United States Patent Application Publication US 2026/0103690 A1 - sequence listing, part 65

SEQ ID NO: 316808 - protein, 453 aa, unidentified
MDPGFLEHVRLSPRAIIGPGARFLEFLFAGPHTDDATQEEEMELLHRRCCGLDVHKATVVACLRLVSDGKVTTEVRTFQTTTADLLRLSEWLAANECTHVAMEATGVYWKPVWHILDDGEFALVLANAAHVKNVPGRKTDVNDAMWLAELLAHGLIRASFVPDAQTQEMRNLLRTRKQLVREQSSHVLRVQKTLEDANIKLDSVLTDLMGKSGRAIIEALIAGETNPVKLAGLADRRVKASPEEFREALRGRVTKHHRFLLRLHLNQIDALDAAMATLDAQVEANLGPFRTAVELIGSIPGIKNLGAHVIVSEIGIDMSRFPSAAHLISWACICPRNDESAGKRRSNRVRKGGTWLKTTLVQCAWAAVKKKDSYLQAQFYRIKARRGPKKAIMAVVASILTAIYHMLKDGTMYKDLGRNHFDRRSSDQQKTRLVKRLADLGYAVEIKPLAATA

SEQ ID NO: 316809 - protein, 350 aa, unidentified
MEYLGIDWSYRRAAWCALSEGGELIGEGAVPADEDGLARLVVQHGRGVRGVVEMMSGAIWVRDTLAAAGWEMQIAHARKVRDVAPIACKTDKVDARVLAELCRRDLVPALWVPGLEDRELRERLRRRTHLVRLRASAMNRIFGLLTQWGLRMSLKRLREPGAMQLLAARGVPEVWQRSISEALALIDLLDERISPLDQELRPLAAADARVVLLDTIPGVGELLGLTLASEIGDISRFASPRKLIGYAGLAPKINQSGDRSRTGALSKAGSRTLRWAAVEAAQHAWRESNPWHQLYNDIAARAGKNPAKAAVARKILIASWHILSRHEPFKAPTSRRPDPASASSRCFLAA

SEQ ID NO: 316810 - protein, 350 aa, unidentified
MFYSGIDLHKDMSVITTINENGSIIAQKKLPNHVAHLLGYFDSIGQDHKAVVESTANWYWLSDLLNDHGIELTLAHAKYLKAISYAKVKTDKVDSHTLANLLRLDMIPEAHQISPSMRPVRDLMRARLTLVTKKTSCINSIHRLLAKYNLLLPNNSKAEDVSKFKHQLGPEPQLQLKILQDQLQLIRYQITDLEKSLTPKLIPNPDIQRILWVPGIGKILAFTTYLEVDGIDRFSNVNRFYSYCRLVPGASNSNKTIRHTSNKDGNRYLKMAFMEASVRAVQYFPEVKSFYQSKARKKHKNIAKALVAQELAKICYHVLSSGTDFDHTFKGKALSRHKTTKWPRLASPGA

SEQ ID NO: 316811 - protein, 319 aa, unidentified
MTNVEIFTGFDVSKDHLDFCTLGGTEKSGSGKVPFNAEGFKMLLSKIPSDSHCVMEATGPYHLKLATWLCKKGFSVSVVNPLVIKRFSQMNLRRTKTDKADARIIASYGQKQKPALWQPPAEYLMKLKQMESLIELETKNHTAYQNQLHSIEATGVPDPFVRAELKKRIQSTEKVISSTEAKISMIIDNEHKEMLDNLTTIPGIGKKTATTLIVATSGFTRFDSHKKLSSYFGICPRIYESGSSVKGRSRICKLGMGEIRRQLYMCTWTAIRFNRACKEMYDRLVENGKPKMVALIAVANKLVRMAFAIAKSGVKYQPA

SEQ ID NO: 316812 - protein, 456 aa, unidentified
MKKKAAMEIIHPHAAGIDVGSRSHFVAIGQDKEDVREFGVYNEDLMALAQWLLDNDITHVAMESTGTYWQSLFSTLQEAGIIVTLCNGKFTKNIKGKKTDVIDCQWIQKLHTLGLLSGSFLPDAITEQLRTYCRHRLNLVDAAADRTRKMQKYLRLLNIRLDIVVRDITGLTGLSIIESICKGETDAATLATLRNGNCKKSGAEIAKALQSNKRPDYLFALQQELHLYKQYQQQMTACDIEIEKAILQSINTDENKKQLRASNKPHKRINKNAPKNFDLYQLSYQYFNGIDLMAIEGVSHSTVIALMSEVGYDGVKKFETPKQFSNWLRLSPNTKKTGGKVISSHLPKGSNRLKIALRNAANAIGNLKDTHLSDFFRRISFRRGRAAAVSATARKLAVVIWNMIVKNLPYKPPTDYMFLDQKRKLKLVTRIRKSITKFELKPDDLGFVNASLSATS

SEQ ID NO: 316813 - protein, 407 aa, unidentified
MDVHKTWIFACIGITDANGRTEYKEKRFSSFSRGLRDLAAWLTSYNCTDVCMESTGKYWIPVFNVLEKTCNVVLAHPKYTKPQKGNKTDRKDAKWICDLFMCDMIKPSFIPPANIRHLRDLVRYRFKLTNMLTGEKNRAQNCLTVSNLKLDDVFSDVFGKSSRSITEHILAHPGETFDVSPFVDSRCKTSIEEIQAAVDGAVSPEQAIKLRQCLDHIDELEKHKEEIEREIVRVSDPYLDTLELIRTVPGLYKNPFTAIQILSEIGGDMSVFPTDQHLASWAGCCPRNDQSNFKIKSTRISRAGSYLKPVLVQVANALIKSKKHPEITERYRRIKSHRGHKKAIIAICRMLLTAIWHILTDLKPYTDEGYLAPRPVKGKKVLTTSQALNLLKLRGYVIKDDLPATAS

SEQ ID NO: 316814 - protein, 358 aa, unidentified
MTTYYIGADVHNNSTELAIEKRNKIVARYSVPTTIPAISNVLDSLQGKKHLAIEEGPMAGWLYRNLNKKVDKFIASDPRRNKLISSDGDSDDRIDATKLAFLLRGNYLRAVYHSEDDQRAQLKHWVALYHDRVRDAVRNINKIRARCRMHGVQIPRLVLRDSSHRSQWLSKIKHPALAKQLNMLWIGYDATAKQTRVAKQQLIGLSKKYPIVRFWKQLPGIGLIRATTLFAFMDTPWRFKQKNKLWKYCGVGLQRSASGTDKRGRPKPARLKLPRAVNRILKKAVLGAAISAINQKDNVFKDYYERMMRDGIITSNARHAVARKLLTVMWGMWKTNSRFNEDLLCVELNRTTASIVSR

SEQ ID NO: 316815 - protein, 412 aa, unidentified
MDVLYPRCCGIDIHKKSITVCVLIREPGRQEQKHIREFGTTTAAILSCGDWLRDLGVTHVAMESTGVYWRPIWNLLEGQFELLLANATHVKNVPGRKTDVKDSEWIAQLLQHGLLKPSFVPDTVLRDLREFSRDRTSLVAERSRLKNRIQKILEDANIKLGSVASDILGKSGRAMLTAMVRGKENPEELADLAQGQLRLKIPQLVEALRGRVRAVHRFRLQQQLERIDFIDGQIAQLEAEIENQNAPMEEAVCLLAEIPGFDRTTAWSVIAEIGVDMSQFPSADDLASWAGVCPGNNESAGKRLSGKTRKGSRWLRQKLCQSAWCASRCKTSYFASYFQRVPAHRGKKRAIVAVSHSLLVVCYYLLQRKCHFNDLGVNYFDQLHHEKLTRYFVKRLTRLGHKVTLEPCSAAA

SEQ ID NO: 316816 - protein, 344 aa, unidentified
MDYYCGIDVSLEQSSVCVVDAKGRIVREAKVLSEPEALIAWFRSLDLPLARIGLEAGPLSQWLYAGLAKAGFAVELIETRHVRDAFKAMPVKTDRKDAHGIAQLMRLGWFRPVHCKSLPAQEIRAMLTARKLVQTKLHDVEMSLRGILRGFGLKVGRTTPRSFEARVQELVTGHPTLTEIAKALLAARAVLHKEFQGFERRVRTLARGDDRAQLLMSAPGVGVLVSLSYAAGIDNPDRFKKSRQVGAHFGMTPKRYQSGEKDITGRISKIGDRSVRTALYEAAHVILTKPVKAGALKSWAMRLAARAGMKKAKVALARKLAVILHRMLVDGTPFVADKAAMIRG

SEQ ID NO: 316817 - protein, 465 aa, unidentified
MKKKTSKSEKEKRKISIHEAWEQINPDAAGIDIGSREHWVCVRPGRAEKNVRKFGTFTCDLEALADWLKECGVKSIAMEATGVYWIPVFQMLEGRGFAVMLVNARQTKNVAGRKSDVQDCQWIQRLHTYGLLRGSFRPKDLYCVLRTYLRYRDELICARSTQCQHMQKALQQMNVQLPQVLSDVTGVSGLTIIKGILEGERDPATLAAMVDSRVRASQATIQKALVGDYRKEHLFELKTAYELYHTYEEKIQACDKQIVAETAGLPDQVELSLKPLPARKEGRAARKDKMAGQDMREWLYKKLGVDLTAIEGIGIATALVILTEVGPDLSGFPSEKHFSSWLGVCPDNRISGGKVLSSRTRRVINRVSDALRIAATSLERSQTAMGAFYRRMKAKLGAAEAVTATAHKLARIVYRLIKHGENYVRQGMDEQEKKYQERKLFTLRKTATAMGFELVARQAVALPVS

SEQ ID NO: 316818 - protein, 375 aa, unidentified
MRDHSEAFVAFDTSKLRNAVAIADDGRTGEVRYLGEFENTDAATAKLVRRLAAKYQRLTFCYEAGPTGYGLHRLITSLGHECIVVAPSLIPKRPGDRVKTNRRDARGLASLLRAAELTAVWVPDRHHEAIRDLTRTRGTAVLDLRRKRQQVSSFMLRLGLHYSEQRRTWTKAHMNWLVSQKLEHAEQRLVFEEMMLAMRQAQERIERLEQAIEVAVPDWSLAEVVTALMAMRGLDLVSATTILAEIGDLSRFATPRELMAYLGLVPSEQSTGDTVVRGAITKAGNGRARRMLVECAWSYQHPPRVSQDKQVKVAAAPPAVREIAWKAQCRLNKRYRALVRRGKLKSVAITAVARELAGFIWAASREITNARAAGK

SEQ ID NO: 316819 - protein, 372 aa, unidentified
MMVWTAPYGIDCARMRLLRSQTKEPSVNQIIRIGMDTSKHFFQLHGVDTAEHPVLRRKLRRKEMLAFFAKLPPTVIGMEACGASHYWARVLCELGHTVKLIAPQHVKPYIKRNKNDGRDAEGLCEAMSRPTMQFVPAKTAEQQAALMLAGMRERLVGQRTQLSNAIRGYAAEFGLIAAKGLDKIEPLLADIAADEALPVLARELFAMHGREYAQLQAELKNIDARLKAWHRANADSRRLAQIPGIGPIVATALIMKVPDPRLFPSGRHFAAWIGLTPKDHSTAGKTRLGKITRAGDERLRSVLVAGATAVIQQAKHGRGHPLPWLLALLKRKPPKLAAVALANKIARIAWKLMTTGESYDGMRMPGASAFAA

SEQ ID NO: 316820 - protein, 325 aa, unidentified
MSSYEIVGIDVAARTLVAIGERVTLTAAYDNTPASRSSLIQTLGRSRRPVRVVLEATGIYFVDLACELVAAGIAVMVVNPKAAHHFAEAILQRRKTDPVDAAMLREYGRRMDFVPWQPPRPELFGFRALTREVQALSKAVAAAKNRLHAVTATRLTPAALIRALERQIAHNQTLIDELVAAALAQTETDPELARLFARTDSVPGFADKAAVLVIGELAVLPPMTARQWVAQAGLDVREESSGTSLARRPRLSKRGNKRLRQTLFYPALTAARCCPAAGAFVERLVAHGKTRLQAIVALMRKLLHGLHAMWRNDEDFNAEKLFAQA

SEQ ID NO: 316821 - protein, 341 aa, unidentified
MTEVSTIGLDLAKNVFQAHAASASGAILFRKKLRRDQVLAFFATQPRCLVAMEACASAHYWAREIAKLGHAVRLIAPTYVKPFVKRQKNNAADAEAICEAAQRPTMRFVAVKSEAKQASAVVFRTRDLLVGQRTQIINAIRGHLAEYGLIAPQGPSQIDQLIAQIEDPSSDIPDPARSCLAVLVETLRALQGKIAALDTEIAARAKRDDGARRLMSIPGIGPLIATALEALAPPIETFRSGRDFAAWVGLTPLQRSTGAQERLGKISRMGERTLRRLLIIGASGVVRWARRKGVPAGSWLARMLARKPPMLVIVALANKMARIAWALIAKGGSYRAPAVAA

SEQ ID NO: 316822 - protein, 372 aa, unidentified
MGHHTEFFVGIDTSKSRNAIAIADGGRGGEVRYLGEFPATEAAIRKLVAKLAAKCCQLTFCYEAGPTGYGLYRLLKSLGHDCLVVAPSLVPKKAGDRVKTNRRDAVSLAKLLRADELTAVWVPDERHEAMRDLSRARQAVKKDLQGKRQQISSLMLRLGRIYPGKTTWGPAHMRWLMSQKLEHREQRIAFEELLEGIRQESERLERLEDAIREVVPEWSLAEVVSALQAVRGIDLIAAVGVLAEIGDLSRFQNPRELMGYLGLVPTENSTGDQVKRGGITKAGNGRARRILVEAAWSYRYPPRVSRDKQPKVEAAPRVAREIAWKAQTRLCGRFRSLERKGKRRTVIVTAIARELSAFIWAINRELMPPRQA

SEQ ID NO: 316823 - protein, 402 aa, unidentified
MIFVGVDWAEAHHDVCVLDDDGAVLGRRRVTDGVAGVAELHGLVADHADERGSVAVGIELDRGLLVGALVAVGYEVYAVNPLASARYRDRHAVSGAKSDRGDAKMLADLVRTDRHNHRRIAADSDLAEAIKVLARGHQSAIWSRQRHLNSLRSALREYYPAALAAFGTDLASGDAVSVLGIAPTPELGRQLSLSRIAAALRGGGRQRNIEARAGVIQATLRSEQLAAPGRLSDAYGVVARSAVAVIASLTREIAALEEALGEGFDEHPDAKIVRSLPGLGTVLGARVLGEFGDDRTRFANAKCRKNFAGSAPITKSSGLSLVVLARHARPRRLADALDQWAFCSLTQSPGARRYYDRLRARNKTHRQALRQVANRWVGILHTCLDRNQPYDEQRAWGHLTAA

SEQ ID NO: 316824 - protein, 348 aa, unidentified
MLIGVDYHPSFQQIAFLVEETAEYSERRLNNSDGEAEKFYRDLKQREVRVRVGMEATGYSRWFERLLAELDFEVWIGDPAEIKTRRVKKQKNDRQDAQLLLKLMTEDRFPRIWVPSPENRDVRQLLWHRLVQMRTRIMNQLQALAMNEGYRWKKKLFSEQGRGQLEKLALAPWAGRRRQELLELLDRLNPNIEELTAAAEQEARKRPDALRLMTHPGVGPLTALAYVLIIGTPNRFDRGKQIGNYVGMVPSEDSSGGKQRLGHISKQGNSLLRFLLVEAAQAATRSNADWRRRYLHLAMRRHKSIAKVAMGRRLGVRLYWMWRNECAYSPSMEFGSYAGQLGTGHGVK

SEQ ID NO: 316825 - protein, 498 aa, unidentified
MPQLAKNATLFNWAGEPKTRRPTKRRASKGKGSKGKTDPTEGLQVANPNAAGIDIGCSEHWVSVPPGRAERSTQRFGCVTAELNRLAEWLKGCGVDTVVMEATGNYWVVLYDILEECRLNPVVVNPRYAKNMSGKKGDIPDCQWMQKLHTYGLFANSFRPTKEIRILRSYLRQRERLVVASSQEIQHMQKALTEMNVQLANVISDISGETGIAIIDAILAGERDPVALAKLKGPRIAASKAVLERALEGHWKQEELFVLEQARLSYTHFQEQIQQCQRCIEQQIEAIQSRLSLEVQVPSERSSQSQVPCDSESGVSPRGNQKVQSFDLGAQLKRILGVDLTQIDGVGPVAAQVILSEVGTDMSRWRTEKHFASWLGLCPDHRISGGKILGRSTRPVVSRARNALRLCAYTLTHSKSWLGAKYRRLKSKLGTPKAIVAMAHHLARLVYRMIKSGEDYVDKGMEVYEAKYRAQRINWLQKQAKEMNMELVTNANSCMTCF

SEQ ID NO: 316826 - protein, 340 aa, unidentified
MSEITTIGLDVAKHVFQVHGIDAQGTTVLRKRLRRGQVLAFFSRIPRCVVGLEACATAHYWARELGALGHEVRLMPAQYVKAYIKRNKHDAADAEAICEAVGRPTMRFVPVKTAEQQAMALLHRGREQLVRQRTMLVNALRAHLAEFGIVAAQGLRNVGELIAIVRDDGDTRLPDVARQVLQVLANQIEQIETAVAALERQLLAWHKSNPVSQRLASIPGIGPIIATAIATTVADPKVFRSGREFAAWLGLVPRQNSTGGKTRLGGITKRGNRYLRRLLINGASANLLRSKATKADPWVIGLRRRRPPLVVAVALANKTARIAWAVMLREKEYQPRAMAA

SEQ ID NO: 316827 - protein, 359 aa, unidentified
MNRAAQRPSLSDTVYAVDLAKNVFEVHTFGPHGVCRKVDRLSRKKFVAKFTDPHTERGVVVMEACASSHHWGRQLSNYGYRTQLVPPQFVAQRRVGNKNDGNDADAIYAVYRDPRIRPVPVKTLAQQDLAALHRTRELLVTQRTQAINQIRGLLAERGVVERAGTGGFQALMKRINQEDLPEVTASLQHQVALIHAHVGEIDAHLKVLECELDSAYQGSVVAQQVHTIFGVGLITATACAAEYGGGVGRFHDSREFAANMGTTPRERSSGEKHHRGTITKRGNSYLRKLLVQCANIILNYRNRHEDPLCQLARRLLEAGKHRSVVVVAIANRLARTIYAVIKHGDAYRMGEQLTRGGAA

SEQ ID NO: 316828 - protein, 367 aa, unidentified
MKKVSTVAAKQSMKISEQKLTVGLDLGDRSSWYCVLDESGAVVLEQRVSTTPKAMGEVFGGMPRSRIALETGMHSPWVSRLLSELGHEVIVAHARNVRLISESRRKDDRLDAQTLARLARIDPQLLCPVKHRSRKAQADLTVIRARASLVRARTALVNTARGLTKSYGERLRGCNVRNMNPEKAEGLSPELQAVLEPLLAGIESLSEQIRESNERIKRLAEEGYPQVALLKQVKGVGTLIALTFMLTLEDPHRFRKSRDVGCYLGLQPGRRNSGQSQPQMHISKEGDSYLRTLLVQGAHHILGPFGVDCDLRRWGLKLAERGGRNAKKRAIVATARKLAVLLHHLWVSGEVYEPLHNSLRSATATAA

SEQ ID NO: 316829 - protein, 343 aa, unidentified
MNEISTVGLDLAKNVFQVHGVDASGRVVLRRQLRRGAMEKFFAQLPPCTVGVEACGSAHHWGRVIGRYGHQVRLMPPAYVKPYVKRNKNDNRDAEAICEAVSRPTMRFVAVKSVEQQATLAVHTTRALLVRQRTMIANSLRAALSELGIVAAQGLEGLRELMAKLEAPNEEVPEVMRAALLLLANHWQTLDADERLLERQIAKAARSDREARRLMEVPGVGPIIASTVLAKVPDAKAFRSGRDFAAWIGLTGRDHGTGGRHRPGRISRQGDRMLRALLISGASAHLRHQRMRGVSDPWLRDLLARRPYKVVMVALAAKTARIIWAMLVKGEAYRDRASAPAAA

SEQ ID NO: 316830 - protein, 475 aa, unidentified
MNFKGKQKKNQVTMVNLFEQKELVAKAESIKSNLKASTWHELETKGKFDKNEKLSFISDDMLILGCDIGSETHFVRAIDSRGRELSKSAFSFSNSLEGFQSAMEWAVKLAATHNKNQIVMGLEPTGHYWFDIATWMISNGISVVQVNPYAVKQTKEIEDNSQLKDDRKDPKLIANLVKDGNFGMPYLPEGLYADLRRLSMFRDQLCEDRIRNLNRLHREMKIYFPEYKDAFGKVDGAFCLELLKAAPFPGNLISIGADGIRQIWHDAKLRGRGYSKADEILKYARESAGMKDGADTSRLAVKWFAERITELDSRIAEIELQLSQKCMEIPHVKNILEISGVGERVLTGIVAEMGDVSRFDDVKEIQKLSGLGLVACSSGKHKGETKISHRGRKRLRYWLFQAAKSAVVHSDEFKQLHTYYTTRQTNPLKKMQSLIVIACKLLRVIYTILTKGVVYDPKKMLEDIKRPVEKETQVA

SEQ ID NO: 316831 - protein, 355 aa, unidentified
MTSSKYIGMDVHKESISIAVRNAVGKIVMECVIETKASMILQFFDGLRGDLHVTFEEGTWAAWLYDLLKPHVTKLVVCDPRKNKSMREGNQSDKIDARRLAELLRLDHLTPVYHGEHGLRTLKELVRSYLTITKDLARVMSRVKAIYRSWAIPCTGKQVYASRHRAEWLGKISEPGVRRRAEFYYQQLDALRSLRQEVRRDLLAESKKHKAWKRLCQIPSIGPIRAAVLLGILQTPHRFRTKRQLWGYGGLAIETHSSADHRSVDGQLQRSKKQVLVRGLNRNCNHDLKNLFKGAAIVASSKPGPFQEFYTDLLTKGIRPEMARLTLARKIATIVLIVWKRGACFDAQHLKPQTA

SEQ ID NO: 316832 - protein, 409 aa, unidentified
MQVVNERCAGLDVHKRQVVACIRMPGEHGKSSGVVRTFGTTTPQLLELLSWLTDHRIGKVAMESTGVYWRPVYHVLEGSVDEILLVNAQHVKAVPGRKTDVKDCEWLAQLLEHGLLRGSFVPPEPIRDLRDLTRFRKTLIQERSSHVNRIAKTLELANIKLGSVATDIMGKSGRAMMQALIDGKRDPQQLADLSLGVLRKKRDALEPALTGRVRDHHAFLLRQQLKVVDDLEQRIQELDVRIDECIRPFADEVAHLCTIPGVRHRTAEALIAEIGVDMTRFPTAAHLASWAKLCPGNNQSGDKRRSASIGKGNSWVKATLVEAAWAASRTKRSYYQAQFNRLRARRGPKKAVTAVAHSILQACWHILQANTEHRDLGRTYFESLDRNRLRRHHIKRLKDLGFTVTVEAA

SEQ ID NO: 316833 - protein, 381 aa, unidentified
MRQVCGLDVHKDSVFVCILNENGIVFQEKFGVLTPELEQMLSVMLQYHVEEVCMESTSIYWMPVWRVLENYVSLKLVNPYFIKQLPGKKSDVKDAEWIATCLLKDLIKGSYVPEDLIQQLRQYDRRISDLNAEIVRKLGKLDAALQRCNIRISNYVSSTDGKSYKEVVRLISEGIRDPSELTKVIHGRTVNRVGRDVVLASLTGVISDTDIDVIRQLREEVELAEKHKDECQSKMDAICRQCFPDQLKNLQTIPGIKGRSATAIIAEVGTDMSSFEDAAHLVSWCGLKPRNEESAGKIKARGITHGNRYLRKTLIECAWAASKTQDCYFSKFSYHQVVVRRKSKMKVQVAIARKVLTAVWYVMHDNVAYRDFTPDIAPAAE

SEQ ID NO: 316834 - protein, 395 aa, unidentified
MHSIGIDVGAAQHRVAICREGNIEAERQVLRIPSSRSGFAELDHWIARQGTIERIVVESSGHYWQTLASHLRAAGHPVAVVNPLAAKYFAKRRLQRAKSDPADARTLAALGMVDRPETREPLAGAELREAARFAMRLVEEQSRLCNRILRLVDLGFPELGEAFEDPTCRTAMALLKVAPTARAAARRSVATLARANRGAGQRALGPTRAAAIHAAARASIAVRELEAQIAFEMPLLIEQHELLERQIAVAEARVATLLDGELARRLQTIPGVGPASAAALIAEIGDISRFSSFDKLVAFAGVHAAEKSSGKKGADPETSWHMAKTGSPYLRAALYRIAVVGLQHNPIIQAHYARKRAQGKAKMNALGHCMKKALAIVWGVWHGGRDFDPAAHSVA

SEQ ID NO: 316835 - protein, 334 aa, unidentified
MKNYSLIIGIDISKLKLDVIGINYKSEIVNQHQTINNTKRTITSFFRKLISKYGKENILFSFENTGVYGYYLIFILEKMNLDYCNLSALDVNKSKGIRRGKSDKLDALIIAQYTLANSFRLDLSKHTELQLTKLKLLFSQREKVVKTIKNFNNNKEAEQFLPNEILKEFSKSNKSIINNLKKNLKLIEDQISQIIDDNISLKKDYDLIQSIPGVGPQTACYILIVTKGFTIFDNARKLACYAGVVPFPYQSGSSIKGKNKVSYLADKKLKTLLNLCAMNAKKYDHQLKLYFEKKVNEGKNKMLILNNIRNKLLHRIFAVVKRQQPYINTHSYAN

SEQ ID NO: 316836 - protein, 393 aa, unidentified
MICVGIDVAKDKHDCFILSSEGEVLADVFTIQNNAEGFDTLLQTIRRCTHPEDKIKVGLEATGHYSYNILGFLLNKGLPTYVINPLHTNLYRKSLSLRKTKTDRVDARTIAAMLMSDVDLKSYTDTAYHNEELKSLTRYRFDKVRERAKLKQSVSRLVTILFPELEKLVPSLHLASVYALLSEFPGAKQVAGAHLTHLKTVLSDTSKGRYGRDMAVTLREVARCSVGSVMPTKSLELQHTIRLIHELDAEIEDIEAAVQSMMDEMQSPITTIPGIGFRMGAMILAEIGDFSRFDSPDKILAYAGMSPSTYQSGQLSLSGAYSHMEKRGSRYLRYALYNATKYVCLWDPTFAAYLAKKRAEGKHYNVALSHATKKLVRLIYALEKSKRPYSSAA

SEQ ID NO: 316837 - protein, 352 aa, unidentified
MLIIGCDFHPGFQQVAIFDNQTGEYQEKRLSHREEAEQFYGSLAGQQVRVGMEACGHYPWFERLLAELGFELWLGDAAEIRASVVRQQKTDRRDAEHLQVLLREDRFPRIWVPSLEERDVRQLLVHRHKQVQARTRTKNQLHALALSQGVQRKRKLWTEVGRAELEKLELLPYAGVRRQRLLATLDQLEVEINELNRRVEGEVKQRPAAVKLMTHPGVGPVTALAMVLTLGPAERFENGRKVGSYFGLIPSEHSSGGRQRLGHISKQGSSFLRFLLVEAGQSAARYDTELGRFYRRLAARKHRALAKVAVARKLATRLYLMLREDWNYAQLCKAVVQASPSHSVVARKKPTA

SEQ ID NO: 316838 - protein, 355 aa, unidentified
MDRTKYIGMDVHQASISIAVRDVSGKLVIESLIETKAATILEFLQGLKGTLWVTFEEGTSAAWLYDLLKPHVVKVIVCDPRKNALLKTGNKNDRVDARKLSHLLHAGLLTPVYHGESGVRTLRELARSYLTLTKDLTRVMNRLKALYRSWAIPCVGEKVYAPRHRSAWLEQLSEAGVRRRAEQLYQQLDILLQIRRDARRELLRESRKHPAHELLRQIPQLGPIRVALLIALVQTPHRFRTKRQLWAYCGLALQTRSSGEYRFTAGQLQHSNKLPALRGLNSNHNHDLKNVFKSAATHVSTSPDALGDFYRTLLAKGMKPAMARLTLARKMAAIVLTIWKKGERFDPGELKRQAA

SEQ ID NO: 316839 - protein, 454 aa, unidentified
MRKPRVIPDEDHEVVYERVAAVDVAKASGVVCMRLPDPARPGRYSNQIWDNVPAARARITELGRELLRHQVQMVTLESTSDYWRIWYYVLESIGLAVQLVSASQARNLKGRPKTDKLDAMWLARLTQWGMLRPSFVPPAAIRQVRDFTRARTDLVHERTRVLQRLEKLLEDAMVKITSVARDGLKAKSVVAMVAALIAGERDPAALADLAKGPLRGKRDQLAEALDGMFDSHHGVIAQALLDQAAFLDQRIAQMEAGAIEALAQVTESWGVDVTGETGPQAGTSPDSLVLAAAHRLAEIPGVSLWLAIVIIAEIGLNMALFPTPAHLISWMGLCRAARQSGTRHGKGKQKKGNSYARAAAGQAALGAAGTATFLGERFGRIARRRGGAIAQVAVARSIMIIVWHLLSDPTARYRDLGPDWHARRTNRDKKIRTHIRGLKALGVTVAITGDEHAA

SEQ ID NO: 316840 - protein, 364 aa, unidentified
MKIMQYVGMDVHKEQIEVAVFYEESRTPEMVAQIPNKESSLKKFFSKLKEKGEMIVGYEAGCLGFALFRTLESFGVLCVVIAPSKIARKPGDKVKTDRKDAILLAKTLRHHDYQPIFVPSQKDEQVREFLRAREDRKSDLTKTKQRLLKFFLRNGYRFEGAKNWTQKHITWMKEIEFASPLQQSTFDLYYSTLVSQEQQLKRIDQSVQELAMSSEYVEKVGKLRCFKGIDYLTALSFVVEISDYRRFISAEAFMGFLGVTPTEYSSGSHRSQGGITKTGNTHLRKLLIESSWHYRFKSMPSKALEARREGQSEETIVYAEKARNRLQSKFYKMIQRGKPKQVVVTSVARELAGFIWGVMTAHTA

SEQ ID NO: 316841 - protein, 354 aa, unidentified
MHYSGIDLHKDNCYITTRDESGDISNRMRVKNIEEDILNYFKSIGSDHKAVVESTNSWYWLNDLLESNNIHLELAHAKYIKAIAYAKVKTDKIDSKTLSTLLQNNLISPAHKISEEKRGLRDTLRMRLRLVQKRTSCYNSIHRVAEKFNCDDSVDLAKEIIPDKLPEDYKFQVKLLYEQIEVLNKQIKEVEKSLRKRLIKNEDIQRLLWIPSIGMITAFTIYLEIDGIERFETVKNFLSYCRLVPGAKNSNKSIKHKSGSKDGNKYLKIAFSDSAVHSIRYYSEIRSHYQKMLRRSNQAIARTVVAKEIAKIVYFILKNKTDYKGYKGKPISHMKSQSWPRLASPDEWLDNKIP

SEQ ID NO: 316842 - protein, 316 aa, unidentified
MKAPLYVGIDVSKKHLDVALGPEDRRPLRVPNTPAGIEALVAELQGKAVQLVVLESSGGWERGILRALVQAGITTARVPGGRVRHFAKSWGQRAKTDGIDARMLARYGERVQPRPTVLPSPQRQRLDALVTRRKQLVDMRTAESNRLETAEEESVRQGLQKHIAWLNEEIADLEQRIEEHIVAHEELAQQQQLLTSVPGVGVGTARVLLAKMPELGQVNRKEIASLVGVAPFNRDSGEKTGKRYIQGGREDVRAVLYMAALSAIRFNPRFKAFYQRLRNEKEKPFKVAIVAVMRKLLVTLNAMVATQTAWHFEPDP

SEQ ID NO: 316843 - protein, 403 aa, unidentified
MEILYKICCGVDVHKKVLVACLNANGKRELQSFGTTTKEIHQLCDWLKESDCEMVAMESTGPYWKPLYNLLESKGIPAIVVNAAHMKALPGRKTDVKDAEWISDLLRHGLLRASYIPNREQREMRELVRYRKSIVEERARELNRLQKILEGANIKLGSYVANINGTSARKLLDELVLGVVHNEKSVKDAVHVKLHGKIPEIVEAMRGVLTHLQIDMLRMVLSHIDDMARRILELDQIIAEHSKKKERAMQLINEIPGIGSRGAEVIVAEIGADMSAFPTQAHLCSWAGLSPGNNISAGKSYSGRTTKGNNTLKVTLVQAAWAAIRVKASFFAAQYARISVRRGKKRAIVAVAHSILIAIYHVIKNNESFRDLGAEYYNKYNKERKIAGHLKKLKQLGWQAIPA

SEQ ID NO: 316844 - protein, 419 aa, unidentified
MKDIQAKKVKVINKETLIVTVDISKVTNVGYCRCPNGIDLKPFGFHNNGQGFKSFWDRIAYMKKAHNLKEIVIGFESTGSYGEPLIHYLKKKKANLVQVNPMHTKRVKELSGNSPNKTDQKDPKVIADIIELGHALTVVLPEGPAAELRRLTHARERAIQRRVSLYNQLQDLVFIIFPEFLQVMKDVKTKSARFLLEHSPTAQDIVKFKLESLTVTLRKISRGQLGEERAKELYVAAKSSVGIKEGRRSILFEIKEILSTIEITGRFIAETEKEMSHHLKDIPYSRCILSMKGIGEITVAGLIGEVGDFRKYKTISEVLKLAGLDLFEISSGMHKGQRRISKRGRHLMRKLLFFASLSVVRTGGIMHKQYQRYLERGMLKMKALIAVSRKLLGLIFVLARDHSEYIEDYVEKQKLKIAA

SEQ ID NO: 316845 - protein, 416 aa, unidentified
MTHSEVQERKPTVKKNNRQGREKAGVVKPCKQTQQQERAERRAEALLRKLEANAARVVETRQEAPAYYIGVDVGDRKSHFCMLNAAGKVVIEESVATTREALTAYFSQVKRSWMVLEVGTHSAWISELLEGLGHRVVVANARKVRAIYGNRRKNDRVDARTLARLLRVDEELLHGIRHRGAAARQSLTVLRARDAMVQVRSKLINSMRGLVKSHGRRLPACSVESFVGKVRDAIPESLKGALAPMLEQIESLTLSIRKYDRSVTVLAKKHKETGSLRQVKGVGELISVAYVLTVEDPSRFRKSREVGPYLGMVPRQDDSGDSSPQLRITKTGDRMLRRLMVTAAQYILGHHGEDCDLRRYGLRIAARGGKNGKKRAVVAVARKLAVLLHRLWVTGEEYEPLRNSRQEQSQGRQAAA

SEQ ID NO: 316846 - protein, 352 aa, unidentified
MRIIGVDLHTRQQSLAMLDTDTGEVIEKTLQHEGDEVREFYSALPGPVLVGIEATGSMPWFLKLMEELKIECRVGHPANIRAAEPRKQKHDRRDARLLLTLLAENRFPAIWMPSTEQRDLRTLLRHRHQWVRMRTRVQHTLQSLALAHGLRRGATLWSQAGQHALQALSLAPFASQRRAALLALYPVLQKAIDDLDQQVSEQALLHPQAQRLMTHPGVGPVTALATEAFLGDPLRFADGRAVASYIGMIPSEGSSGGRRQRLGKLTKQGNALVRYLWGEATIHAVRRDPELKRFYRRKLIQKGLGKAKTAAARKLGIRLWIMLRDQIDYNEFCHRGLWRQKSGDARAGMPGR

SEQ ID NO: 316847 - protein, 391 aa, unidentified
MFYVGMDIAKNNHEASIIDSNGKLVTGSFSFSNSVKGLEKFKRIISSFLLSSNNCIIGMEATGHYWVSLYSFLIDLGFTCVVINPIQSDAFRKMYIRKTKNDSVDSFIIAQILRFGEFSVSNFSDEDTFALRNLSRYRFALVDEASDWKRKLVAILDQVFPEYSSLFSNIYGVTSKELLSKYPLPEDMLSISTNELAELLSKCSKGRFGIDKAKEIQDKASNSFGIKFALKSFSFQIKQIINQISFLEDQISDIEEEISSMLNSLCPVITTITGIGDILGAAIFSEIGDISRFEKASQLVAYAGLDVAVKQSGNFNATDTKISKRGSPYLRRAIWLAANVAAFKDPALSLYYQRLRQRGKAHGTAIGAVARKLTNIIFAVLRDNKAYVPNI

SEQ ID NO: 316848 - protein, 320 aa, unidentified
MSKKKSKSFIGIDVSKEQLEVAVHESDYKFRCPNKISSFGQLIAELIVLRPALIVLEATGGLEIPVVNALYAVGLPVVVVNPRQVRDFAKALGQLAKTDRLDARVLAHFAAAIKPPLRPIKSKDEQELDALMGRRGQLVEMLTDEKNRRGSAASDTVRDKIKEHIDWLEDRIAEIDQQLKALLKTSACWQAKDKLLQSVPGIGPVTSFSMIADLPELGKLDRQKISKLVGVAPLNRDSGRQRGTRHIYGGRAQLRRVLYMAALSASRHNPVIKEFYQRLIANQKPFKVAVTACMRKLLSIINVMVRDSTPWKSPEVPVSA

SEQ ID NO: 316849 - protein, 387 aa, unidentified
MYFVGIDISKFKHDCAIIDELGDTVTPSRSFPNDREGFSHFKALLDSLEGEKKIGLESTGHYGQNLKQFLESNGFTFMEFNPLLVSRFVRSKSLRNTKTDSIDALSIAQYVMTVEYKPYPSSFYHLDKLKSLTRFRNSLVRQRSRQLVELTNVLDKLFPEFKPFFKDKFSVTALYILAHYQTPERIANMNARSYEALRKLSRGRFTLSNFTQLKALAKNTVGTQSDYLLDQMNILLELYSQLDSKVDELDAQIKECVRGIDPPCLSIPGVGELSAAMILSEFGYFSKFQNPSKMLAFAGLEPGYFQSGQSEYTGHMVKHGSSRLRYALMNCCLPLISNEPVFAAYYAKKRSEGKPHRVALTHVAKKLLRVIYTLQTKNIRYDPTMIH

SEQ ID NO: 316850 - protein, 356 aa, unidentified
MDHFAGLDVSVKETSICIVDDTGRIVREVKVASEPEALLKVLGNPAWRFKRIGLEAGPLSQWLFSALAEAELPVVCVETRHMQAVLKAQINKTDRNDARGIAQMIRAGVYRPVHVKTLRSQKLRMLLTHRKLLQSKAIAIENDLRGTLRNFGLKVGMVGKVRFEARIQELVENFSDLAELVEPLLIVRRALREQIVILHRRLLAIVRDDEVCRRLMTTPGVGPVVALTYRATVDVPARFRKSKSVGAVFGLTCSKYQSGEIDWSGRISRCGDEMMRVMLYEAAQSMLRSKKWSWLKAWAMQIARRRGMKKAIVALARRLAVSCTASGLTAPSSDGPGSKPRQQHENHSGSNPIGEN

SEQ ID NO: 316851 - protein, 340 aa, unidentified
MNQVVTIGLDIAKSVFQVHGVDGEGAVVLRQRLTRSRMLAFFAKRAPCLIGLEACGSAHHWARELSALGHEVRLIAPSYVKPYVKRQKNDAADAEAICEAVTRPSMRFVPIKSLEQQSIMAAHRTRSILTRQRTQLSNAIRGHMAEFGLVAAVGRNGLEALIAMIAGAVDNRVPKEARACLLMLVSQLRLVNAQILESDRCIIASARSTEVGRRLMGIPGVGPVLASALVAAVADPNSFRSGRNLAAWIGLVPRQNSSGGKERLSGITKQGDRYLRQLLVVGALAVVRYAARHGARRPWLVQLLARRTPKVAAVALANKNARMVWAIMTSGERYREPTVA

SEQ ID NO: 316852 - protein, 319 aa, unidentified
MNTNANQSITVGFDTGKTLLDIYIRPLDIYFSVTNDDDGIKKAIKEIKTHRPERIVIEATGRLEFAFAVACKKANLPISIINPAHIKKFAGAIGRLAKTDKLDAQLIAHYGEAIQPAESELRPDTMQLMSDLLSRRKQLISMQTMEKNRLTILPKTLHKSVNALLKILMREIEKVDTLMNGIIEDCPEYQAKNAIIQSMPGVGKVVAFSLLSNMPELGYITNKQASSLIGVAPINRESGTYQGQRKIKGGRHQIRTVMFMAMMSAMQCNPVFKSTYQRLVEQGKPKKVAIIACLRKMIIILNSMVRDGVMWDENMAKIQ

SEQ ID NO: 316853 - protein, 470 aa, unidentified
MNVDEKDVLLMSLTGLVSLDSQEDVVVKGIGLSRGDKRRNKLLARLRVLVLAVFAILGIDLADTKQAVVVTDHDSQVLARGPVTAKAWELGPVLDWARKVAHAHGFADVTVGCEPTGHRWRVLDQLAAQHDMALVCVQPLLTGQARQAEDYTSDKRDDKDAVLIARLVAQLHCYAPERAEETWAQLRQLGARRDELVTQAIRCVQQLRDLLECAWPAVLGAAGSPFDSTNWCAALAVVLERCDGDPRRLARRGPERFTAAVRRELPRWGGQRLWRGIVGAVFTTLTDPAGVIAQRRGALQRAGWVLDDWRLIKIRLAEVETQMAAILDELDLTKLVTSIPGVSAVGAAAILAETGDPTRFDSPRALVKHAGLCPRENTSGTYTGRSRISGRGRPRLRAAAWRAVWGALPTNPVMATRYRHLTTRKANPLKDGQARAALAAALLRWIHVIVTQHVTWDAALAGAGALAAAA

SEQ ID NO: 316854 - protein, 350 aa, unidentified
MSNNKNVATFGIDLAKSLFHVCGLDADGKRVVSKKLRRTQIVTFFANQPPCVVAMEACAGAHWLGRKLNGLGFQVRILPAQYVKPFVQNQKNDANDALAIAEASQRPSVKPVPIKTQSQLHLQALHRVRDRLVNQRTRLINQIRGFLLEEGIILRTGVGNFKSQLPAVLSDPSEEISPAMAALINELWDELLGLETRLKSINSQIEAWASQDQSARRLQSVPGIGALSATAIIAAIGNAAQFNKARDFSAWLGLVPKQHSTGGKTTLGRISKSGNPYIRRLLIHGARSCMLHLNREKDRLGAWITDLERRMPFNKVVVALANKLARIAWVILTRPAATYEQVQAARPASC

SEQ ID NO: 316855 - protein, 412 aa, unidentified
MAQLRTRPESDRDETAGATVWLSWRGGASERRTVTEGQPWPESGSQGPPLVVRDRVWTHSGLRKQNPSRRKKEAPVERQYVGIDLHRRRSVIVRKNAAGEVLGKVRIENSAMALAEAVAAAGPEPEVVIEATFGWYWAADVLEEMGARVHLAHPLGNKWGNRRVKTDERDANDLVDLLRLGRLAEAWIAPPEIREMREVVRYRLKLVQLRYGLKAQVHAVMGKHGVLPTRCDMFGLGGNAQLDALQFPEAYMARLDSLRDLIDVYNREITDVDRRMAKMFSGHQGYRAIQAIHGVGPLLAAVFVAEIGDVTRFASPQRLSCWAGLTPKHRESDTKVHRLGISKQGSRHVRWAAIEAVSKNHCGGKIKADYRRIAERRGRNIGRVAAARKVLTLVYYGLRDGEIRCLANADQG

SEQ ID NO: 316856 - protein, 396 aa, unidentified
MAERRDSSEVMGELVSQLRQQLELKSVSVVEAARDERDAVSPNLDRLTVGVDLGDQWSNYCILGLAGETLAEGQFRTRREEVGEFFRGLAISRVVFEVGTHSAWVREIIAGLGHEALVANPRQMDGSKRRRRKNDRIDAVKLARLGRIDPKSLYPIQHRSTEIREDLLVVRVRDSLVESRTKLISTVRGMVKTMGARLPGCSSVSFSRKTADQIPHEVRETLQPILRLIQMLSEEIKGYEKRIEKLASEKYMDTNLLRQVNGVGPVTSLAYVLTLETPQRFKRSRDVGPYLGLVPQQEDSGDSQPQLGISKAGDKMLRKLLVGSAHYILGPFGPDTDLRRFGMKLCQRGGKNAKKRASVAVARKLAVLLHRLWSSGEVYEPLRHGIARTMTQSAAA

SEQ ID NO: 316857 - protein, 378 aa, unidentified
MHKETGLVEHTRFVGLDIHKERISVAVAESGRSGAVEYLGEVANDPSAIGKLCDRLGRPGRLLAFCYEAGPCGYGVHRQLTSLGHRCEVVAPSLIPMKPGDRVKTDRRDATMLARLHRAGELTAVWVPDADHEAMRDLIRLRSVVRQIVTRTRQHLQGFLLRHGRKHGQGTAWRMAYRRWLSTLAFQHPAQQIAFQDYVDAVMDAERRLQRVEEQISCLLPEWNLRPVVDALQAMRGIALINAVVLVAEVGDFTRFSNPRQLMAYFGLVPGEQSSGETIRHTGITKTGNNHARRALVEGAWAYRMKPRIGRHKVDRIEALPKIVRDIGWKAQVRLCARYRRLSARGKNANVVNIAIAREMVGFVWSIACTIQSAPRTA

SEQ ID NO: 316858 - protein, 409 aa, unidentified
MEVLYARCCGIDVHQRFVMAGLSIVEAGQRRKDVRRFRCVTPELLALRDWLLSEGCTHVAMESTGVYWRSVHRRLAGFFEVWLVNAQHLKAVPGRKTDVQDAEWIADLLQHGLLKPSLVPDQQQQEWRDLTRMRLNLVQERSRLVNRVHKLLEDAGFKLHPAISDIFGVSGRAILQAMVRGESDPKLLASLVHPRLSAKRDQLVEALIGDLRDHQRFLLGELLTLIQALERSIEHIEQEIEQRLRSFEAMFTLLEAIPGVSRRILWVLFAEVGIDMSRYPDAAHLASWAGMCPGQDESAGKRRSGRTRPGNRYVREALVQAAHATARTNTYLGEQYRRLSKRRGSKRAAVAVGHSILVIYYHMIKTGEPYQEKGAEYFHQEERQRMQAQLIQKVERLGYQVSGPPQPAA

SEQ ID NO: 316859 - protein, 358 aa, unidentified
MNNVSHKQEKIYFGLDISQKTIEIFALKGEKGVSFGKIPNTPKGLTEFFDKVSVPPETITIALETGTHSAWISRQLEERGYEVIVAHARDLAFIYKGDKKSDRIDAEKLARVARADKKLLHPVKLMDVKRQEDLLTIKARDLLVKEKTCIINAIRGFLRSLGIDDTQYSSETINQIYDELPKKLKQNLRGLFETLTSINRNIKNYDKRIAKISKDYPETETLQQIKGVGPLIALSFALIIGDANRFTSRECSSYTGLAPKRDQSGDVDKQLGISKCGNKLLRRLLVQGAQYIMGPFGEDCDLKDFGKRIAQRGGGIARKKAKVAVARKLAITMLALWRNPDVAYDPHFKINRKKVKSA

SEQ ID NO: 316860 - protein, 411 aa, unidentified
MNPVVGLDVAKGESQIQAFLDRKTPFKKSFKISHTVEGFKQLHQFLQSIEEKANSKPVLIMESTGHYHSPVMQFLDSLNYIYIVINPLISYRAKSSSLRKVKTDVIDAYHLCELYYKEELEPHKKRGAQLLNLRNLTRQHDHLTGISSQAKLHFLAILDQVFPEYRGVFGDLYSNVSLLTLLEFPSSEAVLQAGEDQLAKRIASLCTSRSKQWANERAKLLITAAEKNPFQVNLYRSLIISLEMHIKMVLQYKEHLSNLKAEIDVLVKEIEEYTIIQSIPGIGKKIAATIISEIGEIDRFDNPKKLVAFTGVDPSVFESGKFTASRNRITKRGSSRLRHALFMAVRCAIRDNRKNKTTDEIIPRNKRMRQFYDKKREEGKPFRVTVIACINKLLHWIYALLKSKTTFQDLA

SEQ ID NO: 316861 - protein, 411 aa, unidentified
MRLFVGDDWAEDHHDVEVMSETGMVLARRRLPEGVAGIADLHALVGARLGEDADAAEVVVGIETDRGPWVTALIAAGYLVFPVNPLQASPYRERHGVSRAKSDAGDAHMLADMVRTDSHQLRPAAGDSPEAEAVKVLARTHKTLIWERTRAVQRLRHQLREYFPAALEAFEDLDAPETLELPGKAPEPARAARLTRAQVSAALKRARRRNIPDKATAILAALRGEHLGQHEVLTAAYAATVRALIALIATLNEQVKALQGQVGEHFGRHPDAEIYLSQPGMGTILGARVLAKFGDDPHRYADGKARRNYAATSPITRASGKKKVIVARFIHNDRLVDALRAQAFTALGTSPGARAFYDQLRARGIEHNDALRRLASRLVGILHGCLKTRTLYDQATAWGHRENLPHPSVAA

SEQ ID NO: 316862 - protein, 421 aa, unidentified
MKQQASEAFAAFVGLDWADTKHDVCLQAAGTEHREFLSLEHSPEEINAWVQTLRTRFNGQPVAVCLELNKGPIVSALRNYDFLVLFPVNPLTVAKYREAFTPSRAKDDPTDAELQLELLLKHRDKLTPLSPQSPTMRALAQLVEHRRRLVGDKVRLTNRLTSALKNYFPHVLQWFQEKDTVLFCDFLSRWPTLKAVQLARRATLEGFFRAHHVRSADVIATRIQAIKSALGLTTDEGVITPNVLLVQALVAQLRVTMQAIADFDKAIAQRAQNHPDFPLFDALPGAGAVFAPRLLVAFGEQRERFTCADELQKYAGIAPVTERSGKKSWVHWRLQCPKFLRQTFVEWAAESTRHSFWAQVYYQQQRDKGKAHQAAVRALAFKWIRILYRCWQEHTPYDESVYLQALKRRNAPLLHNLANLS

SEQ ID NO: 316863 - protein, 454 aa, unidentified
MKKQDSYDYYVGIDCAQNKHDFAMKNNQDKFLIKKGHFSNTLQGYEKFLKTVLSKCLNKDKILFGMEVTGIYGTNLYERLKSEGYHVVMISPDSVKKYRDYKQLNKTDKIDSGCIAELLLNGDAQIVHVEKNGYTDLKAYIRRRNALKVTCTQETNRFLAKVCLYFPDLLKVFPSGRATLKAIFSIYPTPHSIIEADFDELVSVLQKASKNKFGVDKANELIHAARNSIVVRKSISDGELYNIHSLIDSIDSLESEIRNLEKIIDSKAEEFPAYHVLLTLTGCGKITAATIVAEIGDISRFHKASQIVSLAGLYGDNSKSGSSVNKRGKLSKKGSRYLRHAIYMVAEFARRNNPIFKAYFTKKKNGDRTKHILAVNAVANKLCKVIYSLMKNQSTYIIQYRDLAKLSESTQNEFFQNAETDFSAKTRRKKYLYEDEYGELHEFVFKSLKTALIE

SEQ ID NO: 316864 - protein, 343 aa, unidentified
MDHFAGLDVSVKDTSVCIVDSTGKIIREVKVASEPDALLAVLTNPAYHFNRIGLEAGPLSQWLFSALADAGLPVICVETRHMRAVLKAQINKTDRNDARGIAQMIRAGLYRPVHVKTLRSQKLRMLLTHRKLLQAKAIAIENDLRATLRNFGLKVGVVGTVKFEARVKELVENFPDLVALVEPLLVVRRVLREQISLLHRRVLAAVRDDEVCRRLMTVPGVGPVVALTYRATVDVPARFRKSKSVGAVFGLTPSRDQSGERDRPGAISRCGDEMMRTTLYEAAQAMLLRSAKWSWLKAWAMKVARHRGMKKAIVALARRLAVIMHRIWVDGTEFRWTREAAAA

SEQ ID NO: 316865 - protein, 405 aa, unidentified
MDTITYVGLDVRKATVSVAVAEGGRGGEVRQVGVFENRPEVLAKLAARLSKAGRRLSFCYEAGPCGYGLHRLLTGCRHDCVVVAPSLIPMKAGDRVKTDRRDALMLAKLHRAGELTPIWIPDAAHEAMRDLVRARATAGRVLSKARQHLQSFLLRHDRIYRGGRAWTLAYRRWLTTVRFAHPAQQIVLQDYIHAVHDAKARLDRLTRQIEELLPSWSMAPVVTALQAMRGVALVVAVTVVAEVGDFRRFANARQLMAYLGLVPSEHSSGASIRRGGITKAGNVLARRVLIEGAWTYRMPARVSRKLHDRNEKLSPAVRDIAWKAQLRLCSRYAVWLRSASRRLWSPPRSLAKWLALSGPSPASLNRRFQPDPNRPRQLGKEVDANKSMVRTAGDRTTVGNPPALL

SEQ ID NO: 316866 - protein, 336 aa, unidentified
MTLTTIGLDLAKYVFQVHGVDAEGKVIEKRRLRRSQVIAYFASIPPCLVGLEACATAHFWGRELARLGHEVRLMPPQYVKAYLKRGKNDAADAAAICEAVGRPSMRFVPIKTEEQQAVLVMHRARDLLVRQRTQLINAFRGHAAEFGIIAAQGRWNVTRLLAAIRECRAVPEPARAIVEMLALQLDAIGERIDEIDARILAWHKENPISQRLATIPGIGPLIGTAIAATVADPAAFRGAREFAAWVGLTPRQKSTGGKQRLGRISRQGDQYLRRLLIIGAQTTLLRSKAARANPWIQSLLARCPRLKVAVALANKTARIAWALMTTGQYYRPIASA

SEQ ID NO: 316867 - protein, 415 aa, unidentified
MEIIYPRVAGIDVGKREIAVAVRTPGDVPGRRRQQIRKYKTYYLVLRGMVAWLVEQGVTHVTMEATGVYWKPVFHALCEAKQIEVLLVNARHVKNVPGRKTDVKDSEWLAQLLECGLLRGSFIPPKEIAAIRELTRYRKKLIEERTRELQRLSSVLEDGGIKIDSVASSITTLSARDMIEALIGGERDPRVLAELARGVMRNKIPDLTMACEGRFGDHHALLARMHTDQIDNLASMIQVLDDRIEEVVDPFAEQLRLLLSIPGIGERAAQVIISEIGVDMARFPTAAHLASWAGLCPGNNESAGKHKSGRTRKGNAEVRSILTECAWSAGRTGTYVGAQFRRMHRRFGKTGGGKAAIAVAHTLIVIIWHVLHDGAAYRDLGSDYFTRHDNPEARKRRLVHDLQSMGYQITITPAA

SEQ ID NO: 316868 - protein, 406 aa, unidentified
MSAYRFYVGLDWATEAHRVVVQDAERQGVAERTVPHEGGALEAFAAWLSELAAGVPRDVAVALESPRGAVVDILLANGFHVFALNPKQLDRFRDRYTVAGAKDDRRDATVLATALATDQPAFRRLAPEHPLVIELRELSRLEDELQQELQRLTNRLREQLHRYFPQLLQLVPAANEPWLWALLDRAPTPSAAQHLSRAALRTLLTRHRIRRVDADAVRTLLQHPALPVAPGTVQAAQRHLAVLLPRLRLAHQQRAECATLIEDVLERLGEQQEHRDVPILRSLPGVGRVVAATMLAEASRLLAARDYHGLRTHTGVAPVTKQSGKHWVVIRRSACNRRLRDAVHYWGQSVVRHDPRSRAHYDRLRARGHSHGRALRGVVDRLLRVLIAMLTTQTLYDSNRRLPIAA

SEQ ID NO: 316869 - protein, 347 aa, unidentified
MRFYTESHQHYCGIDLHARTMYVCILDAEGQVLLHRNLPCDPERFLRAIAPYRDDLVVAVECIFTGYWLADLCAREGIAFVLGHALYMRAIHGAKAKNDRIDAHKTAALLRGGLLPQAYVYPAEMRATRDLLRRRLHFVRHRGQLLAHIQNTHHQYNRPSPGKRIAYRSNRDGVAEGFEDSSVTQSVEADVALIDHYDAVIRDLELTVLRRARGHDRDSYERLKTVPGIGKVLALTILYEIHSIDRFSKVQEFASYSRLVKCPASSAGKVKGTSGAKIGNAHLKWAFSEAAVLFLAKCPEGKKLLARLEKKHGKGKALSILAHRIGRAVYFMLKRKRAFDLARFLKM

SEQ ID NO: 316870 - protein, 352 aa, unidentified
MSSLFVGCDAHKHYSQLEVQDSSSQVIHRLRIDHSRGALASFFSKLPAGTPVALESVGNWYWIADQIEAAGCRPLLTNPAKAKLLMGHVNKTDKLDASGLTTLLRLGSLPFVWLPPAELRDQRELPRTRMTLCAWRTRIKNRIHSLLAKYALSPQDGSTLFSRRGRTWLDSAIPSLPPETARCLTQHLQLLDYLSLQISQLEDRIRTQIAITPAMQLLKTLPGIGDMLAIVIERELGSISRFPSAQQFSSYCGTTPRVSSSGGKTRYGKMRTESNQYLKWAFIEAANAVSAHHAQRGWTNRHCSQLYLRVRSRKGASVAVGAVARHLAESTYWVLKKNEPYKEPVKVSPRQG

SEQ ID NO: 316871 - protein, 456 aa, unidentified
MAQHKRKKSPAEQQLPAQLHAVNLHAAGIDVGAAAHWVAVPVEADPQPVRAFPAHTASLHALAAWLTLCGITTVALESTGVYWIPLFELLETQGFEVILVDPGTMPKNGRPKTDVHDCQWLQRLHTLGLLSAAFRPDDPVVVLRSYLRLRLTLLADAARHIQHMQKALTQMNIKLQHVVSDITGVTGLRIIKAILNGERDPRRLATLRDQRCKEDETTIAQALHGTWREEHLFALHQAVAAYEFCHQQIQEGDAKIAAQLQTFEDRSKGESLPPKPRKRHRNRLSFETRPLLYRMTGVDLTKIEGLDETTALIVLGEIGLDMSRWPSEKQFTSWLGLCPRVRVSGGRVLSSRTRPTANRAAAALRLAAASLHHAKSALGAFFRRMKARLGTPKAITATAHKLARLIYAMLKHGTAYVAGSMAEYEQKYRQRVVHNLSRKARELGYELHPVLGGPPA

SEQ ID NO: 316872 - protein, 475 aa, unidentified
MSTAKRTRGSGKSSAGSEVKVRYEDGLSRISSHAAGIDVGSEEHWVCVPYSGGDAAERVRRFGALTCDLLAIRDWLKERGVTTVAMESTGVYWIALYQILEEAGLDVWLVNARYIRRVPGRPKTDRLDCEWIQRLHSYGLMRRSFRPANDVCAIRSLWRYRDRLIDQWSRCVKQIQKALHEMNVLLHKAVSDITGKTGTAILEAIVQGERNPVRLARFRDPRVKATESELAEALRGDFREELVLIVASALRHLRFTESEIATLDAQIEQRMGGLQPRNTDIGEAELVSTDLRRNSHQHAPEFDAVHLVQRLYGVPLGDIPGLSATTLTGILSEVGLDLSRWENAKHFTSWLSLSPTARISGGRIIASARTAGTANRAGRYFRQAASSLKHNDTPLGEFYRRMRSRNGTKHAIVSTARKLAEIFYTMVTTGERYRYLDGSEYDQKLREMQIRNLQRRAAKLGMELKEAEPPQSRTA

SEQ ID NO: 316873 - protein, 323 aa, unidentified
MQGQKSPERSAQPGVYVGVDVCKDWLDVYLHPSGQAFRVSNAPAGLKTLKRRIAAIPVELIVMEATAKFHRQAHRSLHAAGFAVAVVNPLRARLFAEAVGQLAKTDRLDARLLALMAQTLEPSPLAPAPEALEALQELARARAAAKAEQTALSNRRGASQTAFLKTELGRRLKTLASHIERLDAEIERRLGADPALKRRYDILISIPGVGPVAAVALLVGLPELGACSAKAAALLAGLAPLACDSGAKAGERHIRGGRAFVRTSLYLAALAAARCNPQLRHDYKRLRDAGKKAKVAITAIMRKLVVLANVLIKEDRPWKPIHA

SEQ ID NO: 316874 - protein, 371 aa, unidentified
MAHSTLFVGLDVHKDSIAVAYAGAGGEEPVFVGTIGTRQCDLDALIRRLRAKAREPVFAYEAGPCGYGLYRALTKQALACLVVAPSLIPRRAGDRVKTDRRDALTLARLLRSGDLASVYVPRVEDEAIRDLCRAREDALRDGRAAKSRLKALLLRQDIRYVGRANWGPAHLRWLAEVVCPTPAQQIVFQEYVRAVTEQQERLARLEHELAEQVRGWRLAPVVEALQALRGVQFTVAVTTVAELGDLCRFDRPRQLMSSLGLTPSEYSSGATRHLGGITKAGNGHARRVLVEAAWAYRYPAKVSRHLQLRLQHLPKPIPDIAWRAQVRLCARFRRLVARGKNPNIAVVAVARELAAFMWAIAREVPRGPTAE

SEQ ID NO: 316875 - protein, 339 aa, unidentified
MIYYGLDIHKRYTFYTAMDERGRILKQGKVGSTAAGMADIIGPEACVAMESTCNWYHLYDAVEGLAQEVHLAHPLKTRAIAEAKIKTDKVDSTILAHLVRTDLLPTSYVAPRSIREDRELFRYRASLVALQTQVKNKVHGILLKHGYTSPYSDVFGRKGREWLTGLPLEPVYRQALEGYLALLHTLKEQIDDSEKEIKDRVRANPAALLLTSVPGIGYFTALLIISEIGEVGRFPDDRHLASYAGLVPRVHSSGGKTRYGGITKEGSVWLRWSLQEAAQVAIRHSPHFQGCYRRIAWKKGHQRAVTGVARHMVTIVYAMLRSNQPYRENQDTSVGDMAH

SEQ ID NO: 316876 - protein, 450 aa, unidentified
MKYPKGLRREHKKLLRKKQVVTGQTMICALDLAKKRHAFHVLDGNRNILMRGRIPHSLEGMEQLLEKMESLRQENSDYKDIVFFMEGASHFWMPIASLLERKGYEYRLVENRAVGHQRHLSGQSDHKNDPRDAAHIADLGHSLYFTFSQLPLKQEWIHLRACAQEYQELVDLITAEKNRIHAFLGTILVGYYNIFSDPFGMNSLAILQCLDMASVLDEQEFVLCVRKVFKGKNLLIKRCKAVWQYLRSEDPWGYIEARPALLERIKSSAERMQLFLNQQNQLRKQLLKAYHQIPYSFNLNSIHGSSSVENAVLLGVLGEPKLFDEARATVSVAGLEPGERASGQYQGKTRVTKAGRTRLRRAAISASMAVLKSRKNPDFVRRFFYLQQRKDRPLKALQALCACAGKYLRTVWWLCTEDTEYKPEIAHHGFINKRVSNSNCEDEIVFETVN

SEQ ID NO: 316877 - protein, 340 aa, unidentified
MYYGAIDLHSNNSVLGLIDDQGQRLHMRKLPNDLETIKRTLDPFAAQLRGIVVESTYNWYWLVDGLQAAGYQVHLANPTATEPYSGLKHSDDSSDAWWLAELLRLKLLKEGHVYPRSERATRDLLRKRAHLVQQRTQNILSVQNLICRNTGVPIKSNQVRKLTVEGIEGSYGQEEDRALAITCSLRIIDTLDKEIAIIEKQVKNKIRLSRGYQLLQETAPGIGEILAMVIQLEAGDMSRFASVGDFASYCRCVKSERLSNQKKKGTGNRRNGNKYLAWAFIEAANFAIRYDATIQRFYQRKEARSKTIIGRMTVAHKLARACYYVLRDQVPFDTAKCFGQ

SEQ ID NO: 316878 - protein, 431 aa, unidentified
MAGIDVAKAKADVCTRLPPAREGGRRASRVETVPATAGEVMALAGRLIADGVEVVVMESTSDYWRIWFYLLETAGLNVQLVNSRHARQLAGRPKTDQKDAQWIARLAEMGLLRPSFVPPPEIRALRDLTRTRLQVLKDRTREWQRLEKLLEGALIKLSSAVYSMSRNKTARGILEAIVAGERDPKALAALTHGNIKGGSAAIEKSLEGMLLGDHHPVLIRLHLDHITLLDRLAAEVEDEIEAALDVIPAAWGVSADGVPSPDPGTDAAVLPAAERLAEIPGVSLRLAREIIAETGLDMTRFPTADHLVSWAGLAPVARQSGPRQRKPSKGQGDVYLKTYCAQAANGTGNTDTFLGERLRRLTRRLGATKAMCAVGRSILVIVWHLPANPGARFTDLGPGWHDQQAGRDRKIRGHLRQLKALGLDVTVNPAA

SEQ ID NO: 316879 - protein, 321 aa, unidentified
MQTLSTPINVGADVGKDEIAFASADGRFSRCKVPNQRAELKAFLKQLPAGSRIGMESTGSYHELLAEMAHKAGLVVFVLNPKDVRHYAKGVGLRGKTDRVDGDLIARMIDREHEKLHPWIPPTFEQHQIDRLIKRRAKVSGIQVALNQSLKGLSGFGSDLKAVNERLNRLVKGIDAKVKALIEADSDRKQQYARLRKIAGLGGTVVRSSVLNTLERVPLRSADAFVAFTGLDPRPDESGHHVGRRRLSKRGPSELRRLLYLAAMAAVKTKLWKPIYEHYRSAGLSTTAALVVIARRIARTAWSVYKHKTDFEPKRVTLGLT

SEQ ID NO: 316880 - protein, 414 aa, unidentified
MESVYRSVAGIDVHKKMLAVVIRRQLGEQAEYEKRKFGATHAEIQHLEAWLRAHGVSEVVMESTAQYWRPVWYGLEPHFRLHLTHPLKTRAPRGRKSDFRDAQRLADRWSAGDLEESFIPGCEQRAWRWLTRTRVQLKKKLGVIHSHVEGLLEQGGIKLSAVVSDLFGVSGWAMLEQIAQGVTEVEVLAGEARGALRKKEGELKQALAGQLEPVYRLLLRQHMDQVRLLRRQVEEINQALAEAMQEHLAALYRLSKIPGVDLYAAQELISEIGPKACAFASAEQFASWVGVCPGSHQSAGINYSARSAKGNRYLRRLLCQIAWAAVHTKDTFFAGLFARLKPRVEGKGAAWAVAHRIAKIVWLVLHQQVEYQEKGSAPPNERTLVRKFKRILKDFGRLGLDVRALLDSQLPAPA

SEQ ID NO: 316881 - protein, 358 aa, unidentified
MSNLKYSIGIDVSKKDFHCCLSVIDTEQSVKVKSTHKFTNSTSGFKLLIEWVRRNRKEDLQIFCVMEATGVYHEQLAWYLHDKDFSISILLPNKAKKYLQANGAKSKNDKIDARGLAQIGAEKKLDLWIPPSRKLYNLRSCTRQHQSLSEMHSAINNQLEAITHSQFQSKDIIRQMKKTMRLLEQQINEMDKIIEEIVKEDEVLNFHYKNISEIKGIAMLSFAVIAAETNGFVLFKDAGSLVSYAGYDVVENQSGNHVGRTKISKKGNSRIRRILHMPALCAVREDQPQFKNLYERVYKRTGIKMKGYVAVQKKLLVMAYYLWRKKMKYQADFDYSEKIIAPEKSEATHDKIPEGRFH

SEQ ID NO: 316882 - protein, 408 aa, unidentified
MNPLFVGIDVSSKNNVAYLMKPDGSKHSSFSVQNNLGGAKLLSEKIVSALHSMQLNDVVIGLEATSIYGDSLVYALREDGGLGRFQRKIHVLNPKQVRKFKEAYPDLPKNDWVDAFVIADHLRFGRIAKEVYMDDYRYQALRTLTRARFDIIQNLTREKQRFANYLFLKCSGIAQDKDIQNTSATTIALMEHFETVDDLANADLDELTAFISEAGRGRFVNPDATAKAVQAAARGSYRLPKTVNDTVNQAMSVSIASMRALKEQVKVLDKAIEQQFEIIPNTLTSIPGIGKVYSAGIIAEIGDIHRFNSQASVAKFAGLVWHRNQSGDFEAEHSQMIKSGNRYLRYYLLEAANSVRRCDSEFRRYYDLKLKEVNKYQHKRALALTARKLVRLVFRLLKDNRLYIPPEG

SEQ ID NO: 316883 - protein, 395 aa, unidentified
MESLFVGVDVSKDYFCVSGLDIQGTLLFSLTATADKTGFAEMMSTITSHCARVDEAIVAMESSGCYHLNLFSALTSNNIRTVVVNPLLIANYGKLSLRKTKTDKKDALVIAHYLLSHRETILQYSVSQAYQDIRDVAREREFTGKMIAGIKNDIKRMLQSIFPELEKLVNVFSDTMLHVLKTFPSARLIARSGEKEFRQAFIHPDKRMRLVVKPEKIREAALTTVASRSPAKEMLLPGKIETLVHLQRRLDELTTLMVRLCKETREEELKIITSIDGINTKTAAPFLAELGDLSNYQSYKKVIAFAGVDPSIHQSGKFQGNSKISKRGNRHLRRVIYLMTFCAIRMEGPFKRYFQKRKNEGLPFRKALFATAHKLIRVIFAMLKKRTYFMADQYA

SEQ ID NO: 316884 - protein, 431 aa, unidentified
MANLAVPAPRPRARRPQGRERVRYYLGVDWADQTHAVWVVEADGSKIAAHTVPHTAEGLSEWGRELDQWRAQGVELWAAIERREGRVVDFLLDHGVAVYPVNPKALDRARDRFRQSGAKDDPFDARVLADFLRTDHAHLQALLPSSEAAQELKLLTEDYQRQIRQQTRLVNQLTNTLKAYYPRALEIAELTTTLAQEFLQAYPTPESLSSLTERTWQRWAQTHRLSEARTRALWADLQQPQLPVPAHVVRAKARMMRSLVGQLTPVVAAVAEYRRAIEDFFANIPSAQWARTLPIGEHGITAPTLWARLGDAPGRWESFRHLQAQAGAVPVTKRSGKQQRVVQFRHACDKALRYVVEHVAFLSLRSSEWARAYYDQQRARRHSHRQALRALGAKWLKIIFVMWERQLPYDERYHLATMTRQQFRQRQEKIA

SEQ ID NO: 316885 - protein, 335 aa, unidentified
MYYSGIDLHSDNCYITTLGESDVVVKQQRVENIPELIVDYFHSLPGPHSAVVESTTGWYWLNDLLEANGIELVLAHAKYLKAIAYAKVKTDKVDSQTLATLLRQNLIPRAHKISRELRGLRDTMRIRLRLVQQRTACLRRIESIADKFNTCGDLPDPYTCQLSALHHLRDTFTAKILELEKSLHPLLIPNDDVQRLLYVPGIGKLSAFTIYLEIDGIDRFISDRHFVSYCRLVPAADNSNRHVHHRSSKDGNKYLKIAFSDAAVHAIQYYPEIKAFYQKLARRSSQPVARTVVAKELAKIVYYILKNKEPYRGFKGQPISRRKSQQWPRLPNPDF

SEQ ID NO: 316886 - protein, 396 aa, unidentified
MLYMGDDLHSKQMTVEVRNEAGDVVVRRQVSMRPAKVEEFLEQLHQIGDGKYVVLMEVCGFHDWLVRRLKADPYCQGVFLIQPEQASKQKTDRRDASRLSEILWVNRERLPAGQSVQGVRCVYQPTEEERQDRQITSQRQRLGRRRTQTINQMRHILRRNNLEWERPTKGFQTQKVKRWLKTLALEETERLEMDQLLEQWELWDRQIAQCEERMAQRFSRSVAAQLLATIVGVSCYMALAIASRIGDVRRFPRGRSLANFFGLTPGSRSSGERQRQGSITKQGSQLVRFLLGQLVVHVLRKDAKLRGWYKGIKKRRGSKIARVAVMRRLTGILWRMLSKQEAYRYEGATEPRRPDPASPSEACVLPDRAALLAASPASAASQRSAGQVPVPHLCSE

SEQ ID NO: 316887 - protein, 427 aa, unidentified
MAYRIAGIDVHKKKLAVVVVDVEVDDEYQFERRWFGSNPEQLQRLAEWLIEQRVEEVVMESTAQYWKPLWSALERYWKPSCQNREGAGKMSGTLHLAQALSNRGRRGRKKDFPDAERLVKRLVSQELTLSFVPDTEQRLWRTLTRTRYQRTRDKVRLQNQLEALLEEAHIKLSSLVSDLLGVSARRMLHALADGETDPAALAALADKHLRATPAQLCDALGGCTELNPVYRRLIKMALQELQFLEQQMGQLDQEIANLLRPHEDAVKRLAEVPGLGVDSAQQIIAEVGPTVATFPSDKQLCSWVAVCPGDNESGGVNYSHRSPKGNRQMRRILNQAANAAARTKGSIFEIVYRRQVTRMGHNQAIGVIAHRLCQLIWILLHRKVRYEERGPAVTETSKRKRTARMIRQLRALGYRVEALNLQTAAPM

SEQ ID NO: 316888 - protein, 369 aa, unidentified
MYYVGLDVHQRRSSLCILDAHGKSVKRLEVKGPWPKLLEVVGRDVPRPFAVCYEASCGYGALHDRLAAVAERVVVAHPGQVRLIFRAKRKHDRVDAAKLAKLLYLDAVPAVHVPGVDVRAWRGLINYRRKLVGRRAAAKTQVRALLRGLGTDGVPRGLWTAKGLAWLKGLSLSAADAVRRDVMLDDVEQLDAKVRKVEKELDRIARGHPGVALLRTIPGVGPRTAEAFVAHVDGVGRFARVKQVGCYFGLVPCQDASADRNRLGHITKDGPAPARWLLAEAAWQGRRRSPTIAARFERVMRGDPDRKKVALVATAHYLTRVMAAMLRTGEAWREDPRCAKPPAAKEPEQERAKEQNEQNEQNEQRTTNQ

SEQ ID NO: 316889 - protein, 345 aa, unidentified
MDHFAGLDVSVKETSVCIVDDTSTIVREVKVSSEPDALLAVLTNPAYQFKRIGLEAGPLSQWLFSALAEAGLPVICVETRHMRAALKAQINKTDRNDARGIAQMMRVGLYRPVHVKTLRSQKLRMLLTHRKLLQTKAIAIENDLRGTLRNFGLKVGVVGAVKFEARIKELVENLPDLAALIEPLLIVRRVLREQIGILHRRLLVVVRADDICRRLMTVPGVGPVVALTYRATVDVPTRFRNSKAVGAVFGLTPAKYQSGEIDRTGGISRCGDEMMRVMLYEAAHIMLVRSTKWSWLKAWAMQIAKRRGLKKAVVALARRLAVIMHRIWVDGTEFRWTREQAVAAA

SEQ ID NO: 316890 - protein, 322 aa, unidentified
MSQPNQICVGIDVAKGSLDICVGTGKASFTVINGTDGFEQIIKALKNISVSLILMEATGGLEAPVAYHLQAEGYEIAVVNPRQARDFCRAMGYLAKTDSIDARALAQMADVINNHPERERFILALPDNQRQVLTALVARRRQLVGMLVAERNRLHTTHPAVMKSVECLICALNGELELIDIEIKEHVQKHFIDLSALLRSVKGVGPTTIASLLADVPELGNLTRREICALVGVAPVNRDSGKMRGRRSIFGGRASVRTALYMATLCAVRFNPALKTFYTRLVLAGKPKKVALVASMRKLLTIINAMIKKGEEWDNTFHNLAC

SEQ ID NO: 316891 - protein, 428 aa, unidentified
MLKINPLSTLYVGIDVSSKSNFVCALDFYKNKYINSSFANNQPGAEELAKKILECLKEHPDLNTIVAALESTSVYSIHIANFLSSCEELMHFKPYVFVLNPKCTANYKKSYIGLGKSDPIDAFVIADYARAGNIETEPWRGSQFLALKRLTRHRLHLVECMTREKTYLVSNLYLKFSELQMLEGDDQPFCDIYGAASSSVLTEYLSPEEIIDSSEESLINFLAEKSRNRIKDISKTAELLKKAARDSYRLDKALYEPLNVSIASSFNCIGTFKKEIKLIDTAIEREIKGLNPNAFIILQSIDGIGPVFAGGIVAEIGDISAFHSSDALAKYAGLMWKSNQSGDFNGEDTPMSKAGNRYLRYYLGEAANSMRKHNVEYGAYYRRKYNEVPKHQHKRALALTSRKFVRLVYGLLARNQLYSGVSLDTSNE

SEQ ID NO: 316892 - protein, 420 aa, unidentified
MRNAGIHANSLLEVRRMYNAVGIDVSKGKSTVAVLQPGGTVIRKPFDVSHTSQNLNELADYLSSLDGTTKIVMECTGRYHEPMVKALSEAGLFVSIVNPHLIKNFSNNSLRKVKSDPADARKIARYTLDNWTELRQYSGMDNTRTQLKTLNSQFSFFMKQKVAAKANLIALLDNTYPGVNKLFDSPTREDGSEKWVDYAYSFWHADCVRKIGLKAFTERYKSFCKKHHYIFQQDKPEKLFNASKELVAVFPKEKTYKLLIQQSIQQLNLASEHVERLRREMNELASTLPEYSTVMGIYGVGKTYGPQLIAEIGDVSRFTHREALTAFAGVDPGVDESGQHKSKSNRASKVGSARLRKTLFQIMTTLLQNAPEADPVYRFLDKKRSQGKPYYVYMTAGANKFLRIYYGKVKECLRNLEQTE

SEQ ID NO: 316893 - protein, 423 aa, unidentified
MPYRITGIDVHKKKLAVVMADVEVDGEYQFERRWYGSNPEQLQLLAKWLVEQQVEEVVMESTAQYWKPVWSALERSWKPMCQMGQGAGRMSGALHLAQALSNRGRRGRKRDFLDAERLVKRLVSQELTLSFVPDTEQRLWRTLTRTRYQRTRDKVRLQNQLEALLEETHIKLSSLVSDLLGVSARRMLKALADGENDPAALAALADHRLRATPAQLCDALGACTELNSVYRRLVKMTLADLQFIEQQIEQLDQEIASLLREHQNAVQRLAEVPGLGVDSAQQIIAEVGAKAATFASAKNLTSWVGACPGEEESAGVNKSRRSPKGNRQMRRILNQAANAAVKRKGSIFEILYRRLVLRLGHNKAIGAIAHRLCQLIWIILHNGVVYEERGPAVCEKSKRVRTLRMIRTLRTLGYRVEPLGNPA

SEQ ID NO: 316894 - protein, 405 aa, unidentified
MFDTEDVGVFLGLDVGKSAHHGHGLTPAGKKVFDKQLPNSEPKLRAVFDKLAAKFGSVLVIVDQPASIGSLPLTVARDAGCKVAYLPGLAMRRIADLYPGEAKTDAKDAAVIADAARTIPHTLRSLELTDEITAELTVLVGFDQDLAAEATRTSNRIRGLLTQFHPSLEHVLGPRLDHQAVTWLLERYGSPAALRKAGRRRLVELIRPKAPRMAQRLIDDVFKALDEQTVVVPGTGTLDIVVPSLARSLAAVHEQRRALEAQINALLEAHPLSPVLTSMPGVGVRTAAVLLVTVGDGTSFPSAAHLASYAGLAPTTKSSGTSIHGEHAPRGGNRQLKRAMFLSAFACMNADPASRTYYDKQRARGKTHTQALLRLARQRISVLFAMLRDGTFYESRTPADVELAA

SEQ ID NO: 316895 - protein, 313 aa, unidentified
MKRIKFVGLDVHAETIAVAVAEQDGEVRSIGVIPNRCESVRKLVQKLGPVEELRFCYEAGPTGYVLYWQLAALDAKCEVVAPTLVPVRAGDRVKTDRRDALKLARSYRAGELTAVWVPDAAHEALRDLVRAREAAKRDQLRARNRLTKFLLRPGKRPPEGVNPWTLNYMNWVRKDVHFEPLAQQATLLDYLHEVEHMAARVTRLEQAIEEAVQLAPQQMREVIEALQALRGIAKVSAVTIVAELGELSRFGEARQLMAYSGTVSREHSSGESCKRGGITKTGNVHLRRIVVEAAWAYRHAPAVTAACASGKSA

SEQ ID NO: 316896 - protein, 341 aa, unidentified
MNKTNTITIGIDLAKNVFHLCTQDAKGHILKKTKLGRQQFKYFLAITPPRRVVFESCATAHDWSRVATRHGHDVKLIHPAYVKAYLKTNKNDLNDAEAMCEADSRPTMRYVSSKSIPQQDIQWLHCIRRRQVHQRTALVNQIRGQLLAYGITIPVGISQVRCQLSGRLEEAENELSGDSRILFHEWQQELYLMDDLVKQADKKINLIAKEHPVCHRLMGIPGIGPMIATALISTVGNARHFKNGRELSAWLGWVPKQYSTGGKQRLLGISKRGDSYVRSLLVQGALSAMTRCKNRSDNPLVWARQLKETKGLQKAAVALSNKMARIIWSVMAKDHDYVAHV

SEQ ID NO: 316897 - protein, 356 aa, unidentified
MDQSNKLDFTGQRIYTSLDTHKKSWTVSIFTEHFEHKTFSQPPDTEVLVHYLQRNFPGANHQVVYEAGFCGFWIHDRLRESGISCMVVNPADVPTTDKEKKGKTDPVDSRKMARSLRSGDLKGIYVPQREKVEDRSLIRTRQAMVKKQTRCKNQIKSSLFFYGIVIPKELGAGHWSRKFINWLSEIQMKRASGNVALKTLLSELLYLRQTIADLTKEIRRLAHAEEYAENHRLMKSVIGISTLSAMTFLTELADIDRFKNLDKLASYIGLVPDVHSSGGKEANCGITSRCNPHLRGIIVEAAWITIRKDPAMMMAYNQLLPKVSKKVAIIKIARKLLNRIRYVLKNKQEYVPAVVQ

SEQ ID NO: 316898 - protein, 358 aa, unidentified
MIAMKYYTSTTQFNCGIDLHARQMYVCLMDRDGHKLVHTNIKNNDFDYFLQCMAPYRHDLTVCAECMFGWYWLADACQAAGLHFVLAHALYLKAIHGGKNKNDRIDSEKIAHLLRTNLIPPAYVYPAAKRPLRALLRQRILYIWNRSELLSRIQSHQLAYNRPTFRQTPYNRDPWEEKLLAQEDNPVRQLALQNDLALIRHYDAQINTLEVQLQQLTKASAGRDYALLQTTPGIGEHLGLTILHEIGDIARFPSVKDFLSYCRLVKGTVASAGKIKGLRGAKLGNPYLRWAFGEAAVIAKRDPVVIGPLAQRLEARMNGNKFKANTVLAIKLARAVYFMLRSHTVFDPERLVAALSHN

SEQ ID NO: 316899 - protein, 411 aa, unidentified
MDIVVARCAGLDVHKDTVVACVRVPGPDGRRAEQVRTFGTTTVELLALRDWLVAEEVTLVGMESTGVYWRCVYYVLEDALGCWLLNARHLRNVPGRKTDVADAQWICQLVEHGLVRPSFVPPKPIRELRNLTRYRKAQIEERTRETQRLDKVLQDAGVKLSSVAGDILGRSGRDMLQALVAGTRDPQVLAELARGKLRAKLPALRQALQSRFGDHHALLVGQILAKLDFLDEAIAQLSAEIDRVIAPFAAQVALLDTIPGVDKRTAEALIAELGVDMARFGSAQRLASWAGMCPGQHESAGKQRSGRTRKGPKWLGAHLTEAAKAAGRTKDTYLAAQYQRLRGRRGAAKATKAVGHSILVAAYHILDRGVPYRDLGADWFVRRRPEVQARKLISQLNNLGYQVTLNPIQAA

SEQ ID NO: 316900 - protein, 418 aa, unidentified
MARLKIVYPICCGMDVHRDFVVACIASTNGQGVTDYISKRFSTYSGGLRNLRDWLAEHNCRDVCMESTGKYWFPVHNILESTCHVVVSHPKFVKAIKGKKTDKKDALWIADLFKHDLVRGSFIPPEVIRQLRDLCRYWVKLSSYLTGEKNRAQNCLTVSNFKLDSVFSNVFGKSASAIIAHMLEHPGELFDVAPFVDGRCKTPIDQIQAAADGSFNPSQAEKLKIIRRHMDNLDNLKALLETQIFALALPFARQVELLLTVPGISDPLTAIRIIAEIGADMSVFESAKHCCSWAGLTPQNNESAGKKKTTRIGKAGQYIKPLLIQCALAASNPRSSLYPEIRSKFQHLKKRRGAKKARVAIARRLLTAIFQMLLKDEPYSPYIAPPAAVVPPDRTLTPKQALALLRSKGYLILDDLPA

SEQ ID NO: 316901 - protein, 421 aa, unidentified
MQQPSSDFAAFVGIDWADRKHDVCLAAPDSGKPESSVIDHRPTVIRDWARGLRERFPAGSIAVCLELSQGPIVSALLEHDFFVIFPVNPSTLAKYRRAFTPSGAKDDPTDAQIALDLLVRHRDKLKPLRREGADMRALRQLVEARRDLVQDRVRITNRLTYALKAYFPQVLQWFRDKETEVFIDFLAKWPSLQAAKRARPETLVRFFHAHNVRYPAVVKRRLDAIQAETPLTSDPATIEPTQLVVQALLPQIRALNDAILAMDAAVAKRCDRRPDFHLFAELPGAGPVFAPRLMAAFGEQRDRFDSAAAVQKYVGVAPVTERSGNKHWVHWRWACPTFLRQTFVEWAGETIPRSFWARAFYESHKAKGATHNAAIRALAFKWIRILYRCWVDKTPYDESRYLNALQKRQAPLLKFAASTPS

SEQ ID NO: 316902 - protein, 270 aa, unidentified
MVDTETGELIERRLEHGNGEAKKFYAELHKPVRVGMEATGYAQWFEQMLAKLGHELWVGDAAEIRAAMVRKQKTDSRDALHILDLMLQNRFPQIWVPSPAERDLRQLLRHRHKMVCLRTSLRNQLQALAMGQGLYRRKKLWASQGREEFQRVALDPWAERRRQELLQLLDRLDGSLAELDRAVTKEAEKNPAALCLMEQPGVGPVTALMYVLTIGPVERFRRSKQVVSYLGLNPRESSSGGRQRLGSISKQGNSMARFLGSEQESVTHPD

SEQ ID NO: 316903 - protein, 376 aa, unidentified
MQDSTFIGLDVHKATISVAVAEGVRGGEVRHLGTIPHRADHVRKLVEKLGSGGRNLHFCYEAGPCGYGLHRQLVEMGHDCVVVAPSLIPVRSGDRVQTDRRDAVMLAKLHRAGELTAVWVPDAAHEAMRDLVRARATAVRVTGKARQHLQGFLLRHSRVYPGKKGWTVAYRRWLTTVRFDHPAQQIVFQDYVDAVSDAEARVAKLTGQIAELLPDWDLAPVVEAVQAMRGVAFIVAVTVVAEVGDFNRFGNPRQLMAYLGLTPSERSSGATVRRGGITKAGSGLARRVLIEGAWSYRMQPRVSRKLHDRLEALPAAVRDIAWKGQLRMCQRYRRLAAVGKPKVVVTTAIAREMVGFIWAIARMVTAVPASTAGQRA

SEQ ID NO: 316904 - protein, 327 aa, unidentified
MVYLGIDVSKAKLHTCLRREADGKQKTKVVENSRDGVTALIDWLARQGVMPAQVHAVLEATGVYHETTAETLHAHGVTVSIVNPAQAKKFAQGLAVRTKTDAVDAETLARFGALVRPAPWTPPPPQVRTWQALLARQQALSEDLRRERNRLEKAEATTTPPPVLDSLTDSLAFLEQALAKLQQEIDDYLNGHPQLKADVALLTSIPAVGPKVAHQLLALLHARPFQSAEQLAAYLGLVPVERQSGTSVHARARLSKAGPARVRATLYMAAVVATRYNPHVKALYERLLARGKAKMAALGAAMRKLVHLCFGVFKTRLPYQADYAPAT

SEQ ID NO: 316905 - protein, 419 aa, unidentified
MFSDTTLLVGVDVHGRTNVTLVMDGLGDVLDKHQRFANNRIGTGQLTRYLTQLAQRGGFDAIHLAAEATNNFWLPFFHQLAQSSPLSDQPLTLYPFNPRLIRNFKKALGEEEKTDLRDAGVIAERLRFGKKLPRPFVMDELYLPLRSLTRYRYHLVRNLVRVKSYCLSLVYLKATGYTDKATQPFSNPFGATSQAVLREFATLDEIAKMPFDELVEWLDVKGKRRFPNPEENARKLRQVATEAYQLPEDWAAVIHDIISLNLRHIALLENLIRRVETAVEQQMENIPHTLNTIPGIGPVLAAGILAEIGDVARFEFNEAKVASYAGLRWPRSQSDEFEAEDRRLSRSGNHFLRYYLCEAAQLVRLHAPEYRDYYHKKYKEVRKHQHKRALVLTARKLVRLIVRLLTTHEPYRLRQVSHD

SEQ ID NO: 316906 - protein, 315 aa, unidentified
MAMPVATAQPIVGIDVAKDELVIYHAQSDRLETIPNTKTEIKKWLRALPAPVDVAIEATNIYHQEFADLAYAQGCVIYMIGGYELSHYRKGVKVRAKTDALDARLLARYLNNEGHQLHPWTPPSPLYCRLISLFRRRAALVQARVSLKQSWSNEPLLKTAFENQIKAMQRLEMLLEKTIQTQLDAAGLGSQLKRCMKVEGIGLLSGARLITSFQRGDFRNADAFIAFLGLDLRISDSGKKKGRRCLSKRGDPEARRLMHNAAMSASRTAAWKGFYEALRARGLSTTEALVALARKLARVVFALLKNQSEYLPKSI

SEQ ID NO: 316907 - protein, 358 aa, unidentified
MNICGIDIHKSFLQIAVIDSRGNIVYQERCRYSLIDIILLIAKLAKMRCMEIAMESTGCFWIPLYYEFAGRGFKTVLANPSSTKSFGSKTDMLDAVRIARRHRAGALIKSHVPRDRVKITLRIISRLRRRLKEDRNRVLNRIRRLLTISGVWLDRFVRPNTSRWFSMLEMLASGKSLNEILGLNIGYEYHCMRDRLDCYEANILGQLLSLARRIDEICSFLSKMAESLAEKLYGEEYSLIQTVPGIGKTLAYMILAEIDDIRRFPSARHFKSYCGLSPSLRESGGKARLGRCRHGNPYLRYAFYQAAVVAIRVDDELKRFYDRLRARGKHHKVALMAVAGKLAIRTWHILCNNEKYIA

SEQ ID NO: 316908 - protein, 367 aa, unidentified
MKKISTVTTKKVEKNASQKLTIGLDLGDRFSWYCVLDEAGEVVLEQKVATTPKAMKEVFGGMPRSRMALETGTHSPWVSRLLSELGHEVIVAHARNVRLIGESRKKDDRLDARTLARLVRIDPQLLAPVKHRSAKAQGHLMVIRARAGLVRARTSLINTARGVTKSYGERLRGCNPRNMNLEKAQGLSPELQAALGPLLGEIESLSERIREYSERIEEIAKESYPEVGRLKQVKGVGTLIALAYVLTLEDAHRFGKSRDVGCYVGLQPGRRNSGQSEPQLHISKEGDPYLRTLLVQGAHHILGPFGADSDLRRWGLKLAERGGKNGKKRAVIAVARKLAVLLHRLWVSGEAYEPLRNQREVALPAAA

SEQ ID NO: 316909 - protein, 349 aa, unidentified
MIWIGVDAHKLVHEAVALGEAGVLGTRTIPNTPVAWAALLEWARQWPERIWAVEGAWYLGRGLAQHLAEQGERVHEVNGRWTAARRRGMRRPGKSDRLDAHSVAQLLREEADTLPRVYAEEDEQASVQLWSRVQAELTKDMTRLVNRLHDLLLTCDTEDKSTLPALTTKRGIEAVRAYSAPGTGPLAREREAVIRATAAQLALLDEQDRELRRKLERASTARFSPLRQIEGIGALIACAIVAEVGAPRSGFGEEQLAALGGLSPLEASSAGAVRHRLNRLGNRRVNMVFHQIVLTQARIYPPAQAYLARRKAEGRTAREARRALKRLIVRRVFRAWSECFATSIEAVAA

SEQ ID NO: 316910 - protein, 351 aa, unidentified
MMLIGVDYHPSFQTIAFLIEETGEYEERELNHSDGQAEKFYRDLKQRGICVRVGMEATGHSRWFERLLAELGFELWIGDPAEIKAKRVKKQKFDREDARLLLRLLRENNFPQIWVPDAENRDLRQLLWHRHRLVQMRTRIMNQLHALAMNEGFCWKKKLFSEKGRAQLEKLALAPWAGRRRQGLLELLDRMNPTIEELTAAVEREARKRPEAVRLMTHPGVGPLTALAYVLIIGTPTRFQRGKQIGTYVGMIPCEESSGGKQRLGHISKQGNSLLRFLLVEAAQAAARVNPHWRRRYMHLAMRRHKSIAKVAMGRRLAVRLYWMWRNGCEYSPSLEFGSYAGQLGLGNGVK

SEQ ID NO: 316911 - protein, 445 aa, unidentified
MDVVFPHCAGLDVHKKRITACRVSPDPTGQNADGVMEVQDFGTLTIELLALSDWLSQVGVTHVAIESTGEYWKPVYNLLEGTFTVFVVNAAHVKNVPGRKTDKADARWLAKLMRYGLLQASFIPPQGQRDLRDLTRYRTKLVQERSREVNRVQGVLERANIKLASVATDIMGVSGRAMLEALIAGRTDAATMAELARGRMRTKIPVLEQALTGVVREHHRRLLAIQLAHVDFLDEQIATLSEEIRHVLSALCPSELPGSPTDGAGATPTAPEPGSSAPSMTFMHAITLLDSIPGVNQQGAELLVAEWGIDMERFGTASRLAAWSGVAPGNHESAGVQYSGKTRKGNRALRTGLVQMAHAAAHTKDTYLSTLYHRLAARRGKKRAIVAVAHSIVRSAFHMLSRNEPYHELGGNYFDEHRREHLVDRLTRRIERLGYRVALEPVVTS

SEQ ID NO: 316912 - protein, 378 aa, unidentified
MEAMMERCAGLDVHQKTVVACVLYGPLDKRPKKSIESFSTSTKGLLELNDWLVSFGVTDVVMESTGVYWKPVWNILENQFRLVLANAKHVKNVPGRKTDIKDAEWLAKLLRSGLIEGSFVPPEDIRDLRDLTRYRKKLVNNRTAEQNRIHKILQDANIKLTSVLSDIFGKSGRKILEAIINGEKIEEKSLREMVHKRVKSSLTDIAESINGRIRRHHRDMLRYHWEHMIYLEETLERLEKQIDQCLEPYRKEVDLLDTIPGVNKDAAAVFVAEMGVDMSVFKTEKRLASWVGVSPGNNESAGKKKNSKTTKGNKALKTMAIECVLGTSRQNNRITAHRKRIAKRQGRKKANMASAHLLITINRRTLSGIRTRLFETAS

SEQ ID NO: 316913 - protein, 388 aa, unidentified
MIYAGIDVAKDKHDCLIVDSNGKVLTKVFTITNNKQGFDELFTNLRTHSKDLSELKVGLEATGHYSDNLLEFLIANDLPTTVINPLHTNLYRKGLSLRKTKTDKVDAHSIVTMLRTEDLKPYSQSSYHVRELKSLTRYRFSLVQDCARLKSSFARLCVILFPELEKLVPSLHMASVYALLAEFPNAKAISESHLTRLTNLLSEASKGRYSKDKAIEIRNAAKASIGSYSEVKSLELQQTLQLIQMMEKQIAQAEARINPIVDSLHSPIMTIPGIGYRMAAIIIAETGNFANFDKAEKVLAFAGLEPSVYQSGQLTSTHAKMVKRGSKYLRYALFNAAKYVCHWDDGFRQYLAKKRAEGKPYNIAVSHAAKKLTRVIFHLVKTNQSFSR

SEQ ID NO: 316914 - protein, 338 aa, unidentified
MERQYVGIDLHRRRSVIVRIGEDGEELGTVRIENDPIALSLAVAEAGPNPEVALEACYGWYWAADVLQADGAVVHLVHPAGLNWDNRRVKNDKRDALELANRLRRHDLPEAWIAPPKVRQLRELVRYRAKLVALRTGLKAQVHSVLAKQGLFPPVTYLWGPEGKKFLNDAPLDRGYLHRVESLRDLVAIFDKEVDLLEREIYRWLRDDHGYWAVQQLNGVGHTLAAIFVAEIGDVSRFPGPRELCSWAGMTPKHRESDLKVRRGRITKQGSVLVRWAAVEAISHVRGTEKIKQDYHRIAERRGKNIARVAAARQLLTLVYYGLRDGEIRCLASHREAG

SEQ ID NO: 316915 - protein, 391 aa, unidentified
MLICGIDIGKFHHEASIIDETGKLLAKSLRFTNTTDGGEKLMEYLARNNPNGDVLVFGMESTGHYWLSLYCFLFDKGFQVNVINPIQSDAVRNLFLRKTKNDARDSFLIAETIRIGRFSSTDLPSEDVLCLRQLCRHRMDLVDYIADQKRKIIGVMDRVFPEYQALFSDMFGKSSTELLNRAVTPEEILALSTEELCSLLNTASRGRFGLAKVEEIQHAARKSFGITIGLSAFTLQLRQLLELIALVESQLKDLEAEIERLLLSLNTCITTCPGVGNVLGATILGEIGDISRFPVPKKLVAFVGIDPSVRQSGEFTGSENRMSKRGSPHLRRAIWLAAMVAAFHDPVLSAFYQKKRSEGKHHSTAIGAVARKLTLIIFAVLRDNRPYVPNC

SEQ ID NO: 316916 - protein, 412 aa, unidentified
MIGVDPHKASHTAVAISAAEEQLGELRVRACVARTERLLAWAAAWPQRTWAVEGAGGTGHLLAQQLLSAGERVLDVQPKLGARVRLLAAGDVNKNDPNDARSVAVAALRSAGVRQVRPDDHAAVLKVWSKRYRDLGRTRTQAACRLHAVLGELIPGGVPKAVTTARAGRVLKALRPEGAVETARCELAADLLEDLRRIDASLRETRRKLAAVVAAAGTSLTGLFGVGPVIAAAVIGDVRDVSRFPGRDHFAAYSGTAPIEVSSGRRKVHRLSRRGNRRLNHAIHMAAITQIRNKHSEGRAYYDKKLAEGKTPKEALRSLKRQVSNAIFACLQADARRAAARAEGPGGQQGNDSVASAAGSHPRHRLFGQATPGPGHHTTTTAGDPASRPAIARGRASRSPDAATMPTRLRKG

SEQ ID NO: 316917 - protein, 346 aa, unidentified
MKIFIGIDVSLASSAVCVIDEHGQVVKRAQIDSEPEALIAFLRDLPFTIEAIGLEAGPLSQWLHRGLGEAGFELVLMETRQVKAVLKAMPVKTDRRDAEGIARLLRMGWFRPVHCKSVSAQEMRALLSARKAVQKAALDIEQSLRGVLRNFGMKLGPVGKGKGRYESRVRELVAGNAALEAAATAILDARTVLRDRLSALDRRVLELARQDDACRLMMTMPGVGAVVALTVRSAIDDPARFRSSRDVGPWVGLTPRREQSGERDVTGRITKAGDAALRTALFNAATVMMHNARPCRLKAWGMQVARRRGSKRATVAVARRIGVVLHRMWLDGTEFRPQRKPVPTTA

SEQ ID NO: 316918 - protein, 393 aa, unidentified
MPVLATQPEAAIAVRTDLCAIFVSLELSRSTWLITSLSPGGGEKMSKYSVSAGDIDGLFRRFGDLQERARVRTGQSFAVVTIQEAGLDGFWIHRLLEREGIESWVVDPASILTSRRRRRAKTDRIDGETLVRTLLAHKRGEPRVCAMLQAPTPEDEDRRRLCRERKVLTAERILHVNRIKGLLFAQGVRDYQPLRRDRRARLEELRTGDGRCLPVHLKAQISRELDRLEIILVQLKAVDSERDALLAKGNEDQPPTPASLLVQLKGIGPEFAAVLWSEGLFRSFNNRRQVAAYAGLAPTPWQSGSIDHEQGVSKAGNSRLRTTMIQLAWLWLQHQPGSALSIWFRERVQRNGGRGKKTAIVAMARKLLIALWKYAAHGVLIEGAVANAAFEKG

SEQ ID NO: 316919 - protein, 346 aa, unidentified
MQHCGFDLAKTASQLCIRTEDGQRIERRIKTTREELTKFFAERPLTRILIEAATESEWVAQHLEGLGHEVVVADPNFAPMYSTLSKKVKTDKRDARALCDACERGTYRRAYRSTDSQRQVRAELIARETLVATRTKYISVIRSMLRREGIRVQSCGAQYFRAHVEAMSLPAHLRSAIAPLLAILNTLGEQITQADERLAGVAKSEPLIKRLCLIPGVGPVTSITFVAILGEASRFASAKQVRAYLGLVPKEESSGERQRRGHITKAGNSRVRSLLVEVAWLILSSKKEELQGLKGWATRIAERRGKRIAVVALARKLAGILYAMWRDGTEFEPARLRQPVAEAADG

SEQ ID NO: 316920 - protein, 352 aa, unidentified
MIVLGADMHKSSHTIAAITAATGEMLDEKTAAVGARGFDAVLRWARGLGPERVWALEDCRHVSGSFERFLIARGERVLRVPTRLMANSRRSSRERGKSDRIDAIAVARAALAEGIASLPSAELAGPELDIRLLVDHRERLVRQRVGLNNTLQWHLHDLWPELELPGSSLFYGKWGPRIARRLARAEQTMRVRIARDELRRLRELTQAINQLETEIAALVAHAAPQLLREPGFGPLTAAKLVGEIAGAARFATDAKLARAAGLAPIPVSSGRTDRHRLDRGGNRQINAAIHRVAITRARCHPETIAFIARKKSEGKTHREAVRALKRHLARRIWQLLRAPHPVLETAPYPSTS

SEQ ID NO: 316921 - protein, 345 aa, unidentified
MTIVEARVITGGVDTHADMHVAAALDSIGGLLGVEEFPVTPAGYARLLGWLGGFGTVGLVGIEGTGSYGAGLARHITAAGIQVVEVDRSDRQDRRRQGKSDPLDAVSAARAAQSGRARGAPKGRDGAVEAIRALMVAKRSARSERVQTINQARSLIVTGPDDLRARFAGHTVAALVSELASLRPRPGAVVGYATRIALRELGRRAEFLDSQLERLDELIVPLVVGRAPGLLALHGVGPDTAALLLIAAGDHPARLRSEAAWAHLCAAAPIPASSGKVTRHRLNPGGDREANHALWRIVITRMSSHAPTRAYVERRTAEGLSKKEIIRCLKRYVAREVYRHLRPVG

SEQ ID NO: 316922 - protein, 375 aa, unidentified
MHRRRVLGDRIRYVGLDVHKEGIVVAVAEGGLRGEVRDYGRIANTPAALRRLAHQLGQDGLTLRFCYEAGPCGYGIQRQLSALGHECVVVAPSLIPKRAGDRVKTDRRDAASLARLHRAGELTAVWVPDPGHEAMRDLVRARLDAVRALRRARQQLSGFLLRQGCHYGRPAWTKLHRRWLAGLKFDQAVHHIVLEDYIAAVEAGEARRDRLTAQIEAMLPDWTLAPVVAALQTMRGMALVNAATLIAELGDLSRFANPRQLMAYLGLVPSEYSSGASIKRGSLTKAGNSAARRLLIEAAWTYRFPARVSRELRLRQEEQPRPIREIAWKAQLRLCARYRKLARNGKPAKVITAAIARELAGFIWAIARHVSPAAG

SEQ ID NO: 316923 - protein, 387 aa, unidentified
MNVVTDKSEPLTAIHTQLGAIFVSLELSRSSWLITSLSPGSGEKMSKHSVPGGDFAGLMERFAQLQKKARLRTGQSFRIIVIQEAGLDGFWLHRALQNEGIESHVVDAASIATSRRRRRAKTDKIDGETLVRTLLAYKRGEPRVCAMVKAPTPGEEDRRHLCRERKALTAERVRHVNRIKGFLFSQGISGYQPLRRDRRQRLEELQTGDGRAFPPHLKALVSRELDRLELLLKQIKTVEAARDELLAEEQTAKLAPAPMLLDIRGIGPEFAAILWSEGLFRHFENRRQIAAYAGLAPTPWQSGTVDREQGVSKAGNPRLRTTLIQLAWLWLRNQPRSALSLWFHERVSRNGGRRRKTTIVALARKLLIALWKYVTAGVVIEGVTMKA

SEQ ID NO: 316924 - protein, 317 aa, unidentified
MLYLAMDVSRDEIVFYADITGKHYTVPNDPEEITAFLKGHSFAPEDTLVGCESTADYHIVPCLAAIRSGYPVKVINPILTRQVINATVRKKKTDYSDAEIIAKLLRDGHGETVNEESFQQTKRTILRTEQKLVQCASDLKRIHHSLKNKSKAMDVSDAMEAIERCIGVLEDESDKLTDKATEKQDRQEEIIDSIPGFGQKLSAIISAEAGDIRRFPSSSQFKAYVGIDPKVTQSGNKMHTGHITKRGNPNLRCAIYLAANINRQHDPELKEFYEKKMNEGKSHRHAVCAVSRKLCERIYAIVLKNSLYEVRKDKNII

SEQ ID NO: 316925 - protein, 354 aa, unidentified
MIIIGCDFHTRYQQIAMAREETSELLVERRLHHESGEAQAFYRSLQSLREPVRVGIEATGPIHWFERLLAELGHELWIGDSAKIRASEVRKQKTDERDARLILGLLLAKRFPKIWVPTPAERDLRQLLWHRHKLVCLRTMLGNQLHFLAMSQGLCRKRKLFTKKGRAELTGLALGPWTRRRREELLKLLDQLDPPIAEVDRAVLEEAQRRDDAVLLMTHPGIGPVTSLAFVLTIGTVTRFCCSRKLVSYLGLNPSEDSSGQRRRLGAISKQGNTMVRWLLIEAVYPAVRKDLALRQDYQRLKFRRGHAVAKVAIARKLAVRMYWMLRSGADYAQLVRRQGSPGATLVDASPSLG

SEQ ID NO: 316926 - protein, 352 aa, unidentified
MQHFIGCDVHTRNQVVAWIDEQTGEIKKRRLEHEGQEVKEFYAQFPRGTVVGIEATFPAHWFERLMGELGHELWVGDAARIRASDVRYQKTDARDAEGILDLLRTGRFPRIWVPSLAERDLRQLLVHRMKQVRTRTQVKNQLHALAISQGVCRKGKLFSVKGRAELERLTLLPWAARRRKELLESLDRLDEQVRELDRAVEEAGRERQEVALLRTHPGVGMVVGLAFALTVGPIERFSNSRKLVSYWGLNPREHSSGGRQRLGSISKQGNTMMRWLLVEAAQTAARLDPQLRRTYQRLKKLKSSGLAKVAVARRLAVRLFWMLRTRNNYAQLVHMSGSPSSAVVPPQGGPKL

SEQ ID NO: 316927 - protein, 456 aa, unidentified
MKETELSMKIVNPYAAGIDIGSKTHWVSVDQIPGNVREFGVYTRDHQRLIEHLKSHQITTVAMESTGSYWQTLFHALQKAGFEVVLVQGSQTKNVKGKKTDILDCMWIQKLHTLGLLSSSFLLSDYLQTLRTYYSHREHLVEQMAKYVNKMQKALRLMNIRLDVAIRDLTGKSGRAIVDAILDGHRDPDYLASLAHFRVKKSKQEIAAALHGNWRDDLLFELRSCLKFYDAYKKEIVVCDQQIQAILLNFFPEAKLPTLENISPDKLNHKQINRNSPSFNVRQLAFAHLKTDLFQIPGVSHSTVLCLLCNMGNDIKRFSSAKRFASWLRLIPNNKLSGGRIISSTTPKGKNAIAIALRQAANSIGNQKEHPLTPFFKRIAYRKGRNAAVTATARKLAVIIWNMITKTQSYLHPTAELLVEKRKNAQVKNIKMRLFRLNLTDEEMAALFEKTSFPST

SEQ ID NO: 316928 - protein, 452 aa, unidentified
MSKRPRLLRSQQKLIGPFNVVNPDAAGIDAGSEKHFVSVPEDRSDEPVRTFGTFTEDLYGLADWLVECRIKTVAIEATGVYWIPLFEVLEARGLEVKLVDSRSIGRRNKKTDVLDCQRIRQLHTYGLLDGAFRPSDQILPLRAYMRQRRMLIDYAADHIRHMQKALDLMNLKLHTVIADITGETGLRIIHAILKGNHDPNALAAMRDPRCKNPVHVIARALVGNYRDEHLFALRQAVDLFETYQARIAECDRQLATELASFEKKADPSNLDKKNPKRPRKNQPRFEARTLLYQMTGVDLTAVPGLESSTILTILSETGTDMSPWPSEDHFASWLALPPNKPRTGGKVIKKALPTIQPNRASQAFRLAAQTLAKTQCSLGAFFRRIQSRLGWAGAIKATARKLAVIFYAMMKKKTPYREAGADHYEKRYQARLLKSLSAKALSLGYQLAPIMS

SEQ ID NO: 316929 - protein, 354 aa, unidentified
MDSIKYIGLDVHRDTISVAVLNADGKLVMQSVIATRASVILDFLHGLRGTLQVTLEEGTHSAWLYDLLVRRVAHLVVCNPRKNALLKAGNKSDAMDARKLAELLRAGMLSPVYHGQNSTAAVKHLGRSYAALTEDTTRIMGRLKALYRGQAIACPGKKPYGAHREEWLAQLADRGLQRRARRLYQELDLVQQLRREARQDLILECRKHSETKLLRTVPWLGPIRVALLIERVQTPHRFRTKRQFWTYCGLGLETRDSGEYRVVDGQIERKKKPVFIRGLNLNHNHDLKNLFKSAATTASGSDGPFRPFYENLLKKGMRAEMARLTLARKIAAITLHVWKQGEPFDAEYLKSQAA

SEQ ID NO: 316930 - protein, 342 aa, unidentified
MSVAVLGIDLGKNSCSLVGLDAGGHVVLRRRMRRETVLAFGAKMPSCVIAMEACCGAHHMGRALAAHGHTVRLMSPEYVRPYVKAQKNDDRDAEAIAEAATRPTMRFVALKSEAQLDVQTLHRVRDQLVGERTALMNQIRSVLLERGHVIPQGRAKLSACLSGLLETENDADLTPRMRTLVAEVYERWQYLDRRIAALDTEFAEQARTDENARRLTTIPGIGALNATALVAAIGDVSTFARGRDLAAWLGLVPRQVTTGGRPKLMGITKRGSKYLRKTLIQGARSAMPTLRQSDTHLGQWLRGLLARAHANTAVVALAAKMARIVWALLRHGRVYQAAAVAA

SEQ ID NO: 316931 - protein, 346 aa, unidentified
MEHYAGIDVSLELSSVCVVDAQGKIVRETKVASEPEALVAFFASLGFAVKRIGLEAGPLSAWLHAGLKRAGFDTVLLETRHVKAALSAMMVKTDRKDARGLAQLIRMGWFRPVHAKSMGSQEVRALLVARKQLLGRLIDVELSIRGILRGFGLKVGVVTRKGFEGRIRELVTGHITLERIAGAMLSARATLKVEYGKLHKMVLTIVREDAVCRRLMTVPSVGPLVAITYKSAMDDPNRIAKSKAAGALFGLTPKKYQSGEKDVTGGITRTGDEMVRTALYEAANVLLARITRFSKLKRWGMDVAKRRGSKRAKVALARKIAVILHRMWVDGTTYRWTEAKPIAAQA

SEQ ID NO: 316932 - protein, 340 aa, unidentified
MKLCGAMDLHSNNNVTVLSNEKDEVVYRKRLPNDLKLILEQLAPYQSEIEGIVVESTYNWYWLVDGLMEQGYRVHLANTAAIQQYNGLKYTDDDSDARWLAHLLRLGVLPEGYIYPREQRPVRDLLRKRGQLVRQRTANLLSIQNLFTRNTGSSLSANEIKGLQVEDIEGNVAVSDLALAIKANLAVMQSADEQVQILEQTVTGQVKLRPEFRFLKLVHGIGQILALTIMLETGDIRRFPSVGNYASYCRCVGSQKISNGKKKGKGNTKNGNKYLSWAFVEAANFAIRFSPKIKSFYQRKKSKTKGIVALKAVAHKLCRACYYIMRDRVAFDVTKAFGQK

SEQ ID NO: 316933 - protein, 403 aa, unidentified
MNNVAGIDVSKGKSMVSVLRPFGEVVAKPFSIGHTGSELKELADYLKSLDGETRVVMEHTGRYYEPVARFLHDEGVFVSAVNPKLIKDYGNNTLRKVKTDKADSRKIARYGIDNWAELRQHTPMDTIRMQLKTLNRQQSLYTKTKTMMKNNLIALLDQTYPGVNALFDSPVREDGSQKWVDFATTFWHVDCVRNMSLTAFAERYRKWCKRHGYNFSQSKAVEVHAGAQDLIAMLPRDALTKTMVRQAIDALNAISASMERLKAEMQALAAQLPEYPVVMAMHGAGDSLGPQLMAELGDVTRFTHRNAITAFAGVDPGADQSGTHEAKSTRVSKSGPPELRRALFLVMDCLLKTQPQDDPVYRFMDKKRAEGKPYLVYMTAGANKFLRIYYGRVKEYLASLEGN

SEQ ID NO: 316934 - protein, 403 aa, unidentified
MISVGIDVSKGKSTVCIMKPGGEVLSAPFEITHTKSELLDLINIIKSQNEEVRVVMEDTGHYHLPVATLLVDNDIFVCSVNALRMKKYCSQSIRRAKTDKIDSVHIASYGIAYWNELQPIPCSDDIYKELQLLARQYYQSVALLVKAKVNFSNLLDRVMPNIQSIITDNSSNSKLTDFVARYWHFSRILEMGEKRFISDYCKWAKKKGYRMCERNAKEIFALAQNGIPVLPSSQSTKIVITEAVRVIHELESSRDTILAQMQSFAKTLPEYSVVREMPCIGNVLAPRIIAEIGDVRRFKNKHSLIAYAGIDAPPYQSGSFNATERHISKRGNSYLRKTGYEIMQSLIKHKPENDSVYDFIVKKRCEGKCAKEVMIAGLNKFLRVYYGKVTELYDNLEYCNLTA

SEQ ID NO: 316935 - protein, 411 aa, unidentified
MEVLHEHCAGLDVHKKTVVACVLHSGRDGITRRETRTFGTMLSDLEKLRDWLKQESCDCAAMEATGVYWKPVYNVLEEHLQVLVVNAEHIKAVPGRKTDVKDAEWIADLVRHGLVRASYIPERPQRELRELTRLRAAFIQDRSRAVNRLQKTLEGANIKLASVLSDVTGVSGQRILDALLQGEDDPEVLVGLVHSRLRPKLEALKQALMGRLQGRLRFVVSQELAQIRSLDDQIVACDEEVGSEMRPFDVDLERLDEIPGIARRSAENIIAEIGVDLSRWPTLAQFSSWAGACPANKASGGKRKRAGVRRGNPWLKRCVTEAAWAASRTKNSYLGARFRQLKASKGHKRAVVAVAHEILTIIYYLMTRNRHYEDLGVRYLEDRNKEEVQRRATRQLQRLGYNVQLVPLASE

SEQ ID NO: 316936 - protein, 359 aa, unidentified
MEQKRFVGIDLGKRTYEMKIIGINGKVTGTNGQTNPSGRKLLYRKLLATDRVAIEVCSLGMVMAKEIQKEVGCEVVLLNPSQLALIYRSLKKNDKEDALKLARLVQKYTNEELPKVELPTEHEENLRQILTEIRQLKHDRTKEINRLHAIFVECGITEIKRKDLATIDNRNNCIKMLKGIALSQAERILKKMELIESQIQDVDVLLDKEIDGDKNIGKLTEIPGVGKQLASAYVAFMGDGSRFSNASKIGAAIGLVPRLDMSSTVCKLGHITKCGNKNLRTLLILAAWSHVRSRDGGALKDKFLYMTRFQSKGKKIAIVAIARKLAELMYILLKNDTSYEKRPSPTISQLVDEAMKFAS

SEQ ID NO: 316937 - protein, 388 aa, unidentified
MFAGIDVASERHMLARLDAQGVPLGKPVPITEDRDGYDTLLHLLGPPPVLVAMEATGHYWKNLYAVLAATGHHVALLNPLKTRRFQDSGLERTKTDAIDAAGIARFAFEKRPEATQLHDAAAEALRELVRHRDRIRQDFDDRVRQLHRLVDLGFPEFTRHVRGMDSMLATALLSECPTAHDFARATPKRLAKLRYDGRHLVGAERATQLIEAAKRSVGQHHGPAYRLQARHICQDLDMWRRRLGDIERDIDGLLESNEVGQLLLSIDGLGPQTAARIIAAVGDPARFKSAAAFAAYVGVVPGLRQSGKNGSRRAACAPMGNARLRRALWMPVVGAVRRNAWLKPFYDSLIARGKPPKLALVAAMRKLLHAAYSVTKNRKPFTIKLAET

SEQ ID NO: 316938 - protein, 322 aa, unidentified
MGAKIMATADVVVGIDVAKEQLEVMVLGVAWTSTQFDNDVEGHSALAAALAPLGVQLVVLEASGGYEAAAACALQAAGLSVAVINARQARDFAKCLGRLAKTDRIDARTLADLAAVLLQQPDAARYIRPLPQAEQQDLAALVTRRRQLVAMLQSERLRLPLARPQVRPSIEIMIKAIRAQLDDVEAQMQQQVQFHHAKANQLLRSLKGVGPVASATLIAGLPELGTLTRRQIGALVGVVPYAHDSGTMHGRRHIAGGRAELRHLVYMVTLVAVQHNPVLKAFYQRLVAAGKKKKVALVACMRKIITILNAMVRDQQHFIATA

SEQ ID NO: 316939 - protein, 343 aa, unidentified
MKFIGMDIHSATFTVAVMHDRGAAKLVRKFDTSEANLIKAANLVTSPKTMVVEETGMAEWVKAVVDPYVDRLIICDPRENRWIAGDEFIDDARSATKLADLARMGKVKEVYHPEGSLSDMRDLFITYHHLSNHIIRSKNQLKAVFRRVGISTKTQSVYEVNNRDKWLARLDQRPELRFRAVQLYHLMDLLDEEKKKTKGRLSQRARKHPAYQLLKTIPGVGSVIAAGYLAMIVTPERFSRKNKLWRYAGFSNIRHDSDGKLYKDTPSRSGNRILKWLVSQQFRAAVLRSRKANSFKTKYLEMTKGHGSKRVARRHVCRAILSVTRAVWMKGEPYNSGNMTSSS

SEQ ID NO: 316940 - protein, 326 aa, unidentified
MNYSYFVGLDVGKKSFDASLMSSDEEELGHRRFANSESGIHCLLDWVSSRVTTIDETLFCAENMGSYVTGLCSCSQQLVFSLALECPLAIKKSIGLQRGKNDRVDAFRIASHAVSRHRKLKLYKLPDKNLVQLRAWTCIRNNLVKQKVSVNKLLEITSETSVLTNLSACRTFLEEQLSMIKEKISRVEQEMEKIINSSVSLAENYELLTSIKGIGMINAIVLLCVTDNFRRFSDPRKFACYCGVAPFEHTSGTSIRGKTRTSQLANREVKVYLTRAAITAMVWDPQLKAYYKKKTGEGKHKASVINAIRAKIIARCFAVIKRRTPF

SEQ ID NO: 316941 - protein, 378 aa, unidentified
MRFYNQAHRFYCGVDLHARTMYLCILDHRGQVVLHKEVPCEPAAFLEAIGPFRDGLVVACECLFCWYWLADLCQAQNITFVLGHALYMKAIHGGKAADDKTDSAKIAHLLRGGNLPIAYVYPKGLRETRDLLRRRMYLVHKRAEVVAHVVNTNSQYNLPPFGKKLIYARNRQALKIAQRFSDASVKKSIEVNLRLLDCLDDLIADVELYLERTVKVDDADTFYRLRSIPGVGKILALVLLYEIHDIKRFAGEGEFLSYARLIRPLKTSAGKVKGGGGAKIGNAHLKWAFSEAACLLARESDQAKRFLARKEKKHGKPKALGILAARLGRAVYHMLRQNKAFDPKRFWNGEPGVTPAQLQKAAVKRPRRAKGSRCVLEA

SEQ ID NO: 316942 - protein, 341 aa, unidentified
MDRRRYSVCCGADIHKKFLIATILLMDGTKLTKRFSMDLKSLFEFRDWVIANGCEAVAVESTGSYWVPIYRVLEGYVELIVANAYRIKNVPGRKTDTIDSEWIAELCLNGQIKPSRIFAKDARDLRSLTRARERYVDDKTRVKNRIHHILDSNCISISSVLSNIFGKVGRYVLNCLLEGIDIEEIIEGIPVTRIKKKSDQIREAIAGQLSGTDIILIRGYLDQIDSIQKNMEELESEIRKRIAPLRKNLAIVMSVPGIGFISAAVILAEIGDFNDFDKAEQLAAWCGLVPSVYNSADKNYTGRITKQGSGHIRRILVEVAHVIARTTGKSKAQEFLPQDTS

SEQ ID NO: 316943 - protein, 353 aa, unidentified
MKPKMEPNTESLAVIGVDIGKEVFHLVGLGVDGKIAFRRKIRRLGLKDAFERLPPCIVGMEACLSAHFVSRVLRALGHEPRIIPAIYVKPFLKGQKNDYNDAEAIAEAALRPNLRVVQEKSQDQLDLQACHRVRSRLVSRRTATINQIRAFLIEQGIAVRAGPRALRNSLFAILENRKDEISPRMASLILGLYQDWCCLDERIEAVTGEIEDLSRAEATCQQLMSVPGIGPLISTGIVAAIGTGEAFERGRDFAAWLGLVPRQHSTGGRTILGRISKRGSKYLRTLLIQAAKVLLMRPHNWDRYSFGGWLKTASERLHPNKLAVALANKLARIAWSVLRYDKAFDTHLEVAAI

SEQ ID NO: 316944 - protein, 345 aa, unidentified
MQPMYYIGLDVHKQKISYCVKEGGGKVFAEGWIAATRFDLDRWRKTLPQPWSAALEATMFSGWIYDQLKPHAAELKVAHPLMLRAIAAAKKKNDRIDANKICDCLRCDFLPQSYMAPTAIRERRRTLRYRNLLVRQMVQMKIKISTLLMEAGVSYNKSKLHKAGYFRDLLATNPDINESLRSLLRQCRETVVRLSKMETALIHSLQQDRLLVERVERLMSIPGIGPITALTWALEIGEVQRFSSIKKAISYCGLCGDEQRSANSVQRTPISKQRNKHLQTTLIEAAKMAPRYSPTLAMLYEREEQKGNANRATLAVARKLVAYLMAVDRGKTHFLVIDQETRAAA

SEQ ID NO: 316945 - protein, 318 aa, unidentified
MLSQTPTQHHFLGADVAKETITFHCPAQGKTQTIRNQARSLRAYFNKHTNQALVLEATGGYEAKAIELALSLGMTVYRVNPYRVRSFMRASGQFAKTDELDAQALATFAAQHHNNLRPFKQPSDNEKKLCQLTRRRDELIVMRTQEKNRLQAPDNQNLQSDIKKHVRFLEKQVQEIEEQIITLVQQDDALTHKKEVLTDVAGVDDVTATNLLAALPEIGTLDGKGIASLAGLAPFAKDSGTKTGRRRTGRGRTNVRRILFMAALSASRYNAQIKEFYNRLIKNGKKPMVALIAVARKLLVILNAKVRDALLQKLVQQS

SEQ ID NO: 316946 - protein, 375 aa, unidentified
MATIARLGIDTSKSLFQLHGVDEREEAVLRKQVRRGQFLGFVAKLAPTKIGVEACGASHYWARQLQALGHEVVLLPPQHVKPYVGRNKNDKIDAAAICEAMSRPRVRERFVAVKSAEQSAAQMLLGTRDGLLHRRTQLSNTIRGHAAEFGLVTPKGLAHIKPLLERIAADDTVPALAKELFATLDEEFAELAPRIARLDKKLKAFQRSDELCRRLVEVPTIGPVIASSMVVKIGNPAAFRSGRRCAAWLGLTPKDHSTAGKMRHGGITRAGDEGLRAALVSGATAYIQQVKRGRTRPSPWLAQLLKRKPEKLAAVALANKTARIAWKLMVSGERYDRARAEAREGLGATQHRGSTPSPSLHPHTADQGASTMTVA

SEQ ID NO: 316947 - protein, 284 aa, unidentified
MTDVFVGIDVSKDRLDVAARPSGESWQVANTELGIATLVKRLAKLQPTLVVLEATGRLESAAVSALAVADIPLAIVNPRHVRDFARSTGKLAKTDKLDAQMLARFADAVRPEPRPLPDETQQRLEALLVRRRQLLGMVTAERNRRRRAPVLTRAEIDEHIAWLQVRVEALEDELNKTIRSSPLWREKVALLRSVPGVGPMLAATIIAQLPELGVLTHKEIAALVGVAPLNRDSGNWRGKRTIWGGRPQVRAALYMSALVATQFNPLIRSFYLRLWPLGSQRSWR

SEQ ID NO: 316948 - protein, 399 aa, unidentified
MKASGLDVHKDTVFCAIYDGKSYSSVKEFTTTTVSIRAMGEYLRKNGVNKVAMESTASYWVPVRDILYEMGFDLLLVNPLQIKQMPGRKSDVKDAQWIAELLHKNMLRGSLVPQPLIQELRTYTREYRNLVNQKTKVLIQMDRILVMCGFRLSSCISSIDSKSFMSVVEALIRGETNPDTLVSLVYGNRKNKESGKLKECLTGNMKSHHRLKLTTSKQQFDLFKQQLELYLTEMTKFCDEHFSKEIQNLTTIPGVNHISAMIIIAETGGDMSAFENSGKFTGWTGMRPRNDESAGKFKSTAITKGNKHLRAIIVQVAWAASRTKGSFFKEKFTKLVIRKSRKKALVAIGRKILVVVWHILKENTQYNPNLVRIYDPEKLEQKIKYHVREIERAKKLMVC

SEQ ID NO: 316949 - protein, 452 aa, unidentified
MPAGKDITMHYQKVLKMPESIPYLSVGFDVGADFTWMSIMLPNGILIGKPFKIIHSDPQSRELAISKIKEAQEMYSLESRCFLESTGIYHIPLLCFLRDKGFDCAVINPIITKNSTNMNVRKLHNDKFDSKKAAKVGLDASLKASIVPDDAIIDLRNLVRDYYYFKDLQSAIVLKLHAELKVSFPAYLNVFSKVTTQTSLKLLEAYPLAADMLAAPKDELVETIRSTARFGETYALARYDAICTAAKDAAVFGRALPSNALRIRLYIKMYREYQAHLDSILEELHQAVGKLEGTPDYDRISFIQTLHGVGFLSAVVLIAQMGSFDLFSSPKKLYAYFGLDPGVNDSGKFHGDRVHMSKRGSSLARRILHMVAINNLKVDKATKTPVNPVIYDYYTRKCASKKKSVAVGAVMHKICNIIFAMLRDNKPFELITPEEHRERYAAEHPESVNTAA

SEQ ID NO: 316950 - protein, 436 aa, unidentified
MNMKVLQTKRHLIDGKIIIGIDPSKKKHQAVALDPKGIPMSNSFAFKNSYEGFNEELWKKLDPIIGKPSPDRVIFAIEVSINFWQKLSYFLKHKGFTVLLVNPMVTKYERKRISRNFSRTDPRDALLVANGARQGYYHIYREFSPEYEALHRLAITYDKLKKQLVAAKQRLMAQTELIFPELMDLMDIDTDSARYLLSMAMTPQDFKDRIGLNEASRMATLSRRHYGHQTVIDLKKSADKSIGIPMVGPGHIAERLTMNVWLQQLLVLRLQQKQILDEMTRLAKQTPWYAILTSIMGISDVSASRFIAENRNLSELPHFKKIQAFAGMSLKIDESGEYSGNRHITHIGNPRLRAILYKMTEETKNYVPEVRIRFLKRQMKHRWYTENVVACSSNLLKLITALIKENRTYQEDPEKIKELKKIEKKYQHYLAEKKVA

SEQ ID NO: 316951 - protein, 365 aa, unidentified
MNTLPTNIPTIETPLVSSEKRAKRIKLGVDVHADHYVVVRQIDEAAAQPPQKFTPELFLVFARKQLALAEEVHCCYEAGPFGYVLHRRLMAMGVHNLVVRPRNWSTYGEAVKTDGRDAGALCSCLDRYLAGNRGALAPVWVPSEEQEQLRAVGRQRQSLLRERVRLTLQGKSAAVLCGLRLPKEWWEPKRFAALVGELPVPLATQLHCWQRVLVCIDTELAVLTTQLEQRQTAARPLGVGALTLELLSREVGDWHRFKNRRQVASYTGLCPSEHSSGATRRQGAITKHGNPRLRHLLVEAVWRLFKFQPHYRALVKWHGELLDPKLTRSRKKKIIVAVARQLAVDLWRLATGRTDAATLGLKLNT

SEQ ID NO: 316952 - protein, 341 aa, unidentified
MEQANTIGLDIAKHVFQVHGADAAGHVLFRKRVTRAKLIGFQAAQAPCIVAMEACAGAHYWAREISKLGHRVRLIAPAYVKPFVKRQKNNAADAEAICEAAQRPSMRFVPVKTEEQQANAVVFRARDLLVHQRTQCVNALRGHLFEYAYVFPQGITHVATLVALVEDPRSSLPKNVRIILKLLVDTFTALEEQIAALDAEIKQRSKTDPTARRLMTIPGVGPIASTAITALVPAAEGFRAGRDFAAWLGLTPLQKSTGGKQKLGAVSKRGERTIRRLLIIGASAVVQQASRRGAPKGSWLAQMLARKPKMLVTVALANKMARIVWALLVKGGIYRTPVAAA

SEQ ID NO: 316953 - protein, 341 aa, unidentified
MNYYVGIDVSLEASSLCVVDANGKIVREGKVASEPDALIAWLKGLKLELTRIGLEAGPLSQWLFAAMRQAGFAVELLETRHVCAALKTMPVKSDRNDARGIAQLMRLGWFRPVHCKSMAAQETRALLTARKLLQTKLHDLELSLRGILRGFGLKVGPTTPARFEERIRELVAGHPRLEVIVKSLLAARGALRREFDHFEKQVRDAARCDTRVRLLTSIPGVGAIVSLSFTAAIDDPARFKSSKRVGAYLGLTPTKYQSGETDIDGRISKIGDASVRAALYESAHIILTKPLKGCTALKSWAMKIAKRSGMKKAKVALARKLAVIMHRMLADGTSFRNAAAV

SEQ ID NO: 316954 - protein, 347 aa, unidentified
MVTVGGDCHKRTHTLVAVDDNGQQVGAKTVSAVPARHLEALDWARQWPERRWALENCRHLSRGLETDLLLAGELVLQVSPKLMAGVRRSARESGKSDPIDALAVARGALRESGLPVARLEGASREVKLLLDHRDDLVGERTRIQNRLRWHLHEVEPGFDVPERSLDRKVVLKRVAKVLAVHRGIAAGIAVELLESVRQLTERINELEAQIRVLVSHLAPKLLELDGCAALSAAKLIGETADITRFTTPARFAMHNGSAPIPVWSGNAERHRLNRGGNRQLNAVLHRIALTQMRLGGRGHDYIQHRKACGDTKREAIRALRRRISDEVYRRMWQDATRVTRDHMPAAA

SEQ ID NO: 316955 - protein, 402 aa, unidentified
MAYDFVIGVDVGKYFHHACVLDPQGRQVLSKRINQHEGSLRKLFGQFLADNTSVLVIVDQPNNIGRLTVAVAQDMGADVRYLPGLAMRQLSRIHVGNCKTDVRDAYVIAHAGLNLPDALRSVDRVEEVFIQLKVLNGIDEDLARAYTRLINQMRSALVGTYPAFEHVLRGQMIHRKWILHLLAKYGGPTKIRRIGRTRLKAFARKHRARNPEPVIDAMLAAIHEQTVSIAGAEYAELGVAMSAKDALAKLEHRKEIEAQVLKLIQDIPQTEILLSMPGIGPRSAAQILMTVGDMSDFPDAAHLASYAGLSPRTNQSGTSIMSNSPNRAGNKKLKNALWQSSFASIRFHERSRQFYERKRKEGKRHNAAVVALARRRLNVLFAMMRNGELYRDISTVQEAAAA

SEQ ID NO: 316956 - protein, 403 aa, unidentified
MKKARDPRVVGVDVSKKTLMVSSYGVGKKARAQRSVVADEAGVAALAAELARDKVRVVAMEATGGYERRLLKALDAAKVPAVLLQPERVKNFARSQGTRAKTDSLDCECIANYASVTDVPLWVAPSAALEAAMALGRHRDALIRDRTREKNRLQTATVVAVREPITTHIAFLTKQARAVEKQLLAHIMSEPQSVARFELLKSVPGVGALTAARLVAELPEIGEIGISKLSSLAGLAPMNKDSGEHEIKRKYAPGRRQVRTALFQAAHSGVLFNPVIRAHYVRLISKGKERKVVLIACAHKLLRILDAMVRHDERWDASRHPAGLAAMAVAESEAIEEALAELEVGPTEFESEQASNPATKPTITRRTSTKTASKPAAKRTAQAPVTSARSRRPTRPVVEPKHG

SEQ ID NO: 316957 - protein, 327 aa, unidentified
MVLLEQKLSTTPQAMREVFGGMPCSRIALETGMHSPWVSRVLSELGHEVIVAHVRNVRLIGESRKKDERPDAQTLARLARIDPQLLCPVKHRSAKAQADLSVIRAPAGLVRARTALVNTARGLAKSYGERLRGCNVRNMNPEKAEGLSPELQKALEPLLAGIESLSERICECNERIEDLAQKNYPQVALLKQIKAVGTLIALTYLLTLEDPHRFRKSRDVGCYLGLQPGRRNSGQSEPQMHISKEGDPYLRTLLVQGAQHILGPFGVDCDLRRWGLKIAERGGRNGKKRAIIATARKLAVLLHHLWVSGEVYEPLHNSSPTAMPAAA

SEQ ID NO: 316958 - protein, 318 aa, unidentified
MAIERWLGIDVSQAVLDAHLLPSGETWSVSNDARGIKTLVGHLKAAQGVLVVLEATGGYQHEAAVALSRAGASVAVVNPRQVRDFGRATGQLAKTDRISAEVLAMFGERLRPEARFVPDEELDLLAALIQRRRQLIEMLGAEKNRLRVTRAPEVQRELKTHVRWLEQRLKNTEKKLDGAVRKSPIWRAKDEILQSTPGVGSVVSRTLIGELPELGKLNRKEIGALAGVAPFARDSGTLRGKRTVWGGRASVRSALYMAALVGVRHNPVLREMYQRLRGRGKLPKVALVACMRKLLVTLNAMLRDGTRWQEVRTYPTIP

SEQ ID NO: 316959 - protein, 350 aa, unidentified
MDTNTSALASIGIDIGKEVFHIVGFGTNGKIAFRRKIKRLALVDTFKGLPSCVVGMEACLSAHFVSRALRQLGHQPRIIPSIYVKPFVKGQKNDYNDAEAIAEAALRPNLRTVREKTQDQLDLQALHRVRSRLVSRRTATINQIRAFLIEQGIAVRTGARALRNSLMAILENRQDEISPRMRGLIADLYEDWVGLDERIETIAGEIETIGEKEANCQRLMSVPGIGPLISTAVVAAIGTGEAFERGRDFGAWLGLVPRQYSTGGRSILGRISKRGSKYLRTLFIQAAKVILMRPHNWERFSFGAWLLNATPRLHRNKLATALANKLARIAWSILRNEKVFDVPRREAMAI

SEQ ID NO: 316960 - protein, 391 aa, unidentified
MVCVGIDVAKDKHDCFILNSEGEVLADVFTIANNRNGFETLLRRIRDCTSPIEIKVGLEATGHYSYNILGFLLEKGLHTFLLNPLHTNLYRKSLSLRKTKTDRIDVRTIASMLMSDVELKSYTNTAYHSEELKSLTRYSFDRVQMRAELKRPVSRLVTILFPELEALVPTLHMASVYAVLCEFPGANQITSSNLTHLKTVLLDASRNRYNRDKAVEIREAARRSIGSVMPAKSLELQHTLRLIREPDKEIDEIEAAIKAIVDEMAPPILTIPGVSYRMGAMILSEIGDFSRFDSPDKLLAYAGFSPSTYQSGKLNATGTHAHMEKRGSRYLRYALFNAAQCVCKWEPSFKAYLEKKRAEGKHYFVAISHAVKKLVRLIFALQTSGRAFQPV

SEQ ID NO: 316961 - protein, 407 aa, unidentified
MVCETGKENEELYAVSFYDLRGRIGEWSKSPKRVDSGGRGVRMRIDVGVDLHKTQMTVYVRTGKDEGEGGEYATGEEGYREFLKALGKWRSKGADVRVAVESTGNTRYFMHRLETRGYPVVVINTMKFKVITQSVKKTDKHDACTIAEFLSKDMLPASKLCSEKSEEVRRLLKVRSMLVRTRVSIKNQIHGLLVSRGMEDTRASLQSKRGRQKIQDTLAGAGNGLVVQPLFETIEVLGEKIKAIEAQIEKLLAEDKAVKLLETIPGCGPVTAWTIRAYTDDIRRFASYKQYSSYAGLVPWVQCSNETEHYGRITKRGPEELRTAFVQLVMGIRRSRSTVSWRLMVQYESMKRQKGTGKSIIATARKMSKIVWYMLMREEEFKTSLMVDTKLDSVIQSMREEALCEST

SEQ ID NO: 316962 - protein, 412 aa, unidentified
MSVVQFTQVLSRGCGMDIHKKVVVAAVQGEGICKETRSFDTFTRSLTQLREWLVSLGITHVAMESTGVYWKPIYNVFEGFIPHIWIVNARHIKNVPGHKTDKNDSEWICQLLMAGLLKPSFIPPKAQRELRDLTRYRRKLIQSVSANKNRIIRILEDGNIKLSSVLSDTSGATAVKLIDMLCDGKQITLSDIESVRHGRCQHTKEEMLEACTGCLDEHKVYMLGKIRECNASLKEDILDFDKRIKDVSSSYHDAIERMCEISDIQNRVCEDLVAEIGLDMSNFPTSAHLCSWVGMCPGNNESTGKKKSGKTNHGDKQVKETLVEAAWAASRAKGTFFMERFNRLAPRKGSKKALIAVGHSLLKCIHYVLSTGRRYKELGDNYVPNKKEQKRKEYLKKELQKLGYSVKLSKED

SEQ ID NO: 316963 - protein, 348 aa, unidentified
MQFYTGQHRYYCGIDLHARQMYVCIVNQEGAILVHRNIKTDPTGFLELIAPYRDDLAVAVECIFTWYWLADLCAREGIPFVLGHALYMKAIHGGKVKNDRIDSQKIALLLRGGMLPQAYVYPERMRATRDLLRRRMHLMRFRADLIAHIQNTASQYNLPPLAERASKKSERPAIPAHFPDPVVRQMIQLDLEVIAHLDEPLRVLEQDLALKAKAHDAFAYHLIRSVPGIGRILTLVILYEIERIERFATVGQFASYARLVKCAKESAGKRHGYSSKKIGNAYLKWAFSEAAVLFLRNNPPAQQAIQRLASRHGKGKALSILAHKLGRAVYVMLRKRQPFDQERFMASL

SEQ ID NO: 316964 - protein, 293 aa, unidentified
MKYYTSTTEFNCGIDLHARQMYACVMDRPGKKRVHTNIKGNDFGYFLKRVEPYRHDLTVVCECTFNWYWLADACFEAGIEFVLAHALYLKHIHGGKNKNDRIDSEKLAHLLRANLIPPSYIYSSERRPVRALLRQRMSYVWERATLKTHLSMNQTAEGLVPARKSGHNRDIWEERILEQYANPLHRFAASCDMNMIRAYDVQIEKLEAEIIRQAKKGMGRDYHLLLSVPGIGRVLAMTLLFEIDTIERFPTVKDFLSYCRLVKGSVASAGKIKGLTGGKMGNAICDGSSVKRR

SEQ ID NO: 316965 - protein, 436 aa, unidentified
MRGCRCSMIMGFTKPIEHFNLLRKKVITMNTLYVGIDVSSKSNVVYLMLPDGSKHCNFSVANSHEGSTQLVKRILSALASHSLDTVLIGLEATSVYGDNLVYFLREDATLAPFNRKIHVLNPKQVKKFHDTYNDLPKNDYVDSFVIADCLRFGRINKEVYMGDYRYKALQNLTRARFFAVQNLVKEKQRFMNVLFKKYSTMTQEKVFSDTFSTTALAVYDEFESAEALANMDLHELTDFIMKKGKNRFPDPDAVAKAIQKAARSSYRLPKTVNDSVNQVLSISITSMKALESQIKEFDKAIKAQMELLPNVLISIPGIGPVYSAGIMAEIGDINRFNSQAALAKYAGLAWKQHQSGGFEAEVTRLIPSGNRFLKYYLCEAAFSLVRCDKEYSDFYHLKYKEVNRCQHKRALALTARKFVRLVFRLLKDNRLYCPAK

SEQ ID NO: 316966 - protein, 366 aa, unidentified
MLRTQQEAETGVGVVLGVDTHLDAHVAVALDQLGRRLDAVSVPADARGYEALVGWAEGLGPVVCAGIEGTSSYGAGLARHLSRAGIKVVEVERPKRRHLGRNGKSDPKDAEAAARAVLAGDVAGVPKSGDGLVEMIRALRAARRSAVKARSQAANQLRSLRVTAPDGLRERLRGLSTKRLVAAAVRFRPGALPETPEEATKVALRSVARRHRVLSEEIAELDAQLDRLVAEAAPGMLALLGVGTDHAATLLVAAGDNPQRLQSEASFASLCGASPIEASSGKVMRHRLNRGGNRDANRALHLICVVRMRYDRRTKLYVARRTAEGKSKREIIRCLKRYVARELYRVLVSDVLHPPIGSQTMVETSM

SEQ ID NO: 316967 - protein, 365 aa, unidentified
MNTIYIGVDFHARQQSICYLTTESGEIVSHKLEHRKKDEVRAFYAQFSGRVIVGLEASGYTPWFEQLLEELGHEVWLGHATEIRRRARWRQKNDRRDAELILDLMIHDEFPRLFRPAPQSREILRMLRYRQKLIKIRTMGKNSLQALALQSGLAKRGYLFTKSGQQELRAARMSPAMQWQRDQWLQLLEPINERLVETMLWLKQQSQGDARVSRLRTHPGIGLLTSLCLVHTLWPVTRFRNQRKVTAYVGLEPMERSSAERKQFLGISKAGSRVLRHLLVEAAHTAVRKDDDLKCFYQRLAARRGRPKAKTAAARKLLIRSYIMLRDEIDYAEFRRRAVAARLARRYARPNMPGPLIGQPASPAD

SEQ ID NO: 316968 - protein, 323 aa, unidentified
MTTTTKLYLGIDVSKAKLDCALALKDKYRNKVFANTATGFAELSAWLTKHAEVPVHVCMEATGVYWEAAAEYLADAGHVVSVINPALSKAHGQSLGLRNKTDAVDARLLASFCREKQPAAWIAPSENERKLRALVLRHQSLVEMQTQEKNRIQVARESVRDSLHTHLDWLGEEIKRIEQAITQTLDDDPDLREKRELLDSIPGLGERTIAVLLAFDVGRERFDSARQFVAFAGLNPRHHESGTSVRAKPRMSKVGHAFLRKALYMPAMVTIYKTAWGKAFRQRLHANGKPPKLIIGAMMRKLAQVAFGVIKSGKPFDQALHGA

SEQ ID NO: 316969 - protein, 381 aa, unidentified
MLYVGIDVAKNKHDVTVIDNTGKMVLKPITITNRKQGFELLHNTLKQLRQDCLIAMEDTGHYALNLLTFLHQNNYKIYTYNPLLIKEFTKSLSLRKTKTDKKDARTIALKLLSDPNRALFMHDNRQEELKIMTRHMNRLKKHQSDWKVQYTKCLDIIFPELHQVVTKHSDYVYELLKCFPSPEKIVTAGFDKLIEIKRLTAKHALDILELAPNSIGTTSFAREFELVEIIENIQHYEKLIKQAEKKIDELMAELNSVITTVPGIGNRLGSVILAEIRNINTFTNPAQLQAFAGLEPSIYQSGQLDTQGKMVKRGSSHLRWALIQAAIKVARYSPTFKAYLRIKLEQGKHFNVAISHVAKKLIRVLFRLLQNNEAFEEDKLR

SEQ ID NO: 316970 - protein, 428 aa, unidentified
MENMDINRIKEFRQFKKEIRGSEQHLIVGIDIAKDKHHAFLGTANGHTMQKGLIVENNLSGFSYLMGRVQFHMDRDGFEAVVFGLEPTSVYHKPLAEFLIEQGCLVVYATNEAIKKNRSLLDGRWDKNDMKCSANVADLISQGKCQYYDLPDIKLRDLRNLLLLRKRLRKQLHGSKMRIRNNLVAQYFPELDKFWKTREEENLAIVRWCLAPAKIAAMKFEDFCCLVTSRNRGDRQKQRLFKIWDSASFSIGCFAGNGLELEAKVLVDTVKLIQAQIVEVDGATEAICEQFEEYQYLLSIPGFGPYVSAVVLAAIGNAHRFENTSQILRLAGFDLCAIRSGKKSATAVPVISKKGKADLRYAVYQAALVASSLTTHFAHYYHRLLDGRQREKGIRTKMRVKLAAKLLVIAWTLMKKKESFNPDYIISQ

SEQ ID NO: 316971 - protein, 347 aa, unidentified
MIIIGCDLHTRFEQIAMLDTETGEVVEKRLEHEKGEARRFYAGLKEPALVGIEATGYTRWFAEMLAELGHELVVGEAGKIRAKETRKQKHDRRDADHLLNLLVRGDFPKIWLPSAQERDVRVLLEHRHQLVELRTRAQNGLQAIALSYGLRRRGRLWSERGQEELKKLPLREGMGRRREDLLRLVRQLGVWIKELDQRIEQEVARREDAQRLMTHPGVGPQTALATVLVLGPVERFPDDRHLTSYLGLIPREASSAGRQHFGHLTKQGNRLLRWLLVEAAQTASRYDPRLRRAYRRLAFRKGSALAKVAVARKLAIRLYIMLRDKIDYSEFCRRGSHAGMLEDVALV

SEQ ID NO: 316972 - protein, 345 aa, unidentified
MDEAYDGRQVVGMDLHRRRSVLVRMSMDGRKLETVRITNSPGALRAVLARCGRRPLVVLEATYGWYWAADVLAGAGAEVRLAHPLGVRAFSYRRVKNDERDAADLADLLRAGLLPQAWIAPPEVRALREVVRYRHKLVGQRTSCKDQVHAVLAKLGVPVTHSDVFGTGGGLWLDQLVLPEPYAAKVASLRALIGVLDGEIARLGQRAAGVLGADPGYAALRELPGIGPVLAAVIIAEIGDVTRFRRAGQLCSWAGLTPRHYESDTKVIRGHVSKQGSKMLRWALVEAIQHQPAGTRPRQARDAIIARRGKEARNIAKTAAARVLLTQVFYALRDGHVRSAGRPAA

SEQ ID NO: 316973 - protein, 321 aa, unidentified
MTYIGIDVSKATFVVAYSSAKNSKTRTFKNTAKGVHEFIQTISAGSHHCVLEATGNYSSLLVYLLSEAGITVSLENPLKIKHFSRAMLAVVKTDEIDAHLIALYGEKMQPAPYKLRSETILLLKQKRTVLRQLKKQLTATQNLKGSLEVLPKFDPKCKRTIEKTIEFLNKQIKSMEEELASLAQDEFKKQMSLLTSIKGIGVTLAAALIVATGGFTYFDNAKQLTRYLGLSPTYQQSGTSVNVKGNINRNGDPHLRSQLYIAAVSSIRCNTECQACFSRLRSNGKPGKVAIIAVANKLIRQAFAVVKQEKTYVDGFKSAKP

SEQ ID NO: 316974 - protein, 342 aa, unidentified
MKEFIRIGVDLGKRYIQIHALESKDGRAVKRKLPRSKFLEFFADVAPCLIGMEACGSAHYWARQLRAMGHDVRLMPPAYVKAYVKRGKNDAVDAAACCEGVSRPNMRFVPVKSEEQQATLTLHRTRELLVRQRTMCVNALRGHLTEFGLVAAKGIGRAGELIDMAGNDAELPEIAKSVVKIFAEQLAAIQALIAALEKQIAGVHAQSPMSQLLAGIPGVGKIIASAIVASVPDPQVFKSARDFAAWLGLVPRQNSTGGKTKLGPITKKGDRYLRKLLVLGATSALRVAGRRKGALRDWLAALLEKKKSARLASVALANKLARIIWAMMTSGETFRKDMFEPA

SEQ ID NO: 316975 - protein, 474 aa, unidentified
MRYTCIVAAHKDRSTRGSSQFDRKLDSAYLDGPRIVDVLAGRNTQGSLCSGQVRPGGYERSKQMDEVYPDSSGLDVHQKFVVACVMLPNRQGKLKPERRKFVTTTKGLHELAEWLAGHGIKQVAMESTGVYWKPVYNILHERFDVWVVNARHLAQVPGRKTDDTDATWITKLMRHGLLQPSFIPDEWQRDLREMTRYRTRLHQEKSNAVNRLHKSLEDANIKLGAVVSDIQGVSARAMLEALIDDRLNTEQMADLAHTTLRKKIPELVEALTGLVRVHHRFMLHEILTHIDELNQRIGTLNQRISQLVAPYATIIERLDEIVGVGRVTAEIILAEIGPSVEKWPTAGHLASWSCLCPGNNESGGKRRSGKRRKGQKWLVTALVEAAWAASRSKDTYLAAQFHRLRARRGEQRAAIAVAHSILIIVYHLLKDPQARFQELGGDYFLTKNRGQEERRAVRTLNTLGFEVTLTPIAA

SEQ ID NO: 316976 - protein, 373 aa, unidentified
MSEFNKFVGLDVHKSTIAISIAPEDGGEVRYFGEIKNTKEALINFANKISQGSLKLSFCYEAGGCGYEVYRHLRNIGHDCMVVAPSLIPKKAGQRVKTDRRDSLNLARLHRAGELTGVWVPDAMNEALRDLTRAREDMKHLQRQAKQRLLAFLLRHGWTYSGKSNWTKDHFNWLETVKFQHAAQQIVFQEYVDTVKYCGKRVESVTQQIEICSRKSACWPVIESLMALKGIDLITAATIMAEIGDLTRFDSAPQLMSYLGLVPSEHSSGSSVRRGGITKTGNSHVRRVLVEAAWTYRFPARKTAHTQKRAKLTSDAVQEISWNAQKRLCQRYKELNANGKIKVQTCTAVARELAGFVWAIGQTVPLKPTAYVQ

SEQ ID NO: 316977 - protein, 481 aa, unidentified
MTAGTGRQKDGAGRGAAAAAGEAGGDGAEVAEERVEVVTYAAAIDVAKGSGMVCTRVPGSRPDRKRQKVWQVDATYGSVVALMDHLRCEGIQRLVLESTSDYWRIWYYLAEAAGLEVWLVNAKDVKHLPGRGKSDREDSVWLCKLNERGMLRRSFVPPEGIRDLRSLTRTRSRLAQDQVRHQNRIEKILEDALLKISVVISGLSGASGRRFLDALVAGERSPRALAALGDTRLKATRQQLADALTGQFREVHAFEIATHLRLIDAINDEITRLDARIEQQLTSIPGVAPACGSCGLIGGGHSPGCASDGTPVLGLVERLDEVTGAGVRNAQVTIAELGTGMSVFPTPGHAAAWARLTSRTLQSGNTARPGRTGKGNPYLRGALGQSVMAAARTDTRLGEQYRRIARRRGKQKAIVAVSRVICEISCILIAGPAARFTDPGADYYSRANPARQTRSRIREIERLNPGMKVTLTPVEPAATAA

SEQ ID NO: 316978 - protein, 391 aa, unidentified
MAQSHKRKEPVMNKLQFIGLDVHAETIAIAVADGERGGEVRSLGTIPNRIESIRKLIKKLGSRQQLRVCYEAGPTGYVLYWQLTEMGVKCEVVAPTLVPIKAGDRVKTDRRDAEKLARSYRAGELTAVWVPDAAHEALRDLVRARLAAKKDQLKARHRLSKFLLRHGRRAPAGVKAWTAAYLVWVKRSVHFDQPAQEATLADYLHEVEHAQERILRLEHAIHDAIETMPERMRAVVRALQALRGIAKISAVTVVAELGKISRFGNPRQLMGYSGAVSSEYSSGEKTHRGGITKTGNAHLRRIVVEAAWAYRHRPAVGPTLAIRQKDVSPEVKEIAWKAQHRLHRRYLRLLSRGKIKQKVITALARELLGFIWEIGMTVELDPGGQQQHRAA

SEQ ID NO: 316979 - protein, 340 aa, unidentified
MEHVAIDLGGRESQVCVRQADGEILEEKRWRTAELREYLRTRPPSRVIVETCAEAFRVADIAKELGHEARVVPATLVKALGVGERKTKTDKRDARKLSEVSCRMEVPSVHIASPLARELKTRLGMRQAHVAARTMFINTVRGWLRAQAISIPKSADAFTRRVAETMKDTPLPAHVLEQLKMIDTLSENIHRIDKELAAMAKAHAVCPRLMSVPGVGPITALAFVAVIDDVSRFKGAHDLEAYLGLTPGESSSSSRVRRTSITKAGNAMVRWCLVQGAWAAKRSHRRRPLAMVTWSLEIEKRRGKRVAVMALARKMAGILFALWRDNTTYVHQLGVQPPKI

SEQ ID NO: 316980 - protein, 411 aa, unidentified
MSHEITWLFVYGSPRVIIFTSEVIFMVFVGIDVAKDKHDLFAVDSDGVVLCDHFTFANSAAGFASLLERVSAWGKIKVGIEATGHYSSNLLSFLKAHDFEVVVFNPLSVSRLRSAASLRKTKTDKNDSRYIARLLLTGESNPYHFQSYNISVLKSMTRARFRLFQEIQPLKNRFRRLLHVLFPELQGFFSNLYGNTSMNLLSALPSAKDIAGCNILKLTKILSDFSHGRLKRSRAEQLKALANSSIATYNYGDAFELKQTVKRIQFLASQMSEIEREIDSVMAELNSPITSIPGIGNLLGATILSEIGDIKNFDNPDKLLAFAGCEPSTYQSGKYTATNTPMVKHGSRYLRRALYCAADMAYVNSPSFRSYIDRKRAQGKHYYVAMSHGMKKLVRIIFAVLSRNIAYSEPI

SEQ ID NO: 316981 - protein, 342 aa, unidentified
MQMTTIGLDIAKNVFQVHGIDAGEKVVVRKQLRRGQMLAFFEALPPLLVGMEACATAHYWARELTKLGHQVRLMPAKDVKAYVKRNKNDAADAEAICEAVRRPTMRFVQVKSAEQQSQLMLHRTRDLLMRQRTQVINALRAHLGELGITAAQGKAGLTELLAIIAGSADERLPTEAHASLMVLAAELQAMRTLIASIEKRIITHHRSDEASKRLRSIPGIGLVGATAIVATITDPKAFRSGRDLAAWIGLVPRQDSTGGKQKLGPISKQGDRYLRRILVVGAHAVLKLVRQKPQKYPWLTQLLARKPFKVVAVALANKMARIAWALLVKGGPYRARALVAAA

SEQ ID NO: 316982 - protein, 386 aa, unidentified
MQKLNDLSRSLTALEPDDTLIAVIEMSLSSWLVAGIVPGVERQPLKKLAVDESALLKLLHRWREEAEKAGRRIERIAVAFEAGRDGFWLARWLKARGIEAHVIHASSVAVSREHRRAKTDRLDTELLKRSFLGWLRGERDHCKMVAIPTMKDEDAKRPNREHDSLIGERSRIVNRMKAALVRLGIRGFNPKLKRATTRLDGLRTPEGEPIPPNARAELRRDMERRRLVNNQIRQIEEERLERIERAPTDEPHVMVRLLARVMGVGIETADMLVHEVLSRNMRDRRAVARYAGLTGSPDESGRKRREKGLARSGNTRVRRGMIQLAWRFLLHQKNSGLTKWFRSRTENARGTRKPMSGALARKLLIALWRLVREGIVPDGVVLRPAQ

SEQ ID NO: 316983 - protein, 343 aa, unidentified
MEKITTIGLDLAKSVFQVHCITEDGHVLVRRALRRSQMLDFFRSLAPCLVGMEACASAHYWANAIGAFGHKVRMMPAAYVKAYVKRNKTDAADAEAICEAVSRPTMRFVPIKSPEEQAAGMVLKTRELFVRQRSQTANAMRAHMAELGIIAATGMASIAKLIAILRDGDDARLPAAARAALLEMAEQIERLTVRIEALDTKIVAAVKNDETARRLTSIPGVGPIIAATVLATIHDPAAFKTGRHLAAWIGITPRANSSGGKERLGKISKQGNKQLRTLLIVGATSILKQASRGVKLPAWLASLMARRPYKVAAVALANKIARTIWALLVKGGSYQAPLITTRA

SEQ ID NO: 316984 - protein, 437 aa, unidentified
MASPYRFYLNKIQEVILLSFKIFRFNCCGLDVHKTWIYACIGITDSNGRTDYKQARFSSFSKGLKELCDWLAKYNCSEVCMESTGKYWIPVFNVLEKANNSVILAHPKYTKTQKGNKTDRKDAKWICDLFMCEMIKPSFIPPADIRHLRDLVRYRFKLTCMITGEKNRAQNCLTVSNLKLDDVFSDVFGKSSRSITEYMLAHPGEIFDVAPFVDSRCKTPMEEIQAAVDGAISPEQAIKLRQCLNHIDELEKHLEEIEREILRLSDKYQAALDLIRTVPAFDKNPMTAIQILSEIGGDMSVFPSAKHLVSWAGCCPRNDQSNKRIKSTRISRAGNYIKPILVQVANGLLRSKKHPEITGRYKRIKSHRGHKKALIAICRMLLTAIWHMLSDLKPYTAEGFLESRPVNKAKVLTTSQALNLLKQRGYTIKDDIVPAMN

SEQ ID NO: 316985 - protein, 348 aa, unidentified
MTVYIGVDFHARQQTLSYLTTEDGEIKGLELDHEEPAKVRKFYEQFGGQQVVVGFESSGYAAWFEELLEELGYEIWIGHATVIRSFARRRQKNDRRDADLILELLVAGDFPRIHRYSPESRAVLQELRYRQRLVKMRTMVMNSLLYLASSRGVSLRSHLRSKRGLARLQQIPLPAPLQVQREELCQLLLELNARIDKVESSLEAKAATDLRVRRLRTHYGIGPLTGLCLVHTLESVERFANPRKVTAYVGFDPVEDSSGQRRRIGAISKQGSRLLRFLLVEAGQIAVRRDLELAQVYRRVMVRRGHAKAKVAVGRRLLVRAFIMLRDEIDYDEFQRRGVAARSSRGIA

SEQ ID NO: 316986 - protein, 314 aa, unidentified
MRTPVFVGIDVSHAQLDVAVRPGTRFSASNDEPGIVTVVEELRALAPTLIVLEATGSLEVPLTSALAAARLPVVVVNPRHVRDFAKAAGQLAKTDALDAQILAQFAQVMRPAPRPLPDEQTQALAALLTRRRQLVEMLTAEKNRLSLAPRPVRNSVRAHITWLERELLHTDTDLAQTIRQSPVWREKEDLLRSVPGVGPVLTTTLLANLPELGTLTGKQIAALVGVAPLNRDSGALRGKRTVWGGRAQVRAVLYMGAIVAARFNPVIRVFYHRLRAAGKAKKVALTACMRKLLTILNAMLKHRTPWCAEVAQHA

SEQ ID NO: 316987 - protein, 342 aa, unidentified
MEYGAIDLHTRRSVIRIIREDGTVVLDRRIDTTRDDLARVFGGRARMRIVIESSTESEWVAGHLEGLGHEVVVADPNYAAMYGSRSRKVKTDKRDVAALAEANRTGVFRRAHRVSAPAHALRQTLRVRTHLVQLRSRTISLLRAMLRRDGLRLASGSADAVLARLDRLTIPAALQARIEPLRELVTQLNALLAAREAEVETRAADPVTQCLMTAPGVGPIVALTFQAVLDDPARFGGDAGRASAFLGVVPAEDSSDERRHKGHITKTGPRDMRALLVQASWTIWRGRSAAGAALRTWAQALAARRGRRIAIVALARRLSRILYAMWRDGRTFQSARGHAQAA

SEQ ID NO: 316988 - protein, 337 aa, unidentified
MDNIEACGVEVSARELVVARKGKQGVQLKRFANTPAGHRELLRTLTRRGQRVRVVLEATGLYALDLALLLSAHEQVQLMVANPRAVRHFAQAMMQRSKNDQLDVAVLLEFAVRMPFTPWVRPQENALALWAIARRLQALTRLCTAEKNRAHAMGLSAAIPAIVRRDIARSLQFHQRALKKLRQQALQHIAADAQLQQRYQLLRSIPGLGEISAVQTLAELLLLPEDRDVRQWVAYAGLDPREYSSGTSVRKHTRISKVGNAHLRRALYMPALVASRVEPHLRGFYEHLLARGKSKRQALVAVARKLLHAIYGMFRSQRPYDGTRVYLLPPRLAGESS

SEQ ID NO: 316989 - protein, 463 aa, unidentified
MHEIQSWFAGVDWASQKHDVWLADASGKRLGKRTFEHSGEGLAQMCSWLTATSGGRPEDVHVAIEVPHGAVVETLLDRGFKVYAINPKQLDRFRDRFSPAGAKDDSRDAETLSSSLRTDRRAFHQVALADPAIIELREWSRMADDLNADKIRHANRLREQFRRYYPQMLQLGSDLAEEWIFALWEMTPAPAQAARLRPAEVEKLLKRHRIRRIGAAEVLAILKQPALVVAPGVTEAAVAHIRVLIESIRLFTQQLKEVHRQLDRLCKLVAEPIASENEQTGPEPERSLVAILQSLPGAGRIVLSALLAEAFEPLQRADYPILRKLCGVAPVTRRSGKSRAVTRRLACNPRLRNAIHYLADAARRCDEKSKAKYLALKARGCSHARALRTIGDRLLYVACAMLKNRTLFDPALESQKMHLINRGKSAANVRVLQRMHVRKACLRRTVSPLAPHRMTPRAQANLV

SEQ ID NO: 316990 - protein, 343 aa, unidentified
MDHFAGLDVSVKDTSVCIVDDTGRLVREVKVASEPEALSAVLTSPVYHFKRIGLEAGPLSQWLYSALAEAGLPAICVETRHMRAVLKAQINKTDRNDARGIAQMMRVGLYRPVHVKTLRSQKLRMLLTHRKLLQSKAIAVDNDLRASLRNFGLKVGVVGTVKFEARIKELVENLPDLAMLVEPLLIVRRVLREQIGILHRRLLAVVRDDDVCRRLMTVPGVGPVVALTFRVTVDVPARFRNSKAVGAVFGLTPSRHQSGESDRPGAISRCGDEMMRMMLYEAAQVMLVRSAKWSWLKAWAMQIARRRGMKKAIVALARRLAVIMHRIWVDGTEFRWTRDVAAA

SEQ ID NO: 316991 - protein, 374 aa, unidentified
MSRSIIYLGLDVHQDSITIAVLPAGAPAPTRVERLPNDLAKLRRFCERLAAQGDVRACYEASGAGYVLHRAMREWGYPCDVIAPSLIPTKPGQQRKHDKHDAAQLARLYRAGELTVVRIPSEAEERVRDVVRCRETLQREVLRSRHYILKFLTRRGFVYREGTNWSTAHYHWLRRLAAASSPLAVEDQMVFGEYLGLLEYKLSRRDELDRRIAELALTPALAPAVNRLQCFRGVQRHVAMVLTTEIGDWRRFASPRQLMAYLGLVPKERSSGDRERRGSLTKAGNSHCRHALVQAAWAYRYQPKVGTALKARQQGQSPVVIAHAWKAQHRLHTLYRRLAFRTKPQIAVVAVARELVGFLWAVMQEQDLSSRAAA

SEQ ID NO: 316992 - protein, 384 aa, unidentified
MNKDNIILIGMDTHKVSTSIAYSLDDRKSEPSYFGQINTTKPAFQKLVRHFQSKYPKAEFHFVYEAGPCGYWVYRLLTSMGHCCHVVAPSLIPKKPGHQVKTDKRDALMLTQLLKNGDIEPIYVPEPEDEAIRDLSRARESAMHDLNDAKYQLKAFLLRNNIRYAATANWSKKHLRWLTALILPHPCQQIVLTEMLQTVTERIARRKRLDNELAHQVKKWRYYPVVKAIQAMRGVRLLVAVGVISELGDLTRFDHPRKLMSYVGLTPSEHSSGGRRRLGGITKCGNTRARRMLIEGAHSYRYTANITSDLQQRQEDLSKTVIDIAWKAQLRLCRRYQRLMKQNKNYNLVIAAIAREMIAYIWAISREVVLRPVDVGSRLSRVPA

SEQ ID NO: 316993 - protein, 341 aa, unidentified
METTRHIGIDLHRDKFTCCMQLANGRNYLSEWKLENLPVFVKKLRATDEGAVEVTGNTRLFYDAVAPHVARVVAVDPNQFRVISHSVKKANPNDARNLALYLSKGLLPEVRMKEKTQAQIASLTQTRDTLVKLRTALKNKVNNILSAHGVNLEKEALSSEKKLTEVLAMQFDLMIRIELKVIVEQIRSLNHSIAELEKTITEEGQKLKGHKNLTSIKGIGPLTGSILLSVIGDIHDFADEGKLAAYFGIVPRVSNSNETERSGRITKRGSKLGRTALVQCALIAQRYSPYLKKFYEKTKARRGTGKAIIALARKLLGIVYRTLKNNWVFQDFPNFVLAEES

SEQ ID NO: 316994 - protein, 351 aa, unidentified
MQYAKISHKYQYFCGGDMHAKTTYFVVLDRSGHCMLKGNLANRFDGFKNFISPFQDQVVVGVEANFNYPWLYDGCKMDQIPFLLGHAPYMRAIAGNKKKNDRLDAQTIANLMRTNFFPVGFAFPKEMRNVRDLLRRRHYFVRQRSSLITHSKLTFYQQGITDNPDAVFKNKQQREQLCHLLSEEELRLSLNSNIQVISFLDDIIAFLEKTILQRVKKHHHESFALLQTIPGVGEMTALIIIYETCDISRFKSHQNYASYARVVKPERMSNGVLKKGGNPKMGNPYLKWAFGQILHQARMAHPDIDHCYLKLDRTCSKKKARAIMAHKFNTAAYFILKNQSAFDLDKFLNRD

SEQ ID NO: 316995 - protein, 360 aa, unidentified
MFTERTSVGLDVHARSVVAHAMDVQTGEIFKARLCPDPAEVTAWIKALPGPAAAIYEAGPTGYGLARTLLASDIRTVVAAPSKLQRPSGSRVKTDAIDAEHLSTLLRLDAYSAVTVPDELNEAARDLVRAREDCRSDLMRARHRLSKLLLRHGIVYSGGQAWVGAHDAWLKRQRFDSPLVQAAFDEAYDSVITITARRDRLDERIAAMAADSPWSDTVRRLGCLRGISTLTGFGLAVEIGDWTRFTGNSIGSFVGLIPSENSSGQSRSLGPITKTGNSHARRLLVEAAWHHQHRYVPGKTIRDRWDLASPAARARGDLGNRRLNHRWNQFKARKKRPIVANAAIARELAGWCWSLAVLED

SEQ ID NO: 316996 - protein, 410 aa, unidentified
MGRAGGEGCGTIAVGETSDGKRPMQRNDLSRSLVAFDQTSTVVAVVELSLKNWLVSGLVPGVKRQPLKKLAADRERLLALLERWRDEAIKAGHAIKRIAVAFEAGRDGFWLARWLRARGIEAYVIHASSIAMPREHRRAKSDRLDTEALMRAFLGWLRGEARHCRMAAIPTLEQEDAKRPTREHESLVAERTRLVNRMKATLVRLGITGFNVKLRKAAERLAALRTPEGEPVPPNTLAELGRCLERLGVIKGQIAAIEQAREQRLKALPAQGTHPMILMLANILGLGIETADMLVHEVLARKLRDHRAVGRYGGLTGSPDESGSRRREQGLAKAGNARVRRGMLQLAWRWLMHQKASALTQWYRERTANGRGDTRKTMIVALARKLLIALWRYVTTGELPAGVVLKAKAI

SEQ ID NO: 316997 - protein, 349 aa, unidentified
MDSMTPTGRDVIGGVDTHQDLHTAAVVDAAGEVLATQAFATTRAGYRAMLAWFSSHGDLARVGVEATGTYGAGIARHLAAAGIPVLEVTGPDRAARRGCGKDDRLDAIAAARAALSGQRVQVAKDRSGPIEALRVLRTTRKTAVRCRRATLQQLHNTIVSAPDELREQLRHLTRMRRLRTCAAWRPDTIAYRDATVATRIALRSLARRILDLSDEIADLERLIAPLVGELAPGLLALPGVGVANAGELLVTAGQNPKRLRSEAGFAMLCGACPIPASSGKTERHRLNRGGDRQANSALHMVVVYRMRRDARTKAYVSRRSAEGLGKREIMRCLKRYVAREVYHVLVSST

SEQ ID NO: 316998 - protein, 354 aa, unidentified
MSVYVGIDVHRKRSQVAVVGEGGEVLANRNVHNGVEPILRVIGGLPAGTPAAYEAAFGWGWLLELLEAYGFEPHMVHPLQCKAIASARLKNDKVDAATLAQLLRADLLPEAWIAPPEVRQLRAVLRHRAQLVRLRTLLRNRIHAVLADHGHGRPAGCWSGPGRAWLASLELPAVSREVTGDALALIDAVQQPVDRLDAEVRQRAKADPRVRVLTQLPGVGPFTALVLLAEIGDITRFGSARKLASWAGLTPTVRGSDRTVHHGHISKQGPAWARWVLCEAAQTAKRHPDFAPPPTRPWPAAAGRRSPPRRSPASSSPAPTTCSPTPAPVSPASGEGRKPRASSHIRMSRPRRAR

SEQ ID NO: 316999 - protein, 343 aa, unidentified
MTKISTIGLDLAKNVFQVHGVEASGAVVLRRQLRRSALEKFFAKLPPCTVGMEACGSAHHWARVIGRYGHQVRLMPPAYVKPYVKRNKNDGRDAEAICEAVGRPSMRFVPVKSVEQQATLAVHGTRALLVRQRTMAANALRAALSELGIVAAQGLEGLRELMAKLEAPNEDIPEMMRGALLVLASHWQVLDADERALERQIAKTARADRNARRLMEVPGVGPIIASTVLAKVPDAKMFRSGRDFAAWVGLTGRDHGTGGKHRPGRISKQGDRMLRALFISGASAHLRQQKRRGVNDPWLRELLARRPYKVAMVAFAAKTARIIWAMLVKGEQYRVRASASAAA

SEQ ID NO: 317000 - protein, 405 aa, unidentified
MEVLYERCCGLDVHKKLIVACFRNGKKKELRKFDTLTESLRELCKWLLQNKCQMVAMESTGSYWKPIYNILELNDLEVMVVNARHIKTVPGRKTDVKDAEWIAELLQHGLVKASYIPDKEQRELREIVRYRKNLVEERSREINRLEKTLEGANIKLSAFVSDLTGVSSRKLLKEAMYGEVRADNIADLLHSSMLHKQNTLLKAMDGVMSVTQKHLVKAIMDHIDDMTRRIDNMSNFIDQQMQKYADEINKLDEIPGIGKLSAETILAETGVDMSRFPTAAHFASWVGLCPGNNQSAGKRKSGKTNKGNRYLKTALIQAAKAAVKNKDSFFYAQYQRIVVRRGANRATVAVAHSMLIAIYHMLKNNTFFKDLGKDYYTQFNKELKARYYMKKLQELGVPLPVSTAI

SEQ ID NO: 317001 - protein, 353 aa, unidentified
MKDKYVGLDVHQSSTMAAVHDEKGKAVMESILKTEAEAMRDFLKGLSGTIHVTFEEGAQAGWLYEIVKPLVGEAVVCNPRANKLLAVGNKGDRVDAHKLAELLRGGQLKSVYHGGTSSRQLKELAHNYDSLVSDTTRVMNRIKAIYRGRAIGCAGRDVYYARHRQEWLEKLMESGVRRRAEFLYQELDTLRKLRREAKQAMLRESRRHPAYPTLKQIPVLGPIRIAEILAKVVSPHRFRTKRQFWAYCGFAVVTRSSADYEFVEGRAQKRQRAPMTRGLNPNFNRRLKYVFKSAAVDGMQQEPFQSYYLRRIAVGMRPEMARLTLARKIAALTLTLWKKGEGFDELKVSEPVA

SEQ ID NO: 317002 - protein, 552 aa, unidentified
MPFKLATVPYAIHGSAASRACTIVAVAKTKGLVQNPEIRRAVCLAGDLGNQILILLWDRIFFSFVFGRAVVALRPWNRDEGGALHRLRPQRRAGVLALAADVVPYLYPLIRRVRGVDAPWLKGSQEASRGVPRCPLRGELRRRLVAQPGMGPDGVVVVAPGGKDGPGRGQRCEQGFVQAFVAQPSVDGEDGPAPSVLAVHWPCCNPNKELSAMEADTIGLDLAKNVFHAHAVDVDGNVVIRKRLTRREVLPFFAGLQPCLVGIEACATAHHWARELQNFGHTVRLIPPAYVKPYVRRGAKNDASDAAAICEAVARPGMRFVPIKSKENQAFLLLHRARGLLVRQRTMAACAIRAHLAEYGIVIAQGRHRVEAFVAALDEFGTELPEDAQFALNALIGQLDELNRQIERIESKLNAIHQSHPVCRVLSSIPGVGPITATAFAATIPDPSMFRSGREFAAWLGLTPRQNSTGGKTRLGGITKQGDSYLRHLLVIGARTVVRYPKARSKVDAEWIDALLQRRRPMVVAVAVANKLARIIWAMMSSGEFFRTADVR

SEQ ID NO: 317003 - protein, 370 aa, unidentified
MENITYVGLDVHKATVCVAIAEGGRSGEVRQLGVFENRRELLLKLVARLGKGGRRLSFCYEAGPCGYGLHRLLSGCRHECVVVAPSLIPMKAGDRVKTDRRDAVMLAKLHRAGELTPIWIPDAAHEAMRDLVRARATAGRVLSKARQHLQGFLLRHEQIYRGVRAWTLAYRRWLTTVRFAHPAQQIVLQDYIHAVQDAEARRDRLTRQIEELLPNWSMAPVVTALQAMRGVALVVAVTVVAEVGDFRRFANARQLMAYLGLVPSEHSSGATIRRGGITKAGNALARRVLIEGAWTYRMPARVSRKLYDRNEKLAPAIRDIAWKGQIRLCSRYRRLAAAGKPKVVVTTAIAREMVGFIWAIARIAQPTLQG

SEQ ID NO: 317004 - protein, 428 aa, unidentified
MNEEDRIRLEEFRQFRKEVRGSAEYLLVGIDVAKDKHHAFFGTAMGKTLFRRLVFDNSIEGFEKLLVQVEALKVQHVLGKVVFGLEPTANYHKPLGEHLIRCGHKVVLVSGVAVKENRKSLDGRWDKHDVQDAANVADLLSQGKCLFYEYPEVAVRDLRDLLSLKRRLKRQEQGMRVRIRNHLLAKYFPELDRYYERSESGSLAIVRWCLDPAVIAGLEYKAFAQRVAPGKRRLSQESRLQAIWKLAVDSIGCEVGSAVEFEGEVMVEGLKQIREVIRATEEKIEEICSPFSEYSCLRSIPGFGPDVSSKVLGAIGDPFRFQNGQQVLKLAGLDLNAERSGKTSGAAVPVISKKGKADLRYALYQAAFIASTKNRTFIVYYTDKLRGREREPGIKTKMRVKLAAKLLIIAWTLMKKREPFNPDHLKLE

SEQ ID NO: 317005 - protein, 310 aa, unidentified
MDATVVWIDVSKDRLDVHVLPGAVSFAVARDGEGLAALVARLSDEPVALVGVEATGGFETIVAAALAGAGLAVVVVNPAQVRAFAQALGRRAKTDPIDAAVIARFLEATRPEPRPLPDADTVALADLVTRRRQIIQMLVAERQRERRATQARLKKSLHRLIAALEKELSEIDGAISDTMRGSPAWREKEDLLRSVPGVGPVLSRTLIAELPELGRLDRRQVAALAGLAPWTRQSGQWRGRSFIGGGRSSVRACLYIAAMAAARFNPALKLFHQRLISAGEPKMVALVAVARKLLTILNAILRDQRPWQTA

SEQ ID NO: 317006 - protein, 319 aa, unidentified
MQAALNIGVDVAKAELVIGEVDHPEYQGSIANESVPIKKWLSRLPGHARIAVESTGRYHALLVDLAQAQGFEVYVLNARDVHYYARALGQRGKTDRMDAQLISRYLREHHARLHPFAAGSAAQREIRKLLAGRTRVVVQRQSLLRSLKDLAGVQTASLTAQLDEVLKQIDQRIAALIASEANLAEAARRLKTITGVGSLGAAWLASLFERVRFTNSDAVVAYSGLEPRPRESGQWRGRRKLSKRGPADLRRLLYMMAVSASHSKVFASYHRALRARGLSGTASIVVLARRLLRIAFAVWKTKTSFDPDRYLAREACAKL

SEQ ID NO: 317007 - protein, 412 aa, unidentified
MEVIYPCCCGLDVHKKSITACVLWAEAKGKSRKQKKRFGTFTHDLLQLADWLAECGVTHVAMESTGVYWKPVWNILAEQFEALLVNAQHIKAVPGRKTDQKDSEWIADLLQHGLLRGSFVPPQPTRELRDLTRYRVSLVQEINRIANRIQKVLEDANIKLASVATDALGASGRAILEAMLAGEQDAGRLAELSKGLLRNKIPELKLALEGRMTEHHRFLLRQLFEHLRFTESKRSDIEQEIDKRMLPFEDKVTRLCTIPGVDRVTAWGMLAEMGMNMNQFPSSGHLASWACLCPGNFESAGKRLSGKMRKGNVSLRRCLSQAAWAISMMKNNYLSALYRRIAARRGAKRAVMAVAHALLVIAYHMLKRKEDYRELGADHFDRIDVNRIRRSLVNRLERLFRRSTGHRFAVVV

SEQ ID NO: 317008 - protein, 347 aa, unidentified
MLADELDYVLGVDTHRDEHVMAVVAAPAGGVIAGGAVAANARGYRELLRLAERHAPGRRAWAIEGTGSYGAGLARFLAGRGELVLELSRTPRAERRLRGKDDSLDAVRTARAALASETLALPRAGERREALRLLLVARRSAVDVRREALSQLRAVIVTAPEPLREQLRRLPVGQLLERCSRLRRSGTTDELATRIVLRSLARRIQAATREAQELEREILSHVRAIAPVLLDEPGVGPIVAAQLIISWSHPGRLRSEACFARLAGVAPVPASSGQTTRHRLSRGGDRQLNRALHTIVLHRRQHDPATRDYIARRVAEGKTRREATRLLKRYLARHLYRVLEQQEPLMT

SEQ ID NO: 317009 - protein, 346 aa, unidentified
MTTVDATCPVTGGVDTHLDVNVAAALDPIGGLLGVAEFPTTPTGHRRLAEFLASFGTLTRVGVEGTGSYGAGLSRYLRSSGVEVVEVDRPNRQSRRRTGKSDPVDAIEAARAALSGRAQGAGKSRDGNVEAIRALVVAKRSSRSTKIQTLNQIRHLGFTAPEELRSRLKGISRQHLGAEAAALRPRAGGDPVVFATKTALSLLGHRVLVLDAERERLNLLLGELVEKTAPQLLEIHGVGVDTAATLLVTAGDNPGRIRSEAAWAHLCGVAPIQASSGKVTRVRLDRGGDRQANSALWGVVITRLSSDPRTQAYMERRLKEGRSKPEIIRVLKRYVAREVYHRLPRT

SEQ ID NO: 317010 - protein, 312 aa, unidentified
MPAKLPPTYVGLDISSDQLDYSRSENDEGRCAYTAEGIAELIKKLQVLLHARVICEASGGYEKRIVAELLQAGIEVCVVQPGRVRAFAYAEGLMAKTDRLDARLLRRFGEKIEVRLAVPTDPALTTLRELLEHRRQLTRQLIEVIGRLSLAGATLRKLLEKQRLFLEKQIAAVEGMIKDHIDQNPDLKQKSARLQEINGVGPVLSATILAYVPELGKIESNQLSALIGVAPHPDDSGLRNGPRHVRGGRAQVRRVLYMAAVCAARTNPILRAFYERLRANGKPAKVCLVAVMRKLVHLMNKLILNPDFSLVR

SEQ ID NO: 317011 - protein, 387 aa, unidentified
MSQTVAAPIPAAVDYERTLVLAIEVSNRSWVLAAQVPGLPHTKAKRTIDPEAEALLAAITGYRARAAATGRSIERVIAVYEAGWSGFWLARWLMQHGVEVHVVQPSSVPVDRRKRRAKSDGIDSELLLRTLLAWLRGEPRVCSMVPVPDEADEDARRCVRERTELISERVGLTNRIGAVLATLGVSDYNPLLRNRCRRLAELRTGLGDLLPANAHAKIKRLLARLELVLAQIAELERERDAVVEMEASDKASRMIQQLTGLRGIGVQSATVLVREAFVRRFANGKALGSYAGLASSPYSSGGIDREQGIGKAGNRRVRTVMVELAWLWTRYQPGAAQVCWFRERVGSTGRRVRKIMVVALARKLLIALWRFVIDGVLPEGAVLKPAA

SEQ ID NO: 317012 - protein, 351 aa, unidentified
MKVTTIGIDLAKDVFGLHGVDGEGRVTFKRRLVRSRLLEFLSQLPRCLVGLEACSSAHYWAREIERLGHRVRLMSPRFVKPYRKSDKNDANDAEAICEAVTRASMRFVPIKSEAQHEVQALHRVREQLLKSRTALVNQVRGLLAEHGVVAPHGIARARRLRLGILADPERHGLSGLFRETLQEMAERLRFFDERVGAYDDRIERVFKEDERCRRLAKVEGVGPLVATAVVAAVGNASEFKSGRELSAWLGLVPRQHSSGNRSQLLGISKRGDRYLRTILIHGARAALRRADHKRDQRSRWAMRIKLARGYNKAAVALANKNARIIWALLTRGENYRPAAISVASAGSVESV

SEQ ID NO: 317013 - protein, 321 aa, unidentified
MSEIGFTQVVSRGCGIDVHQKTVVATINGEGLKPQTREFSTFTSSLTSLKEWLLSEGVTHVAMESTGVYWKPVYNVLEPSGLIVWLVNARHVKHVPGHKTDKKDSAWLCKLLLAGLLKPSYIPKKEQRVLRDLTRYRRNLIQQNASEQNRILRILEDCNIKLSSVLSSVQGVGSTKLINKLCQGEVITRADVDQAYHGKMQCSREDLYEACQGFVEQHHIYMLQTIQSNITRTEVVISELTQRIRGLLEPYQNKIEQLREIPGLDKKTVEDLIAEIGLDMSVFPTDKHFASWLGICPGNNESAGKKKVDESHTVTNTPKLQ

SEQ ID NO: 317014 - protein, 350 aa, unidentified
MVTIGIDSHKSSLAVSLVDELGRELASEQFGNDAGAHEALYAWVRARAPGERCFGIESTGWIGRGVACYLLERGERVVDVRGTLTERERKRLRGDGKSDTRDALAIARVSVREELPPVRVDSPSRDLKLLCDYRAQLVGERTRIANRLHVDLVSLHPGYERRVPRLTSGVRLEAAEEILAGDSGVQATLARRRIEGLRRIDLELADVRREIEAKVRASGTGLVRLVGISHLSAARIIGEVGDVARIATKDRFARMNGTAPIPASSGQTQRHRLNKGGNRRLNHAIHMMALTQARMDPRARAYVERRRGEGRTYRDAVRALKRHLSDAVYRQLREDADRATRRCTPGVALT

SEQ ID NO: 317015 - protein, 355 aa, unidentified
MNDTKFIGLDVHKTSVSAAVLDQDGKLVMQSVFATHAAAILSFIHGLRGTLRVTFEEGTHSTWLYDLLHSQVAEVLVCNPRKNALLKSGNKSDQIDARKLADLLRGGMLSAVYHGQTSTLTVKELGRTYSTLTQDTTRVMGRLKALYRSQAIATEGKKLYTRRRREPWLALLTQAGQRYRAERMFEQLDALQGLRRQARRDLMIECRKHTATSLLTSVPFLGPIRAALLLARVQTPFRFRGKRQFWSYCGLALETRSSADYNFVAGELRRSKKPVLIRGLNQNHNHDLKNIFKAAATTASAFPGPFREFYENLLGKGMKPEMARLTLARKIAAISLILWKKGERFDPEQLKPQAA

SEQ ID NO: 317016 - protein, 478 aa, unidentified
MEKEDGQPVSRRLVGIDLGIASRHSVRVLEADGQVVCRSSCVPTVESLTLMESAALAGAPEGTKLAVVFEPTGPAWLPIAVFFARRGHSVYRVSSAKAADLRRFLRRHAKSNGIDAETLARMPLADPGGLQQLELPGPDAAALDRRVRACERLTRAGSEHKVRIKDLVRQLMPMTPLTGDLGQADLAVPGHYADPRVLLAAGMAELTRLITTASGRQQGQDRASQGRAAAAAAIELYGDHPAVPYDELAAEVLTEVRLLRAIQAELASHAAAREQRYRQVDPGQLARSLPGFAEISAPVLVAVMGRPGRFRNGTRFKSYAGLAPRASETGDTDRKGQPMSKAGPSVLRATLFRAADTARRHDPQLARIYYLQMTERGATHLKACCVVAGHLAERAWTVLHRGTPYVICDNTGNPVTPAEAKQIIAERWTVPEEIRKRRRSRKLAGRAPQAATTGPDRRGGPPPPRSSRPRPKTVNPTT

SEQ ID NO: 317017 - protein, 320 aa, unidentified
MVTIGVDPHKQTHTAAAVDGLGVEVAHRTVPARPAGNGQLLEWARAVDEQRVWVIEDVRNVSGSLERFLIDRGETVVRLAAHLMAGARRGARTRGKSDPIDALAIARAALREGVENLPTARLAGPEREIRQLALYRERLLDMRTRLSNELRWQLHDLWSDWEIPAKAFAQPGWQTKITNRLARAEQSTQILLARDMIRRIRELTRATKDLYDKITVLVKQVAPQLLAEPGIGVLLAAKFIGEIAGIDRFTSDAQLARLAGCAPIPVSSGRSDRYRLDPGGNRRLNSAFYMLAIIRISHDPRTAVYLAKQRQTGVPQLVGT

SEQ ID NO: 317018 - protein, 434 aa, unidentified
MISFPKRERAQRAAACVGVDAGKFSHTLVVRPQHQPDSRPFGFPTTRAGFDSALAFIRQQTAGAAAETILVGIEFAGNYGFTFAHYLAQLGFPIVSVLPAHTKRWKDVAHNQPLKTDAKDAGTITDLVAQGHFVGFPFLSPAYADLRYLVTARERLSLLRRGAITQLRTLIQVVFPEYEALFPLLTKKTPFAVLRTFPTPQDLLDATKTKVLRVLKSASRGHLGAETYDKLVEAARATLGLPGAQARLKQEILLTLERIALFERQIKALEAELVAALQAVPETPYLLSIPKIAPVTAAIFLGSIGDPRAYESGAQILRVAGLSLVERSSGVLRGTKRISKRGRPLLRQPAYMFAVRSITRGGLFRTEYEACTASPGTAGCSPPSRRRGVGRPHELVVARLASRDDGAPCESRQPAGWPPMVQWLTRPSVRSSFR

SEQ ID NO: 317019 - protein, 427 aa, unidentified
MPYRIAGIDVHKKILAVVVADVEVEGNYQFERRRFGSNPEQLRLLAEWLLEQAVEEVVMESTAQYWKPVWGALERYWKPICQKREGAGPMSGALHLAQAQSNRGRRGRKRDFPDAERLVKRLVAQELTLSFVADAEQRLWRTVMRGKYQLTRNHARVQNRLEALLEEAHIKLSSLVSDLLGASARRMLKALAEGETNPVALAALADQRLRATPAQLCDALGACTELNPVYRRLLKMALEELQFIEQQIGKLDQEMATLLSRHQDAVERLAEVPGLGADSAQQIIAEVGATAATFPSAKNLSSWVGACPGDEESAEVNKSHRSPKGNRHMRRILNQAANAAVKHKGSIFDIVYRRQVPRMGHKQSIGAIGHRLCRLIWLILHQGVRYEERGPAVSRKSRQRRTAKMIRELRLLGYRIEPVSAQFTNPA

SEQ ID NO: 317020 - protein, 311 aa, unidentified
MNSEAYIGVDVSKDLLDVKVLPSEQTQQFSNDDPGVKKLITFVKKIHPQLIVFESTGGLEMLAVSSLVEKHLPTVVINPRQIRDFAKATGRLAKTDSIDADTIARFARDIRPEIRPIKDEHTQLLSALNARRRQIVDMLVAEKNRLYSAPKPNIKSIQKHIQYLERTLEDINNDINKTIKKSPTWRENDRILQSFKGVGPVLSATLLCDLPELGTLNRKKIAALVGVAPLNCDSGRFRGRRRIKGGRADVRRKLYMAAVASIRHNPRMKNFYHKLIDAGKPPKLALTACMRKILTILNAMIKNRTYWIATC

SEQ ID NO: 317021 - protein, 382 aa, unidentified
MRLFVAIDVSSEKLDVCFLDSHDTVLKEICLSNDVNGANAIKEDVLHFHQLYNYKKIVIGMESTSVYSFHPSMFLTEDKDLRALDVEVVVQNPKAIHRYKKLFEEDKTDKIDAFRIADFLRIGRYNKFLIKEEKYVALQRLTRSRYQLVHQQTECKQHFLENLYYKCNTLSKELNTSVFGATMMEILSDSLSLDEIAEMDLEALATLLQKKGKGRFNDPEDLAKTIKKAIRESYRLGKVVQDSVDVVLATYARLIQTLKKQIKEIEKSITAFFEAIPEARYLTSVPGIGVVYAAGIIAEVGQIERFENEAQLAKYTGLYWKKSQSGNFESERTPMTRTGNQYLRYYMVEAANSVQLREATYRAYYLEKYDEVPKYKHKRALV

SEQ ID NO: 317022 - protein, 507 aa, unidentified
METRTNLNEVGKKKLVLGIDVALKNHWAAIGDNKGQEMVKPFQFSNNAEGMSLLEGMIKQTGRAEDKGDVIIGMEPTGIYWKPMGHYLRETGYRVVLINPSHTHKTKELEDNSQTKNDRKDSRVIQTLTREGKYLEPIILRGIYGELRRLGQAYKSALKRGNVISNKVKMIADEYFPEMRGIIKSINGKTAKGLLAEIPFPDDIIRLGKTKFYKKLKKWSNKRFGKKKSLKLWEAAKKSIGVKVGQEAAKIELRQLVEEMELVKRHREELVKEIEEKAKVTEEGKSLIKLPGLGYLSIGKLIGETGSIKSYKGARSLEKLAGLNLIESSSGERHSGKKISKRGRKLMRTTLYQMALASIKNNRAIKYEYQYRIKTKKQKKMKALTAVACKMLRVIYALVSANKEYDERKISRHYYESEIKREENICEWVTPIIPPSGPGYNSGDTVMKNTGHPLPMTLNEVMSGAPVQYRDDTGRNDRVRHRKSGGTNPLVNIEKSWAEENQVVVCK

SEQ ID NO: 317023 - protein, 409 aa, unidentified
METLYERCAGLDVHKDTVVACVRIAMGRSAQREVKTFATTTSGLLELHDWLQSDAVTHVAMEATGVYWKPVWHLLEDSFQLILANASHIKAVPGRKTDINDATWIADLLAHGLIRPSFVPPTPIQELRDVTRARKQLVQERTRYIQRIQKVLEDANLKIDSFITDLLGKSGRAILNALVEGYTSPEVLVSLTTGRLKASRAELREALRGRVTKHHRFMLKLHLRQIDQLDCSIEQLEAQAREATAPFRHQVEQLTAIPGVGETAASVLLAEIGTDMSVFPSAAHLLSWAGMCPRSDESAGKRRSTRLRHGAPWLKATLVQIAWPAIRRKDSYFRALFHRLKARRGPKKAIVAVAASILTTVYHVLRDGTLYQDLGPGHFDSINRDRAAKSLVRRLKALGFDVDVRLATA

SEQ ID NO: 317024 - protein, 457 aa, unidentified
MGHARKRKIPAQLVEDEDYQLRHERVAGVDIAKAKADVCTRLPPAGEGGRRRSRVEEVPATARGILDLGARLLGDGVELVVMESTSDYWRIWYYLLESLGLAVQLVNPSHARQLAGRPKTDRLDCQWIARLAEMGLLRPSFVPPPEIRALRDLTRARLQLVRDRTREWQRLEKLLEGALVKLSSVVSSLAAVKSARVILEAIADGERDPRALAALAHGGVKGGRAAVEAALEGMRLGSHHPMLIRLHLDRITDLDRKAARLEDEIRDALAEIPGAWGVTAGGEPSPDPGPGAAALAAAQRLAEIPGVTPELAAMIIAETGLDMTVFPTAGHLASWAGLAPVSRQSGPRTRKPKKGQGNDYLRGYCTQAAMGAARTATFLGERYRRLARRLGGVRAQCAVGRSILVIIWHLLSDPAARFTDLGPDWNARKGDRDRKVQSHLRQLRALGVEVTITPAAA

SEQ ID NO: 317025 - protein, 348 aa, unidentified
MLADELDFVIGVDSHRDEHALALVACPSGARVQERLIGADERGYAAALAFAVERAAGRRAWAIEGTGSYGKGLARYLTQRDERVHEVERPKRQGGRARAKSDRVDALRAARSLIAAEKPALPRAAGLRESLRVLLQVRTSAVAARRVALNQLRGLLVTCPEPLRAELRSLTRARLLRRCRELEPERTDDPELRSTLQALRLLAARVESLTAETRELEQELRAEAEQIAPALLAERGIGPIGAAQALVSWSHKGRFRSEAAFARLAGAPPIPASSGKTVRHRLDRGGDRKLNNVLHQIVITRRKHDPRTIAYIERRRREGKSEREAIRSLKRYLARHLFRLLETTTTPT

SEQ ID NO: 317026 - protein, 344 aa, unidentified
MDHFGGLDVSVKETSICIVDDTGRIVKEVKVASEPAALLKVLGNPTYRFKRIGLEAGPLSQWLFSALAEAELPVICVETRHMQAVLKAQINKTDRNDARGIAQMIRVGLYRPVHVKTLRSQKLRMLLTHRKLLQSKAIAIENDLRGTLRNFGLKVGMVGKVRLEARIQELVENIPDLAGLVEPLLIVRRALREQIVILHCRLLAIVRDDEVCQRLMTIPGVGPVVSLTYRAAVDVPARFRKSKSVGAVFGLTSSRYQSGEIDWSGKISRCGDEMMRTMLYEAAQSMMHSKKWSWLKAWAMQIARRRGMKKAIVALARRLAVIMHRIWVDGTEFRWSREQAAAAA

SEQ ID NO: 317027 - protein, 453 aa, unidentified
MSVLRKVKIKTNVQLPPIHPHAAGVDIGAKQIQVAVPCDADPKPVRTFTTFTDDLYALRDWLKACGVRTVAMESTGVYWIPLFQILEAAGLEVCLVNARHCKNLPGRKTDVSDCQWLQYLHSVGLLRASFRPPEAICAVRAFLRHRANLVRYASQQVMQLHKALTQMNVQIHNVISDVVGVTGLAILDAVLAGERDGQKLAALKDRRIKASADTIARSLRGDWRPEHLFALRQALATWRHYQQLITECDAATAQTLAGFESRVDVQANPPPPSTLRHKTPHANEPRFEARTELYRITGVELTQVPGFQVNTALTLFGELGPDFVMRFPTAKCFASWLGLCPDNRITGGRVISVKTRDVKSRAAQALRVAAQALWQSKTYLGDCFRRWKARLGTPKAITAMAHKLARILWHLLKYRKAYNPAVWTVAEEKLRRRKLKRLEQNAAAFGFKLVPTT

SEQ ID NO: 317028 - protein, 356 aa, unidentified
MTKVKTNFSYHKVDVGLDVHKRSWNAAVFLDGVYVRNVHQPPSPKALHSFLTSSFPGADYRCAYESGKFGYWIQRELSAMSIECLVVNPADIPCTHKDEVYKTDIRDARSIGQALTAGQLKGIYVPLCEQEADRNLLRHRKRLWRDLVRCKNRVKGFLAFCGIAIPPQFDNPHWSHNFIFWLQQLSFEHSSNRITLDYQVREVVVLRKELLSISNDIRKLMRSKKYKERYYLLRTITGIGPLTAAALLTEIGDMNRFQNFYHLNSFIGLMPMEHSSGEKEVKGRITVRKHRQLRSDLIECAWAAKRNDPALALYYNEQIKRGKNGKAVIVKVARKLLSRIRYVWLSGKPYETAVVQ

SEQ ID NO: 317029 - protein, 388 aa, unidentified
MEVRFVAATPTAGDDALACILIAIELSKASWLVGVQTPLKSKTSQFKLEAGDWEGLLKLIERFREQLARELGRPVEVITCYEAGYDGFWLHRLLEAHGVRNYVLDPASLLVTRRARRAKTDRIDVERMLRALGRYLRGELDACSVVQVPSVEQEDARRLHRERKRLVNERVQHVNRIKGLCALHGIYDYQPMRADRKAELEGLRTGDGRPLPARLKAEIMRELQRLELVLKMIADIEAERDAIVKEAAPQHPNAGKIKALVELRSIGPEIATKLVGEAFYRSFDNRRQLGSFAGMAPSPYSSGSMERDQGISKAGSPIVRTTMIELGWLWLQFQPDSALSIWFRERVGDRKGRVRRIAIVAMARKLLVALWRYLETGLVPVGAVFKPR

SEQ ID NO: 317030 - protein, 411 aa, unidentified
MEVVYKRCCGLDVHKEIVVACLLIREAGKVVKEIRTFLTMTVDLVVLHDWLKAHQVTHVAMESTGIYWRPVFNLLEDDFTVLLVNAAHMKAVPGRKTDVKDCEWIADLLSHGLLKGSFIPPEPIRDLRDLTRYRKSLTDERVRQVQRLQKFLEGANIKLASVASNVMGVSGRAMLEALAAGSTDPQVLSELAKGRLRKKLPELKKALEGRFRSHHGFMVAEILTHLDFLDEAIERVSQEVSNRIVPFSEIVESMDLVPGINERVAEGVLSEMGVNMSCFPSHRHAASWAGLCPGNNESAGKRKSGKTRKGNPWLRRYLIEASWAAVRKRGTYLSALYYRLVPRRGKNKAIIAVAHSILVMVYHILKDRVPYHELGSDYFNKLNAAYVQRHHVKRLESLGFKVILEPISKAA

SEQ ID NO: 317031 - protein, 418 aa, unidentified
MNEELFARLSRRYLALDIHKHYSVVAGVNFEGQVILEPVRIEHADLEGWLKKHIQPTDYVVIESTTNAWHIYDLLEPLAEKVLVANPIKVKQIAQARVKTDIRDTLILARLLAANMVPVIWVPPAHVRNLRYLLSQRRHLVEMHTATVNRMHSVAHRHHLSHPRGKRFNKKNTEWQQADALSDSEKFQLELDMNIKKHLAEQTEKITEKLRRMSHRKPWAESMMYLMQLPGFGVITGMTVLAAIGEITRFESPRHLASYSGLIPGLEQSGVKLRGKKITKEGRKDLRWAMVEVAQRAVKSDPLWKHRFNALQRRMHRNQAIVAIARRLLELVWYVLSRKQPYRNFSHERIAYKYLTWSWQLNDKDRDGLTRQQFTRYYLMRLGIGHDLEQIALNPRYKRRLASEAELLVLRPELNQTE

SEQ ID NO: 317032 - protein, 366 aa, unidentified
MEQHNTIVGLDVHKETVVGGVLTPNGDEVRENFKIENTEKSIQKMADRFVNRKPVTFVYEAGPCGYTLHRHLTSLGFECVVISPAHTPIRTGDRVKTDRRDAEKLARLYRAGELTVVRVPTSEEEAARDLVRVREDLVEDRLRARHRMSKFLLRQGRVWRETKAWGVAHEAWLRAQKYDTLYQQDTHNAYMRTLDEVDEHLEGLTQQVMDLAAREPYHRLVVCLNGLKGIDTLSAVTLAVEAQEFGRFETARRFMGYAGLGISEDSTGERIRRGNLTKTGNAHIRRILGEAAWSYRSGGTGKALLERRKRCPEKVQQIARKAQDRLHRKFWRMVKKGKRSQVAVMAVGRELAGFVWAIAHETLKTA

SEQ ID NO: 317033 - protein, 421 aa, unidentified
MTDERRWYTGVDWASESHHVLLTDGDGRKIGEKIFKHGGEGLAEMAAWLMAMSGVAEPRQIHIAIEVPHGPVVETLIERSFKVHAINPKQMDRFRDRFTLAGAKDDSRDAEVMASALRTDPRCVRLLAAADPVVIELREWSRIAEDLGAERNRLTNRLREQLWRCFPAMLDLESDLGAEWLLDLWETAPTPHKAIRIREATVAKVLKRNRVRRFDAAHVLDVLRKPPVQVAAGTTEAASAHITTLTARIRLINQQPREAHRQLNALTARLIPSEETGLRQRKQNDVAILASLPGVGRIVLATLLAEAFDALQRRDYAASRSLTGVAPVTKKSGKSCIVVQSCVVVRRQACHDRLANAMYHWARVAVQHDPRSRSKYAALRSRGHSHGRALRSIADRLLNVACAMLKTGTTFNPSLATEKSP

SEQ ID NO: 317034 - protein, 411 aa, unidentified
MEIVYERCCGLDVHKQTVVACVILSGPGRTVQKEVRSFGTMTPDLLALGDWLASLAVSHVAMESTGVYWQPVWNLLEDRFHLLLANARHIKAVPGRKTDVKDAEWIADLLRHGLIQASFVPDRRQRELRELTRYRTSLLGERSAELNRLQKTLEGANIKLASVASDIDGTSARAMLAALVAGSSDAGALAELARGRLREKLPQLQRALQGRFGEHQRFLVAQQLAHLDFLEEAVAQVSGEIEERLRPFEQAAVERLDAIPGVGVRTAQVIVAEVGADVDRFPTAAHLASWAGMCPGNNESAGKRLSGKTRKGDKWLRAALVEAALAAGRTRRSYLGEQYRRLVPRRGKKKAAAAVGHSILTIVYYLLSRKVAYADLGPNYFDIRDRAALEHRLVHRLQGLGNKVTLEPLPV

SEQ ID NO: 317035 - protein, 339 aa, unidentified
MHKTNTIGVDLAKNVFHQCTQDHKGHILNKAKLGRSQFKQFLGVTAASRIVFESCATAHYWSRVASRHGHDVKLIHPAYVKAYLKTNKNDFNDAEAICEADSRPTMRYVSTKTIEQQDIQLLHRIRQRQVQARTALVNQIRGQLLEYGITIPQGISQVRGQLSGILEDADNELTPQARMLFNALGQELYALDDRVKLADQQIKQLANETPTCLRLMKIPGIGPMTATALIAAIGDTNSFKNGRELSAWLGLVPRQYSTGGQQRLLGISKRGDSYVRSLLVQGAISAITRCKNRSDSQLVWASQLREKKGLQKAAVALANKTARIVWSVMARDHDYVAIV

SEQ ID NO: 317036 - protein, 421 aa, unidentified
MQVLYERCAAVDVGKNVIAVAVRLPGDGPGGRATVKRTFKTFYGVLGEAARWLSSLGVTHVAMEATGIYSMPIYHALIEHGEFTQVLVCNAGHVKNVPGRKTDLADAEWLVHLLECGLLRGSFIPPADIKAARDVIRYRTKVVQSRASEVQRLGNVLQDAGIKIDSVASSITTKSGRAMIEALIDGERRGQVLAQLAKGTMRAKIPDLSMALEGRFGDHHALMCRLHLDHIGHLDAMIAKLDAQIQAMMAPFHAQRDLLTTTPGIGPLAAAAVIAEIGADVTGFFPDAAHLASWAGICPGNHESAGKRHSGKPRHGNQHLQPVLVECAWAAVRHDGYLKALYHRHVMKWGGYRSPVAKKKAIIVVAHAMLVIIWHILATGRPYDELGADFFTRRLDPERETRRLIAKLEALGHQVSLQPAA

SEQ ID NO: 317037 - protein, 345 aa, unidentified
MELHTIGIDLGKTVFHLVGLNLRGEVVVRKKFSRKQLLHFTANLQVELIGMEACGGAHFLGRALREQGHEVRLMPAQYVKPYVKTNKSDYIDAEAIAEAVGRPKMRFVPIKSDDQLDLQSLHRVRERWVMRRTAVINQIRGLLLERGITLRKGRCHVDAALPGILEDASAKLSGALRVLLAQLKLELDHLQMRIDEADAVIKKTAGENEACRRLVAIPGIGPITATAIIAAIGNGAAFKKGREFAAWLGIVPGEYTTGGKQKLLGISKRGNSYLRRLFVHGARAVLQQSAKQSSGLSAWLAQLTTRTHRNVAAVALANKLARMAWAVLAKNEAYRPPILVAAAPA

SEQ ID NO: 317038 - protein, 397 aa, unidentified
MNGQTDFTVKVEPEGFKNTLFLAMELSRSTWLVATLAPRLGDKISVHAIPGGDTKRLLELIGRLRAKLQDKDVSRVRTVCCYEAGYDGFWLHRVLVNHGIENHVLDPASLPIDRRAKHIKTDNIDAKRLLRAIVGFVQGDPQSCRVVRAPTPEEEDARRLHRERQRLVRERTGHLNRIKALLITHGIRALRITDGKWCERLDKMRTGDGRPIPARLKIEIEREWKRLKVVAEQVREVEAERDRLVKGSEPSGDACTEKLRQLVKLHGIGAEFATVLTREVFYRPFQNRRQVASYVGLTPAPYDSGDTKHDQGINKAGNTRARVIAVQMAWLWLRYQSKSELSLWYYRRVGDLKGRVRRIMIIALARKLVIALWRYVETGKVPTGASSKMDGTHLSYG

SEQ ID NO: 317039 - protein, 385 aa, unidentified
MSQLLNIAEAVQYDRTLVLAIELSSKSWVLAAQVPGLPQTKAKRTIEPGKLALQAAIDGYRARAVAAGHPVDRVIATYEAGWSGFWLARWLIAKGVEVYVVQPSSVPVDRRMRRAKSDGIDAELLLRTLLAWLRGEPRVCSMVPIPDEADEDARRCVRERAELVSERVSLTNRIGAVLATLGVDDYNPLLQSRRRRLADLRTGLGEPIPPNALAKIERLLSRLELVLAQIAELERDRDAVAAAAAPNEAGKMIQQLCTLRGIGVQSATVLVHEAFVRRFANGKALGSYAGLTATPYSSGGIEREQGIGKAGNRRLRTVMVELAWLWQRYQPGAAQVTWFRERTGSSGRRVRKVMVVALARKLLIALWRFVVDGVVPEGAIMKPSV

SEQ ID NO: 317040 - protein, 410 aa, unidentified
MEVILSCCTGLDVHKDSVEACVRRTSAGGKVEHEVRHWGTTTRELVEMSDWLSSLRVTHVAMESTGVYWKPIFNILEEHFEILLANAHHLKNVPGRKTDIRDCQWIAQLLQHGLLRGSFIPPRRQRELRDLTRQRTQLVDEASRISNRVQKVLEDANVKLGSVASNVVGVSGRLMLEAIVSGQDDPAQLADLAKRRLRAKIPQLEQALYGKLTEHHRWMLGLLLDQLKSTEQFIARLDERIAELTRPQQPVLEKLNAIPGVDRRVAEVLLAEIGPDVTPFPTDAHLASWAGICPGNNESAGKKRSGKTTKGSRWLRQALVQAAWAASHKKNSYFQAHARNLMHRRGRKRGLVAVAHSLLTVIYHMLKDGTVYRDLGPQFLDRLRATHLIRFHVRRLQHLGMEVSVTPAQA

SEQ ID NO: 317041 - protein, 387 aa, unidentified
MQKPHDNSKASPAAFTQDNTLIAVIELSLSSWLVGGLIPGVSREPPKKLEPNPEDLLKLLHRWRDEAIKAGRLITRIAVAYETGRDSFWLARWLRERGIDAHVIHATSVTVSREHRRAKTDRLDTAMLKRGFLGWLRGERGHCTVAIVPTMEEEDAKRPYRERDGLVHEQTRVVNRMKSALIQFGVRNFNPKLRKASVKLETVRTPESKSLPPNTIAALRRDMERLKIIKQQIKAIEQARLQQFEQKPEALANRMIYLLARIYGLGLETADLLVHELLSRTLRDRKAIARYAGLTGSPDESGSKRREKGLSRSGNARVRKIMIQLAWRMVKFQPDSALVQWFKQRTENAKGSRKPMIVALARKLIIALWRYANDGVIPEGFRLHSAA

SEQ ID NO: 317042 - protein, 425 aa, unidentified
MPTTDYQVEASQFAAWIGIDWADQEHAVCVVDAATGRSDTSTLAHDPGAIEDWAAELHNRFPGPIAVCLEQSKGALLYALMKYDFLVLFPINPKQLACYREALAPSGAKDDPVDAQLLVEFVRRYPDRLRPWRPDDQATRLIAILNEDRRGLIDLRTELTNRLQSRLKLYFPLVLELFRGRTKLYAPVVCELVLRWAALAELQHADPEAIDAFFKLHHLHQKSIDQNLAKIALARPLTDDAAIVRSGRLQAQSLARQLLDLNDAIARCEAELEKLMETHPDAPLFRQLPGAGDALAPRLLAAFGTDRERIGSAGDMQSYSGIAPVTRRSGKSQFVTRRWACPNFLRQTFHEFARCSIAKSVWAAAYYRLQRDRGKKHHAAVRALAFKWIRILYACWKNHTLYNEFHYLQQLESQQSPLLAYVRKT

SEQ ID NO: 317043 - protein, 408 aa, unidentified
MRIIGLDMHRAFAEAVALEDGVYKRIGRIGMTRDHLRAFAETLHPTDHVIVEATGNATAVLEILAPKVERVAVANPFQVHLIARAKTRTDKIDARVLAQLYAAGFLPEVWIPDEAPLARRRQVTRRNQLVKSRVRLKLIAQSILHAPLGPRCPHADLFGGKGRAWMLAQKLPDDERAAIVSHLAECDRQTEALKLVERDIAEVALDDVSVKRLMTIPGIDMVVAVGVMAAIGRIDRFASPDKLVAYFGLTPSVRQSGDGPARHGRISKRGRSHARHLLVEAAWQTVRNPGPMRAFYERVKGRRGPHVAAVAVARKLAVPTWHMLTKGEDYAWGRPALMARKLRSLELTAGKPARNGQKGSAYDDTLPERRRAEREQVEQSGRAYRRLTEHWRRQGSQKGAGAANEERR

SEQ ID NO: 317044 - protein, 407 aa, unidentified
MICVGIDVSKRKSTVCFMAPGDKIIRRPFDVKHTKEELQPLVDEIRVQAKYDEIKVVMESTGVYHLSIAYFLQQNGIFVSVVNALKVANFNKAENFRHTKTDSIDSTNIARYGIAYWAKLPQFDLNGDKYFLLKRLCDAYLNFSEERSRILLQLQSQLEQTMPGIFDLFGGFDINSGKDKLLDFLEKYCHIEDIIAKSEADFVASYSEWAKEKGYRSNESKAATIYAQAKNGIPSIPNNPIVRETIMWYVGLLRRADEALMASLTRMEDIAKDLPEYELVGEMGGVGRVTRVALIAQIGDVRRFKNKHSLICFAGLTPSIHESGKFRASQNHIVKKGPARLRKVLYQVMMSLVMHKIPKDDAVYRFIKKKEAEGKYKKVAKVAGMAKFLRIYYGRVMHLYRDLGLAA

SEQ ID NO: 317045 - protein, 437 aa, unidentified
MRKFLECCAGIDIGKREITVTILTGSTAVEPVQQTQTFGTTVQELNRCLQWLLAQQCSTVVMESTGTYWVPVWNVLHDSVAVIVANPEHVKARRGEKTDPEDSRRLAERLRVGDVRGSFVPSAQIVELRDLTRRRKRLLSAANSERNRIQKLLEQANVKIGNVVSDVFGVSGQRILHALLQHPQLPPADLAELAKGRLRHKRQALIETLQGHRLNDHLRWMIQHSLDHLVFLEKQLTELSQRTLQKLQPLEREYELLQTIPGIAAETAAVILAETGGNMAQFPSPKHLTSWAGVCPGNNRSAGKQKSTSIKRANKWLLAALVQSAWATVRQRGSIFKKRFYRQMQHRGKKRALIAAARSLLTVVWQVLQHMTPYDEPANEVFQERERGKKIQHHLRRLRQLGVDISALELPPPTPSERTRFLPGTLHPLGALGIHAR

SEQ ID NO: 317046 - protein, 378 aa, unidentified
MKRILKIGMDVHSTNYTLCAMEPVIGAEDRVFANVQVTPDYKNIILFIENLKQKLGLNDTYDIECGYEAGCLGYSLYNQLTAAGVKCVILAPTTMLTEQGQRIKTDSRDAHLIAQCLSYGGYHPVYIPTEQDDSVKEYLRMRDDHKKALKKIKQQIGMFCMRHGYYYEGTKWTIAHLKWLKKLELTPMYQETLNEYLTSYDEQTAKIERFDARIEEIASQAEYAEKVKKLGCFLGIKTHTALSLIVETGDFTRFAKGNVYAAYLGLAPGEHSSAVKVNRLGITKAGNSHLRLLLVEAAGGICKGAIGHKSKALRQRQQGNSAEVIAYADKANARLRSKYYRLIRHGKKRNVAVAAIARELACFVWGMMTDNINVIEAA

SEQ ID NO: 317047 - protein, 239 aa, unidentified
MQTQLSQYTAVIGIDWADKKHDVCVQDMATGKRRASQVRHRAEDLDEWARSLHRRFGGPIAVAVELSKGPIITVLQKYDFFVIFPVEPAGLASYRRTFALSGAKDDPTDAEFALKLLLSHAERFNNAAEVQKYGGVAPVTQRSGQSTWIHWRWQCPTFLRQTFVEWSAQTVNKSYWAGLYYHQQRAKGSSHQAAVRALAFKWIRILYRCWKTKTPYDETRYLKALQERGSPLLKTADAA

SEQ ID NO: 317048 - protein, 396 aa, unidentified
MTAIWAGIDAGKTHHHCVVVDDTGKRLLSRRVANDEPELLRLLADTLALGDEVTWGIDLADRGAALLIDLLLNHGQHTLYIPGMAVNRASEGYRGEGKTDAKDAAIIADQARIRRDLQPLRPGDELVTELKILTVHRRDLTDDRTRAINRLRGRLTGIFPALERALDLTNAGPLVLLTGYQTPAAIRRTGVRRLETWLRNRKVRGAAQLAQATMEAAESQHTSVTGEKPTARLVHTLAKEVMRLNEQVAEIDKLIEARFREHRHAEVIASMPGIGPLLGAEFLAATGGDMMAFATPDRLAGFAGVAPAPRDSGKISGNLHRPKRYSRGLQRVFYTSALISIRYCDESRRFYDRKRAEGKRHTQAVLALARRRVNVLWALLRDGRCYEPIPPVTAAA

SEQ ID NO: 317049 - protein, 343 aa, unidentified
MQVVRIGLDLAKYVFAVHGVDERGKIALRKTLRRDSVVRFFANLPPCMVGMEASNGAHYWARVLTDLGHQVRLISPHFVTPYVKSNKNDRNDAEAICEAISRPSMRFVPPKSTEQLAVQAIHRIRRRLVSDRVKLVNQVRGLLAEHGIVIPRDITQLRRGLAELIARCDDDLSELVRSLMTELREELAELDRRITSYDRRIREIFRNSEPCQRLGKIEGIGPITATALIAAVGDRTCFKNGRQFAAWLGLVPKQLSSGGRARLVGISKRGDRYLRTLMIHGARAALARAGGKQDPRSLWLGKLRNRRHPNVAAVALANKNARIVWAMLAGNAAYQPELSMKTA

SEQ ID NO: 317050 - protein, 471 aa, unidentified
MLIAAAGVVADIGLQPRVRRRVWREDPGGPRTVATSTNPSIRFAWSSPAASNPNMGGEAVKRIRERVAGLDVHRDTVVACCQVKQPDRSIEVTKQTFATTANGLGELAAWLSDSGVETVAMEATGVYWKPVYYCLEGLFDELWLCNAQHVKNVPGRKTDLSDAEWLADVAAHGMVRPSFVPPAEIRELRDVTRYRKTQVEARVKEIQRLEKTLQDAGIKLSSVASKVWSQSSRAMIEAMIDGERDPSVLAQMAKSRLRAKIPQLEEAFSGRFDSHHALVCRQVIEHIDFLDRSIATLTADVTERLCPFESAVTILCSIPGVSRTTAEVMIAEMGVDMTRFPTSGHLCAWAGVAPASHESAGKRHPVGTRKGSTWLQRALVEAARGASRTKGTYLSAQYSRLARRRGSNKATIAVAHSILDVSWHLLTNGALYDDPGAQFFELRHDPAVEAKRLQRRIEDLGFDVSIAPAAA

SEQ ID NO: 317051 - protein, 368 aa, unidentified
MGKHIMVGCDLHDASMLLKVAVDRQESEKLYFDNDPEGRQRMIAELKRRKKAAKADRIYFAYEASGLGFTLYDELTEAGITCFVLAPSRMERSVKQRRNKTDDKDAERILKELRGHLLGGNELPAIWVPDPQTRDDRLVVRARLNVGDKRTGVKTQIRSLLKLHDVPRASRTPGGRTKAYRAWLQSLSDSEQALPWGARIALKTLLAQLAALDQELARLDEAVRRMSEFPRYAEAVRALTELPGVGILMAMVFLTEMGDLSRFPNREAVGAYLGLAPSADESGEQQDHKGHITGHGSGRVRYMLCQITWVRLRLDPATKERYERIAARNPKHKKIAVVAMMRQLAVVLWHTALEAQRRAGVFSKGTAA

SEQ ID NO: 317052 - protein, 360 aa, unidentified
MLLKYSVGVDVSCKSLKCCISTIDKEQKVKVKSSTTVSNNLSGFKNLIDWIKKHYNDAEVPLFVCMEATGVYYEQCAYYLHDKGFKVVVVLPNKSKKYFQALGLKSKNDKIDAKGLAQMCAEQHLKTWEPMDDFYYVLRHLTRHHQSLQDQKSALKNQLHAIQHSAYQSKTILQQMNQTIALFDKQIKQIGKAIKEHIASNPEAKIKFDNVCAIKGLGIISVATVVAETNGFILFENYKQLVSYAGYDVVENQSGNHIGKTRISKKGNPRIRRILHMPALVVKKYQEPPFINLYNRTFERHGIKMKSYVAIQKKLLVMIYYLWKKNEKYNPNYDMNIQEKELVLPSLLAFEKGKNEVASL

SEQ ID NO: 317053 - protein, 411 aa, unidentified
MERVVERVAGLDVHKDTVVATVRVPGKGAKRHQETHTFGTTLTDLLTLQDWLVSHRVTLVGMEATGVYWKPVYYVLEDTLECWLLNARHLKAVPGRKTDVADSAWIAQLLEHGLVRPSFVPPKPIRDLRDLTRYRKAQIQERSREAQRLDKVLQDAGIKLSSVATDLQGKSARDMLDAMVSGTTDPEVLAEMARGRMRRKLPALREALRGRFRPHHALIVGEIMGKLDYLDEMIERLSEEIGRLIDPFRPAVELLRTIPGVDQRTAEALLSEIGADMSRFASAAHLASWAGMCPGNNASGGRHRSGRTRKGSKWLRVALVESAKATCRTKETFLSAQYHRLKGRRGHAKATVAVGHSILVIVYHLLSRREPYTELGAAHYVERHGGERYRQRLVANLERMGYSVTLEPTAA

SEQ ID NO: 317054 - protein, 356 aa, unidentified
MLKIVYPICCGMDIHKSFLVACIASTNEQGVTTYKSKRFSTFIGDLRRCAVWLSENNCKDVCMESTGKYWIPIYNVLEASCSIVLAHPKYVKAIRGKKTDKKDAKWIADIFKHNLVSGSFIPPADIRQLRDLVRYHWKLTNFTTGEKNRAQNCLTVSNIKLDDVFSDVFGKAASAITSRLLKNNEPFDVAPFLNKKIKTPIEKILAAVDGEMCVEQAEKLRIIRSHMDSLKLCKANLESLILTTAEKYLPQLDLVMTVPGIQSFSAIAIISEIGADMSVFPSSKHCCSWAGLTPQNNESAGKKKTTRISRAGAYIKPLLVQCALCAVRAKQFPEVRNRYLVLKKRRGHKKAIIAIA

SEQ ID NO: 317055 - protein, 472 aa, unidentified
MSKGSGSGMTRGDRRRNARRERLRALLPRDGAVVGIDLAEDKQALAVIDHDVRVLARKTVRVKAFGLGEALDWAVGQARVKGFDRVTVACEPTGPRWMQVQRLCAERGLPLVCIQPLISHIAREQQDYTTHKTDESDCVMIARLAVELHCYIPEELDETWAHLRHLGRRRQQLITAQTASGQRIMDFLSVAWPAVTETCAGPVESRTWLAALEVVTARCGADPGTLAAMGREGFTALTRGAVAGWGITRAHGPICARVFAALTDTEGAVTWSRRGLLRRVADELGDLKRTRVQLRQVEADMVAVLDELGLSRLADIPGLTAVGAAAILAETGDPRRYDSSSSLVKHAGMSPSDNASGAFSGQAHISRRGRPGLRLTVWRAVWPMLQYNPVMAAKYQAMTRAADAAAAGAGPRQGTAAQAAARARRAKARVACAASLLRWIYCMVVHDTSWDPAVASGAASRHDTARTQAEAA

SEQ ID NO: 317056 - protein, 446 aa, unidentified
MQVVYPRCAGLDVHKKSVVVCVRLISIDGTLTSHLRTFGTTTAELLNLAAWLLALEVTHVALESTGEFWKPVYNLLEGSFEVLVVNAAHIKYVPGRKTDVKDAEWIAELLAHGLLRPSFVPPAPQRALRDLTRQRTHLIQERASVVNRMQKVLEWANIKLSSVVSDITGVSARAMLQALVDGQTDVTVLAQLAKGRLRSKLIELEQALRGTLQPHHAFMIAQHLALLDVFDEQIAAFDERIRVAIEGTRPDAPSADGNAGAEHGTSDPTAASEASTAPDGAWAAQAILDAIPGIGLRVAETILAELGTDMSRFPSQGHVSSWAGLAPGQHESAGKRKSTRIRDGNKYLRSVLIQAAWAAVKQPDTFLAAFYRRLAARRGKKKAIIALAHKLLVIIYTLLRTGQVYQERGAAALDSQQKDRIVHRLERRIAQLGYKVQLEPITAAAS

SEQ ID NO: 317057 - protein, 366 aa, unidentified
MAKVRLEAIPAQGESHAPIRPAPGTAVSMAIDLSRSKLVYCVRWKNAEQRRLSTPAALSHLQAVVGQYRDCQLHVAYEACGFGYEPAWWLGAQQIPVTVIAPSRVERAPGLGVKTDRLDAGHLARKLEKGELKGIYIPPRLVHAQRQLGRTYAQCVRERQRAQIRLRSLLQEQGRLGPEPAAGWTAYRTWLATQALPAPIRTCVQVHEQLRATADHHAQALRRELLHLARTAEYRALVRALCTQAGVGPLSAIRLRLELGSIDRFASGAALAHYLGLTPSQYSSGELDQRGHILKCGPGTLRGLVLQCAWAAVRPGRDAALRAVFERLAPRRGRKRAIVAVARRLAVQLHRRWWAVQHPAPSGPVS

SEQ ID NO: 317058 - protein, 318 aa, unidentified
MNTKINQSINVGVDTGKTQLDIHIRPLDLFFSVENNDKGIKKALKTINSHSPERIVIEATGRLEMPFVLACAEAQLPIVRANPVHIKRFAGAIGRRAKNDRLDAELIAHYGEAIKPALTVIKPKNIRLMSDLVIRRNQLLSMQTMEKNRIQILPASLHPTIKPMLTTIKNQITKLEEKLVKLIEDSPEYQAKNTILQSVPGIGNIAAASIISNVPELGYITNKQAASLIGVAPITRESGRYKGKRVIQGGRAQVRTVLYMAMMSAMQCNPVFKATYARLVAAGKPKKVAIIACVRKMVVTLNSMLRDGAMWDENTAKN

SEQ ID NO: 317059 - protein, 312 aa, unidentified
MPCKTEVAVARTIGIDTGKNTLHMVGLDQEGAIVLREKVSRTRIAARLVNVPRCLVGIEAGMASHHVARELLALGHEVKQVPPAYAKPFRQGHKNDFRDAYAVAEAVQRPSTRCVPVKTADQLDLQALHRVRSRLIGNRTAVINQLRGFLLEHGIPVRQGLRFLRQQLPQILATRNDVLSPRMVRIIGALIGDWTYLDERIERVTDEIETLARADENCRRLMTVPGIGPIIASAMVAAIGNGAAFAKGRDFAAWLGLVPKQMSTGDRTILGRITKRGPNRARDQIGAATRSRDPVSRPGCSGLRIHFRLNGS

SEQ ID NO: 317060 - protein, 387 aa, unidentified
MPQPNDLSRSLVRFEPDTTLVAVIELSQSSWLIAGTIPGVERQPLKKIAPDETTLLGVLHRWRDEAVRSGRTITRIAVAFEAGRDGFWLARWLNGHGTEAHVIHSTSVAISREHKRAKTDRLDTAMLIRVFQGWLRGERGHCGMVAVPTIEEEDAKRPSRERENLIGERTRIINRMKSVLVWLGIRGFKPELRKARVLLESLRTPEELPIPPNTLDEMRRDIARLAIVRDQIKAIEQARLERLEQAPQTGPNAMVRLLASILGVGIETADMLVQEVLSRNLRDRRAVARYAGLTGAPDESGAKRREKGLAKSGNARVRRGLIQLAWRFLLFQKDCALTLWFRSRTEGPSGARKTKMIVALARKLLIALWRMVTSGEVPHGVVLRQAI

SEQ ID NO: 317061 - protein, 427 aa, unidentified
MNYTQNHKISQITSETLIIGIDIAKDKHVARAQDDRGFEFGKRLIFENRIHGFIKLIDWMDFHKREHGKNRYIVGVEPTGHYWLSLAYFLKAKGIDLVVVNPMHVKKSKELDDNSPTKNDTKDARVIAQLIKDGRYSVPNLLEGVYAELREGVKLRDQLIKQLMVAEGRIQNHIQRYFPEFFDVFGDWEGKAALATLKLFPFPNAIKKKTPEEVLTEWKPFVQRGVGIKRASKLVEAAKKSVGIQVGTAFARMEIECLLKQYELFKEQLEELDEKLEVLVETLPGAKQMMNISGLGTTTVALFFAEVGDITKYSHPQQLVNLAGLSLREHSSGKYKGQTRITKRGRSRLRRALYLAIRPLVAHNPTFKALHKHYTTRSEKPLKKQQSLIALCCKLLRVLFVIGHKQCEFDGSKLLTGLPEKQVLKIA

SEQ ID NO: 317062 - protein, 341 aa, unidentified
MEQFIGLDVSMKDTFISIREGGKRIWRGKCASDPKMIAEVIRKRAPNAERVVFETGPLSVWFYHALKLEGVPAICIDARHAKAALDMAPNKTDSNDADGLAHICEVGFYREVRVKNIDSMLVRTLVAARTQMIKMTTQMTNQIRGFMKTFGLVVPNGGGSVFEGHVRNLLVSNAGLEQIILPMLEAWRGMRVRAAQLSRQLVASARVSEKCQLLTSIPGVGAVTASSFVAAIEDPANFSKSRSVGAWIGLTTKRYQSGEVDYDGHISRRGDNHLRGPLYEAAAVILTRATADSALRIWGLKLKEKIDFQRAAVAVARKLAVIMHTMLKTGELSDRSIAAAA

SEQ ID NO: 317063 - protein, 357 aa, unidentified
MESQEVKYVGVDCGKKSIEVVRINSENSLERRQFSTTESGINNLLQWLTLNDIVGLEAGSQSFRIAKSILNKGVQVIVLNPGNLATIYQSLKKTDKEDSLKIARLIQRHPIEELPTVPIPNDEEEDNRRLCTEQENWTRQLTQSKNRLHSLFTQAGLTHITKKHLRTKANREISVALLPSRYQKEAERILKVLDLVEQNLKLIEKEIQEALQKNKAYVQTIMSMPGIGMITSLAIMSYMGDCKRFSSAKQAAYYAGLVPRVDISGDTVRYGRIINRGCHSIRRVIVQAAWSLVRCQHGGKVKEFYQRLYLKKGAKKSIIATSRKMIEVLYVMIRTGKLFDSMPENILNRKLTQYGLM

SEQ ID NO: 317064 - protein, 409 aa, unidentified
MEILYARCAGLDVHKESVAACVLTPGSGTEPNREIREFGTTTGELKLLREWLQQNGITHAAMESTGVYWKPVFNILESACQLIVVNARHIKQVPGRKTDKADCAWIASLLRHGLLEASFVPETEIRQLRDLCRTRTTLVRECVQVGNRLRKVLEDANIKLDSVASDALGVSGREMIQALVSGKTDPAELAALARGRLRAKLPELEKALEGQVTAHHRFLLRELMRQLAFLEGQVERFDKQIARQMRPFEWAAGLLITMPGVDRTAACGLIAEIGTDMSRFPTSRHLASWAGLCPGNNESAGNRRSGKSHRGNRWIRGLMTEIAWAASRTKESYSSAQYRRLTGHRGKKRALVAVANSLLQAAWHILSQRQGYIELGAQYLETLHRKEIERNLIRRLEKLGHKVILEPVA

SEQ ID NO: 317065 - protein, 403 aa, unidentified
MNAVGIDVSKGKSMVAIMRPFGEIVASPFEVKHTASDIKSLVKLINSIEGESRIVMEHTGRYYQVLAHQLSQTNLFVSAINPKLIKDFDNDSLRKVKSDKADAVKIARYALDKWQNLKQYSVMDELRNQLKTMNRQFGFYMKHKTAMKNNLIGILDQTYPGVNTYFDSPARSDGSQKWVDFASTYWHVDCVRKMSLNAFIDHYQKWCKRKKYNFSQSKAEEIYGKAKELVPVLPKDEITKLIIKQAIDQLNSASVTVEELRSLMDKTASKLPEYPIVMQMKGVGSSLGPQLMAEIGDVSRFTHKGAITAFAGVDPGVNESGSYEQKSVPTSKRGSSGLRKTLFQIMDVLIKTHPQDDPVYQFLDKKRAQGKPYYVYMTAGANKFLRIYYGRVKEYLSSLPESE

SEQ ID NO: 317066 - protein, 364 aa, unidentified
MKRKVYVGMDVHKETIQIAYLTSNSKEILKEQQIKHNEVQIKKFIKKLKTEWNEIYCCYEAGVTGYPLYRYLKSLGVNCILVAPGKIPRQSSDKIKTDKRDAIKLARLMRSGELESIHVPSEEDEAVRDYLRSRDSLRLDLGRNRQRLMKFLLRKDIKYSTTKYWTVSHYKWLNNLHFNNEILQETFNDYYSRVRVQEENLKAMDKKIQEIAESEPYREKVGILRCFRGVDYLTAMFLLCEVNDFKRFKTAGSFMSFLGLVPGEYSSGSKRKQTGITKTGSPRLRRILTEAAWQHRFPGTGSKIITARRSGQPALVVALAEKASLRLHKKFRNLQLRGKTPQVMITAVSRELSGFLWAAMNLVA

SEQ ID NO: 317067 - protein, 318 aa, unidentified
MNTIGIDISKEWFDCLCWQRQRNRRFTNNHSGWKAFKDWIIDEKVHVIMEASGPYYLGLASYLYEQGLKISVVNPLVIRRYGQMKLTRTKTDAKDAALLAQYGIDQQPDLWSPPSKARQGLKKLMSMREGLVRQKAILTGQAEAFTQNKEIEPMVNELNGKMQKDIQKNITRIDRRMAALAEEHYQQVMEALLTIPGIGPKTAIELVTVTDGFGRFDSPRKLASYVGICPRIWESGSSVKGRGSISKLGCPQLRKLLYMCSWSAKRSNPACRKMYDRLKKRGKPEKVIKVAIAHKLLRQAFAVGKRCEAFNEKKALAA

SEQ ID NO: 317068 - protein, 490 aa, unidentified
MNNIGSNRVIGLDLGVTSAHSAVVLDVTGQVLLRRRVVSTVESLAELEQAALRGAPEQTHLTVVIEPTGPMWLPIAVYFGRGGHTVLRVSSAKAADLRRFLSRHAKSNGIDAETLARLPMVAPAGLHPVELSGTDRASLDRRVRTVARLTREIGQRKVRIRALAQTLIPTIGQALGDGLNRTDLAVLERYGDPRALLGAGRARLLRLVRTESRGKLGDDKVRVLRTAAEQALQLWGDDPAIALSDLAEEITTEIRLLRLAETERARHEATRDDALTRVDPDGLATSLPGLGPVGATQLLAAMGRPGRFRNAAAFKSFTGLAPKASETGNTDRKSQPMSKAGNSVLRSQLIQSANTARQLDPQLAAIYYAQMTQRGAPHLKALCVVAARLAERAWLTLSKAEPYIIRDLQGRPISPQRARELIAEQFTVPADVRRRRRSNKLAGRAPQQCSRHAKSRHTAGHEATLPSNTITPPNPAVNPTQHTALTPTPA

SEQ ID NO: 317069 - protein, 376 aa, unidentified
MERGSLMLNTTTFVGLDVHARSIKAVALDAMTGEVRSATFAYDAAAVAEWVGSLDPAAKCVYESGVTGFDLQKRLAALGVDRVVGAVSKMIKPSADRKRKNDRNDAEFLARMLSVGNVVEVWVPDDGCEAARDLVRALDDAREDLKRCKQRLSKFLMRHGYAFSETTPTGRRKGNWTAAHWAWIRSIEFPEKADDDVLAYYIDATRQAMEDKKRLEKLVEAEASKPRWKKRVDSLRCLKGVDAMTAADIVFEAGEFSRFKNAGSFAAWLGLTPSEHSSGESARQGGITKAGNKHLRRVLVEAAWHYISASPHPKDLAKGQAPDPAARRHAAKGIRRLVKRREEMLGRGVHKNKANVATARELACWCWAVGRMVENG

SEQ ID NO: 317070 - protein, 378 aa, unidentified
MSVIDSDTQATRGRQAGVGRAGPRGMGVTVGVDTHQRTHHAVVLDAAGMLRGDREFAACARGYEELVTWALALAGSGPAGSGLIEAVGVESTGSYGAGLTRHLLVAGLSVIEVARPEKSTRARHGKSDPIDAESAARQVQAGTATGRPKISTGIVEAIRILKMPRDGAVHDRTRAYNQLRDLVTTAPASIHDELIGLSGPQRVARALAWRPDRDRLADPTQAAKRALRWLAHRIRELDTQIAQADVELDTLTAQAVPTLRAMPQVGPQTAAQLVITAGQNLDRLRTEASFAKLTGTAPLPATSGKRQHRHRLNRGGDRAANSSLHMIAIGRLRRDPETRAYRDRRQAEGLSTPEILRCLKRHLARHVYRALRTDLMTA

SEQ ID NO: 317071 - protein, 448 aa, unidentified
MACGKGGTAPAQPQNMQRNKFQELEEVPVTIVGGFDVHRGQITFDYLRPETGEVVRGRIAPADRPHLAAWLSKLGDEPAAFALEGCTGWRYVVEELHAAGMEAHVAEPAETAGARGPKRRAKTDREDARHLRELLQGNRLAESWIPPTHVLEARARVRLYKDLVDERTAWAQRIQAILFHQGVPVVGSLREAKARQQLASLPLSPSGAQAVVVARRQIDAVNTDLDPLKVQIARFSRRQLGCRALQAHYGIGPLFSVAIWAEMGDARRFSSSADAVRHTGLDISVWSSDRKRAKGHLARQGPSVLRWSLYEAAQCAAKAASPDHAYYLQVRDRLGHQRAALSVARKLARWCHHTLRALGDAAWEAVDEEGTGRQPTDVMTCGQLREPECCHEPALDSPQRMSGRNLRGDDPINHHVTGARSERRDKSGRPRTGSSSSRRPKQQAAAMS

SEQ ID NO: 317072 - protein, 340 aa, unidentified
MHVIIGIDPHKASHTAVAVDGDEQELCRTKVRATRRQVDELVGWAEPFGSRTWAVESADGLGYLLSQQLVAAGETVVDVPATLAARSRVLGTGRSTKTDPNDALSVAVTALRNRTLRRVEPVGHGEVLRLLAKRNTDIGNQRSRVVSRLHSLLVELSPGGIAKEINASDIDAFLEGFEPAGPVEQVRTDLVAELLDDIRRLDAQLKASHKRIRVAVQVSGTSVTELFGVGPIIAAMLIGYSGDMTRFASRDTYAAYNGTAPIEYASGGRSVHRLSTRGNRKLNHAIHMAAISQLRQPHSDGRAYFDRRVSEGKTTKEAIRALKRHISNAVNRQLVADARR

SEQ ID NO: 317073 - protein, 410 aa, unidentified
MDVLYTRCAGLDIHRDSIVACVRLAEAGGVTRLVETFATTTTDLERLSEWLRGHGVTAVAMEATGVYWKPVWAVLAGDFELVLANAHHVKAVPGRKTDVNDATWLADLLAYGLIRPSFVPSLSEQALRDLTRARKQLTREKASHVQRIDKTLQAANIKLGSVLSNIMGQSGRALLEALAAGESNPEQLAGLVRTKIRASHAQVVEAVRGRLAAHQRLLLRLYLTQVDALDAAIAAIDHELGERLKPVQETVQRLTTMPGLSPLSAAVVISEIGLDMSRFPSAAHLISWAGLCPKNDESAGKRRSTRLRPGAPWLKAVLVQSAWCAVRVKASYLHALFQRLKARRGPRKAIVAVAAAMLTAIYHMLKRGAAYHDLGPDHFQRTERSRLAARLARKLGELGFDVTLTQRAAT

SEQ ID NO: 317074 - protein, 348 aa, unidentified
MEQFVGLDVSQKLTHVCVVDQKGSVVWRGTCPSTPDDIAATVRARAPHAERIGLETGPLSTWHWHALKAMGLPVICIDARHAKAALSMQINKTDRNDAQGLAQIMRTGWYREVGVKSLDNHQIRAVLGARAQLVGMQTDLKNQIRGLLKVFGTVLQRGCSQSFEHQVIAALPGNDLLDASVRSSLAALKTVSEQVAQLDRLVMKQAKENALCRHLMSIPGVRVLTALAFMTAIEDPARFRKSRSVGAFLGLTPKRHQSGETDWDGRISKCGDALVRAYLYEAANALLTNCKKWSALKAWGMQLAKRRGLSKAKVAVARKLAVIMHQMWTTGEAFRWSSEAATGKPTAA

SEQ ID NO: 317075 - protein, 487 aa, unidentified
MEPKYRRCCGIDVHKKSVTVCVLPPVGKPEMEVRKRNFRTFRRDLKQLRAWLKNCKVTEIAMESTGQYWRSIWNLLEDHFEKLILVNPQHIKGLNGHKTDPKDAQWIAELLETGKLKGSWVPAREIREVRDLTRQRVHVLEDMNRVKNRIEQLCQTGNIKVSSVATDLFGVSGRRMLKAVVEGKHDAGWMADYARGSLRGKRRELELALEGSFTGNQRWLLDKELRQLEWLESQIPVLEQEIERQLEPFQEAMRRLMTIPGIDRKTAWTIVAELGVDMGVFTDAKHLASWAGLCPGNRESGGKRMSGRTRKANRYVKRGMCQAAWAASHSKNTYLHAFYRRIQMRKGAPKAVMALAHHMIAIVYNTLARGEEYVELGGDYYDQRNKPRVVSRLVARLTRLGYYVSLKPVEPESSYEPSTVIELSLPQPRPAIPASHNPPSVPGSVAPAKPRRGRPCKCVERGIICKHTTSPEVNSLKQHDLSPSRFS

SEQ ID NO: 317076 - protein, 410 aa, unidentified
MIYVGIDWADDHHDVAITDDSAKTLAQFQVSHDHSGFATLHGQLAKFKQSPGQILIALETSRGLLVHELLRSGYSVYAVNPRAVNRYKDRYVLSRAKSDALDALALAHLLRTDRQRFKALRPFPEDYRLLDRLCQDLRKLVEEKSRMSNQITSVLKEFYPKALELFSLDSHIGIAFLKAFPDPEALRTCHKKTFMTFFKKHHYSRPQKVEELWALIQAPALQPDVVVLKAGRFRLLALLDQLGPLREHLALYEKEVKAILDKLPEAKSISSLPGVGDRLTPELTAALGPKESDSQSRFQCAEEIMRLSGCAPVTRQSGRWKSVSLRYACVKNLRRTFRDWAFASLGQSVWARAYYDFYKAMNMPHSTILRNLGKKWARILFTLWSQGGLYDEALYIQSLKDHNVRWAMAL

SEQ ID NO: 317077 - protein, 427 aa, unidentified
MPYSIAGIDVHKKVLVVVVAEVTEQGEWSYERGTFGATAYELQRLADWFQHQGVQEVVMESTAQYWRPVWGALEQYWTPVMRQREGAGPMAGKLHLAQAQSNRGPRGRKNDYRDAERLVHRLVAHELVLSFVPDPEQRLWRTLTHRKQQFAEDRTRCQNRLEALLEQMHLKLSSFVSDLLGVSGRRMLEAVAEGATDPLAVAALADAKLRATPEQLRDSLAACAHLSPVYRRLLKMELKQLQFLEQQRHQLEQEIAQLLQPHAAAVERLAEVPGLGVESAHQILAEIGPTAEVFPSEKALSSWVGVCPGEEVSAGETRSSRSPKGNRALRRLLNEAAHAAVKMKGSIFEVVFKRLQPRLKYKEAIWAIAHRLCRLIWKILHQGVRYEERGPAVSAKNQRRRLVRMVRELKRAGYQVITHVPPTAETA

SEQ ID NO: 317078 - protein, 350 aa, unidentified
MAQPGWPPELGRRSVGSVPIEALRAVGRSKIAIGTSSGPEWLNELKVRITREGSTKMTKHTTICAGIDTGKRKLDVAIEGRCEQLQVDNTPEGHELLLAWLRQHRVKRVGIEASGGYEQPVVIELRRKRFVVVVFQPTQVRAYAKFQLQRAKNDKIDAALIASCTAAVRKIHAAPDPRLLWQEDIARLEKREKAEFTVLVALIRKHRDLARRLELIHSVDGIGLPTAVAILVRLPEIGEITREQAVALAGLAPYDDDSGERVGVRHIEGGRKRLRRALYTAALAASFRWNRQLIELYQRLTAAGKEHKRALVACARKMLIFANTVVARGTPWCDEPPAVNASIAGASSVS

SEQ ID NO: 317079 - protein, 323 aa, unidentified
MVYIGLDISHTYFDAALPQAKGNCKFDNQLSGFQALEAVLPANAHCVMEATGPYYLRLASYLYQRGIPVSVVNPLVIKRFSQMKLSRAKTDQADARLIGEYARLHQPAIWQPPVAFIGELQQESSLLEQLLKQRTALGNHQHALAQHPHISQQAAQSLTELLEKLDEQIQQLEKSIENKSKTQASELLKVLVSIPGIGLKTAIQLIIITQGFERFTSSKQLAAYVGLAPRLYESGSSVRGKVHISKLGMAQMRKLLYLCAWSACRCNLACQQLYQRLLEKGKARKLALIAVANKLLKQAFAIGNSLQPYQEAKEKLVNNSTFP

SEQ ID NO: 317080 - protein, 486 aa, unidentified
MVTCGIDWAQDHHDVALVDADGRLVARRRIPESVAGFAELTAMLADADDDPEDPIPVAIETPRGLLVAVLRASGRPIYPINPMSVARYRERTSMSGKKSDHGDAVTLANILRTDIDQHRRLPADTELAQSITVLARAHQDATWRRNRAGNELRSLLREYFPGFLHAFADRPGGITAPEARAVLAIAATPAKAARLSKPQITAALRRAGRQRGLTTLAATIHQQLRLPQLRHPAPVEDAFGIQAVALLATLDAECANVDRLGEATAATFAQHADHRIITSFVGVGDLTGARLLAEIGDDRTRFADARALKAFAGSAPVTKASGRSIRITHRHVKNNRLAAVGFVWAFIAAGCEGPTRAHYLTRRDHGDRHPAALRHLYKPHARPALPLPANQPNLRPNQGIPTTPDAPHTSRRLTVNKIGGLPVAHQANTAAQQPEEPTPRRGGPITGKTASQVVPSMANRWSHAHGKTSSEVVPFTWQPTQVRGSR

SEQ ID NO: 317081 - protein, 356 aa, unidentified
MEQLTTVGIDLAKDVFAVCVLDVTGSVVERRVLRRDAFMRWAEQLSPCRVAMEACGSSHHWGRWFAARGHTTRLIAAEFVKPFRLGGKNDAADAEAIAVAARQPTMRFVAIKSIDQQAILAWHSVRAGWHEERTALLNRTRGLLAEFGVVIARSADRFLGALPTLIEDARLPDPVRAMLLEVREQLAALNLRLARCDQQIATHARSSDVARRAGELLGIGPITSSALAATVPDAKVFSNGRQFGAWLGLTPRQHSSGGRTRLGHISLRGNVYLRTLLVQGARSTLQSALRADPAHASRLQRWIRQLHERKGYHKTLIAIANKHARMLWAMLAKGERYDADAWQRHPLHPPLPPAAA

SEQ ID NO: 317082 - protein, 402 aa, unidentified
MNCVGIDVSKGKSMIAVMRPFGEVVVSPFEVRHTANELSELAGLLKSLDGETRVVMESTGNYHAPVAWLLHDAGLYVSVVNAMLVHDYGNNSLRRAKTDKKDAVKLANYGLDHWLTLPRYIPEEDTRLMLKICYRQYQQYSKVQTMLKNNLISLLDTTFPDANRLFTSPPRADGSEKWVDFVAAFWHCECVCGLSKKAFTAKYQKWCRKHGYNFSEDKALDIYASACRHFGVIPKTDTAKLLVEQAISQLQTTSSALAALKQEMQSLAASLPEYPVVMGMFGVGPTLGPQLLAEIGDVRRFHSKKALVAFAGIDAPPYQSGQIDVRSRSISKRGSASLRRTLFLVMSVILQCAPIDEPVYQFMDKKRSEGKPYRVYMMASANKFLRIYYASVKAYLESLEHD

SEQ ID NO: 317083 - protein, 398 aa, unidentified
MTESSDYESVQIFIGVDVGKDTHHAVAINRSGKRLFDKALPNDENKLRSLISDLKQHGQILLVVDQPATIGALPVAVARSEGVLVGYLPGLAMRRIADLHAGEAKTDARDAAIIAEAARTLPHALRTLKLADEQIAELSMLCGFDDDLAAQTTQASNRIRGLLTQIHPALERVLGPRLEHPAVLDLLQRYPSPEKLASLGEKKLAAQLCKLAPRLGKRLAADIAQALAEQTVVVPGTNAAAVVLPRLALQLITLCKQRDEVALEVEQRVLAHPLYPVLTSMPGVGVRSAARLLTEVACRAFASAVHLAAYAGLAPVTRRSGSSIRGEHPSRRGNKALKRALFLSAFAALRDPLSRAYYTRKMSQGKRHNQALIALARRRCDVLFAMMRDGTFYTPQGS

SEQ ID NO: 317084 - protein, 372 aa, unidentified
MMHLLREFVILPEEQTIYLGGALMYYMGIDHHKQYSHITVLNEKGEVVKAEKVWNIGREVKGFLSGLDDKISGVVEAGYSHYTMVDLMESEGVSMKIAHPEQVKAIAKARIKTDKRDSRILAYLLRSNLIPEVYCRDKENQEAQRVLRHRVTYVRMQTQVKNRIRALLAKQREEVRQIVVLEENLFKVSGRKVLGSLDLPGKDQQMLGSLLETLEHLKGKIKLSDALVREILRSSEGARLISTLPGFGEFFSVLVSVEIADISRFDSPANLHSYAGLIPSTHASGGKIYHGKLVHQGNKWLRWALVEAVWPAVRSDFDIRVYYQRMKKRKGANSAKVATARRLLTIIYRVMKEKRAYIPYKREKHTAAFARI

SEQ ID NO: 317085 - protein, 485 aa, unidentified
MPTKRSKQQKSRQVQGQGRKRRQKGMCLEDRPVLEPNAAGIDIGAREIFVAVPPGRDEHPVRACATFTEDLEQLGDWLVACGVTTVAMESTGVYWIPLYDILESRNLKVCLVNARHMKNVPGRRTDWHECQWLQYLHSVGLLRGAFRPEAEVTAVRTIMRHRTELVQMSSQHVLHMHKALTQMNLQIHHVIDDITGLTGLAIVDAILAGQRDPVELAKLRNWRIKADPETIRKSLVGNWRDEHLFTLRQSRELYRTYQQQMVKCDQEIEKLVGGLEPRVDPEEKPLPPDRKRYRGAKKRAKKNGQPDTGFNLRTEAYKLFGVDVTQIPGLETMALPLFGEVGRDMSKWPTADHFASWQGLCPDNDISGGRVLWKGTRRVRNRAGQMFRQAAYSLHHNLTPMGDYLRRMKTRLGPAAATTATAHKIAVIFYTMVKNQVEYDETIWATRDVKRQQSVKRQQRIEARLKRQANQLGYQLVPLEEKPAA

SEQ ID NO: 317086 - protein, 423 aa, unidentified
MSIANLLTGACQMNAVGIDVSKGKSMVAVLRPLGVVVAKPFEVRHTAAELGKLADFLKSLDGETKVIMEHTGRYYEPIAQVIHERGVFVSAVNPLLIREYGGNSLRRVKTDKADARKIARYGLDNWAELREHTPMDTIRYELKTLNRQFHLASKNRTACSNNLVALLDQSFPGVRGWFDSPVRKDGSQKWVDFAMTFWHVDCVRSVSQAAFVERYRKWCKRHGYNFNAEKAERIHREAGEVIALVSKSATAKLLVQESATQLFNLSRMVEVLRAEMNRVAAQLPEYPVVMGMYGVGESLGPQLMAEIGDIRRFAGKQSLVAFAGVDPMVNQSGMKESRSNKSSKRGSPYLRKTLFNLMSMLLQLAPSDVPVYQFLDRKRAEGKPYYVYMTAGANKFLRIYYGKVRDHLASLDAAPLDTPAANP

SEQ ID NO: 317087 - protein, 410 aa, unidentified
MEVLYPVCCALDVHQASVTACLRAPGDGPQRRQEVRTFGTTTPELLRLAGWLTAAGCTHVAMESTGIYWRPVYNILEGRFELSLVNAQHVKMVPGRKTDVRDSEWLAQLLELGLLRRSFVPPAAQRELRDLVRYRKRLIEERAREANRVQKVLETANIKLASVVTTVLGVSARAMLKALIAGEQAPEQLADLAQRRLRRKRAALGEALTGRVTAHHRFLLEHLLRHIEFLDGAIAACDRQVETLTAPHAEALTQLDTIPGVARRTAEVIAAELGCDMTRFPTAGHAASWTGLCPGNHESAGKRLSGRTRHANRTLRQALVESARGAVRKRDSYLAAQYRRLVKRRGDKKAIVAVAHSILVIAYHVLRDGQPYRELGGDYFERLNADRLTRYHTKRLAALGYTVTLTKDAA

SEQ ID NO: 317088 - protein, 312 aa, unidentified
MTKIICGVDVSSQTLDARIGPDGPSLRVERTVDGIQELAAFCREHGAELVAMEATGGYEQMPFMLLWAEGIPCAIVNPRSVRRFAEAMGLLEKTDRLDTGIIAHFAAVKRIVAQEPASEIQQRLTVAVRRLRQLTDLQTAQRNQRRLVTDAEVLASIDGILALLRGQIRQFERTIAALIATDPLWQKLDEAFRTIKGVADRTVARLMADLPEIGTVSNKAISKLVGVAPLAKDSGKIAGKRRVRGGRSSVRSIIFVVVEIVRRHDPDFAAFHRKLTAAGKPKKVIRIALAHKLLVRLNAKARDVRCQLALAA

SEQ ID NO: 317089 - protein, 348 aa, unidentified
MDHYTGIDVSLECSSVCVVDASGKIVREGKVLSEPAALIAWFGSLGFGLERIGLEAGPLSQWLYAAMKQAGLAVELLETRHVHKALETMPVKTDRNDARGIAQLMRLGWFKPVHCKSLAAQETRAMLTARKLMQAKLHDVEMSLRGILRGFGLKVGKTTARSFAARIEELAAGHPNLETIARALLAVRAVLLREFNGFQKRVRIMARSHLAAKLLMTTPAVGPIVALTYACAVDDPGRFKSSKAAGAHFGLTPRKYQSGETDITGRISKIGDAGVREALYQAAHVMLTKPVKGCAQLKSWAMRLGRRAGMRKAKVALARKLAVILHRMLADAKPFNDAAKAKTMAAAA

SEQ ID NO: 317090 - protein, 337 aa, unidentified
MSLYCAIDLHSTNNVPAIIDDDDRILFQKRLPNDLSTVISALKPFKHDLYGVAVESTFNWYWLVDGLADNDFNTLLVNPSAVKQYEGIKHTNDESDAFHLAHLMRLGILPTGYIYPKTERAVRDLLRKRLQLVRHRVTHMLSAQNQIWRSTGLNVSSKPFKQADFSLLNLVNDNHIRMAVKSNLTIIQALNQLIDELECTVLQQIKLKPEFLALLTIDGIGKILGMTIMLETGDIRRFASVGNFSSYARCVDSSRTSNGKKKGSNNRKNGNKYLSWAFVEAAHCIIRHNKTAHKFYQRKRSQKNGALATKALAHKLARAAYHVMRNQEPFQLERLFR

SEQ ID NO: 317091 - protein, 344 aa, unidentified
MVTIGIDTHKATLAVSAVDEAGRERAAETFANDGEGHARLLRWARRHGPERRFGIEGSGSFGAALARLLVAADERVVEVPAVLTDRERRHLSRAGKSDPGDALAIARVALREQGLGPARLAGITEDLKLLVDAREQCLAERTRIANQLHAHLVVLAPGYKREIRNLSAARHLTAAARLVKRVGGVRAELARAEFNRLRALDAESGALEVRIRALVQISGSSLPTIRGVAALTAAKLLGETGDPRRIRSAPAFARISGTAPIPASSGQTSRHRLNRGGNRQLNRALYTIALTQARTDPRAKAYMARRIAEGRSWLEALRCLKRHLANVVWRTMLADAQRSAEIGS

SEQ ID NO: 317092 - protein, 345 aa, unidentified
MAGLDLHSNNVMIGVINQDGERVAHRKLDCDLKQVVEFLAPLKPRLQSMAVESTFNWYWLVDGLRARGYSIDLANPAKIEQYSGIKHADDKDDAYYLAELQRLKILPQAYVYDPQLRPVRDLLRRRSGLVHQRTALLLSFKSLYVRTTGEQLNLSEAKKLEPKQASKLYEHPANQLIAQVQAEHIQALDKSIGRIEKAVLGCAREIPMYEKLLTIPGVGRILALTITMEVGDIKRFKSDGDFASYCRMVDARHLSNGKCKAQNNQKCGNKYLAWTFIEAANFSRRYDESCRRWYDRKAAKTSKIIATKALGCKLAKAAWHVMAGPCDYDPKRMFPELATQPMKTS

SEQ ID NO: 317093 - protein, 416 aa, unidentified
MNEAGIDVSSRKSTVAVLRPFGEVVRLPFDVAHDTEGLASLAEQLKALDGETRVVLEHTGRYYEPVAKALHEAGLYVSAVNPLLIKEYGANSLRRVKTDKADAVKIARYALDNWTDLRDYTPMDTIRYDLKTLNRQFQLASKQRTACSNNLIALLEQSFPGIRKCFDSPVRSDGTQKWVDFAHTFWHVDCVRKQSLNAFSARYRKWCKRHGYFFKQSNAEEVYSLAKNAVVLVPKSEVTKVLVQEAANQLTSISRSVETYRTEMERLASMLPEYPVVMEMYGVGKSFGPQLMAEIGDVRRFERKQALVAFAGIDPMPNQSGDKNVRSNKSSKRGSPYLRKTLFNVMGIYLKCAPQDEPVFQFLDRKRSEGKPFYVYMTAASNKFLRRYYAKVRDYLATLENLPPVDMDSTGLQERN

SEQ ID NO: 317094 - protein, 440 aa, unidentified
MRSIGLDVHKRLAEVAIIEGKGPPVRRRIGTSPAELAAFARTLRADDQVILEATMNTWAIAAALQESGARVVVSNPLRTKAIAEAKVKTDKVDALTLAQLLQADFVAEVWIPDEDTRRLRREVATRAALVRQRTQVRNRIHSVLHRCLEQAPTTDLFGAVGRKWLDDLALREDERGQVDAALRVHDAIEGEIALVEQRLAKVALADERVERLMTIPGTGAAVALSLVAVIGDVQRFRRPAKLVSYLGLDPRVHQSGDRPARTGSISRAGHAHARSLLIEAARAAVGTPGPLRAFFRRVERRRGTQIALVAVARKLVVLTWHVLSSGARYRLERPTIMHEKRRMLERRVGIPASGRRARPRRGELTIAERKQREFAALFEAEAAYQAEVSIRTSRDAAAANVEATAWPSKGRDARRSSHPLRSALLTGSTASERGGYASGS

SEQ ID NO: 317095 - protein, 346 aa, unidentified
MEHYVGLDVSLKLTAVCIVDRTGKIEREGVVHSDPEAIAAFIKSNAPHVARIGLETGATSTWLWTELNRLGLPVICIDARHAKAVLKMQINKSDRNDAVGIARIMQCGWYKEVRVKDLDSHAVKALLVSRALLVKIKRDLENQVRGLLKNLGLVIGRAKMNAFAWRAAELIEDQPELAAAVTPLLNARVAIERQIADLDRKVLKLARNNARVQQFMTAPGIGPITALCFLATIDDPKRFRRSRSVGAYVGLTTRRYASGEIDWTGRISKCGDKMLRSYLFEAANVLLTRVAKWSALKAWGIRLAKRSGLRKAKVAVARKLAVILHRMWVDGTDFKWSSKETADQTA

SEQ ID NO: 317096 - protein, 312 aa, unidentified
MVTIGLDPHPDSHTIAALDENGTTLAVLTVANDAEGLALLHRFALPFPERRWAVEGAANRYILPFVSGLLERGEVVHHIPPNLTSQYRARLSRKKNDVVDASNAARALLANPELPAFRPSEGQREFQDLTRTQRRLSEQLKANRMALQALDPSSSARSALTQVIHVLEEQLANLSKQMKTLVKTLAPTLLELLGVGPVVASVILGEVGTIERFANEGQFASYCGAAPVERGSGKNSRMQLNHGGNRRLNWALHIVALTRSRCDERTKALLAKLKARGKTQRASLRILKTYIARELFRHLRQTTSPILSPGST

SEQ ID NO: 317097 - protein, 356 aa, unidentified
MKQTVQPDFTGQNIYVGMDVHKKSWTVSIFSEHHEHKTFTQPPNAQSLVGYLKRTFPGASYHAVYEAGFCGYWIHDSLYQQGIDSMVVNPADVPTTDKQRRGKNDKIDSRKLGKNLRSHDLQPIYIPGSMQREDRSLLRTRYGMVRKQTRCKNQIASLLAFHGVFLPPEMETRRWSRRFINWLESVQFEHTSGTIALKTLIEELLHLRKLIAGLTRQITVLSRTYDYAEAVWLLKTIPGISTLTAMILLTEIGDISRFKNLDKLASYAGLIPDTKSSGEEEHITNITMRRNPMLRAILVESSWIAVRKDPALILAFNKLCRRMKKNNAIIHIARKLLNRIRFVLNNRQPYVVAIVE

SEQ ID NO: 317098 - protein, 348 aa, unidentified
MQSKSQIRSIGIDLGKTTFHLVALGSRGQVVVRKKFSRQQLLLYTANLPSSLIGMEACVGSHFLGRALREQGHEVRLIPAQFVRPFVKSNKNDYRDAEAIAEAVERENMRFVPIKTEDQLDVQALHRVRERLVSRRTSVINQIRAFLLERGISFAKGPASLRRQMPEILENADEKLTTRMRRLLDFLWQEWKHLQLQIESLSEDLELIASSDEACARLQQIPGVGPLVATAVVSAIGNGAAFHKGREFAAWLGLVPGQWSTGGKTKLLGISKRGNPYLRKMFIHGARAVVLRAKREGSYLGQWMKSLEGRAARNVVIVATANKLARISWAVLSSGENYHPMPAVAVAS

SEQ ID NO: 317099 - protein, 356 aa, unidentified
MSRGIQYIGMDVHKEAIVIAVLNDGGKLVMESIIETKASSILQFIHGLRGELHVTWEEGTWAAWLYDLLKPHVHQMLVCDPRRNALLKEGNKSDKVDAHKLANLLRTGMLRPVYHGEHGLRTLRELARSYQTISKDLARVMNRAKALYRGWSIPCAGTQVYAPRYRQEWLGKIEHAGVRRRAELLYQQLDGLHALRRTLRPELLAESRKHKAAKLLRQIPCIGPIRAARLLALMQTPHRFRSKRQLWTYSGLGIETHDSAQYCYVNGQLQRSKKPQQIRGLNRNHNHEMKEIFKGAATRASCGVGPLHDFYVALLDKGMKPEMARLTLARKIAAIALALWKKEERFDAEQLKTQAA

SEQ ID NO: 317100 - protein, 321 aa, unidentified
MTRIVCGVDIAFSPLAARVGQDGAGATFANTPEGIAELAAFCKTHQVALIAMEATGGYEQRAFAQLCGHGLPVAVVNPRAVRQFAQSMGWLEKTDAIDAGMIAWYAETKKSQPLCLAPPTQLELRARVTRLRQLTEVRTAQLNQQRLVTNEAVQKSFGAMLTFLAGQIRELEQAIAALIQADPLWRELNQAFRTIKGVADRTVARIMAEMPEIGTLSNKTISKLAGLAPLANDSGKHQGKRAVRGGRAAVRDILFLVGSVVARYEPDFLCFQQRLRAAGKPPKVVRIAVAHKLLVRLNAKAREVRQQSAHTQLSCSASQQP

SEQ ID NO: 317101 - protein, 407 aa, unidentified
MQVLYPRCAGLDVHKDTIVACVRCVSAPEHHEVQSFSSTTTGLLALSDWLASHLCTHVAMEATGVYWKPVWHVLEDSFELVLGNAAHIRNVPGRKTDVNDAMWIADLLAHGLIRSSFVPPAAIQELRDLTRTRKQLAREIAQHCLRIQKVLEDANLKLGSVLSDVLGDSGRAMLKAIVSGEDDPVRLASLAQGHARRKTSELREALSGRVTAHHRAMLGLHLQVIDALERALADLDAAVGLALTPIRQHVQLLRTIPGVGDLTARVLVAEIGVDMTRFPNPAHLISWAGLCPRNDESAGKRRSTRVRKSGTWLKTALVTAAWAAVRTKNTYLHAQFLRIKARRGAKKAIVAVAASMLTAAWHMLRNGVEYKDLGPDYFNRHDMQGTVKRLLKRLTDLGYPIQPASPS

SEQ ID NO: 317102 - protein, 315 aa, unidentified
MTITSDEYVGIDVAKDKLDIAVLGQKTTSAAFNTKKGIAGLVKKMCQLQPKLIVVEATGGYEEALVLSLFEAGMPVALVSPQRVRQYAKARGLLAKTDKLDAQNLAEYGKNIQPRLFVAKSEAGRRLSAIIGRRRQLGDMQKAEKNRFRTAYAEMRSSIQTVIDCLEAEIGRLDAEIRNFMQAHEDFGEQEKLLRSAKSIGPVTAATLLADLPELGKLDRKQIAALVGVAPMNHDSGKKRGYRKTKGGRPEVRSVLYMSALSAIRYNPVIKSQYEQLVKRGKEKKVAITACMRKMLTILNAMMRDQLPFHAIPVS

SEQ ID NO: 317103 - protein, 334 aa, unidentified
MDKDGPGDALERRSRVLVGIDVAKAELVVATRPGGERWTVSNDERGVRTLTERLRRDGVELIVLEATGGYELLCVAALAAVSLPVVVVNPRQVRDFAKATGQLAKTDRIDADILALFADRVRPEVRALPDAETQELEALLARRRQLLEMLQAERNRLGQVFGRGKAPVKKSLKAHIAFLERELRMADTDLGDQVRQSPAWRERDDLLRSVPGVGPVLSLTLLAHLPELGRLSRRAVAKLVGVAPLSRDSGTLRGRRCVQGGRASVRGVLYMGALVATKRNAVIRAFYARLLAAGKPKKLALVACMRRLLMILNTMMRTGERWSAEHVDRRLIDA

SEQ ID NO: 317104 - protein, 403 aa, unidentified
MNSVGIDISKGRSTIAVMRPFGEVVISPFEVRHTGSELSKLAKQLKSLDGETRVVMEATGNYHASVAKLLHDAGLYVSVVNAKLVHDYGNNELRRVKTDRKDAVKLANYGLDRWLTLPRYIPEEDTRLLLKNCYRQYRQYSKVQTVLKNNLISLLDTVFPNANRLFSSPIRGDGSEKWVDFVAEFWHCRCVSEKSERAFTSKYLRWCRKHGYNFREAKAHTIYAEASGHIGVMPKSETTKLLVEQAVAQLRATSTALAALKHEMQSLASQLPEYPVVMDLFGVGPTLGPQLIAEIGDVRRFYSKKALVAYAGLDAPPNDSGDVTGRHKSMSKIGASSLRRTLFLVMSVYLQTAPLDEPVYRFMDRKRAEGKPYRVYMMASANKFLRIYYATVKAYLESLEHTA

SEQ ID NO: 317105 - protein, 406 aa, unidentified
MKDLLEISCGLDVHKDKIVACILSGPIGKTTVSEIREFTTLIPDMAALRDWIVSCNCHHVAMESTGIYWQPIYEILEDAYSGDITLLVVNARHMKNVPGKKTDMRDSEWIATLLRAGLLNGSFIPDKQIREFRYLNRYRKSIIRDITSQKNRVEKFLQSSGFRLSTFISDIFGASGRNIICHLIQHGCIDRESLDSCLKTKTRNHINEILVAVNGTLSQIQQDFLEMLMDHYDSLKSHLAEIETALEEAMAPFSLHIEQLTSIYGINTTASCAIIAEIGTDMSYFKTAEHICSWAGLCPGKRKSTSITKGNPYIKSMLCEIAWVIAGKRNTYLSAWYWRIKQKKGAKKAIVALARKLLVIIYTMLKQGTLFDENCFETRRKNCEQKQVSHYIRELEKRGYHIEASA

SEQ ID NO: 317106 - protein, 425 aa, unidentified
MRFIGLDVHRDFCEVAIAESGQVRLAGRVQTEPEELALFAQSLAADDQVALEATGNALAIARVIEPHVGRVVLANPKAVKGITQTGAKTDKIDARTLAKLLAGGFLPEVWLPDEQTRILRRRVSHRAQLVRHRTRAKNQVHATLIRNLKGKPPVADLFGVRGRRWLGEQVLAADEQETIAACLRQIEFLDAEIALVERALAQQVLVSAEMRRLLTLPGVNFVTAAALIAAIGDVTRFATSRHLVSYLGLDPRVRQSGIEPARHGRISKQGPGETRHVLVEAAWHAARTPGPLRAFHERVAARRGGNVATVAVARKLAVIAWHMLSRGEDYAFARPSLTREKIRKLELATGAERRNGKRNPVRVFASREQHRLDQQLAAQAELAYRRLVQDRQPAIKGTGAAPGRASRGPSSGQAARQETAPPPAL

SEQ ID NO: 317107 - protein, 312 aa, unidentified
MDAIVIVGIDVSKDRLDVAVRPGREAFFVRRDGDGIAALIERLGPLGPAAIAVEATGGFETVVAAGLAGAGLPVVVVNPAQVRAFANALGKRAKTDPIDAGVIAHFVEATKPAIRPLPDEETQLLADLVARRRQIVAMIGAERQRQKRAPARIARSIVRLVKALEKELASLDHDIDDAVRGSPAWRDKEDLLASVPGIGKTIARTLIAELPELGSLDRRQVAALVGLAPWTRQSGQWRGKSFIGGGRAAVRTALFMGALVAARHNPTLKAFRDKLVAAGKPKLVAIIATARKLVTILNAVIRDRQPWREQTA

SEQ ID NO: 317108 - protein, 411 aa, unidentified
MTYTVAGIDIHKKVLMVVVTDATREELEFDSRRFGTAAREREHLAAWLRERGVQEIVMESTAQYWKPVWLDLEPHFGKLHLAQAHSNRAPKGRKHDFADAQRLTRRLIAGELILSFVPDAEQRGWRTMTRAKLQLVRDRVRLQNQLEALLEEMRIKLSSVVSELLGQSGRRILAALAQGESDPAKLAELGDFRLKCGKEVLADALQGQLQPMHRQMLKLFLERLDLLDRQIQQMDQMIAGAMSNYEDAVIRLAQVPGFGPDSAQQTIAEVGPTAQSFDSAAQFASWVGICPGSEESAEHNHSSRSPKGNKFLRRILTQAAQAAVKKKGSHFQVAFRRWLPGLKYNGAIWAIAHKLCRLIWKILHDGVHYIERGEETNPKAKKRRADRMVRTLRRMGFKVEITSLTPQPAEG

SEQ ID NO: 317109 - protein, 424 aa, unidentified
MVQNEDSRLEEFRQLKNEIRGSKQHLVVGIDIAKDTHTAFFGRATGKTLLRRFVFDNTREGFGKLCFQADTLKTQHGLTHLAFGMEPTADYHKPLGEYLITHGRMVVLVAGTAVKKNRELLDGRWDKNDTKDAANIADLLTQGKCLFYEFPSVDMRELRSLLSLKRRLKKSEQGYRVRIRNHLIAQYFPEMDSSFRYGEGPAVVKWCLNPAELANLSFEAFVRMVSSSNGGENQRRRLWEIHRKASSSIGCMVHPSAGLEARILLDGLQHLHSMILETDRRVAAVCRRFPEYRCLVSIPGFGPDISAKVLGALGNPHRFENHRQVLKTAGLDLSSDRSGKRTETAPVISKKGKADLRYGLYQAALIASTRNHAFITYYTNRLTGREREKGIRTRMRVKLAAKMLIIAWTLMKKRQMFDPGCIRA

SEQ ID NO: 317110 - protein, 373 aa, unidentified
MNYSTVYVGMDVHKESFSLCCYTNEKEKGEYPQKVDAHYSKIINYIEAMRFHYGDDATFICGYEAGCLGFTLYHQLTSHGIKCFILAPTTMLKPQGKKKVKTDKRDAALIARCLAHHDYSAVHVPTKKDEQTKEYIRMRCDHKTALKKVKQQILAFCLRHNYRYEDGANHWTEKHLKWLRGLKPDGLYGEILQEYLLTYDTLSNKLDRLDKRIEELADDVEYKENVHKLTCFLGIKTQTALSIITETGDFKRFATAQHYASYLGLVPGEDSSGEDQNRLGITKAGNRHLRMLLIEASQSYGRGQIGYKSKVLKQRQAGNDPAVIAYADKANERLRRRYYKLVLGKSKKHNVAKTAIARELACYIWGMMTENIA

SEQ ID NO: 317111 - protein, 340 aa, unidentified
MQTARHIGIDLHRDKFTCCVRLENGRNYLTDWKLEELSRFVKKLRPDDEIAVEVTGNTRLFHEAVSPYVKRVVAVDPNQFKVISHSVKKTDPNDARNLALYLEKDLLPEVRMKDKTQAQLASLTQTRDTLVKLRTALKNKVNNILSAHGINLEKEALSSEKKLNEILAMRFDAMVKVELEVIIEEIRSLNQRIAKLEKTIAEEGSKLEGHKNLTSIKGIGPLTGSILLSVIGDINDFADEGKLAAYFGIVPRVSNSNETERSGRITKRGSKLGRTALVQCALIAQRFSPYLKRYYEQVKVRRGTGKAIIALARKLLGIIYRTLKNKWVFEDFPNFVLAEV

SEQ ID NO: 317112 - protein, 480 aa, unidentified
MFRQDKQRGKPEKQKNSKRRRRKGMTLDDRPLLEPNAAGIDIGAREIFVAVPSDRDENPVRVFPTFTADLEEMAKWLVSCGITTVAMESTGVYWIPLYDILEQHGVTPCLVNARNMKNVPGRRTDWHECQWLQFLHSVGWLRAAFRPDGDVSAIRSLMRHRNDLVQVAAQHIQHMQKSLTQMNLQIHHVISQLTGVTGLAIVDAIIAGERDPAVMAKLRDHRIHASEEVVQKSLVGNWKPEHLFTLKQSRQIYQHYQEAIAACDEEIEKLVVAFEPRVDPAEKPLPPDRKAKQRKRKKRGVTPGVNPKTGFDMRTEAYKLFGVDVTQIPGLMMLALMLFSEIGRDMSRWPSAPQFVSWLGLCPDNDISGGRVLWSGMRGTRNRAGQLFRMAAFGLHHDLGPLGDHLRRMKSKIGPAAAQTATAHKIAIIFYTMVKNQVEYDASIWAERDIEREKRFDAKLKRQAHARGFDLVKREENIAA

SEQ ID NO: 317113 - protein, 350 aa, unidentified
MLIVGCDYHPGFQQIAFVDTETGEFQERRLQHRGEAEKFYRDLAARGVKVRVGMEASGHARWFERLLAELHLELWIGDAAEIRAKRVRKQKTDRQDAQHILTLLVQDRFPRIWVADWENRDLRQLLWHRHRMVQTRTRMMNQLRAVALNEGLRCKKRLWGKKGRQQLESLRLAPWATRRRRDLLELLDRLNPLIAELTQAIEQEVEKHPEAQRLITHPGVGALTALAFVLVIGTAERFQCGKQIASYLGLVPAEDSSGERRRLGHISKQGSAILRFFLVEAAQVTVRSVPEWRSKFFHLAMRRGRKIAKVAMARRLAVHLFWMWRKQWDYQQLKEFGPYAGKPGTGVGVH

SEQ ID NO: 317114 - protein, 333 aa, unidentified
MQDLSSKQHFIGCDVSKNTLDIALYQRKTDYRNFEHIRVSNDVTGYATFLKWLRSKKITISEVVVGMEHTGFYSVAFSEWLFKKKITFCLLHPIDVKNACARGRNKTDMVDSQFIADYLYTMREKLSPSDPEPKVIKTLRGLRNERALAVKMRTAYINQMKTGNDSTTIKRMKKMIEMITNQIHQIEAEIKSVIQSDESINTNFKLLMSIHGIGLVNAITVIVATGNFTRFKTARQYAKFCSVSPLSTQSGTSVRGGNHVSKAGHNELKSVLSEAARSAIMYDSQLSDYYARKRAEGKTHGCVMNAVKFKLVCRMFAVISRQAPYVDIEKYKS

SEQ ID NO: 317115 - protein, 357 aa, unidentified
MQNKNTEVDFSNQKFFLGIDVHKKSWKITIRTSQMELKTFSMNPQPGELANYLQRNYPNGEFRSVYETGFCGYWIDKQLRQRGIKNIIVNAADVPSKGKERVNKDDIIDSKKLARELENGTINGIYIPDDYYEGIRSLCRLRYSVTKEQTRIKTRIKSLLTYYGKDFPENYELKNWSGKFINFLEGIEFNQVTAKQTLNHLIEELKDKKQRLAKIIKDLRDSTNTAGLGNKIKQLMSIPGISFITAITFYTEIMDMSRFKRLDELCSFVGLVPSTYSSGDRERVLGLSNRQNKYLRNLLLESSWVAVRNDPALVMKFGELTQKMAKQKAIIRIAKKLLNRMRHVWLNDVEYVKAVVK

SEQ ID NO: 317116 - protein, 424 aa, unidentified
MKNCNKQNEKIELVDEKTLVIGVDVGSYDEYARAFTCRKQELSKKPLHFHNTAEGFKTFKDWAVNIMKANGLEKIIVGMEPTSIYWEALATYCKDNGMILVHVNPAAVHKSKELDDNDPSKNDRKDPKVIAGLVADGRYQFPYMPEEEYAELRELSNLRIRTQESLTQCKNRLARWYSRYFPEFKEAYKNVVSKTAMIIMDMYPLPEDIVTLGVEGILQIWRSKKVRGAGERKARKLYEAARNSIGRKEAASIARIEFKSIKEDLDRYQERLDEIEKKADEILKKIKNVDKLFEIKGVGKATVLTFLSEVGEISRFDNPKEIQKLAGYAIVTNESCKHQGEKRISYRGRKRLRWTLYQTALSVIAKNEEFRQIHAYYTTRTNNPLKGIQSVVAVACKMIRIFYKILTDGVSYDGAKMTQDIVHA

SEQ ID NO: 317117 - protein, 408 aa, unidentified
MLKAVHVGVDISGERNVAQFLDQDGNLLRKPFSFSNDSPGLSSFVEVLRDVADSHKPEVMNIGMEATGFYWWHLEERLSEDGFLDVETRVFVINPSLIKAFKKAYTSLPKTDAVDAWVIADKLRFGRLTPVSEKALIYAPLARLTRLRYHLKRAITGEKNRALSLMFLRFSGYKKAAGRRAFNKAPLDLLNELTIDEVADEPIEELVEYVLSHGNSRISNPEEFVGELKAAARRSFRLNPKMEDAVGVALSLTTENIRFLEGQCRKLDSVIARELRAIPQTLDTVPGIGPVIAAGIISEIGDVSRFQSQAALAKFAGLTWHRYQSGRFDAEETSLTKAGNAYLRYYLVEAANSLRLHNEEYSAYYRKKYSEVPKHQHKRALVLTARKFVRLVFALLSKGQIYRTGVVK

SEQ ID NO: 317118 - protein, 422 aa, unidentified
MLAASQDEEQIIARVAALDIGKAELVCCVRVPAEGNRRKRLQEVSTHSTMGRSLAELANRLVDLRIERVVMEATSDYWKPVFYLLEAHGLEPWLVNARDVRHLPGRPKTDVLDSVWLCKVAERQMIRPSFVPPAPNRRLRDLTRYRIDLVGTRTAEKNRVEKLLEDACIKLSVVASDIFGVSGREMMAALIAGERNPAVLAQMARTRMRTKITELEEAFTGHFDDHHRFLLARMLARIDGIDADIAAVDEQIEAHLAPFAGAAERLDEIPGIGPVAAAVILAEIGVDMSRFPTEGHLCSWAKFSPGISSSAGKTKGNGSTGHGNRYLARVLGEAAVVAGKTDTFLGERYRRIARRRGKKRALVAVGRSILIIIWHLLQDPDSRFHDLGADHFSRSTDPESRKRAHIRQLEALGYTVTLAPAA

SEQ ID NO: 317119 - protein, 338 aa, unidentified
MIVIGVDVHKHSLTAAAVDETGRLLGELTVDYPDEVLLAWAGQLGSERLWALEDCRHVTRGLERRLLAEGEELVRVPPKLTGATRRAGRQRGKSDPIDALAVARVALREPDLDRPRAGEERYRELKLLVVHRDDLVDERRRCQQRLRWHLHQLDPAFRVPAGALDRAVWLDRVGRWLARRTPEVQVRVARDLVSRCRSLTRTIGELDRELAAMSAQTAPTLLQLPGCGGLTAAKLLAEIGPIERFRTDAQLARHGGVAPLQASSGRVQRHRLDRGGNRQLNCALHRIAITQARVHPPARDYLERKKAEGKSNREAIRCLKRQLARTIFNTLKNEPPLT

SEQ ID NO: 317120 - protein, 348 aa, unidentified
MQSTLNLPVIGLDLAKSVFQLHIVDVESGEIQRRQIKRAKLTEFFAKCTRSLVAMEACGSSHYWARTIRALGHEVKLLPAQHVKAFLLRDKTDAMDAQAIWVAAQQPHILPVPVKSERQQACLALHGMRRQMMKMRIMQTNALRGILAEFGIAMPIGHNQLLKTIQAEIDETQEKSHLPADLVICIQEQLKRIDGLQDDIDHIGQRLGAMIREDRQMQAIQQIPGVGDLTASALVAAVGDFCTFKTARQFASWVGLVPRHVGTGWKTQQLGISKRGDTYLRTLLIAGARAVIARSGKSGWIERLLQRRHYNVVVVALANKMARTAWAVLARGMAFDRARWNPLETVTA

SEQ ID NO: 317121 - protein, 342 aa, unidentified
MQDTTISVDIAKSIFEVAVSDRPGHVKEQHRLTRSRFLRFFAERRPVRVLLEACGSAHHWARQLQALGHEVVLLPPHAVRPYVSRSKTDRSDARALLEAARNEDIHPVPVKTCSQQAITALHRLRSCWLSARTARINTVRGLLREFGVAIPVGARQVTPHVRRVLNQDDSPVPPALHEPLISLAAEIGELENRIRETELQLQRLAKQIPVVSLLKTIPGVGPLSATALVAFVGDVHRFPTGRHFASYLGLTPREHSSGLRRRLGAISKRGDVYLRMLLIQGARAVLWASHRSSRKDRLRLWTQKVHASRGPNKAAVALANKLARVVWAVWRFGAQFQEAPAA

SEQ ID NO: 317122 - protein, 415 aa, unidentified
MDVIIDRCAGLDVHKASLTACVRAPGEGRRRRSQEVRVFSTVEDDLVALSAWLTEHGVTDVVMEATGVYWKPIWYVLEDGGFDLLLVNATHVKKVPGRKTDVKDAEWLAQLLECGLLRGSFVPPRPIRELRDLTRYRKRLIQERAREVQRVHKVLEDAGIKLSSVATDALGVSGRMMIEALIAGERDPEVLAEMAKRRLRRKIPELRRALAGRFRGHHAAMLAEALARLDSLADAICRLDDKVDEAMADYADQRDRLTTIPGVAKRAAEVIVAEIGVDMTRFPTSAHLASWAGMCPGNNESAGKRFSGRTRKADPWLRDILTECGWATHLTKTYLGAQWRQIARRRGKGKASIAVGHSILVIAWHLLSDPTATYQDLGPDYFSRRRDPAAEQRRLIRQLQALGVTVTITPQNPAA

SEQ ID NO: 317123 - protein, 335 aa, unidentified
MQHYVGLDDLSVKQTSVCIVDKAGKVIREVKVATEPMAILAVLTEEALAIERIGLEAGPLSQWLYSALAEAGFPVICVETRHMKAALSAQLNKSDRNDARGIAQMMRVGLYRAVHVKTLASQKRRMLLTSRQLLQAKALDIENDLRGTLRNFGLKVGMVGTVKFEARIRELVADHPDLAAIVEPLLIARRVLREQLGVLYRQLLEIVRQDEVCRRLMTTPGVGPVVALTFRATVDVPSRFTSSKAVGAAFGLTPRRQQSGEIRHGVVLQTELATSLPPVKGDQVQLQQVILNLILNAVEAMSSFGEGVPQLRISTAVDAGGGVLVAVRIPARDWA

SEQ ID NO: 317124 - protein, 430 aa, unidentified
MKIVYPICAGLDVHKREIVATVARTDSQGITMYKQRKFPTFTSDLNCLADWLHSHQCRHVCMESTGKYFIPVYRVLEHRGLKPCVAHPKFLRAIPGKKTDSKDSKWIADLFKHGLVPLSFIPPLEIFELRDLTRYRTKLVHARSAEKNRIQNSLTVSNIMLSSVVSDTFGKTASAILKYVLDNPDQKDIDYNSFLKGTAMRRMKATADDIAKAMNGTFSPEQANKTKIAFKHLDYVNNCLEDLDLAISLLSKRFAPQLELLTTTPGVTIFSATRIVAEIGVDMSVFHDSKHLCSWAGLTPQCNESAGKKKSTRISRAGTWLKPLLIQVALGAVRNKDCPYFAYKFQTLSKRRGKKKAIIAIARMILTSAYHILKNNVAFDQNLYKQYYHEQIKRFHNLTIPKIVQFLSTQGMSVINADGVLLAAQNALCG

SEQ ID NO: 317125 - protein, 403 aa, unidentified
MTERTPGIYGGVDTHHEVHVAAVVDQTGRILDVSSFPATGAGYRQLLAWMRRNGEVVRVGVEGTGSYGAGLARHLAGEAVEVVEVNRPNRQARRRRGKNDTVDAEAAARAALNGEATGVPKAADGMVESIRAIRVAFCSTRNTRTRVANQLGGLIVCAPDQLRRDLEGLDTPGRVKRAARFRPGDLADPVEGTKAAMRALARQHQALTGDLDQLRDQLDTLTRHANPALRRAVGVGADVASILLVAAGDNADRLTSDAALAALCGASPVEASSGKTVRHRLNLGGNRQANHALWRIAMVRLTCDPATRAYAQRRRAEGKTSREIIRCLKRYIAREIYRLLTTPPEVADHTELRAARTASGLTLAAAADALDTWPARISELERGLRPAPQLELRYRAWLGLEVA

SEQ ID NO: 317126 - protein, 369 aa, unidentified
MFIERTSVGLDVHARSIAAVAIDTVTGELFKQRLAPGADAVLGWMTGLPGPLAVTYEAGPTGFGLARAIRAAGIRCEVAAPSKIRRAAGDRVKTDARDAVLLARLLRVDDIVSVRVPTITEEAARDLVRAREDVRVDLTRARHRVSKLLLRHGHVYYGGDAWTGKHHQWLRSIRFDGADRAGTLAAYESDLETVEFAVNRRNRLERAIGELAADSEFTPVTRRLCCLRGISTLTGFALAVEIGDWTRFTGSSIGAYLGLVPSEHSSGGSRRQGGITKTGNTHARRLLIEAAWHHKKRYVPGVTLRRRWDDAPPTARARAHEGNQRLHHRWTQLAARNKKHTIANTAIARELAGWCWSLATLPDPPPATS

SEQ ID NO: 317127 - protein, 357 aa, unidentified
MGKSILNLAAVTRVGLDLAKNAFQVHAVDAKGAIVVARKLTRGRLIAFFAGLPRCLVAMEACPSAHHWGRQLLSLGFEVKLIPPAHVKPYVRRNKNDAADAAAICEAAGRPGQRFVPVRSIDNQAEVMRHRARELLAGQRTSLLNALRGHMAEIGIVAPQGAQHAYDLKRLAADSFGEDGEIVVPESVRAALRPLIEQIDALDERVAAIDKELAASVKADETARRLMTIPGVGPVTASAITATIQDISAFASGREFAAFLGLTPRQSSTGGKERLGRITKMGDRYLRKLLVVGACATLCHRRGHHDALRVWADRLLARKALKYKFKLTAVALANKVARIVFALLTRGGEYIERPAVG

SEQ ID NO: 317128 - protein, 343 aa, unidentified
MDHFAGLDVSVKETSVCIVDDTGKIVREVKVASEPEALLAVLKNPAYHFKRIGLEAGPLSQWLFSALAEAELPVVCVETRHMQAVLKAQINKTDCNDARGIAQMMRVGLYRPVHVKTLRSQKLRMLLTHRKLLQSKAIAIENDLRGTLRNFGLKVGMVGTVKFEARIKELVENLPDLAELVEPLLIVRRALREQIVVLHRRLLAIVRDDEVCRRLMTTPGVGPVVALTYRATVDVPARFRKSKAVGAAFGLTCSRYQSGEIDWSGRISRCGDEMMRVMLYEAAQSMLRSKKWSWLKAWAMQIARRRGMKKAIVALARRLAVIMHRIWVDGTEFRWTRERAAVA

SEQ ID NO: 317129 - protein, 371 aa, unidentified
MSANENITFVGLDAHSKNINVAVILPGSGQVDEQWQITHDARSLKRLSKKLIKMAPGEVHVVYEAGPCGYTLMRNLEKLGLSCEVVAPSLIPVKPGDRVKTDRRDAHKLATLYKAELLTVVHPPNEAQEAVRDLMRAREDAKKDLMSAHHRLSKMLLRYGLYFLETKNWTKKHRAWLKRLRFEHAQAQQVFDNYLLAIEQVEERLKTIESHIEEVAAYKAYAEQVGWLRCLRGVETVTAMTILAELHDFRRFKHPNDLMSYLGLTPSEYSSGSHTKRGSITKAGNGHVRRILVESAWSYRHRPAVSKTLLKRRAGQPAAVIAIADRAQHRLHKRYYRLKEDHRKPHNVAVVAVARELVGFIWAVLYHETAT

SEQ ID NO: 317130 - protein, 403 aa, unidentified
MSTLFAGLDWASRVHAVCIIDAHGNVRRQFEINHDATGLTELRRRLTCAGVTTVAIERPSGLIVDALLEGGFTVVPIHPNVVKATRPRYRSHGGKSDASDAYLLADLLRTDGHRFQPLTAQDDDIRALRALVRGRDDLVTTRVQLANQLRSLLQSFWPGAAEIFADVDSPIGLAFIQRYPTPESASRLGPKRLAAFCAQHAYSGRRSANELLSRLHQAPAVAVGELEMEAKGELARCLARTLNLLVDQIRLLTARIEHHVANNDDGQILMSFPRAGRICAAQILAELGSVRERFPSDEQLAAEAGVAPVTYASGKSKAVTFRWACNHRLRAALTCLADNSRHASAWAAHVYAQARARGCDHPHAVRILARAWLRVLWRAWIDRKPYDPTQHRAAQLLLTAAKG

SEQ ID NO: 317131 - protein, 421 aa, unidentified
MKQQVSEAFAAFVGLDWADAKHDVCLQAAGTAQREFLSLEHSPEAINAWVQTLRTRFNGQPVAVCLELNKGPIVSALRTYDFLVLFPVNPLTVAKYREAFTPSRAKDDPTDAELQVEILLKHRDKLTPLSPQSPAMRALAQLVEYRRRLVGDKVRLTNRLTSALKNYFPQVLQWFPEKDTAIFCDFLSRWPTLKAAQLARRTTLEGFFCAHHVRSTDLIATRIEAIKSARALTTDDGVIAPNVLLVHALVAQLRVTLQAIADFDKVIAHRAQDHPDFPLFNALPGAGAVFAPRLLVAFGEQRERFTSADELQKYAGIAPVTERSGKKSWVHWRLQCPKFLRQTFVEWAAESTRHSFWAQVYYQQQRDKGKAHQAAVRALAFKWIRILYRCWQERTPYDESIYLQALKRRNAPLLHNLANVS

SEQ ID NO: 317132 - protein, 429 aa, unidentified
MLQTEVACVPAMINGGVDKTHYKQNHVYVGLDLHKETHTAVIIDCWNEKLDTIVIENKPSDFTKLLNKAKKIAGDLTPVFGLEDVHGYGRSLAVFLIEKGQVVKEVNSALSYSERMSYPTTKKSDDWDAYCIAAVLLRILDKLPDANPQDLYWTIKMIVNRRDAIVKAVTTLTNQLHGQLAYHYPSYKKFFNDVNSKTALVFWEKYPSPHHLTGVTEEDLAKVLRKPSHNCCSTRKAKEILDLVESDGDTTREYQESRDFIIQSIVRDIRFKAEEIKMVEKEMKSLLKLLDYKLETIPGVDTVTAIALVAGISDIKRFRNADKLARFAGIAPVNFSSAGKGKDKKSKQGNRELYAVFYFLAIQQIQVAKGSNLPRNPVFLEYYKRKISEGKTKIQALVCVMRRLVNIIYGMMKNKSEYVMPIVPLKEAV

SEQ ID NO: 317133 - protein, 453 aa, unidentified
MVQRKARISLKPGKSRAALTITHPNAAGIDIGSGSHFVAVPPDRDDTPVREFPSFTVDLNALADWLKACGVDTVAMESTGVYWIPLFELLESRGFTVLLVNARHVKNVSGRKSDVLDCQWLQQLMSYGLLSGAFRPADQVCVLRSFWRQRGMLLRSQGRHVQHMQKALTQMNVQLANVISDVVGETGQKILRAIVAGERDGQLLGSMKNARIHASVDEIAKSLQGNWRTEHLFVLKQSLDAFDFVGTQLTECDNEIERQLQCLQRHEGEPAKGRQRGRSRNAPKFDLRAQLFKMCGVDLTRIDGIDVTTALAVVSETGADMSRFRTVRHFTSWMNLCPGTKISGGKVLSSKTKRCANRAAQALRLAAAALRTSQSALGAYFRRMCSRMDKPKAITATAHKLARLIYTMLTKGEEYTDQGQDYYEERYRERVLRQLSKRAQALGMALVPTAQPN

SEQ ID NO: 317134 - protein, 391 aa, unidentified
MVCVGIDVAKDKHDCCILDSDGMVRADCFTIPNNMDGFKQLLQTIRNCTKKSDKIKVGLEATGHYSYNILGFLLDNGLPTYVINPLHTNLYRKSLSLRKTKTDRVDARTIATMLLSDVDLKSYTDIAYHNEELKSLTRYRFDKVQERAKLKQSVSRLATILFPELEGLVSSIHGTSIYALLSEYPGAKQISEVHLTKLTNLLTTASKGRYGKEKAIQIREAARASIGSVMPAKSLELKHTIKLIQELASEINEIEDFIQKIIDELNPPILSIPGMGVNSAAVILAEIGDFSNFSSPDKILAYAGCSPSTYQSGKLTNCYAHMEKRGSRYLRHALYNATKYVCYWNPVFAEYLAKKRAEGKHYNVALSHAMKKLVRLIYALQKSGKVYLAAA

SEQ ID NO: 317135 - protein, 375 aa, unidentified
MKEKLRFLGMDVHAETIAVAIAEPDGEVRSLGTIPNRIEPIRKLIKKLGPVEKLRVCYEAGPTGYVLYWQLAELGVQCEVIAPSLVPVKAGDRVKTDRRDAEKLARSYRSGDLTAVWVPDEGSEALRDLVRAREAAKQDELRARHRLGKFLLRSGHRPPPGVRAWTHLHLTWVSQIRFAQAAQESTRLDYLHEVEHMRERVLRLEQAIVEAVKLASPALQEVITDLQALRGIAHISAVTIAAELGQVSRFPGARELMGYCGAVPSENSSGKRTRRGSITKTGNAHLRRIVVEAAWSYQRPPAIWAGLRKRQQSASEEAKEIAWKAQHRLHKRYARLAATGKDKRKIVTAVGRELLGFIWAIGTKAEATARQRIAA

SEQ ID NO: 317136 - protein, 340 aa, unidentified
MNKSLDFDPCGIEVSARTLVVERRRPGQPDAVREFANTAAGHQALLRWLEGAGRAVRVCLEATGLYGLDLALTLEAAGVALMVANPRAVRHFAQAMMQRSKTDRLDAAVLTEYAARLPFQPWRPPSPSALKLLAVARRLEDLTAMHAAEKNRLHAASVSQALPALLRRDIQRSLRTLERAVARLTRAAQEFIVADPRLAERYALLLSIPGLGPTSALHVLAELTLLGPDLDVRQWVAYAGLDPRQYTSGSSVHKKARISKAGNKHLRCALYMPALVASQHDAHLGGFYQHLVARGKTKLQALVAVMRKLLHAIFGIFKHHQPYDGAKLFALPIPQEVTCT

SEQ ID NO: 317137 - protein, 367 aa, unidentified
MRKHHHFGTFDAVRRGHPLHHYVGIDVSLELSSVCVVDVVGKIVAEAKVESHPAAIINFLRKLGLSIERIGLEAGPLSQWLHAGLTKGGFETVLLETRHVKAALSAMTVKTDRRDARGIAQLLRMGWFRPVHCKSPGSQEVRALLVARKQLLGKLLDVEFSIRGILRGFGLKMGVVTRSGFEARVRELCAGQAMLEQIAEAMLAARAALRKEYSKLHKAMLALVRRDEICRRLMSAPGVGPLVAITFKTAIDDPARIRKSKAVGALLGLTPRKYQSGETDVTGGVSCVGDEMARTALYEAANAVLSRVTRFSALKRWGMDVAKRRGTKRAKVALARKLGVILHRMWMEGTSFRWTKEASKVPQVARA

SEQ ID NO: 317138 - protein, 394 aa, unidentified
MGKLYVGIDISKDRSSANGVDERGINRFELSFDMDSTGFAELLKAIEANSDGYENVVAAMESTACYHINLYSFLSAKGIETVVINPLLIANFAKLSLRKTKTDKKDASTIAQFILAHKDSVTQLAVSQDLQDIRDMARERESLCHQISATKVEIRRLLHTTFPELESMCNPFTKVMLHFIQRFPSARLVSVAKANIIAKTLKEKPCSCRIRFTPAELINIARKSIATVSPGKEIILSGKIDTLLHLQKRRDELTKTLTKYCEASIVEDLKIVTSIAGIGNNTATTFLAETGRIDNYASHKNLIAFAGIDPTVYQSGKYEGASKISKRGNRHLRRVIWIMTVRVINHNPMFRKYFLKKRNEGQPFKKAVFATAHKLVRVIFAMLSHRTYFQEECI

SEQ ID NO: 317139 - protein, 410 aa, unidentified
MEVVHPRCCGIDVHKASVCACISIKDNETKKQKRRFDTTTAGLRELAAWLREWKITTVAMEATGVYWKPVWNILEEEFELLLVNPQHLKSIPGKKTDFKDGERIADLLQHGLLRGSFVPPQPIRELRDLTRARASFAQERSRLINRIEKTLEDPNLKLGVVASDVVGVSGRAILEALIKGEEDPVKLAELAKGTLRNKIPQLRLALEGKITAHHRFMLRQWLDALDFTDSKIADLDKQIHEKARPFEPTVQTWMQVPGLRRVNACSLLAEIGADMKQFPTAAQLASWAAICPGNRESAGKQTSGKTCHGNPWLRRTLCEAAWAASRTRNSYFRALYQRKVRTRGKNRALIAVAHSLLTTVYSFTTSGQPYGDLGLDHFDRLNRQSLERSLVKRLEKLGNHVILEPVRPAA

SEQ ID NO: 317140 - protein, 354 aa, unidentified
MVIVGTDVHKRTHTFVAVDEVGRKLGEKVVQATTAGHQRAINWARAQFGDDLVWGIEDCRNLSARLERDLLGAGQSVVRVAPKLMAQTRASARTRGKSDPIDALAVAHAVLRHPDLPVAAHDEVSRELKLLTDRREDLVAQRTATINRLRQRVHELDPAAEPTPGSLHRAKPCDTLAAWLQTQQGLLAELAAEELADIVRLTQAINALAARIGERVRQVAPTLLALPGCGELTAAKLVSETAGITRFRSEAAFARHNGTAPIPVWSGNTAGRVRLNRSGNRQLNAALHRIAITQIRLPDSPGHRYYRHRLAEGNSSKEALRCLKRRLSRVVFTRLHTDEHTHRNAGNTDHRIAA

SEQ ID NO: 317141 - protein, 408 aa, unidentified
METLHRRCAGLDVHQKEIVACRRIVSGRKVRSELGRFSTTTQGLLALSAWLAEAGVTHVAMEATGVYWKPVWHVLCHDFTLVLANASHIRNVPGRKSDANDATWIADLLAHGLIRASFVPPQPIQELRDLTRTRRELTREIARHTQRIQATLEEANIKLASVISDILGLSGRRILKAIVAGESDPRRLAELGHSRLACTRADLAAALDGRPRDHHRFLIGQHLKTIEQLEGTIGDFDARLEAALAPFLDAAERLKDIPGFGDNVAQTLLAEAGADMTAFPTADHLVSWAGMCPRLDESAGRKRSKRLRKGAPWLKPVLVQAALAAIKVKNSSLRARYFSLKPRLGHKKAIIAVAAAMLRIAYHMLKDGTFYQDLGPDYRGRKNPEHAARNLAKRIRALGYHVELKKAA

SEQ ID NO: 317142 - protein, 428 aa, unidentified
MPTRFFGLDVHRQFTQVAVLEHGRLTHLGQVPTTPEALREFASTLRRDDQLVLEATSNTYAIVQVLRQHIDRIVVSNPLQTRAIADAKIKTDKIDAEVLVRLLAGGWLPEVWVPDAETQALRQRVAHRVRLVRHHTRLKNRIHGVLIRNLVPGCPRSDLFGQAGQKWLIEQAVPQLPAHEQEIVVATLRQIESVREELGHVGQTLAGLALESPAVPRLMTIPGIDAVTPLTVVSIIGDVRRFRSPTKLVGYFGLDPRVRQSGSHAAYHGRITKRGRAHARAALVESAWAAIKSPGPLRGFYQRLRARRGPQIAAVATARKILVLAWHLLTEEKDYAFARPSLTARKHRTLELAAGKPAQFGKRGLAYQYNFKTVRQRELDLCVQAERAYTELTRHWQPRRPQQNAGAANGKATPRRRSAGQRGGAFIP

SEQ ID NO: 317143 - protein, 355 aa, unidentified
MIVIGIDPHKQSHSAAAVERERGELVAERTVRARRVGFEQLLGWARSLGEERLWAVEDCRHVSISLERFLLESGEQVVRVPPKLMAGARRSARQRGKSDAIDALAVARACLREPDLPVAALEGGSREIRLLVDHREDLVGERTRVQQRLRWHLHELEPELELPSGCLDRRVWLERLGRRLARREQSVQLRICRELVARCRELTRHANELECELGRLVQAQAAPLLELPGCGVLTAAKLLGETAGAGRFADDGRLAMRAGAAPLPASSGNKQRHRLNRSGNRQLNCALHRIAVNQGRWHSPAKAYLARKEAEGKSRKEALRCLKRHLARTIYRLLCSLEEEKMTSTNQAALVPALT

SEQ ID NO: 317144 - protein, 416 aa, unidentified
MNNESPVVAGMDVHKKMLAVVVAKVDGNRIEYLSERFGTTRQDLDQLAHWLHQQQVTEVAMESTAQYWMPVWLALEEQFTLYLAQPRSTAAPKGRKSDWADAQRIVRRLLAQDLTLSYVPGREQREWRTMTRTRVEMSAQQVRLRNQMEGLLEQAQIKLSSVLSDLLGVSGRRILREMVKGETNPACLASLADKAVKASEKTLQEALGGKLTATHRLLLKMYLEQWDLLASQIDQLNTRMAQALSQHQAAVHRLVEIPGVSLTAAQQIIAEVGPEARAFAAPQKLASWVGVCPGQHQSAGTEYSHRSPKGNRMMRRVLVQCAWASVKVKGSIFHQKFRVLVPRLGPRQAIWAIAHRLLRIIWKLLHDQVNYVERGLDTNPAAVQLRIKRHLKELQRLGYAVNLSALAAIRPQEESV

SEQ ID NO: 317145 - protein, 412 aa, unidentified
MQAIIERCCGLDVHQETVVACLLVGAPGEQPHKEVRTFRTVTRDLEALRDWLWEAGATHVGMESTGVYWRPVYAVLEGCFELIVGNAQHMRNVPGRKTDVKDSEWIADLVRHGLIAKSYVPPRPLRELRELLRYRRKLVESQAAERNRLLKLLETANIKLASVASDVFGVSGRAMLRALIAGEASPEAMADLARGLLRRKRADLILALDGRVEEHHRFLLAMQLRRLEAIEADIAALDQRIGKRLEPYAAPHTLLMQIPGVDWVVAAVLIAEIGVDMSVFVSVYHLAAWAGVCPGNHESAGRQKSGRARKGNIHLRAILVGAAISASRAKGTYLKDKFHRLKARRGGLRAALAIAHKILVSAYHMLAKNLPYRDLGEAYLDQIGQTRTVANLKRRLERLGYRVILEPNAQAT

SEQ ID NO: 317146 - protein, 341 aa, unidentified
MRIVGVTGGVDTHADTHVAAAIDDNGGLLGVESFPADQTGYEELLGWLVGFGEVEQVGVEGTGSWGVGLSRFLADQKIVVVEVDRPNRQTRRKKGKSDPTDAVSAARAALSGTATVTPKSRNGQVEQMRVLMVARRSAREQRIQSLNQLRHLVFTAPESIRVRFKDRYKTGLVTEAANMRPRKGSDPVTYTTNLVIRNLARRIRVFNSEIREIDRTLTELISETAPSLFNLHGVGTDTAASLLVAAGDNPDRLHSERSWAHLCGVTPLPASSGKVTRHRLNRGGDRQANAALYRIVLTRMSSHEDTRRYVARRRTEGLSTPEIIRCLKRYVARQTYKHLTT

SEQ ID NO: 317147 - protein, 471 aa, unidentified
MSCFRGAIQNRLRKEDFMKKQDSYDYYVGIDCAQNKHDFAMKNNQDKFLIKKGHFSNTLQGYEKFLNTVLSKCLNKDKILFGMEVTGIYGTNLYERLKSDGYHVVMISPDSVKNYRDYKRLNKTDKIDSACIAELLLNGDAQIVHVEKNGYIDLKAYIRRRNALKVTCTQETNRFLAKVCLYFPDLLKVFPSGRATLKAIFSIYPTPHSIIEADFDELVSVLQKASKNKFGVDKANELIHAARNSIVVRKSISDGELYNIHSLIDSIDSLESEIRNLEKIIDSKAEEFPAYHVLLTLTGCGKITAATIVAEIGDISRFHKASQIVSLAGLYGDNSKSGSSVNKRGKISKKGSRYLRHAIYMVAEFARRNNPIFKAYFTRKKNGDRTKHTLAVNAVANKLCKVIYSLMKNQSTYIIQYRDLAKLSESTQNEFFQNAETDFSAKTRRKKYLYEDEYGELHEFVFKSLKTALIE

SEQ ID NO: 317148 - protein, 413 aa, unidentified
MNYEPITAVGIDVSKGKSTVAVRRPGGEVVLTPFQVNHDAAGLSSLVKTLQDVGGNIRIVMEHTGMYWRPIALALKEAGFFVSVVNAMLIHDFSDNSLRKVKTDKADSMKIANYALSFWAELRDYSTEDETRQMLKMQNRLYLRTQKSSVTLRNGLISLLDQAFPGVNTLFDTQPKRSNGHFKWVDFVRRFWHRDCVAGISFAAFSDAYRKWCARSGYRFSASDAKKLHTAARNSVATFPKSDSTKLLVAQAVDSLNAVYDALYVLRGEMLRLASLLPEFDIVMSMQGAGEVTGPQLMAEIGDVRRFTHKGALVAFAGMDAPPFQSGTFDAKSRRISKRGSPHLRKTLFMVVSTILQHSDPANPIFQFMDKKRAEGKHFYVYTVAGAAKFLRIYYARVKAHLMALDSGANSAA

SEQ ID NO: 317149 - protein, 310 aa, unidentified
MDIIAVGIDVSKDRLDVAVHPGGEAFVVERNGAGLEQLTARLKQLAPTIVALEATGGFETIAAAAVGGAGLPIVVVNPAQVRAFAKALGQRAKTDPIDASVIAHFAAATRPEPRPLPDEATRFLSDLVTRRRQIVDMIGAERQREKRATSQHLRKSITRLIKALEKELVSVDTDIDDAVRSSPAWREAEDLLASVPGVGPIIARTLMAELPELGRLNRKQIAALAGLAPYTRQSGQWRGKSFIGGGRQAVRTVLFMGAMTARRHNPVLKAFFERLVANGKPKLVALIAVARKLLTILNVMIRTKTPWQPA

SEQ ID NO: 317150 - protein, 398 aa, unidentified
MDHPCIALDVSKGKSYFQGFISIDKPFSRAKQIEHTKAGFDEMMETAESLKKEGDVTFIFESTGIYHKGLQKYLDEREEKYIILNPLEAAKIRKSQLRSTKTDQRDCKNIAVAYFSRDYRTHHRQDNIYERLQQMNRDYGFMVQQLRMLKVAYRNTLDVVYPQFDQLYEDVYSDIAMAIIETNSHPDEMLKKRVETICKQLEKKTKHHSNYCMKEAQIIKSYAQNVQSGVSLNDYEVSELKHYNEATKAQMIEVETHLERMISVAKDIPLFNQLVTIPGVGENLTARLIAEMGDISRFSNKRQLVAYAGIDPRVYQSGQVSGEHLHITKKGNKQLRTLLYLAVSSSLRLKKPSVIREFYNKKRQQTNPLSHKAALIACANKLLRIIYGMSRNGTTFLI

SEQ ID NO: 317151 - protein, 291 aa, unidentified
MNIVFLGIALAKNVFQLCGLNQAGKPVYTKRTGRKELLQTLANIPACLIGIEASTGAFYWQREFEKLGHKVKVISPQYVKPFVRGQKNDGNDAQAIAVALMQPIMQFVPPKSPEQQDIQALHRARQRIVNHRTATVCQIRGLLLDRGIPIGSAVSRSRRAIPLIPEDAEKGLSSRMRRIIAELYDLFNDLGRRIHFFDKEIETVFRQSEACQRIAKVKGIGPKTATAVVAAIGKGTEFKNGRHFAAWLGLVPRQHSSGDRQVLMNMTKKRRQASADTFYSWCPRCRQGCHE

SEQ ID NO: 317152 - protein, 313 aa, unidentified
MSQNTMTTIYAGLDIAKRNLQLHLAGRSYDLPNTAAGHRRLLKLLATQPGVHVVCEATGGYEREVVAALQEAKVPVSVLNPARVRHFARATGQRAKTDDLDAAVLSAYGRALQPKPTAPRTEQEQQLAELIRRRVQVVEILVAQRQQAERLTVPALRRQAQSLVRRLERDVAQIEAQLKALRTQTATLDERVQKLVAITGVGNLTALGVLAELPELGTLNRRQAAALAGLAPHPRESGQWHGRRRIGGGRAPVRRALYMAALVAAHSNRQLKEFYQRLRAAGKPAKVALTAVMRKLIVLMNHILKNPNFALQN

SEQ ID NO: 317153 - protein, 346 aa, unidentified
MKHIPTIGLDLAKQVFQIHGADVEGPPIVSRKLRRAEVLRFFEKQPTCLVGIEACGGAHYWAREIAALGHEVRLIPPAYVKPFVKRGKTDAADAEAISEAVTRKTMRFVQIKSAQQRAAAMVLKTRGLLVRQQTQAINALRAHLSELGIVAGIGTAKIAGLIEIVRDETDARLPKAARLALSALADQIEALKEQVDKIEREIIAEAKRDEDMRRLATIPGVGAITAATIKALVSDPGGFKSGRHFAAWLGLTPKSHSSGGKERLGGISKMGNPELRSLLVLGATTVLRYARGNDKAPKWLAALLARRPFKVVAVALANKMARIIWALLNKGGTYRGLTEASSVAST

SEQ ID NO: 317154 - protein, 390 aa, unidentified
MRAGASLAQSRGLPSRLLFGSAYMCEEAPVFTERTSVGLDVHARSVVAAAIDGDTGEVFRKRLTPGNSDVIGWVRSLPGPSAVVYEAGPTGFGLARAFVSAGIRCEVAAPSKIQRPAGDRVKTDARDAMLLARLLRLNDIVSVTVPSVQREAARDLVRAREDVRGDLMRARHRVSKLLLRQGIVYYGGHAWTGTHLVWLRRQHFDAPGLQLAFDAEHEAVLQAEARRDRLDKAIEAMAADSEYTPVVRRLGCLRGVATLTGFGLAVEIGDWDRLTGSTIGAYLGLVPTESSSGQSRSQGSITKTGNTHARRLLVEAGWQHLKPYRTPGATIRARWELAPAAARARGHAGNQRLHQRWVHFADRKKEPVIANVAIARELAGWCWSLAVMDD

SEQ ID NO: 317155 - protein, 356 aa, unidentified
MSNITRVGVDLAKNVIQVHAVDAAGKVVTNRALKREKFLAWCADLPAGCLVAMEACSGAHHWCRQLSERGFDARMIPAQFVAPYRIQGKSGKNDANDAAAVCEAASRPHMNFVPPKTLAQQGMLCVHRLREGLKEDRTACMNRIRGLLAEFGVVLPQKPAVLRLHLNDVLEDASNDIAGMARLVLQRAQEHWRELEVHIKWCDERIAAHQKDDEQVQRAAELKGVGPITASAMVATVGDFKQFKNGAQFGAWLGLTPKQNSSGGKTSLGGITKRGSCYLRSLLIQGAKAAVLVGKHNDDPISQWAQRLRERCGWQKAVVALANKNARILWAVMTKDKRYDAHHVSIPPAGAMPAAA

SEQ ID NO: 317156 - protein, 369 aa, unidentified
MPTMTHPVPTPQPMSSTGRVTGGVDTHKDTHTAAVLDACGRMLGHQQFPTTPAGYALLLTWLRSHGELDKVGIEGTGAYGAGLALHLRVAGVELVEVDRPDRSTRRGRGKSDPVDAEAAARAAQAGRATGVPKDRTGRVEALRALRVARRSAVTARADTQTQMKSLIVTAPDQLRAQLRTLGDRQLIRHCATRRPDHTAVGDPTTATVMALRALARRHQQLTVEIDELDGLIAPLAAAINPALCALLGVGPDVAGQLLVTAGENPQRLRSDAAFAMLCGAAPLPASSGRTLRHRLNRGGDRHANAALHRIVLCRLRWDPRTRAYADRRTTEGMSKKEIMRCLKRYLAREIYTALLNPHPSSIPAVQSAA

SEQ ID NO: 317157 - protein, 389 aa, unidentified
MQFYTTQHTSYCGIDLHARSMDVGVLNQDGDSVMHRNMQARPDTFLRTVAPYRDDLGVAVECVFPWYGLADLCAPAGMPFVLGHALSMQAIHGGKATNDTIDAHKIAVLLRGGLLPQAYVYPAARRATRALWRRRLSLSRTRAELLAHIQNTKSQDNVPEIGTQLADTAHRAGVAARFPAPAVQKSLAVDRALIGSDDPLRSDVALPSVTAATQHDAQTLSVLQTVPGIGTLLRLVRLDAMHAIQRFPRGQDVVSSGRLVQWAKASAGTRSGTSGSKSGTASLPWAFSAAAVLFLRDQPAGQTYRARREKTHGTGTALTVLAQTLGRAVYAMSRRDTGFARDNCLHGSESGAGAPAASLGPDGTSRVTGLCNDASTASPTAHAPIGALS

SEQ ID NO: 317158 - protein, 387 aa, unidentified
MSKLNDLSRSLVALEQHATLIAVIEMGQSSWLVAGIVPGIERNPLKKLAPDQDGLLRILHRWRKEAVQTGCTIKRIVVAYEAGRDGFWLARWLRAREIEAYVIHPSSIPVSREHRRAKTDRLDTELLKRAFLGWLRGEPKHCTMAAIPTVEDEDARRPSRERESLVGERTRIINRLKANLARLGIRGFRPNLTLASSRLEAVRTPEGAAVPTNTLAELRRDMARLRFVKQQIKEIEAARAKRLGGSKAQRHAMVHLLTRVVGVGVETADMLVQEVFLRNIRDRKALARYAGLTGAPDESGQKRRERGLAKAGNARVRRGMIQLAWGHLVHQKDSALSEWYRRRTSDAHAGTRKTMIVALARKLLIALWRLVTTGDITAGLLLRPTAR

SEQ ID NO: 317159 - protein, 343 aa, unidentified
MSEIKRIGIDTSKAMFTLHAIDQADRPVLRVNLRRAQMLPFFKKRPRTEIAMEACSSAHHWARKLTALGHDVRLIPPQYVKPYVKRGKNDRNDAEAICEAAGRPGMRFVLTKSEAQQADGLVLKVRETLVAQRTQLINALRGHAAEFGVIAAKGTSQIAPLLAAVAAEESIPAAAKAMLALLGEEIAHLDGRLKELEAKLLAMHRANAISQLLATIPGIGPIIALTLAVEVDPKAFQSGRHLAAWLGLTPREHSTGGKQRLGGISRAGHERLRSLLVSGATAVIRHASQGGGKLASEWLRQLLSRKPRKLAAVALANKMARIAWAVMSSGEAYRHPAAGAAAA

SEQ ID NO: 317160 - protein, 342 aa, unidentified
MQVTTIGLDIAKNVFQIHGIDANEKVVVRKQLRRGKLIAFFEALSPCLIGIEACATAHHWARELTKLGHEVRLMPAKDVKAYVKRNKNDAADAAAICEAVRRPTMRFVRIKSPEQQGQLMQHRTRDLLMRQRTQLINALRAHLAELGIVAAKGDSGVKELLAIVADEEDTRLPIDVRASVIVLAAQLGAVQTLIGSIEKRIKTQHRANEASRRLETIPGIGVIGATAIAATVADPTVFRSGRDFAAWIGLVPRQDSTGGKQKLGPISKQGDRYVRRILIVGAHSVLRRAQENPEKYPWLTQLLARRPFKVVAVALANKMARMAWALLAHGGTYRAPELAQAA

SEQ ID NO: 317161 - protein, 381 aa, unidentified
MTLPTAGIDPHNTNFTVGIIDVHGVEITHKAFPNSATGFVEAIELLTTHGVRTVGVEGSGCLGAHVSIALTSAGFDVREVPAQRSATQRRSRRLDKTDTVDSIAVARAVAAEPTLGPAQVMEIYDPLVAKIETVLEQRRFLVESRVLMLHHVGEQLIKLPIEVRDQIGNHDKVESALRRLETLETFEGLTPAGDYRIEWLTSLIDQDRALRRETRRLERLLDTLLDEHGTTLRDEDGIGPIAAATLLCEVGEITRFGSESQFARWCGTGAVELSSGEGTGRPIRHRLDLGGSRTINSTLYTASITQQRYIPCLDRKRAEGKTNREARRAHKRHLANRVIRRMQRDEKTSTQILHPTIDKGALPTPQNDRTTSRTNSVVHRK

SEQ ID NO: 317162 - protein, 412 aa, unidentified
MTAKDQFAAHVGLDWADKKHDVCVQFKNGDRIFHVIEHTPEALDIWLNELHQRVKGRIAIAIELKKGPVVYALQKYPFVTVFPIHALSLARYRQAFWPSGAKDDPQDAELALDLMLRYPHKIKAIEADNPDIRLLQQLVEQRRLLVEDKRRFVNRLINTLKQYYPQPLEWFSHRDSSLFCELIIRWPSLQQLKRARSDTVRHFMNAKGGPAVAYTEQRVASIASAIPLTTDKTVIEANALMATALASQIKLAGDLIRTYDERIESLFDTLPDAELFKSLPGMGPCMGPRMLAALGDNRDRFNSAEEIQNYAGIAPVTERSGQKSWVHWRWQCAKFVRQTFVEWTAKTVNSSYWARLYYQGQREKGKSHQSAIRALAFKWIRIIYRCWKTKTRYDEAKYLLALEARKSPLLKP

SEQ ID NO: 317163 - protein, 427 aa, unidentified
MKYTQNERIMQITEKTLIVGIDVGSETHYARAFNFRGLEYGKLLKFNNDAEGFSRFEDWVRKLVNNNGFKDVTIGMEPTGHYWFNLGEYIERQSGMRIALVNPHHVKKSKELDDNNPSKTDRKDPKTIAMLIKDGRYIEPYLPEGVYKELRTAMDSRWRIMKELSAIKNRISRWICIYFPELTKVFKDWEGKAAILVLKECATPTKIKEKGVDGIIAVWKKYKIRAVGRKRAKMLLEAAVSSVGTTEGLISAKYELEMLLEDYESKKRQYDKTMELVERLTKEIPGFEKLLEIKGIGLVTAAGFIAEIGDIKRFSHPKQIQKLAGLSLKENSSGKHKGKTTICKRGRKRLRYYLTFGMMPLLSKNEEFRALHEYYTSRKENPLKKMQSLVALSNKLIRIFYAILTKNVAYDPQKMMSDIRRPETKAA

SEQ ID NO: 317164 - protein, 392 aa, unidentified
MICVGIDVAKDKHDCFILSSDGEVLADVFTIQNNAEGFDTLLQTIRLCTRPQDIIKVGLEATGHYSYNILGFLLDKGLATYVINPLHTNLYRKSLSLRKTKTDRVDARTIATMLMSDVDLKSYTDTAYHNEELKSLTRYRFDKVKERAKLKQSVSRLVTILFPELEKLVPTLHMASVYALLSEFPGAKQIAGVHLTRLKTLLKEASRGHYGRDMATELRDAARLSVGSVMPAKSLELQHTIRLIRELDAEIDDIEAAIQIMMDEIHSPITTIPGIGIRMGAMILAEIGDFSRFDSPDKILAYAGMSPSTYQSGQLSLSGTYSHMEKRGSRYLRYAIYNATKYVCLWDPTFSAYLAKKRAEGKHYNVAISHAAKKLVRLIYAMEKSQRPYAAA

SEQ ID NO: 317165 - protein, 371 aa, unidentified
MSNDIIGLSRLLNDLKTVHHPEIVFEATGVYSRRLQSFLEKNGYAYTRLNPLEAKKQLDSLRVRKTDKIDAEKLAQSQFILDRKPTYVQEEVYQLLRDLSRFYQNLTEDIVRVKNRLHKVLQVTFPELEYLLSAPTGEQYWNLVRAFPCKALVVELDDKTLSAIIRQSTSKRLSDKRVIYLVEKLISLAKQSYSAVTKTSPMIEEVRYYAKELLRLSEHRQAILDKMVALAQPLPEYEILRSIPGIAETTATSIIGELGDIRRFQSANQINAFIGIDLRHYESGNYLAQEHITKRGNPYARKILFKCIHNIVSASHTNPCHIADFYEKRKRQSQTTSTKPHTIASIHRLIRTMYYLITHNKLYDYASTQNH

SEQ ID NO: 317166 - protein, 395 aa, unidentified
MTNRASSDLIGAWRKGPLAVLSRPPGWRAPSAATNKEMAVPTLAQLEPVRVTMGVDTHKDTHVGVAKDHLGRHLGETTVLTTPRGYRDILAWAESHGEVEAWGIEGTGCYGAGLARFLRSEDQVVIEINRPDRKARRLKGKSDPVDAEAAARAVLSGEATARPKSGDDRVEMIRALRAARSSAIKARSQAVNALKALLVSAPAELREQLRALSATQLVRTCSRLRPGDIMTPLAATKLALRSLASRYESLDVEIKILDPELVRLTAEVAPGLVELFGVGPEVAGTLLVTAGDNPQRLRSEAAFAHLCGASPIQASSGKTVRHRLNRGGDRQANAALYRIVIVRLRYHTPTKDYAERRTTEGKSKAEIIRCLKRYVAREVFAVLSDIDQKNLAEAA

SEQ ID NO: 317167 - protein, 374 aa, unidentified
MQEQAATAQTEVISVAIEMSNTQWRLAFTAGDKIRQVTLTAGDAEGFLQHVKTAKEKLHVAADAGVYSCYEAGRDGFWFHRFLTAHGVTNLVVDAGSMRVQRKHRSAKTDRLDAELLLRNLLRWQAGEHNVWSVVRVPSVEAEDQRRVERERQRLQKEWTAHWARLWSLLKLHGIRSCAKTRFLAHVDAARTWDGQPLPERVQAELRREYVRVEQLAEQRAVLEAEQARQVKRPATEAEKVAAKLHRVKSLGPVGACSLAHEFFGWRHFRNRREVGALAGLTDTPWSSGDLARSQGISKAGNRRVRHLLIEVAWKWLRYQPESALSQWYARRFATGGARLRRIGIVALARKILIALWRWVAFDEVAAGVCLRPA

SEQ ID NO: 317168 - protein, 331 aa, unidentified
MKIKETVGIDISKLNFDARVHTTQVFKSFSNDTRGYQKLISWAYKNTSFSKENIIFVFEHTGLYSHQLAVYLTSQGIPFLMVPGLEIKRSLGMARGKDDKKDATKIAQYAYRLRDEIVPSQLASEEIMSLKRLLSLRERLVKQKAGFKASLKEQKRVLLKKENEVLLSTQEKMIKYLSKQISIVEKQMNEIIKENQSMSRNFKLLTSIKGVGPQTALFMIAYTNNFTKFKEWRKFASYCGIAPFPNESGTSIRGRTKVSNLANKKIKSLLDLCAKSSIQYNPEMKQYYERRIESGKNKMSTINIIRNKLVSRMFAVIARNEPYVDLMKYAA

SEQ ID NO: 317169 - protein, 379 aa, unidentified
MAASRSPQTKTRRSSPSPVAANATTLAVAKPSQRRKRGTNVSESQYVGIDLHRRRSVIVRVDQAGNHLSTVRVENEPMVIMAAVAEAGPNPEVIVEATYGWYWLVDLLRDNGAIVHLASPSGLNWGNRRVKNDERDALDLVRMLRLGELPEAWIAPPELRQLRELVRYRFRVVQLRSGLKAQVHSVMAKEGILPGLGDMFGPGGQALLDAMEMAPNYTTRVSSLRELIADYDRQVAALERDIHAQLRHHPGYNAIQAIPGVGRTMAAIFVAEIGDVSRFSSPEKLCSWAGLTPKHRESDLKVNRGRITKAGSKLVRWAAVEAVAKRNGGPALSPAYQRIAERRGKGKARIAVARRLLTLVYYGLRDGTIRALQPTEEAA

SEQ ID NO: 317170 - protein, 376 aa, unidentified
MGKHRLAFVAFDSAKNKHAVAIADDGRSGEVRYLGEIDNSPDAVRKLVAKLRRQYERLHFCYEAGPTGYGLHRQMTELGHVCDIVAPTMIPKRSGDRVKTNRRDSVTLVKLLRAGELHAIWVPDSVHEAVRDLTRARETAMVDLKTKRQQLLSFLLRHGRSFRDGRNWTKTYERWLAKQTFAHPAQQIVFQDQLEAITTAQARLAALEQQLREIVPTWTMAPVVAAYQALRGVSFLVAITFVAEVGDVRRFATPQQLMAFLGLVPSERTTGDTVRRGSITKTGNHRARRVLIEGAWTYRFSARVGETLRRRLEDLPLSIRTIAWKAQVRLCARYRRLIARGKKPPVVTTAIARELAAFLWAIGQQVAPRTGVTPAS

SEQ ID NO: 317171 - protein, 352 aa, unidentified
MIIGCDFHPSFQQIAYVDQETGEYGERRLRHREEAVQFYRSLASRQVRLGVEATGNDRWFRKLLGELGQELLIGDASAIHAAAPREQRTDKRDARHILRLLVENRFPAVWQPPAGNEEQRQLLLHRCRLVRMRTRIKNQLDSMAKSEGLTASRRWSSQRRQQIEALPLTGWYAQRRADLLRLLDELEQRIQPLDRAVEAAARQDAQARLLMTHPGVGPVISLAYVLVVGDWRRFPRGKQVGSYLGLIPSEASSGRRQQQMGHITKQGNTLLRWLLVEAATTAQRYDASWHRQYVRLSMAKHHGVAKVAIAHKLAVRLYWMLRSGQDYGQMMERGSHARQSECPVGRSKRPIE

SEQ ID NO: 317172 - protein, 342 aa, unidentified
MDEFIRIGVDLGKGYFQVHGLPLAGGPAMNRKLSRARLGAFFAQIAPCRVGMEACGSAHYWARELVSMGHEVVLMPPAYIKPYVKRGQNDAVDAAAICEAMSRPDMRFVPIKSADQQAVLMLHKTRELLVKQRPMSVNALRSHLAEFGLTVAKGLGRLDELSELAENDASLPEEARQMAKLLTLHVEALTRSIDATERKIAKASASSKTSRLLDRVPGVGPLTASAIAASVPEPGVFKSGRDFAAWLGLTPRQNSSGGKAKLGAVTKQGNRSIRKLLVVGSTAVLRHAPANRKGPLADWIAALRARKPERLVAVALATKLARICWAVMTTGEFFRQESFARA

SEQ ID NO: 317173 - protein, 315 aa, unidentified
MTKINITTAGIDTSKAKLDVAVHNRTERWQVANTLSGWRVLAANLAKAGVTRVGIEATGGYERGVVEHLRAAGFTVMVLQPIQVKAFGRVHLRRAKNDELDAALIAACTAALDQPKIAPDPRLAELARNLTFLEQIEEDIARFKTRLEHIDEPRLRRLVTSDIARLKARRATQIRDIAKHLRGHDDLARRLALVLSIPGIGERTALALIIRMPELGQISREQAAALAGLAPFDDDSGQHRGQRHIAGGRGRLRKSLFAAALPAAFRWNKALIALYARLIAKGKVHNAALIACARKLLIYANTVVQRGTPWIENAA

SEQ ID NO: 317174 - protein, 338 aa, unidentified
MRLYCGIDLHSNNSVVVILDEADKVIYQKKLNNDLFLILQQLSVYKDEITAIAIESTFNWYWLVDGLMDAGYTVKLVNTAAVQTYAGLKHTDDKDDARWLAHLLRLGILPTGYIYPKEERAVRDLLRKRSQLVRQSTTNILSLQNILARNTAQSLSSYRIKKLDDDQAEKLINDPNITLSLKSNLNVIRCLQSTISDIEAAVLKQSRLRTEFKKILSITGIGEILGLTIMLESGDMNRFPKVGNFSSYCRCVKSERLSNGKKKGEGNRKNGNKYLAWAFIEAANFAIRYNDQVKSFYQKKKAKTNGIIATKAVANKLARACYHVLKDQVTFDVNKSFS

SEQ ID NO: 317175 - protein, 319 aa, unidentified
MTEVVLFVGMDVSKDFVDVAVGTTDPVRSFPNDEAGRANLVELLRARNVTLIVMEATGGFELPLAAALATAELPVAIVNPRQVREFARATGQLAKTDRIDARLLALFAERIRPHARALPDEETRLLDALLTRRRQLIEMITAERNRLGFAPTALHTGLRKHIRWLQRELEGVDRDLDKSVQASPLWRARDDLLQSVPSVGPVTARTMIGAVPELGRLNRREITKLIGLAPFAQDSGKFRGKRRIRGGRSDVRKVLHEHSGRDSTQPHDPCLLSAPARRRQTQEGRHHRLHAKAVDHPERHGSLRISLGRFRTLDMRDSY

SEQ ID NO: 317176 - protein, 345 aa, unidentified
MFVAGIDAHATYSVIAIVSNTGQLVQEPVRIDNTDEERLHELFEPYRPLEVVVETSPAWPWLFDRLQERGIHFVLAHAKRIRVIAESNYKSDEIDAEMLARMRLAGLIPEVYPKCIEQREQAVLLRNRARLVRERTRMVNRIHAQIHNVGLHLERGRLLTQDGRQWVRDVAWPLLGEERRLFIDMQWELIDQIVPMIRTLDHRVEHVGREIPAVALLETVPGIGPYRALLIATETLPIKRFRTPGHLVSYAGLAPRSSQSGLRPIRHGSIPAGANRWLRGTFVRAVVSHVTYAPDSWLSQSYELIRQRLGWQVARIATARRLARAVHAMLRTGEVWHDEPVARAN

SEQ ID NO: 317177 - protein, 344 aa, unidentified
MDHFAGLDVSVKETSVCIVDDTGRLVREVKVASEPEALLAVLTNPAYHFKRIGLEAGPLSQWLFSALAEADLPVVCVETRHMRAVLQAQINKTDRNDARGIAQMMRVGLYRPVHVKTLRSQKLRMLLTHRKLLQSKAIALDNDLRGTLRNFGLKVGMVGTVRFETRIKELVENLPDLGLLVEPLLIVRRVLREQIGILHRRLLAIVRDDEVCRRLMTVPGGGPVVALTYRATVDVAARFKNSKAVGAVFGLTPSKYQSGEINRTGAISKCGDEMMRMMLYEAAQVMLTRTNKWSWLKAWAMKIARHRGMKKAVVALARRLAVIMRRIWVDGTEFRWTREETAAA

SEQ ID NO: 317178 - protein, 346 aa, unidentified
MKITTIGIDLAKNIFQLHGVDERGKPAVRCAMKRDDMLPYFANLEPCLIGMEACGSAHHWARKLIALGHTVKLMAPQFVKPYVKSNKNDAHDAEAICEAVTRPNMRFVPLKNVEQQAELSVHRARQGFIKARTAQGNQIRGLLGEFGTVIPKGIAHIYKRVPEILEDGENGLPGSMRQLILRLTDNLKVLDEQVAALEKEIKQLHAGNKPGRKLAEVSGIGPLTASALVATVGDAKNFDRGSQMAAWIGLVPKQHSSGGKTVLLGISKRGDTYLRTLLIHGARAVIRHAQNKPGYADSWLGKLIARRGKNVAAVALANKNARIAWALLSKEGKFRPDYATVQPTAA

SEQ ID NO: 317179 - protein, 416 aa, unidentified
MLAVVVSDVEIESEYQFERRMFGSSPDQLRSLATWLLEQEVEEVVMESTAQYWKPVWEALERYWKPLRQKREGAGRRSGTLHLAQAQSNRGRRGRKRDFPDAERLVKRLVARELTLSFVPDAEQRLWRTVTRRKYQLRRDHVRLQNQVESLLEEAHIKLSSLVSDLLGASARRMLKALAEGETNPAPLAALADWKLRATPEQLCDALGACTDLKPVYRRLLKMALEQLQFLEQQMDQLDQELASLLHPHQDAVQRLAEVPGLGVDSAQQIIAEVGPTAATFPSEKCLSSWVGACPGDDESAGVNYSHRSPKGNRHMRRVLNQTANAAARTKGSIFDIVYRRSVPRLGHNQAIGAIAHRQCRLIWLILHQGVRYEERGPAVTKQSKQKRTARMIRQLRSLGYRIDPPNPQPSQAHAQ

SEQ ID NO: 317180 - protein, 348 aa, unidentified
MLADQLDYVVGVDPHRDWHALAVVRVVSGAVVFEGSVAADSLGYAQALKLADQHAMGRRAFAVEGTGSFGAGLTRYLAGRGEQVLEVGRLRRERGSAGKTDALDAIRAARSVLAQERPATPRASGEREALRALMAAREGAVNAKRAALCQLRDLLVTTPEPLRSELRPLTRAPLLRRLAATRPERRQDPQLRGALLALRSVARRVLQLASEERELAREIETLTRKLAPQLLDQPGVGPLAAAQLELSWSHKGRISSEAAFARLAGCAPIPASSGQTIRYRLDRSGDRKLNRALHMILVTRRRTHPPTIAYIERRIQEGKSRREATRCLKRYLARTLFRLLEHGTPQTA

SEQ ID NO: 317181 - protein, 429 aa, unidentified
MDVKDCIRVEAFRQLKKEIRGSERHLIVGIDVAKDKHNAFFGTARGHTLLKRLVFENNIEGFEKLLTFSESMKVKHALEEVVFGFEPTANYHKPLGEYLVKRGLSVVLVSGKAVKNNREMLDNRWDKNDTKDPANIADLISQGKFMYYDHPVLPLRDLRNLLSLKRRLKKQEHGLKVRIRNHLLAQYFPELDRYYGQWERGGLSIVRWCLSPSAIAGMEYEQFERLIVPGSRMNLSQQERLKAIWQKATDSIGCEVGEALEFEARMMVEGLKQVREAIRVTDEKIKGVCLHFPEYSYLRTIPGFGPDVSSKVLAAIGNPFRFDNETQVLKLAGWDLSATRSGKNSNAIRPVISKKGKAELRYALYQAALIASTRNQFFVMYYTNKLRGREKEKGIKTKMRVKLAAKLLVIAWTLMKKEEPFNPDFLHID

SEQ ID NO: 317182 - protein, 316 aa, unidentified
MINVGIDISKAHLDVAFRPSGERFRVANDDKGYAEICKRLTKLRPQRVVVEPTGGYEQALVQAMVRAKLPIVVVNARQVRDFAKAAGRLAKTDQIDADVLAHFGEALQPEIRALPDDAHRQLEAFVNRRRQLVDMRTGEVKRKQTAPAAVHPSIDVTIEFLTKQIDDIDRELRGLIRRTPAWREADDLLQSVPGVGPVVSSTLTALVPELGKLNRKQIASLVGVAPFNRDSGLGERKRVTWGGRAPVRAVLYMAASVARRFNPAIARFYDRLLAAGKPPGVALVACMRKLLTMLNAMARDRRPWNPQILEQASSCP

SEQ ID NO: 317183 - protein, 350 aa, unidentified
MLIIGCDFHSRFQQIAMLDPTTGEVINRRLEHENGEAKKFYATLPSPARVGMEATCDAQWFERTLREHNHELWIGDAAEIRAAMVRKQKTDPRDALHILDLLLANRFPRIWVPSPAERDLRQMLRHRHKLVRFRTSVMNQLHALAMGQGLCRKKKLWTKVGRKELESLLLDPWASLRRQELLQLLDQLDPWIEKLDEAVIQAAASRPPAVCLMQQAGVGPVTSLAFVLTIGPVSRFANSKKVVSYLGLNPSEESSGGRQRLGAISKQGNPMMRYLLVEAAQTASRLDPELRRDYQRLKFRRGSAVAKVAIARKLAVRLYWKLREADQPVPSARMQGSPASPVVGESLSPN

SEQ ID NO: 317184 - protein, 368 aa, unidentified
MAPYYVGLDVHSRQSVFVIEDAAGQVVGQGEVPTTPEGLQQLQTQHRLPAGTPVALETGTVAFFVARHLRRLGLEPVVVDAQEVRLKAHRPTQKSDRRDAYELCEGLRRDIYRILVHVPPPAVSALRDTLSRRRHFVRLQTAEINAVKRLLRAAGLGHLSRALRTEVGWGKLLAAVAPQPDLRAFVEHHRAAWRCAAEQVAALEHALGAQQRAFARDLERLETAPGVGPIVAATTLAVFSEVTRFPSAKHAASYAGLVPSTYQSGTRDAHGRITKRGSAELRAMLCEAAQHARRPTHPLHPYFTKLCAKRGYKMAVIAVAHRLARILFAMLRDGTDFDVHRLGIAVGPFTRTTVDAYRLKRAPRAHRA

SEQ ID NO: 317185 - protein, 388 aa, unidentified
MPQLKDDLSKSLVALDQSKTLIAVVELSQSSWLVGAIVPGIDRHPEKKLEPDQEALLRLLQRWRDEAVKAGRTIARIAVAFEAGRDGCWLARWLRARGIEAHVIHPTSIPVSREHRRAKTDRLDVGLLKRAFLGWLRGEPGHCGMVAIPTLEEEDAKRPNRERENLVGERTRIINRMKGTFARLGIRGFNPKLRKAPDRLATLRTPEGEPIPPNTLAELQRDMARLRFVTEQTKQIEAGRLDELQRRPGERPNAMVLQLTRARGVGIETADMLVHEVFCRDLRDQRAVARYAGLTGSPDESGSRRREKGLAKAGNPRVRRGMIQLAWRFLVHQRDSALSQWYRACVTAGKRRKTMIVALARKLLIALWRFATAGEIPQGVDLRPAMSN

SEQ ID NO: 317186 - protein, 360 aa, unidentified
MQAQRNELNFEGQNIYVGMDVHLKSWTVCIMTEKLEHKKFTQPPQANVLYNYLTRNFPGGTYHSAYESGFSGFWAHRQLEALGVKSMVTNAADVPTGQKERIQKDDTRDSRKIARSLRSGDLEAIHVPEESTLEERSLLRMRTSLVKDMTRFKQRIKSFLYFFGIPYPERFNNSGSHWSKNFLKWLKEEIQFTEESGRQTLDIMVQEVEEQRQLLLQISQQIKQLSRKEKYLSNVKLLKTVPGFGLLTAMHFLTEMETIERFENTDHFAAYVGLVPDRYHSGEVKNDGEMTFRGQAILKKCVIESAWIAARKDPALSLAYNKYVARMEPNKAVIRIARKLLNRIYFVLKNKKEYVTCVIK

SEQ ID NO: 317187 - protein, 438 aa, unidentified
MSNKVIFNLDELFISVGIDVGADFSWMSIALPNQQFVGKPYKILHNSIDSLTTAVSKIKEAEELYSLESRIFLETTGIYHYPLFCYLRDKGFNCSVINPIITKNSTNINIRKVHNDRFDSKKAALVGLKPDLKVSLMPSDLALNCRNLCREYYDLMDNRSAYVNKLQGELCMAFPQYLDIFSKVTINTSLTLLETYTSPSAFLEADRQEIIDIIRSTARFGLTYAQNKYNAIVQAATDANQFGYIINSNIKRIRLYISFIRKYDEEINRILESLHELVDANEDADFVKQIHLIETFKGAGFLSAVSIMGEIGDFSAFSKPKQLFAYFGLDPAVKQSGKFEGTKVQMSKRGSAIARLVIHTLTLQSISISRNGEAKNPVLREYYLKKCDSKPKLVAMGAVSHKVCNMIFAILRDNKPFKIIAPQEHIKQYNSAKCDIAA

SEQ ID NO: 317188 - protein, 364 aa, unidentified
MLQKAELNGNVDSENNHGGSSSIMYYIGLDVHKKTISYCVKDVSGQVHREGKIGTTRNELDCWVGTLPQPRIMAMEATIFTGWIYDYLLPHAEQVKVAHPLMLRAIAAAKKKNDRIDAGKIADCLRCDFLPECHMASTEIRDRRRTLRYRHLLVRQMVQMKNRISGLLMETGVTYNKQRLHKMGYFGELLSSNEEVHENIRPLLRLSRETIVRCQRTEYALVSSLQRDPLLAERLRRLRTVPGVGPITALTWALEVGDVSRFRSVKQAISYCGLCGEEKSSADKVLRTPISKQRNKHIQRVLVEAAKLAPRQNHELALIHEREKNKGNRNRATLAVARKMVAYLLAVDRGEREFVPAEGRGKAA

SEQ ID NO: 317189 - protein, 308 aa, unidentified
MATSSYVGIDVSKAKLDLAVLEGCEWQVDNTPDGIAQLVKEMVELQPELIVVEATGGYQRAVVDALFHAGLCVAMVNPTRVRQFARAGGLLAKTDKLDAQLLAVFGQRMQPKRYEGKSEAEKQLSALLVRRKQLEEMLKAEKNRLRTVSPSLRGSVERSIAFLKDEKKRLEEQIEQFLKEQKDWHEQTQILSSAPGVGKVTSATLLADLPELGKMDRKKIAALVGVAPMNYDSGKKRGYRKTKGGRTDVRSVLYMSTLVATRYNPVIQAQYQQLLKRGKVKKVALTACMRKFLTILNAMMRDQQPFRM

SEQ ID NO: 317190 - protein, 338 aa, unidentified
MKIVILGIDLGKNSCSVVGLDESGTVVLRRRLRRDGVITLAARLPTCQMAMEACCGAHHMGRALASLGHDVRLMSPEYVRPYVKAQKNDDRDAEAIAEAATRPTMRFVELKSEEHLDVQTLHRVRDRLVGERTSLTNQIRSLLLERGHIVAQGHAKLRHKLHELLDPSRTVLSPRMALLLEDMLARWTDLDRRIAAFDAEFTAMARSDTRARRLTGIPGIGALNATALVAAVGDAATFAKGRDLAAWLGLVPRQATTGGKPRLLGITKRGSRYLRKMLIQGARAAMPVVARQDTATGRWLRALLARAHPNVAVVALAAKMARTAWALLHHGRSYEAVR

SEQ ID NO: 317191 - protein, 342 aa, unidentified
MKITTVGIDLAKSVFQVHGVDQGGKPVVQKRLSRQQVLRYFAQLPPCLVGMEACGGAHYWARKLQAQGHTVKLMAPQFVKPYVKANKTDAADAEAICEAVTRPNMRFVSIKNAEQQSVLSLHRARQGFVRARTAQANQIRGLLAEYGIILPQGIGHVTNGLPGIVEDAQNDFPGVFRELLERLRVHLIELNRQVQELEVLIDGWHRRSEGSQKLAQIPGIGPLTASALVASIGDARNFKNGRELAAWLGLVPRQHSSGGKVLLQGISKRGDAYLRTLMIHGARSVTRVAEKKSTPTDRWTTGVLARRHKNIATVARANKNARVVWALLAHDRDYNADYKWAA

SEQ ID NO: 317192 - protein, 343 aa, unidentified
MQAVTTIGLDIAKSVFQVHGIDAEGNVLIRRQLKRRYVLAFFQKLSPCLVGIEACATSHHWSRELKALGHIVRLMPPAYVKPYVKRQKNDAADAEAICEAVTRANMRFVETKTPEQQSCLMLHRTRQLFIRQQTSVINAIRAHLAEFGIVAPVGRKGVEQLLAVVTDARDQRVPELARACVAALGAQLCRLKQQILEFDRRILTWHRSNEISQRLDAIPGIGPALATALVASVANPKAFRSGRNFSAWIGLVPRQHSSGGKHKLGSISKQGDRYLRSLFTAGALAVIRYAKLHGTKHRPWLTALLARRPTKVAAIALANKIARMAWAMMARGERYREPVALAA

SEQ ID NO: 317193 - protein, 335 aa, unidentified
MNPVRIHIGVDVGKDSLDICYPDGTKEKVRNIKSCRTKLIKKALKLGAIISFEATGPYEEPLAEECLARGVRAVRLDAWGTRKYAESQGRIEKTDAIDCEMIRDYAMSLKDDKLHFIKPRSQAHKALKRAVSTRKNLMKARAIIYNQYENLPDAEMRKCLDQTLAKLDREIARIEGECDAAIASDDRMRELASRFQTVKGVGPCLARIVLAYCPDIGEFTDGGIAKMCGDAPIDYESCTIKKKAKPKRGRTDLRKAMYMAAVSASRSNHILRPIYQRLVAKGKPRKVALTAIARRIAILLNNIAKHPDFVPAQDPKDVASAALPRRGRGRPRKTA

SEQ ID NO: 317194 - protein, 396 aa, unidentified
MAVYSKFVGMDVHKETIAVSVAEAFGGEVRYVGEFRNNPEAVTKLIRQLGKGETKLLCCYEAGPCGYVLHRQLLGMGVANLVVAPSLIPKKPGDRVKTDRRDSQTLARLLRAGELTAVWVPDETQEALRDLTRGREDLKHLERQAKQRLQAFLLRHGRIYEHEKKWSRMHFRWLEEVKFDQPVQQFVFQDYLDTVQMLSRRVEALEEQLEAAGVASGFAAVIEGLMALRGISRIAATTTMAEIGDLHRFRTAPQLMAYLGLVPSEHSSGATHSRGGITKTGNGHVRRVLVEAAWTYHHPARKTAHLQQKAKRAPERIQEIAWKAQVRLCGRYHLLESKGKLKVKVCTAIARELVGFIWAIGQAFPGPDPASPGPKTESQCIGSRTGNGGRTLGAPM

SEQ ID NO: 317195 - protein, 357 aa, unidentified
MSVYVGIDVHRKRSQVAVITEGGEVLANRNVPNGTQPVLGVIGGLPPGTPVAFEAAFGWGWLVELLEGYGFAPHLVHPLQCKAIASARLKNDKVDAAILAQLLRADLLPEAWIAPPPVRQLRALLRHRAQLVRLRTLLRNRIHAILADHGHDRPGGCWSGPGRAWLASLELPAVSRELIDDDLALIDALQVPIDRLDWEVHQQARRDPRVKVLTQLPGVGPYTALVLLAEIGEVSRFSSARKLASWAGLTPNVRGSDRVAHYGHISKQGSAWLRWILCEAAQTAKRHPDFAAGYQAIAQRRGKKIATTAVARKLLTRAYHLLADAANGGTPTSPEGRQAPGELAFLHEPAPRPRSMT

SEQ ID NO: 317196 - protein, 403 aa, unidentified
MVKYHVGVDVGKECHHVAVLDLSQGNYRRSFSFTNDHDGFSEFVSAMEKLSSEKSDFLIGVEACAYALNVSYFLLATGFSLVEVNPFRAGQFRKAQGRKAKTDKIDARAIAAFLALGDHKTLSIPDPILDNLRELTRFRVDLVNERSTMIIHLQEALSVVFPEYEKVFRTLDSAGSLALLTTYPGPEHVIAAGEEAVGKTLSLASPRRMSRGMARRIIEVAKLTVGVVQKQPALGIKISILAKRIADLQGTIRDIDRQITALYNTLPQRPCGFPVGRAPSLATIVAEIGDIRRYPTLMKFLSHLGWCPQSFQTGNYRMEHPRMSHAGNKYVRRIIWMLSIFAVQHVPRYREYFQRRVNEGKGKMHIIVAVGRKLLSAFYAMLKNGTAYDPNWEENRRLALARL

SEQ ID NO: 317197 - protein, 350 aa, unidentified
MSTSALQTAIAVVGIDIGKNSFHIVGLDSRGAIVLRQKWSRGQVGARFANMPPCLVGMEACVGAHHLSRELKALGHDARLMPAKYVRPYSKGQKNDFRDAEAIAEAVQRPTMKFVATKTADQLDLQALHRVRERLVSQRTGIINQIRAFLLERGVAVRQGLRFLRAELPGILAMSPDVLSPRMVRAIEALAEDWRRLDERVDHLSSEITALARQDAGCERLMSVPGIGPIISSAMVAAIGTGEVFAKGRDFAAWLGLVPKQISTGDRTILGKISKRGNRYLRVLFVQAAWVVLIKPQSWERHGLKRWLDAAKSRLHRNVLAIALANKLARIAWGVLAHGRTFEAHKLQVA

SEQ ID NO: 317198 - protein, 343 aa, unidentified
MQNSTVVAVDVAKSIFEVAVSERPGHVCRRDRPTRAQFLAFFLAYPGATVVMEACGSAHYWGRELQKRGHRVVLLPPHQVRPYVRGNKTDRTDAKAILEAYRNTEIRPVPVKSIAQQSLTTLHRLRSGWMAERTARLNAVRGLLREMGVFIPVGAREVVPAAWAQIEDADSEIPSVLRPVFAEACQEIRDIEARIKMVERELEALAAQLPAVAHLMTIPGIGLLIATAFVAFIGDIRRFPSGRHLASYLGLTPREFSSGLKRRLGRISKRGDGYLRTMLIHGARSVLIHARKQQPDRLRSWANALGQTHVHNKAAVAVANKLARIIWAVWTRDMPYQLMPKAA

SEQ ID NO: 317199 - protein, 309 aa, unidentified
MNTTLYAGLDIAKHNLQLHWAGRFYDLPHSPAGHRRLVQLLTRQPGAQVICEATGGYERDVVAALHQAGIPVSVLNPARVRHFARAQGQRAKTDRLDAAVLTAYGQALQPQPTPARSEVQQQLTELVRRRAQLLELLVAQRRQAEQLTLPCLRRQAQSLVRRLERDIEQIQAQLQHLRQQEASLDQRAQKLQAITGVGTITALAVLAELPELGTLNRRQAAALAGVAPHPRQSGRWQGRRTIGGGRAAVRRALYMAALVAARANRTLQAFYLRLRTAGKPAKVALTAVMRKLVILMNHVLKNPHFVLAT

SEQ ID NO: 317200 - protein, 322 aa, unidentified
MTVYLGIDIASKKFDAALLSNDSYRCKAFANSVAGFTALLKWAGVGDFLEIHACMEATGDYGTALATFLYEKKIKVSVVNPSRIKGYGMAELSRTKTDKSDSKLIARFCRATIPAQWQPVPQPVRTLQALVRRMDALKGMLRMESNRADNADASIQPSLLRITSHLKEEIEVIRQEIKKHISCNDELRRQEALISSIPGIGSVTGAVILSFMADKQFSKAKEVAAFLGLNPRHHQSGSSVRGKSRMSKTGNAYLRSTMYMPALVALKHNPDIRAFGHRLRLAGKPGMLIVGAAMRKLIHIIFGVLRSGTVYVPKITGETACQ

SEQ ID NO: 317201 - protein, 462 aa, unidentified
MSSDFATADTLVIALDIGKNVHWLGCYDGRLNVLVEPHKLRSDLDGFRQMTATVDPLLTGGRFRQAILGHEFTGVYHESWSWQIHEHYAPHLSPQAACPLVYHQLNPLLTKKRREDNSIRRRSTDRLAVWAVAACLADGLGHPAHRLTPVEAQLGQLVRTYYQLQGQQQHLARQLTSQVDRLWPGAIVDVEKFCAAHPELELPTPIVRTNALDRQRVAALLLHTPNPHDALALGADGLQALLRREVSRAGPKTVNAILNMLRQAPLPPPVIAAIYAQRLLTDFQAYVLLGARLASLVTHIETLTLDSDARFLDSVPGISPLLAARYLAAIIAVSRFPSAAHIWAFAGYDLVTDESGDTKRLGQMTKRGAPTFRDALYQIGYHTARHCPSIGRTFLDARQRGLDQTLAVIHAAHKANRLCFALLRDRRPYRPVSPEEQARFHRRWQAFHKKGRRRRRPKQIAA

SEQ ID NO: 317202 - protein, 356 aa, unidentified
MNEITTVGVDLAKEVIVVCAADAQGRTRYFKQLSFQGFAEWAVKLPRCTFGMEACSTAHHWGRFLGAHGHTPRLMAAEFVAPFRKSQGAKNDRNDAQAILVAVRQPDMRFVSIKSLDQQATLAWHRSRSGYQMERTALLNRTRGLLAEFGVWIGRSTSVLVRQLPQLREDPRLPEHFRPILTSTLEHLQRLAQSIAECDERIHSHVRHNETAKRLCELTGVGELTASAVLATLPDARDFKNGRQLAAWVGLVPRQNSSGGKQRLGVITKRGDSYLRGLLTQGARSTLQVALKREPLRRSRLELWIVALHGRVGYHKTLVAIANKHLRILWAILAHGEAYDPNAWRRHTPQRTAICT

SEQ ID NO: 317203 - protein, 385 aa, unidentified
MKPNSQMTLGESFRQCVGIDISKDKFTACLYMYDRASDVGCCTKSIDFANTKSGFNQMVKWSRKEAVKEYPLVYLMEPTGIYYERLAYHLHKIGQTLYIVLPNKARTFCEAEGIKTKTDAVDARCLALMGCTSRKLRPWSPPKAIYSELRQLTRFHADLCKVRTSVTNRQEALLHMEDAAKGVLKGCEKLIAEIDKLLEKNEKDINDKLAQDKELKAKIERITTVKCIRIATVTCVVAETQGFHLINNRKQLTSFAGLDVVAKQSGKEDPKHVISKKGNAHIRAALYMPALSATFHNRQMKAVYGRICQKHPNEKKIAVIAVMRRMLLLIYTLWKNGEVYDEERDTTHTLRKKDFLAEYTKEDCMGTIQEPVDWNTVDENGEPPF

SEQ ID NO: 317204 - protein, 348 aa, unidentified
MVAEMVDHVVGVDTHRDEHVLAVVAAGAGALVARRRVAADGRGYRQALRFAEQYAAGSRLWAIEGSGHYGAGLARYLGERGERVLEVGRSPRGERRLRGKDDELDALGAARAALASEALAVPRSGERREALRLLLVARGSAVDVRREALVQLRSVIVTAPDRLRQQLRGLPLGKLLERCSRLRRSSSTSADELATRLVLRSLARRVEAATVEAGELEREILTHVRALAPRLLDEPGVGPIVAAQLLVAWSHRGRLRSESAFARLAGVAPIPASSGQTTRQRLSRGGDRQLNRALHTVVLHRRQHDPATQAYIARRIAEGKTRRDATRLLKRYLARHLFRLLQQEPLMA

SEQ ID NO: 317205 - protein, 361 aa, unidentified
MAKVRSWAGLDVHARSVVAVTLDAESGELRSARLSGETTKVAEFLGRLPGPTRVAYEAGPTGYGLARALQAAGIECMVAAPGKIERPAQDKLKTDQRDAERVLRLLMIDALYPVRVPTVEEEALRDLVRAREDVRGDLMRARQRLSKLLLRHDILYEDSASTWTQRHRSWLRAQQLGGGAQATLLDYLGAIDTLELRRTSLEKTISELVVASPFAQTVARLRCLRGIDTLSAVGLCAEIGDFIRFDRAGKLMSYVGLVPSENSTGESRRQGSITKTGSGHARRLLVEAAWHYRKTPSRGITLQRRQDGQPANIIAISWQAQQRLHRVWHRLAEQRGKRRTIVAVAVARELAGFCWALARAD

SEQ ID NO: 317206 - protein, 365 aa, unidentified
MPVTTKFIDFSGQSFHVGIDVHKKSWSVTVRALNFELSHFSQAPDAMQLAHYLHQHYPGGRFFSAYEAGFCGTSHHQDLCRAGIENIIIHPADLPESDKEKKNKTDLHDSRAIAKYLESGVLTGIYVMPVDQQEQRSLYRCRQATVRNVTRCTNRLRSLLDYYGVKLPDNLRDKAYISKYFLDWLAKLQFSTDQGTDTLHHYLEDLQYHRKQLLLVTRKLKKEFAEHYQQSYSCLLTVPGIGPVTAIGLLAETGDLSRFKNPDEFCSYLGLIPSEQSSGERVYSSHIQPRCNTHLRPLLIEAAWTAIRRCPVFLAYYRKHAGKNNKKAIVKVARKLALTAKAVALKKEVYQADYYSYQMSATTEG

SEQ ID NO: 317207 - protein, 373 aa, unidentified
MPKYSTAFGMDVHLRSTTVCALDADTGEAVTRRFPGNPWGEIAGWMDGFPGPSLAAYESGYLGFAPQRELAGLGVECAVAAVSKIPRSAADSASKNDRNDAARMAKAILAHDISPVWVPSPEVEGIRDLAGAYDGATARLATAKQRLLAFLAKRGFVYGGTTPAGNPRKYWTYDFLRWLDKVRPEDDGGVRTLAALRNEVEAAAEARADLLSEYRAAVDASPIAAEVAALQSIKGCAFALAAAFSAEVGDFTRFRSGRQVTAYFGLAPSQRSSGDSVRLGGISGAGNALVRKLAVEGSWCYAAARHQPKLMPRDTGVPLEIRMHGRKGSERLLRRREEMLARGMPAAKANAATAAELVRWLWALGMMCREGAE

SEQ ID NO: 317208 - protein, 338 aa, unidentified
MQWTVAVGVDTHKDTHVAVALDALGVELGSREIAATAAGYRSLLCWAQELGMPAFAVEGTGSYGAGLVRFLERAGVSVFECERPRRQERRRGKSDLIDAALAARRLLSGERLSLPRGGGRREDLRLLLLERRGAMQARNAGLNQLSALLVTAPDHVRARLGALSGERLAHAAARLRPSSEVMNGVLRRLGRRVERLSREVADAERALAALVAEVAPALLEEGGVGPVCGAQLLVSSGDPSRMRSEASFAALAGTSPVDASSGKQRRHRLNRGGDRQLNWALHVVALQRIRHHAETGAYYQRLLAAGKTTREARRCIKRALARHFYRRLRELPTLPLTT

SEQ ID NO: 317209 - protein, 341 aa, unidentified
MKNLFIGIDFSKEKVDVAVIFAEGLVETSVRVFNEFKNSVSGYKQLVKWVEKNANGIDSSLWLFCGENTGDYSKPLCNHLYGRGFDMWLENSKCIKDASGIRRLKSDRADAAMIAEYAMRNHDKAIIYEPLSESLTQLREYYLYRQMVIRHRCSFEVRRGEKRLMMEKSAAKTVIAQSGKHIVSELNKEIAKIDRKIASLIESSDELSEVYRIVTSVPGIGTQNAVCLMVYTDNFRKFNYDARSIACYYGIAPFGQDSGTSVHVDPHVHYMANRHIKAMLTQAALAAVRFNPIIAQYYQRLIGRGKKMPVAMNNVKNKLLHIVTSMVKNKQVYKPEYRLSA

SEQ ID NO: 317210 - protein, 331 aa, unidentified
MERATTIGLDLAKSVFQVHGIDAAGGIVLRRKLRRPELLEFFAALPPALVGIEACGGAYYWARELTRLGHTVRLMPPAYVKPYVKRGKTDAADAEAICEAVTRPTMRFVPAKTEAQQASLVELKVRDMLVRQRTQTINALRSHLAEYGIVAAQGRKLSELIAVVRDDDDTRLPVLAREALDELVGQLEALEQRIARLDGRMVRHAREDETARRLTSIPGIGAIGATALAALVCHPHGFASARHFAASLGLTPKPHSSGDKERLGRISKQGNPMMRRLLVRAQGSAVRRSFCSSSAGYRGVKRQASGRPLANFSPMGQVALSEYVSGWCPYP

SEQ ID NO: 317211 - protein, 341 aa, unidentified
MEYCGIDLHAEYSQICVLDEDGEVMETSRVRTSRKALERFFRREPMRVVLEAGGSSPWVSRLLESVGHEVVVCSPRRVRLIAESKLKNDRVDAEVLARLVRLDPEFLKPIQHRSEEAQLLRGNLKVRSAMVEARTKWINTVRGLLRSFGYKVSGKAPKTFVDRVDKLDLPSELRTVIEPLLEQLDLLSGEITRRNEHLEEMVKELPEVEHLRQIPGVGPVVATYFVLTIDDPNRFKQSRDVASFFGLRPSMRESASVSHFGRITKEGDPEMRRLLVQAAHACLLTKADSELKTWALALAERKGKGKAVVALARKLAVLMHHLWVTGEVYQALPNKEANQAA

SEQ ID NO: 317212 - protein, 360 aa, unidentified
MKQITGGESRREAVRVGVDLAKRVIQVHAVDALGRVLTSRTLGRDRFIEWCTRLPAGCIVAMEASSSAHHWARKLAAIGLDARIISAQLVEPYRLEGASGKNDANDAAAICEAASRPSMRFIPVKSIEQQSMLCVHRLREGLKQDRTACINRIRGLLAEFGLVFAQGPRELQLILSDVLEDAGNELGTLARLTLQRAQAQWRELDEHLAWCDERINAHGRDNVEVKQAATLIGIGPVTASAAVATVGDFKQFKNGAQFGAWIGLTPRQRSSGGKSNLGSITKRGDTYLRTLLIQGAKSAVMTAHRRHDKISSWALALRERSGWQKAVVALANKNARILCAVMTRGDVFDPNHLSVKPTGG

SEQ ID NO: 317213 - protein, 356 aa, unidentified
MKYYTSTTEFNCGIDLHARQMYVCVMDRQGKKLAHTNVKDNDWEFFLKLIAPYKHDLTVCSECMFGWYWLADACHEAGLTFVLAHALYLRAIHGGKNKNDRIDSEKLTHLLRCNLIPPGYVYPAQKRPMRALLRQRVYYVWRRTEILNRIQSHQLAYNRRPLKCTTRHNRDPWEQKILATESHPLRQLALQNDMAMVRHYDAQIWALETKLVNLAKEHSARDFTLLLSVPGIGENLGLTILHEIGDIDRFPTVKDFLSYCRLVKGTVASAGKIKGLRGAKLGNPYLRWAFGEAAVIAKRDHAIIGPLSQSLEARMGGNKFKANTVVAIKLARAVYFMLKNKTVFDPDRLVAVLSKN

SEQ ID NO: 317214 - protein, 333 aa, unidentified
MNKKWFIGIDVSKKTLDASIFVAGEEINRFPHIQVRNEKQGFRELLRWAKDQGLDTKDTLFGLEFTGYYSDALEQFLTGKELDYTMLPTTVVKHYQRGTRDKNDRTDSAKIADYLFRFNGTECIKLRVLPSKALQELKALKSERKFYVEQRVACENRQKVAKSEQERKHLQKAIDLFKEQEELIERQMADVVTSDEEIYLTYTRLLTIPGIGFVNAINTIANTQNFTAFETARQYAKYVGVVPSEHSSGTSVRWRGRPSPHADLQAKADLSMAALRAVETDFEMSQYYERKLGNRKDDKDVQRKALNAVKFKLIRQMFAVAKQHKDFVKMQQM

SEQ ID NO: 317215 - protein, 366 aa, unidentified
MKKISTVQVFGNEILKEQKLTIGLDLGDRWSFYCVLDEAGKILLEQKVATTPEAMKQTFGKIPRSLIAMETGTHSPWVSRLLTELGHQVIVAHAQKVELITKSNRKDDRHDARTLARLARIDPELLGPVRHRSAKAQIHLTVIRARAELVSARTALVNAARGLVKSYGQRLPKRGTYQVSRELATGLSAELRDVLGPLLKEVESLNERIQEYDERMEKIAKEEYPEVSLLKQVKGVGTQISLTYVLTIEDPYRFPKSRAVGCFLGLRPGRRNSGESEPQKGISKEGDRYLRTMMVQGAHYILGPFGEDSDLRRWGLKLAERGGKNAKKRAVVAVARKLAVLLHRLWVSGEVYEPLRNSQKAMRAVA

SEQ ID NO: 317216 - protein, 334 aa, unidentified
MNNVTTVGIDLAKNVFAVHGVDALGRVVLRRTVRREKLLELIAQLPSCLIGMEACSGAHEWARQFAKLGHTVRLMAPKFVVAYRQSGKNDDNDAAAICEAVARPNMRFVPLKTLEQQAVLAQHRIRQGFIEERTACLNRIRGVLAEFGQVLPQRSSELRRGLAGCLEQLPTRVAAALSDLLAHVRSLDERIGAYDRELKQHAHSEPNARRIQQLAGIGPITASAVVASVGDAQEFRNGRQFAAWLGLTPRQYSSGGKTRLGHITRRGDAYLRTLLIMGARAVLQSATQHTDRLARWALALKARRGYHRTCVAIAAKNARILWVLLARGERLRMT

SEQ ID NO: 317217 - protein, 347 aa, unidentified
MRFYTQQHAYYCGIDLHARSMYLCVLDQTGTVVLHRNIAAEPGELIAALAPFRPDLVVAAECTFTWYWLADLCADENLPFILGHALYMKAIHGAKAKNDRIDAHKIAALVRGGNFPLAHVYPKARRATRDLLRRRLRLVRRRSELNVHIQNTTSQYNLPALQKRLAYRCNRDGVAERFLDPSARKSVELDLALMDVYDGMLLDVERHILHAAKEHDGDTLYRLQSVPGIGKILALTIHYEVGDIARFPTVQDFASYARLVKPSKESAGRVHGHGGQKIGNAHLKWSFSEAAVLFLRDNPIGQKLLARYERRHGKPKALSILAHRLGRAVYYILKRKTVFDMQKFIAS

SEQ ID NO: 317218 - protein, 355 aa, unidentified
MEHFIGWDAHKQYSVFVAIDEKGQFSPTWRTSHEGGEVERCLEALPAGSRIAIEATGTCYWLIEEMRARGHQPVLAHPLESKKRMGQTKKTDRLDARGLAMLLRNGTLPEVWIPPAEIRDQREPMRLRMALTRKRTQLKNRIHGVLSRFNVQIPVSDLFGKKGREQLEPELNRLPEHTRASVKQALRVLDFLELEIGEAEKRIAGMLEGDEAVRLLDSLPCVGPILSAVMALEIGRIERFQTAEQLASYAGLVPSVHSSGGHTRIGRVGHNVNRTLKWAFVEAANLIAMQRRKHPDSHAVRLYQRVRDRKNHQKATVAVARHLAEAAFVVLRKKQIYRSPADRRSSKRSASLTHE

SEQ ID NO: 317219 - protein, 390 aa, unidentified
MIYVGIDVAKDKHDCCILGSDGKILFSPFTFQNTLQGFDELYEKIWPLTSDLTEIKVGLEATGHYHINLLRSLLDNGLPSFVINPLHTNLYRKAQSLRKTKTDKVDAASIAMMLLTDRTLQPYSDTSYHNEELKSLTRYRFDKVQERARLKTSVVRLVGILFPELEKLVPSLHMASVYALLSEFPGASFVASAHLTRLKHLLYDASKGRYGRDMAVSIRDAASSSIGSILPAKSLELKHTLHLIDVLTEEIDEIEVAISSIMDTINSPITTIPGIKNRMGAMILAEIGDFSRFDNPDQILAYAGLSPSTYQSGQLTSSYARMEKRGSRYLRYALFNATQYVCMWDPVFKAYLSKKRAEGKHYYVAISHACKKLVRVIYRMQLTGEPYRTA

SEQ ID NO: 317220 - protein, 400 aa, unidentified
MISVGVDVSKNKSTICILKPYGEIVSSPFEIQHTEKELIDVSNMLLRFDEEVRIVMESTGNYHYPILTFFLKKGLFVSVINSLAMHKYAMCSLRAAKTDKIDSIKIANYGIDNWYHLKKYELQDNEYHQLQLLGRQYAHYIEMRVKEYLYFYSILDQTLPGIKKVIKSQNNDNFERDKLLDFAEKYIHFDNISKMSETDFIEDYLIWNKENGYQPSKTKALEIYNCAKNSIPTLDFQNPITSIMILESVRVIKKINKTLNIILTQMNEYAKSTTEYSVVRNMGGVGNKLAVRLIAEIGDVRRFHSSKALIAYAGIDSPPYQSGQYLGLNRRISKRGSALLRNVGYQVMQSLKTHKPSDDAVYLYILKKEQEGKPKKVAKIAGLNKFLRIYYARVMEIYKS

SEQ ID NO: 317221 - protein, 400 aa, unidentified
MLSIGIDVSKGKSTVCGMKPGGEIVYTPFEIQHTREGMSELVSLLHNSGEEVRVVLESTGSYHCPVVAALLENGIFVSVVNSLRMKRFCSQSIRKVKTDRIDAMQIALYGLAYWQELQPAKLPEDTYRELQLLARQYYQMTSLLIKAKVDFNAICDQVLPGMQELMNDHAGRHKLSDFVLRYRHTTHILEMGETRFRKDYCKWAEKKGYRNCERMAALIFATAQNGIPVLPNAPSTQIVITEAIRVLHTVEASRDAILTQMQALAKTLPEYSLVREMPCIGDTLAPRLIAEIGDVRRFHSKRALIAYAGIDAPPYQSGKFCANNRHISKRGNRYLRKTGYEVMQSYVMHKPANDPIFTFIEKKRSEGKCGKLAMVAGLNKFLRVYYGKVTELYRSLPAIE

SEQ ID NO: 317222 - protein, 482 aa, unidentified
MKKRNIFQNRSQQLLRLFEKAGNRLKMMCVPIDYAKKDHLVMFCNGYGDIVRKPFSVKNTLEGVKYLIDQVMRSCRQRHIKKEYVFFGGEDVNSYAENFANAIRAKGFLVANVNAHDAKKQRETLQASTDRIDLMGIATMLLNLRAKCSPAQDGIYRNLRTLVRHRKKLVGVKTEVKNRVHTLVDRLFPGFLNEKNTGINPFSKSSLVLMEDRFSAQQIRRRQVTTLIKILKRCATPDAQSVAAKLHSYAAQVITTPNEYAATLQLSLQHHIKHFRCLQENIDQLLSEIALVLAQTQAAYLTSIKGVGIVLAAGVSSEIGNPFEQKPLNNLTSYCGIIPRVKQSGGIEGHTHTGRVSKRSNHLLKDYVVQSAFHIGIRGPQPLLQDYKRREAAGQHADFGIGRRFLRMAMCLMRSSQVYLPPKLRSPKTQMQERAGYYLTTWPLLRDKWKKAHAHQVAFAKDQPLGQWRQMVQELYDIKLKL

SEQ ID NO: 317223 - protein, 344 aa, unidentified
MQKQSYVGLDVSLAETSICVIDETGARLFEGKVVTDSAAIAAAVRRHVVGQVVRVGLETGTTAGWLWRELIALGLPAVCLDTRHAHRALSLRVQKTDKNDARGLAELVRLGWYREAKVRSVDAQFVRSLLMARRQLLAIKRNLANQLRNVLKTFGLTRTSTAGRGWLAKVRAIVAETAWVAPVVEPMLKICAELDVQLAALNKQLLILAREDPDVRRMMTVPGIGALTGLAYKAAIDDPSRFTSSSSAGPYLGLVPKVHQSGETEWTGRISKTGDELARTYLYEAAGVLLFKVSRWSALRAWGIRLVQRIGLKRAKVAVARKLAVLLHALWTDGTEFEWRVAQA

SEQ ID NO: 317224 - protein, 329 aa, unidentified
MSDNKSLELRVSVDVGYRRHSVAIGLGSGEVLEEFEIAHRPEGFEQFFSRIEKHQKVRACEVAVAMEGYNGCARPLDTMVRRRGYRLYNINNLKLARFKEIFPGAAKSDRIDARKGLELFQLSDHLPLAKEVLQEVKGTPEENEILKRLTRRRRRLVDERIRVISNLQTDLQAVCPGLLEMTKNAGNQWFLNFLVSAETLPQLARLRPATLLKIPAVGRKYASLIEDWQKRAHFSEEVKWVSEMIQEDARRCLELDEKIKVLKAKIKEVANDSKIAKILLSIPGFGTICTAELAGEIGTIERFSKEGSLALYIGMSTLDNSSGKYQAGC

SEQ ID NO: 317225 - protein, 337 aa, unidentified
MIKENYIYVGIDLHKETHTAVMIDCYNQKLGEITFPNRPADFPKLVAKVKKCNTDGKTIVFGLENAYDYGRALAVWLIDKGYLVKDVNTAISHRQAKHRGAMYRKSDSDDAEAIALATLNMLDKLPDAYPNDAYWSLGQLVHRRDNIMKQRTRLVNQLHEQLCIAYPSYKQFFNDISRPTALYFWEHYPSRKYLKGKSVEDLRAELVPVSHNKCSTRTCEKILDAIAGDKVKNNAYQDARDMVTLSIVSDLQHYDKQLAEVDKMLEQMYKMLGCTLTTIPGVNVITAVKILAEIGDIKRFSNANKLAQFAGIAPLHLSSSGKGKDLATKQGNRCDIL

SEQ ID NO: 317226 - protein, 408 aa, unidentified
MNTLYVGIDVSSKSNVVYLMLPNGDKHSNFSVANSHEGSTQLVKRILSALTSHSLDTVLIGLEATSVYGDNLVYFLREDATLAPFNRKIHVLNPKQVKKFHDAYNDLPKNDYVDSFVIADCLRFGRINKEVYMGDYRYKALQNLTRARFFAVQNLVKEKQRFMNVLFKKYSTMTQEKVFSDTFSTTALAVYDEFESAEALANMDLHELTDFIIEKGKNRFPDPDAVAKAIQKAARSSYRLPKTVNDSVNQVLSISITSMKALESQIKEFDKAIKAQMELLPNVLISIPGIGPVYSAGIMAEIGDINRFNSQAALAKYAGLAWKQHQSGGFESEVTRLIPSGNRFLKYYLCEAAFSLVRCDKEYSDFYHLKYKEVNRYQHKRALALTARKFVRLVFRLLKDNRLYTSAE

SEQ ID NO: 317227 - protein, 335 aa, unidentified
MRFYTRQHLHYCGVDLHARTMYVCVLDQEGNVLVSKDIASAPEPFLELIAPYREDLAVAAECMFTWYWLADLCAREGLAFVLGHALYMRAIHGGKAKNDRIDAHKIAALPQAMRATRDLMRRRNYLMRQRAELLAHITNTNHQYNLPALGVRPARPAERSGLAEHFAEVPVRKSVEVDLSLVEHYDRQLLPLERYLESNAQAQDPVALAIVRSVHGMGKVLGLSILYEIHDIGRFSRVQQFLSYCRLVKPTKESGGKILGHSGKKIGNAHLKWAFSEAAVCFLRTNKPAQALRARLMAKHGKGKSLAIIAAKLARAVYFMLRRSEAFDAERFFAH

SEQ ID NO: 317228 - protein, 458 aa, unidentified
MTTFLYCRRRVKPNAGTTMKEINIMNTTPPYDLVIGLDRSDKKADLCLIDLRTGQRRATILDTAPEALWEWLLELRQQYPQARVGLCLEQPAVHLIPFLETYAWITLHPINPITLQKYREAFVTSRAKDDTKDADFLADLLLHHHAQLPVWAPEDSATRAVQQLGFHRRAVVDERTGLTNRLQALLKSYFPQALLLCGEDLWRPLATALLLKWPSLQAVQKAKSATFKQFYYLHGSRSAKLLEQRLTLVGKAVPVTDEPAVIESFVLRVQLICRQLQLVQRSVQEFDHRLAAAYTAHPDRMIFASLPGAGAVLGTRLLATMGSQRERFADAAAQLQRYTGIAPVTKKSGGSCYIHRRYRCPKFHRQSFHEYAKESILWSRWAAAYYLQQRTKGCPHHTAVRALAFKWQRIIWRCWQDHKPYDEQIYEAALRKHGSPLVQLFNRVDLGKSPWKNPAKIN

SEQ ID NO: 317229 - protein, 334 aa, unidentified
MNYTHVVGIDVSKAKLDYAVHEGKQLILQHESTNDLNGIKTFIKLLKKQPGFTMEQTLFCMEHTGIYNEFLLQYLQTLNANVCMESSLQIKLSLGLQRGKNDRLDAARIAQYAYKNQEDLRLWKPKRQVVNQLRHFTTLRHQLLQVKKQLTVALKEQIRFNKRIAKQLTDTCKRTLAALNKDLEKVEQQIDEVIASDDELKRLFGIITSVQGIGKVTAAEIIITTNEFKNIDDPSKFACYSGVAPFEHTSGSSIRGKTRVSHKANKYMKTLLHMAAMVAIVFNDDLKAYYQRKVLENKNKMSIINAVRNKLIWRIFACVKQNRAYQNKYLTTFV

SEQ ID NO: 317230 - protein, 410 aa, unidentified
MRYHIGVDGGDQEHAVWVEDEQGQRVSAGNKVPHSAAGFSDWGQELNAWRAQGITLWAAIERPEGRVVDFLLDHGVRVYPVNPKALDRARDRFRQSGAKDDLFDARVLAGFLRTDHGHLTALEPSTEAAQELKLLTEDCHRQLREQTRLLNQLTATLKEYYPRALEVAELTTALLREFLQAYPTPESLTALTERQWQRWARAHRLSAARTTELWTALKQPQLPVPAHVVRAKSRLMQALVAELAVVVQMVARYRQAVEDFFAGMPAATWARTLPVGEHGITVPTLWARLGDAPSRWDSAEHLQAQAGMVPITVRSGKQLVVLFRFACDKQLRYTVDQLAWLSLSGSDWARAYYDQQRARGHRHRRALRALGAKWLKIIFVMWRRQIPYDEEHHLATMARQALRRPERKIA

SEQ ID NO: 317231 - protein, 408 aa, unidentified
MNAVGIDVSKGKSMVAALRPMGEVALLPQEFLHTEVGLEQMAYAIIALGEDTRVIMEATGRYHEPVAAALHEYGIYVCVLNPLFIKQSGGGSIRKVKTDKADAMKIAKYGLDNWVDLREYTPMDTVRQQLKLCSRQYNLYMKTVVSLQNNLISLTDKTFPGVNELFSSPERADGHQKWVDFVMTFYHCDCICRVSENAFAERYQKWCKRKGYHFSAEKAQDVYLGSCGHFTTLPKNDNTKLLITTAAQQLLAGKMTLAALRTEMTRLAKQLPEYDIVRAMYGVGETTAVQLMAEIGDVRRFPRRSSIVGFAGVDPAVDQSGKHSAKSVPTTKRGSPHLRKTLYQIVCTYLKKSPVDEPVYQFLDKKRSEGKPYFVYMTAAQNKFLRIYYARVKECLEDFDAQQNSAQS

SEQ ID NO: 317232 - protein, 354 aa, unidentified
MIIIGCDYHPGFQEIAFVDTETGDCGEQQLKHCEGAQEFYRALVAQGKKVRVGMEASGHARWFERLLAELNIELWRGDAAVIRAKRGRKKKTDREDARHILNLLLTGDFPKIWVPSWENRDLRQLLWHRHRMVQARTRVMNQLQAVALNEGLRCKKKLWRTHGREQLEAFRLAPWASRRRKDLLEILDRLNPTIAELTQAIEPEAEKCPQALCLRTHPGVGALTALALVLIIGEAERFQCGKQVGGYLGLVPLEDSSGEKRRLGHITKQGNSLLRFLLVEAAQVSSGTIPEWHSKYIHLTMRRGRKIAKVAMARKLAMRLFWMMRKGWNYQQVIKFGSHVEQPGNRHGVQSNTE

SEQ ID NO: 317233 - protein, 406 aa, unidentified
MAVMIGIDPHKGSHTAVAVTATEEPLGKVRVRACPAQAEQLVAWAAAWPERTWAVEGAPGLGRLLAQQLVAAGERVLDVQPKLAARVRLLQTENTGKSDPNDALSVAVAALRSKGQRPVLADDHATVLKVWAKRHRDLSRAHNQVACRLHAVLCDLVPGGVADEITAGHAAKILGQITPADPAAEARKELAAELLADIRHLDAQRREVKKKLAAAVKASGTSVTEIFGAGPVIAATVIGDVVTVARFPSRDHFAAYNGTAPVEVSSGNKKIYRLSLRGNRRLNHAIHMAAITQIRHKHSDGRAYYDRKIAEGKTHKEALRCLKRRISDALYARLRADARNAAAACVKDPGGQPGNHSVSRAAGSHPAHRLFGQATPGPQTSLRPAAALTPAMPPSGPPANKTRRPT

SEQ ID NO: 317234 - protein, 320 aa, unidentified
MTILDSQVVVGVDVAKDAIVVYRCDEESTLVVANERSALKKWLKLLPDNCALALEATNTYHLDTTEMAHEMGHDVYVIDGSRLNKYRDGIGVRAKTDALDAVLLARYLGKESDKLRVWSPPPKAYTQLKSLLRRRAELVRHRVAIKQSWRDEPLLEEALGEYLRCVEQIEKGIQKALKDIVSKAGMDAQVKRCQAVEGIGVLTATAAVTAFMRGEFSDSDGFIAFLGMDPRVRQSGKKDQKRYLSKRGDSEFRRLFHNSAMAASRSPAWRPFYQRYLDRGLKGTQALVILARKLARVVFALMKNQSEYQPNSMFGGSPQT

SEQ ID NO: 317235 - protein, 368 aa, unidentified
MSFVLRKGAVTAMSIVAHAHPFVVGVDTHARNHVYAILAATTGALLESRAFPTNAAGINRAINWVARRTGADADTLWVIEGAATYGAILAGTVASHGYPVAEAPRMDAKKRRGVGKTDALDAHQIAAATLPLPVHKLRRPRLNDGIRQAVRILTTARGAMSADRTRSVNALNALVRSNNLGVDARKSLTASQTSDISRWRPREEELSLSVARNEAIRLARHILELDEQLKSNEKQLDELVRVSEAAPLLEEKGFRAISAAKCLTAWSHEGRVRNEAAFASLAGVNPIPASSGNKVRHRLNRGGDRALNSALHMVAVTRMTHDAETRQYVEKRRAEGRTDKEIRRCIKRYVARRIYRTLTASSEPMKTA

SEQ ID NO: 317236 - protein, 418 aa, unidentified
MIDQDQAPATPATTPAATPAPTAGIDWASSDHAVAIVDPHGVQQDRFTIPHTAPGLRQLVARLHRAGVDEVAIERPDGPVVDALLEADLGVVVIAPNQVKNLRSRYGSAGNKDDGFDAYVLADTLRTDRGRLRPLTRDSDATITLRMTVRARQDLVAARVAMANQLRAHLQTTLPGVIGLFRDIDSAITLRFLNRFPSQDKADWLSPTRLGNWLRSIGYNHLANLDRLWDHLNQAPRGTTGAQAAARAEITLALVAALTGLRVQIKALEKQIADQLAAHPDAAIFTSLPKSGTVRAARLLAEIGDARGRFPTPESLACLAGAAPSTRQSGKVKVVTFRWAVDKQLRGAVVDFAGDSHHVNPWAADLYQRARARGHDHPHAVRILARAWLHIIWRCWQDNQPYDPARHRALQRLQHQAA

SEQ ID NO: 317237 - protein, 349 aa, unidentified
MRYYQPPAGTRFYAGIDLHARSLFLCILDRDGQERLARNLPAAPAPFLKAVQPFRDGLVVGCECMHCWYWLADTCRDANIAFALGHAWGMRAVHGSKTKCDRHDAEAIARLLKGGNFPLAYAYPKERRGLRDLLRARLRLVRQRAELYGHVHTARRQANLPPVSSAVKYKSQRAALTADIADPFVRRRVEADLALLEPLDTTIRRLEAEIEEAAREHFPTELAVLQSTPGVGPVLSLTILLEIDTLDRFDTRQQFCSYARLCGAVQESAGQRVGVGNRKAGNAWLKWAFSEAAVLSAQKDERIGRYLEKLASRRGKPRAYAALAHKLGRAFYHMLHTKEVFDINRFLRH

SEQ ID NO: 317238 - protein, 342 aa, unidentified
MQDINRVAIDLAKNVFQVCALNSHNKVVFNKKLSRNKFTEFMTQLPASTVYTEACYSSHYWGRTLKEMGHSPFLIPAQHVTPFVRGNKNDNNDALAIAEAANRPGIRFVPIKTVQQQEIMAMHRLRTRMVKSRTQVSNQARGLLSDFGIIFPKGHKAFIDAMAALQDNEQLSLSFRQLMLDMSTEFYEITERINKIENLLKAYIQQTEHCTIVSSVPGIGIINASAIVASIDKGQAFNNPREFAVWLGLTPRQFASGEKSRNGGITKRGDRYLRTQLIHAARAAKKWSRKRNDQLSLWIKQLEARVGVHKATVAIAHKLARIIWVLLQKQQTFVQQYPQDMK

SEQ ID NO: 317239 - protein, 418 aa, unidentified
MSDSKFLYVGIDVSKASNQVYAMDSDEKKFLSFSSPNNSEGASAIEQRLFEVLVKFSFTDVVIILESTGMYSYHIAVFLAASELLAKFNVLVFNINPKTSCNYRKTFCDLDKTDPKDSFLLADMARSGKYKQFTPVRGSQKLALQRLTRHRKHVSELIGREKCYVLNNIFLKFSAFDSKIDGKSVFSDTFSASATEILSQFKTPEEIENSSIEDLVAILAKASKNRFENTVEVANLLKKCARLSYRLDKAAYDPINIAIASSLCLIRTFEKQLESIDKEILNLIKGLQTNEYASLISIPGIGPVFAAGILSEIGSIKQFANDSALAKYAGITWRTKQSGKFAADETPMTKTGNNYLRYYLLEATSMAILHNPEYRAYYLKKREEVTTHQHTRAVALTSRKLIRLIYGLVSKDQLFASI

SEQ ID NO: 317240 - protein, 414 aa, unidentified
MDILYARCAGLDIHRDTIVACVRLAEAGGVVRFVETFATTTAELERLSEWLTGHGVTAVAMEATGVYWKPVWAVLAGDFELVLANAHPVKAVPGRKTDVNDATWLADLLAHGLIRPSFVPTMPEQALRDLTRARKQLTREKARHVQRIDKTLQAATIKLGSVLSNIMGQSGRVLLEALAAGESDPERLAGLVRTKIRASHAQVVEAVRGRLAAHQRLLLRLYLAQVDALAAAIATIDRELGERLEPVQETVQRLTTMPGLSPLSATVVISEIGLDMSRFPSAAHLISWAGLCPKNDESAGKRRSTRLRPGAPWLKALLVQSAWCAVRTRATYLHALFQRLKARRGPRKAIEAAIEAVAAAMLTAISHRLKRGAEYYDLGPDHFQRTERSRLAAHLTRKLTELGFDVTLAQRVTA

SEQ ID NO: 317241 - protein, 345 aa, unidentified
MQAVTIGIDLAKHVFQVHGVSAGDKVVFSKPLRRAQMLPFFARLKPCLIGMEACASAHYWARELKKIGHEVRLMPAKDVKAYVKRNKNDAIDAAACCEAVRRPVVRTVPVKTPEQQARLMQHRVRDLLIRQRTQAINALRSHLAELGIVAAQGYDGLKTLVSIVADESDARLPEDGRASLSALVNQIAACQAEISAIEKRLLAQHRKNEDSKRLETIPGIGIIGASAIVATVPDASVFKTGRDFAAWIGIVSREDSTGGKQRLGPISKQGNRYLRRILILGALSVVKRARCCPENYPWLTKLLARKPAKVAAVALANKMARIAWAVLTKKDTYHVPQITAALIPA

SEQ ID NO: 317242 - protein, 369 aa, unidentified
MEEYNAFIGLDVHKDSISVAIADAGRDGELRMYGTIVNSPDAVSRLMRKLVQRHGKIEVTYEAGPCGYGIYRQLTEMGICCRIVAPSHTPKRPGERVKNDTRDALMLARLLRAGELTYVWVPDATHEAMRDLVRARQVASQDVRAARALIRMFLLKHGLHCKSKAWCLRYRKWLTSLKFDHAAQKFALQSYINRLEQAEARKAEIEDQMADLIPGWALAPVVHALQVFKGIGMVIATTLAAEIGDFSRFASPRKLMAYLGLVPSEYSSGSKQRPGGITKAGNKIARVMLVEAAWAYKWPPKVGVDLMLKRQDYSQELKDIGWKAQVRLNKRFRRLESRGKRSTVAAAAVARELVGFIWATAISAMPKTA

SEQ ID NO: 317243 - protein, 372 aa, unidentified
MAQPTPLFVGLDVHKDSIAVAHAQGLCTDPPVFVGAIGPRQADLDKLVRRLQCKTPDLVFAYEAGPCGYGLHRYLTGQGFACHVVAPSLIPRKPGDKVKTDRRDAVELARLLRNGDLTSVHVPTIDDEAIRDLCRARDAARLTLKNAKFRLKAFLLRLGRHDEGRADWNAAHQRYLAKVVCPTATQQIVFQESVRAVEEQVDRLQRLEAELLERAPAWRLYPVVQALQALRGVQFLVAITVVAELGDLTRFDSPRQLAAFVGLVPSEDSSGPRRRLGAITKTGNGRARRALVEGAWAYRHPAKVSEHIQRRIDTLPKPLQDLGWKAQVRLCKRFRRLIARGRHPNVAVTAIARELIAFMWAIAQEVPITTSS

SEQ ID NO: 317244 - protein, 391 aa, unidentified
MYLVGIDISKFKHDCFIMTETGEVINNSFSFDNNDSGFTLLLNTLKSLDQSQKIKIGLEATGHYGNNLKLFLTENNYSFMELNPYLVKKFSQALTLRRTKTDKLDAMTIASVLVSPNLTYEPYQISSYHISSLKSLTRYREAFIKERSLHLVQLTNIMDQIFPEFKPFFNGKFGTTAIFILKKYKTPERISKLTDEDILKIKTVSRKISAAKLVKLRELAKNTVGHSSISNQILLKSILNLYTNVDDEVTEIEKQIDSIMSEYKNHIVSIPGISKYSAAQIIGEVGDFKRFSSASKLLAFAGMEPSTIQSGTMDFKGKMVKHGSGHLRYVLMNIAMTIIIHNPTFYSYYSKKHHQEGKNHRVALSHVVRKLVRIIYHLEVTNQDFNSNLLK

SEQ ID NO: 317245 - protein, 378 aa, unidentified
MMKNTRYVGLDVHGETIAAAVGEGHGKARSLGQFPNRPEAVRRFIEQLGGPEGLKICYEAGPTGYALYWQLTKMGIECEVVAPSLIPRKPGDKIKTDRRDAEKLALCYQSGTLTRVWVPDAAHEALRDLVRARAATKRDESRAKHRLVKYLLRNGLRHPEDCRAWTHPWWRWVQSIKFEFETQQVTLGDCVAEVLHQTERLGRLDLAIDRAIESAPPEKRAVVEALQAMRGVAKLTAVTIVTEVGTFQRFRKPTELMGYTGLVPSEYSSGGREAKGRITRTGNAHLRHVLGEAAWHARHRPWLNKRLRKTLPTLPAGVSEIAWKAQERLHRKFARLTFHRKPPAKVATAVAREFVGFIWAIGRLAESHAASGTTESRR

SEQ ID NO: 317246 - protein, 400 aa, unidentified
MTESLIVGIDPGRYGHGVVVLRPDGEEALRERVANEAAAIEALVDRVVELAGGPGRALWVIEADGGDGAVLIGELLARDELVATLTPTEVAVRRKGRRQIHKSDLIDAELCARIGREEQATLRRLVAVPEAVAEVRVLARYQEGLIRDRTRLINRLRFLLSQYWPEFLAARAFAALDGDAVTALLAELPTPSAVRSKTPLELARFLAAQRYRRRPLERAEQILAAAQVGTRPQEAVYGRLVAEVAHELRALKLRIEALDVEIRDRFLLQPEAPIILSLPGMSHRTGPRFLAEVGALARFGSPDALAAYAGLTPTLWQSGRSSGTHFLSRRCNLHLRQACWSAALGSLKTPASRRFYDRKRSEGKSHHQAVIALARTQLRVLWTMLRAGTLFSAERALEAA

SEQ ID NO: 317247 - protein, 453 aa, unidentified
MDQPKYRPRGNRETLTTVNPDAAGIDVGSQFHVVAVAPQRDAEPVRTFQSFTGDLHCLADWLVACGVKSVAMESTGIYWIPLFEVLEARGLEVFVVNARDVKHVPGRKTDVNDAQWLQQLHAYGLLRGSFHPPADIAALRAYLRQRERLSDYAAAHIQHMQKALMQMNLQLHHVVSDITGQTGLRIIRAIVAGEHDPATLARYRDLRCKASAETLRQALEGHYRPEHLFALQQSVALYDSYQQHIAECDRAIEAVLANLRRPAATAAPPTARRRSRQPNALRFDARTALYAVTGVDLTQIHGFGPYLALKFVSECGTDLSRWPTAQHFTSWLCLAPSNKVSGGKLLSSHTRRTKNRASALLRLAAVNVGKTATALGAFYRRLAARIGKAKAVTATARKLAVLFYNAMRHGMSYHDLGATYYEERYRERVLHNLERRAQQLGYTLAPTAVVSVS

SEQ ID NO: 317248 - protein, 317 aa, unidentified
MSDETCWVGIDVCKASLDVFISVGEHSVQVANDEQGIGQLRALLQQACPKLIALEATGALERVVVGELLAAQLPVAVLNPRQVRRFAEATGHLAKTDRIDARVLAHFAAAIEPPVRTLPDAEAQAFADLLARRRQLVGMLSMENNRLKQAHNGAVRKDIKAHIAWLNKRLSATETGLREAVQASPAWQAKADLLGTVKGVGEVTTLTLIATLPELGSLDRKQIAALVGVAPLNRDSGTQRGRRCVWGGRALVRQALYMATLSGVRHNPVLKAFYTRLRQAGKKPKVALVACMRKLLTILNAMLRDQTPWNESHAQNA

SEQ ID NO: 317249 - protein, 426 aa, unidentified
MAAREKVGEPEFVAFVGIDWADQKQVWCLQAANSAKREKEELEHKPEVVEAWVSELCPRFGHGPIAVAVEQVKGALVYMLGKYECLHLYPVPSTMSASMRQALYPSGAKDDPRDADLLLDLLVQNRDKLRRLTPDNEATRRVQNLVEERRKLVEEKTAQLNRLTGYLKVYFPQMLEWFSKLDTKLACESLERWPSLEELQAAAPAEVRKFFRQHRGRHPELTEWRLRIGEAMSAIRDGAVIEAKRMVVQVIARVLRTLLEGIAALDGKITEAAEAHPDFFIFQSLPGAGAALAPRLLAALGSQRDRYASAEEVQKYSGIAPVTERSGKKKWAHFRWACPKFLRQSFHEWAGHSIAQSVWARACYQQQRQRGKDLHAAVRALAFKWIRIVFRCWQDGVAYDENRYLATLAKRGSPMIPVPATASPSL

SEQ ID NO: 317250 - protein, 359 aa, unidentified
MLVERTSVGLDVHARSVAAAAIDGVTGELKRARLTPSHDHIRSWLGELAGPVAVAYEAGPTGFGLYRSLTALGIRCVVAAPSKLQRPSGDRVKTDARDAVHLARLLRLGELTAVCVPSVDQEAARDLVRAREDCRGDLMRARHRLSKLLLRQGIVYCGGNAWTDAHDRWLRRQRFDSPATTTAFESDYDTILTVAARRDRLDNTIAELAADSEFTPVVRRLACLRGISTLTAFALAVEIGDWHRFTGNTIGSFIGLVPSEHSCGASRVHGSITKTGNTHARRLLVEAAWHHRASYRPGKTMHQRWELAPAAARARGDAGNRRLHARWITFNLRRKRPVIANVAIARELAGWCWSLAVMD

SEQ ID NO: 317251 - protein, 395 aa, unidentified
MSSMPPKTITPFDTGVPADSALLCVSLELSRSTWLVTSLAPGSAKMSRHQVEGGDAAALLNLLRHLQGKAAKRLGMPVRIVTIQEAGLDGFWLDRLLQAEGIESHVVDPASVAVPRRRRRAKTDRIDGELLVRTLSAWLRGEPRVCSVVMPPSPEEEDRRRLTRERDVLLKERVVHTNRIAGLLAAQGIHGYRPLRRDCRARLKELETGDGRPLPQRLKAEIGRELDRLELVKQQIVEVEVARDALLALQNKTAQDEVAATPGRLLLQLKSIGQEIASVLWLEGFYRSFDNRRQLAAFSGLAPSPWRSGKVDHDQGIAKSGNAKLRTTMIELSWLWLRYQPDSALSRWFRDRVRGNDTRRYRKITIVAMARKLLIALWRFVTKGVVPEGAVMKAA

SEQ ID NO: 317252 - protein, 413 aa, unidentified
MDWVACVGVDWGDKKHAYEIRGGDGRKTSGTMDTTPEAMHEWVRSLRERFPTGTIAVAFEHGRWSLIYALMMYEFLALIPINPRASKAYRDALRLSGASSDQADAALLCEFAAKHPSELKVWHPEDPVTKKMRLMVENRRTLVDQRTGFTHTLTDTLKQYFPQALQWFGGETSRKLRAFLTRWPTLEHLRQATVDDITAVLRALRCRKVAAAAQELAEKVRTAVPLTRDQAIIDGYAIYAQSLAAIIEPLELQIAKYDKAIAADWAIHPDRQIFDSLPGAGNVMAPRLAVAFGTDRSRYQAAHDVECYSGIAPVIEQSGNQRWIHARWGFPTFMHQTFHEFAQASIPYSAWAKAFYEDQRERGAGHHAAVRALAFRWIRIIFRLWTNRDQYDEELYIEALTNKQSPIVRRLVA

SEQ ID NO: 317253 - protein, 414 aa, unidentified
MEPVYRRKAGIDVHKKMLAVVIRCQSGEQIEYRKRKFGATRQEIEHLRAWLEGEGVDEVVMESTAQYWRPVWYGLESHFQLHLTHPLKTRAPRGRKWDFRDAQRLTDRWCSGDLEESFIPGAEQRSWRWLTRTRVDLKNKIIVVRNQVEGLLEQGSIKLTAVVSDVFGVSGWAMLEKIAQGVMDEKVLVAEARGVLRRKEEELKEALGGRLEPVYRMLLKQYMDQVRLLRKQVEEINQALALALKEHLPALHRLTQMPGVDLYAAQELLAEIGPRAAAFPSAEQFASWVGVCPGNHPSAGVCYSHRSAKGNRYLRRLLCQIAWAAVHTKGTFFAGLFARLKPRIEGKGAVWAVAHRMAKVIWLVLHNQVDYQEKGSAPPNERTLMRKFKRLLKEFGHLGLDVRALLEQQLATPA

SEQ ID NO: 317254 - protein, 375 aa, unidentified
MDSNTIFVGLDIHKATIAVAVAPSGRSSEVRFHGSLQHRPGAMTEFARRLLDKHPDTRLSFCYEAGACGYGLARELTDAGHECLVIAPSLIPTRPGDHIKTDKRDATTLAKMHRAGELISVWMPDAQHEAVRDLVRARETAMYWRNKARQALSSFLLRQGFRYGGRSAWTVTYWRWLASLQLEHPAHQVAMQEYIIAIQEADARHDRLVKQIEAVVPGWSLAPLVKALQAMRGIALITAATIVAEIGDLGRFDTPRRLMAYLGLVPAEHSSGPKIRRRGITKAGNTRVRRLLVESAWTYCRSPRVGEEIQRRQEGLDLAIVKIAWKAQLRLHNRYRRLSASGKPKNVVITAVARELVGFIWAIGQEVGPAPAATA

SEQ ID NO: 317255 - protein, 332 aa, unidentified
MLNCIGIDVSKASINVYIPKNNQDLVLENNLKSFRSLFSKLKKIYKKEIDDIIFIFEPTGSYSEALRKYCADKNIKCFIINPKQFSNYAKALGVEVKNDVEDARVLSKALHLAKEEQVKVPVFNEDVEQMKELMSFYRFTKKQTTQQRNHLESLTSKDGDKFSIKELQKSIDDSKKKESRIIEQVQTLIDSTDEYRIAYENIISIKGVGQIAAIVLLHLFLKYPEANQRQITSLTGLNPIYRQSGTSVQSAYRIAKTGAGIYRGTLFMATLSAIQHDKNFKALYNRLKSRGKHSTSAQIAVMRKIILTALSLYKNNRKYDENFNTQKASSMK

SEQ ID NO: 317256 - protein, 348 aa, unidentified
MRFYTKTHKHYCGIDLHARKKYVCILNSEGTVLVHREINCNPESFLRIVAPYREGLVVGVECMFAWYWLADLCRNEKIEFVLGHALYMKAVHGGKAKSDKIDAHKIAVLLRGGMFPLAYVYPPEMRATRDLLRRRNFFVRKRAELMAHIQNTVTQYNLAPLGVDLGVEENRHEIAQLFHNPEVRKIIEIDVAMIDAFDDVLKVLEPDIEKTAQQHNQQALKLLRSIHGVGKVLGLVMLYEIHDINRFPTVQDFSSYCRLVKCAHESAGKKKGTGGSKIGNVHLKWAFSEAAVFFMRHNPPAKTLVEKLAKTHGKGKAISILAHKLARAIFYMLKHNVPFDRERFLATA

SEQ ID NO: 317257 - protein, 344 aa, unidentified
MMIIGCDFHPSWQVIAFVDSDTGETGELKLVHANGEARRFYEGLKGSVRLGLESTGNCHWFTDMLSEMGHEVWIGDAARIRAAQVRKQKTDRRDAAHILDLMLKKDFPRIWTPSRQERDHRQLLIHRHKLVRMRAQIKTELQHLAMNQGMQKGRSLWSKENQKQFLDLALQPWASVRRQNLLQLMQGMDQQIAVLDQAVKQAAEKDARARLLMTQPGVGPITSLAFALTIGDVGRFEHSKQVASYLGLIPTERSSAGKQRLGSISKQGNRFLRMLLVESAQVVVRYDPKFRKEYLHRCHQKPKAVAKVAAARKLAVRLYWMLRTHTPYPEVVRIESSPRVPLAG

SEQ ID NO: 317258 - protein, 338 aa, unidentified
MTIVMGLDQHRAQITAEWIDTATGEVSRQRVAPAHRAGVRRFAECFRDVELEVALEATTGWRFVVEELRAVGARVHLAEPAETAARRGTKKRAKSDRADARHLRELLMVGRLPESWIPPEHLLDLRARVRLRHTLVDQRREWQQRIQAVLYHHGAPPRSWLLGAESRAWLTSLALPATAREQITVALAMIDAIDAQLAPLDRELRAYARRQAGCRALMGHYGIGPLTSITVLAELGDARRFSSSREAVRYAGIDITVHQSDARRAPGRLSRQGPSALRWALFEAAQCARRPASPDHQYYLQTAARLGANRACLAVSRKLLKRSFHTLRELGEEALQPA

SEQ ID NO: 317259 - protein, 330 aa, unidentified
MTMTPTQQTYNHVVAFEVSKEALVVHTLPADEQCTLANKPQSVRRLLKSQLKHNRKQNLGPILIVCEATGGYERHVLDAAIDLGLPVHRAHGARVRFFARYCGLIAKTDPIDARVLAHYGVKTDKLRLYVPPPPETAALRALHARRTEIQQMMIAETSRLDQAHHKSVVKSLKAHIAQLKSALEAIEDEITHLLQENASLKKKVELMRTVIGIGPVSAMILLAYLPDIGSMTKGEVARLSGLAPINNDSGKKRGARHVEAGRTAIRRALYMAAVVAMRANPVIKRFADRLRGKGYPFKYVAVAVMRKLVVILNAVLRDGQPWKGAQAACA

SEQ ID NO: 317260 - protein, 407 aa, unidentified
MPRTSRAVIGGVDTHKDVHVAAALDDHGVLLAATSFPTTSAGYENLRRWMAGFGPLQRVGVEGTGSYGAGLTRHLRAAGIDVVEINRPNRQLRRRRGKSDTVDAEAAARSVLAGQAAGIPKSSTGPVEGLRALRVARRSAVKARTQAGNQIRDVIISAPQELREQLGRLSLGAQVARAATWRPGPASDLLQATKRSLRHLARRHRALSTEITELDRDIAGLCAQTNPALLATDGVGPEVASTLLVAAGDNPDRMHSEAAFAALRGASPVEASSGKTIRHRLNRGGNREANNALWRIAMVRLAHHHPPTATYVRRRREQGKTDREILRCLKRYIAREIFNVLTNPNKVPRATELHQHRLAAGISLTAAANQLGTTAIRLSRLERGILHAAELATTYQNWLNAQPPHAA

SEQ ID NO: 317261 - protein, 413 aa, unidentified
MWFVGIDWGDTFHEVAALNEQGASGGTLRVAHTAEGLEGLVGWLLALSVQPSAGAAGTPDPERIACLVEIRSGLLVTALLEAGFAVYPVNPKTLGQRRNAAGAKTDQIDALLLARLGRSELADLRRLVLQSPLVEELRELTRDQDHLIHLQTRLVNQLTACLKAAYPVGLTLFSKLQQRATLLFLQRYPSFEEAQAASVEELTAFLRTIPYFPGAAVVAQRIFLRLHAAQPLVSPVTARVKARLVQALVSQLLPLLEQLGAYDKEILRLFTAHADAAVFASLPGTGKRLAPRLLVGWGDDKARFASAASMQGWAGTAPVTWQSGQYRVAHRRTACNKPLRQTLHQFAWHSTEKDVWAKDYYVRKRSEGKSHSVAVRALANHWVRVIHAMWRASTPYDPLIFQAARAAHERAVA

SEQ ID NO: 317262 - protein, 356 aa, unidentified
MTIVAHARPFVVGVDTHARNHALAILVAATGELLAAEQFPATKTGMDRSIAWVGRRTGGDLATLWVIEGIGTYGARLAHIAADAGYQVVEAPRMNARAHHAVGKSDPLDARRIATAVLSLDSDELRHPRQDDGVRAALRVLVTARDHMTLERTANVNALIALLRVVDLGIDARKPLTSKQVLEVSCWRTRDEELGAATARAETVRLAKRVVDAGEDLKSNATSMTVLVRQSRAAVLLERTGIGPMTAAIALTAWSHPGRVRSEAAFACLAGVNPIPASSGNTTRHRLNRGGDRRLNRALHMATIVRMTHDPDTRAYVEKRTAEGRTTKEIRRILKRYLARQIYRALNTTITSPSPA

SEQ ID NO: 317263 - protein, 448 aa, unidentified
MEIVYERCAGLDVHKKNVKACFTGPGRTGRRTKETRTYLTMTEDLLQLRDWLKEQGCTHIALEATGVYWRPIYNLLEGDFEVLVVNAHHIKVVPGRKTDVKDAEWIADLLSHGLLSASFIPAAPQRELRELTRYRTSLVEERAREVNRLQKTLEDTNLKLGDVVSDVLGKASRLILRAIVEGETDARQLASLAVGRVRADQQTLERALTGKVTAHHRFMLSQHLTLIENLDAAIRRVEEEIARRFTPPEPPTGAEDQSAPEPAVGAESASSEPSSEPLSWREAVQLIEQVTGISERVAQGLLAEIGIQMSQFPSAKHLASWAGICPGNHESAGKRLSGKPRKGNPYARRLLIQAAHAAAHSKNTYLSAQYRRIAARRGPKRAAVAVGHSILVIIYHLLRDRTPYQDLGGNYFDEHDRQMVQKHLVRRLERLGYQVELQPRAQDEEFLA

SEQ ID NO: 317264 - protein, 418 aa, unidentified
MSRIDSNAVLSVVHHHCCGLDIHKDKVSAAVITTHDDGTIEENICEFGAFTEDLYRLKDWVLEQGCDVVAMESTGVYWRPVHNVLEDSCQVILVNARHVKHLPGRKTDVSDSRWLAGLLRHGLLKGSFIPERHVRQWRDLARLRKTFVESLADYKRRVHKLLECANIKIDSVASDLFGVTGRNLMDLLVSGRDITLESVISCTRGRLKGKEDELFKSIRGFFTEHHRFQLVSLLTLIESVEKQIAAVHERLSGLLTDRREKVCRLMEIPGISDVSAQALLSEIGDTLDQFQTAASLASWAGLCPGNNESAGKRHSGRSPVKGGHVKTIMIEVAWGAIKKKGSYYREKYYGFRARKGAKKAIVAVAHRILKAVFHVLKFDRPYQELGEAYLIQLNNKARLHSLYKQAAKLGYTLVPAGV

SEQ ID NO: 317265 - protein, 351 aa, unidentified
MLIIGCDYHPGFQQIAYVDTETGEMQERRLGHRQEAEEFYRALKQQQIIRVRVGMEASGQARWFERLLAELEFELWIGDAAKIRTKRVREHKTDRQDAQLILSLLLENRFPRIWVASWENRDLRQLLWHRHRMVQMRTRLMNQLQAVALNEGIRRKKGLWREAGRKQLETVALAPWASRRRRDLLELLDRLNPTITDLTQLIEQEVEKYPTAQRLMTHPGVGALTALAFVLIIGEAERFECGKQIAAYLGLVPEEDSSGESRRLGHISKQGSGLMRFFLVEAAQVTVRSDPEWRNKFFHLAMRRGRKIAKVAMARRLAVRLYWMWRKQWDYEQLKKFGPHAGQPGTGVGVQ

SEQ ID NO: 317266 - protein, 337 aa, unidentified
MKYVGVDLHKSQFSVYWKTEEGKGIFKKYPMTKRGIEEFKKNLDKETEVAIEATGNSRFFYNSIVTEVKKVRVINPSQFKVISESVKKTDRHDAEIIAEYLSKGLLPEVRVMSKENRELKSLIQTRDKLVKLRSTLKNKIHGILLEHGITTRREMFSSEKALEEVRNAAVSETSRFEIGVIVDQIKALNEGIKKIEEKIKENGEGLKGQKNLQSITGIGKLSSTIILSNIGDINDFDNSKKLCAYAGLVPRVFDSNESIRHGQITKRGDKILRTTLVQVALIAIRYSPYIRGFYERLKHKKGSGKAIIATARKMLSIIYETLKNDWVFEDFNNFILA

SEQ ID NO: 317267 - protein, 328 aa, unidentified
MTEAYDGRQVVGMDLHRRRSVLVRMTEDGRKLETARITNSPAALRREIAKAGKHPRVVLEATYGWYWAADVLEAAGAEVHLAHPLGVQAYGCRRVKNDQRDAADLADLLRMGRLPEAWIAPPEIRELRELTRYRIKLVQIPVTHSDIFGVHGQAWLDELKLPQPYAGKVTSLRQLAGELTAEITLLDAVLGDLLAGHEGYAAIQQLPGIGPVLAAVIVAEIGDIRRFRKPGQLGCWAGLTPRHRESDAKVTRGHISKQGPRIVRWALCEAIQHQPAGTRPRQVKDGIIARRGPQARNIAKTAAARELLTLIFYAMRDGRVRRAISPAA

SEQ ID NO: 317268 - protein, 313 aa, unidentified
MSQNNTSILHVGLDVAKASLQLDLAGQSHPLTNDAKGHARLLKLLRAHPAARVVCEATGGYEQPVVRALHAAQVPVSVVEAGCVRHFARAKGQRAKTDPIDAVVLSEYGRVMKPVPTPAPTALETRLAELSTRRGQLIQMLSAEMNRAEHYADPFCIKQSGQMRRTLEKQITQCDQAIAELIAADKVLQAKAECLDAIPGVGEVTAATVLAELPELGAISSQAAAALAGVAPYNRDSGGSQGVRHIAGGRAGVRCALYMATLSAVKHDRILKAFYLRLRTAGKKPKVALVACMRKLVVLMNHLLKNPDFQLAH

SEQ ID NO: 317269 - protein, 318 aa, unidentified
MTHTTQTTARYVGIDVSQKTLTIAIYPTDEVWTIDNTREHHTALVQHLAHLPIQRVLLESSGGYEKAVVSALQQAGLPVVVVPAQRARYFAKSMRGDLKTDRADARMLAYFACCYPVQPVAPCSPVQAELKELWARREQLVQQVEREKKRLQTVQSEAVRASLARMLAVLKDEIAQIEARVEELIASDAALAQKAALLQTAVGVGRVVAYGLVAELPELGQVSHRAIAALAGLAPVRCESGDWVGRARVRGGRPRVRRLLYQAAVVASTHDGRWRAVYEGLLGRRKVKKVALCAVARQLLVVLNAMVRDGRAYERVQA

SEQ ID NO: 317270 - protein, 345 aa, unidentified
MELHTIGIDLGKTVFHLVGLNLRGEVVVRKKFSRTQLLRFTANVHVGLIGMEACGGSHFLGRALREQGHEVRLIPAQYVKPYVKTNKSDYIDAEAIAEAVARPTMRFVPIKTDDQLDMQSLHRVRERWVMRRTAVINQIRGLLLERGITLRKGRCYVGAALPGILEDADANLSGALRMLLAQLKLELDHLDLRIEEADAVIKKTARENEACQRLVAIPGIGPVTATAVIAAIGNGAAFHKGREFAAWMGVVPREHSTGGQQKLLGISKRGNSYLRRLFVQGARAVMQQRTKQSPGLSAWLARLTSRTHRNVAAVALANKLARIAWAVLAKNEQYRPAVVADVAAA

SEQ ID NO: 317271 - protein, 475 aa, unidentified
MNLKGKKKKNQVVTANIFEQQELLKKAEVIRESLTASTWHELETNGKFDKNKKLSFISDDMLILGCDVGSEIHYMRAIDTRGRELSKSAFPFNNDSEGFQSAKEWAVKIAAEQNKSQIVLGLEPTGHYWFCLATWMVSNGISVVQVNPYAVKQTKEVEDNSQLKDDTKDPKLIANLVKDGNFGMPYLPEKLYAELRRLSMFRDQLNEDRVRTINRMHREMKIYFPEYKDALGKVDGAFSLQLLKQAPFPDDLTALGEDGIRQIWHEARLRGRGYSRAGEILGYAETSVGIKDGAAAGRTAVKWFVQKILELDAELAVIENQINQKCQEIPHAGNILEISGIGENTLSGILAEMGDISRFDDVKEIQKLSGLSLVACSSGKHKGETRISHRGRKRLRYWLFQAAKSVAAHAEEFKELHMHYTTRADNPLKKMQSLIVIACKLLRIIYTILKNGTAYDPKKMLMDIRHPEKKEAVAA

SEQ ID NO: 317272 - protein, 340 aa, unidentified
MIIGCDFHPSFQQIAYVDQETGEYGERRLSHGEEAVAFYRSLAGKAVRIGMEATGNDRWFHKLMSELGQELLVGDASAIHASAPREQRTDKRDARHILRLLVENRFPAIWQPSVANEEQRQLLLHRCRLVRMRARIKNQLDSIAKNEGLTSSRKWSGKRRQQIEALPLTGWYAERRADLLGLLDTLEARIKPLDEALQATAEQNAEAQLLMTHPGVGPVVSLAYVLILGDWRRFPRGKQVGSYLGLIPAEASSGKRQQRMGHITKQGNTLLRWLMVEAAIKAQSKDPSWHRQYLRLSMNKHHGVAKVAIAHKLAVRLYWMLRSGQNYTQIVERGSHAGSP

SEQ ID NO: 317273 - protein, 418 aa, unidentified
MSEEANARRSRRYVALDIHKHYCVVAAVNRDGEVTLEPVRVEHEDLERWLQKHLLRDDDVVIESTTNAWHVYDLLEPLVERVLVANPIKVKQIACARVKTDIRDTLILARLLAANLVPTVWVPPVHVRDLRQLLSQRRSLVGMHTQGINRMHSTAHRHHLNHPKGKRFLPKNTAWQKEDVLSTLEKLQLELEMETREHLRDQIDRITTVLARMSHQAPWNEGMQYLMQLPGFGVVTGMTVLAAIGDITRFESPRHLASYSGLTPGVEQSGVKLRGKGITKEGRKELRWAMVEVAQRAVKSDPHWQYRFNELQRRMHRNQAIVAIARRLLELVWYVLTRRQPYRHFSQERIAYKYLTWSWQLSEDDRDGLTRQQFVRYYLMRLGIGHDLERIVLDPKHPRKLASEAEILTLRPELIQIE

SEQ ID NO: 317274 - protein, 337 aa, unidentified
MSRIAVYVGLDYHQHSVQVCIMDREGELLFNRRCANEADAIVALVTGYGEVRGVAIESCCGAADLAEQLIQQAGWVVDLAHPGFVSRMKQSPDKHDWGDARLLADLERIGYLPRVWLAPEEVRELRRLVRYRQQIVDERRNIKLRISALLREQRQVKPPANPWTRRWLTWLRHEVVLSEQGRWIVDRHLNKMLNVLDELQEVEMRLHQLTVHDPLVRQLSLLKGVGSVTAWTIRAEIGRFDRFRTGKQLSRFCGVSPRNASSGERQADAGLIKAGNSRLRAVLIESAHRLRRYDARWRDLSDRMEARGKSRCVVVAAIANRWVRWLFHQMQPDQLAA

SEQ ID NO: 317275 - protein, 434 aa, unidentified
MDQVIIGVDPHKLSVTIEARDSREILRATGRFGTDARSYRQLLAYARQWPGRVWAVEGANGIGRPLAQRLLASGERVVDVPAKLAARARVFDTGQGRKTDPADAHAIVMVALRDKRLRELSPDPDRTVLRLLCDRRDELSQARAQALNRMHRLFLELIPGGAPVKKSAAQYRELLASVRPRDRAGKTRRRMAAEELADLERLDTKLKAMKAELKAAVLASGSRLMDIHGVGPAGAARILADVGDVARFPNRHHFASWTGTAPIDASSGQHTHHRLSRAGNRRINHVLYMAGIVQLRNDTPGRAYYRRRLTEGKTPMEAMRCLRRRLSDVVYRQLVADTQAPAADQAGPGGHSGATLLSSAADLPPDIGTSAQPLPGPVSATLPPPLPAPHSPAAHAGASPRRRAGGVNVERLTGRTTLTPTSAGARSKPPGPPS

SEQ ID NO: 317276 - protein, 464 aa, unidentified
MTDKKLWRNRKERKEWTQRLQSEDPGLEVVHPHAAGIDVGNGAHYVAVRPDCDPEPVRRFECFTADLHSLADWLKRCGVKTVAMQSTGVYWIPIYEILEERGIQVYLVNARHTKNLPGRKSDVQESQWLLKLHTYGLLNNSFQPSSEIRVLRTYWRQRGEHVHGAATCVQRMQKALTQMNVQLANVISDVSGLTGQTIVRSIVAGEHDPWKLAELSDPRIHASREEVAKSLEGNWRPELLFVLQQEVAMYDTYQRRIAECDQQLQKHLARFADTVPLQPTEAEPKRKKTKPAKNAPRFELRTELQRITGVDLTRIDGIDVMVAQTLISEVGLDMSRWKTEAHFSSWLGLCPDNRTSGDKVLARGIRRVVNRAATALRMAAVTLMRSRTYLGAQYRRLRTKLGAPKAITAMAHRLARLVYRMLKYGQRYVDKGAEYYEHRYRRQQIEFLRKKAANLGLQITLAQT

SEQ ID NO: 317277 - protein, 405 aa, unidentified
MAVMIGVDPHKASHTAAAIGPAEEPLGQVRIQACASQVEQLVAWAAAWPDRTWAVEGATGLGSLLARQLVAAGERVLDVQPKLAARVRLLEAGNTNKNDANDARSVAVAALRSATRRAVRPDGHAAVLKVWSKRYRDLGRTRTQVACRLHAVLADLVPGGFGREITAGQAARLLARITPADPAARARCELAAEFLADLRRLDAQRRDTRDRLAAAVRASGTTLTEIFGVGPVIAAAIIAAAGDPGRFADRDRFAAYNGTAPVEVSSGGRKIHRLSLRGNRRLNHAIHMAAVTQLRYAHSPGRSYFDRKIAEGKTGKEALRALKRKLSDVIYARLQAANARRGAPADTEGPGGQSGNGSVSSAASSHPRRRLFGQATPGPQPSLRLTVPGRRATPAATSTKSPGTS

SEQ ID NO: 317278 - protein, 477 aa, unidentified
MNKKQGDNLQPPKAKSKRRRRNKGMCLEDRPVLEPNAAGIDVGAREMFVAVPPGRDENPVRVFATFTEDLERLTDWLEQCGVTTVALECTGVYWIPLFEILEQRGIRPCLVNARHMKNVPGRRTDWHECQWLQFLHSVGLLRAAFRPGQDVCAVRTILRHRNELVAAASQHVQHMHKALTQMNLQIHHVISDITGLTGRTIVDAILAGQRDGAELAKLRDPRIKADTETIRKSLEGNWRPEHLFTLGQSRDLYRIYQQQIVNCDLEIEKMLQGFAPRIDPGEKPLPPDRKRNRAGSKRRRKNGHPHPEFDLRTEAYKLFGVDVSQIPGLEENALPLFSEVGRDMSRWPSAAHFVSWLALCPDNDISGGKLLWRGARRVKNRAGHLFRMAAYALHRSLTPLGNYLRRMKAKLGPQAATMATAHKIAVIFYTMIKNQVEYDETIWDARDAQREKKLQAKLKRQAKQLGYELVPIEPQAA

SEQ ID NO: 317279 - protein, 339 aa, unidentified
MGLYAGIDLHSRNSYVGVSDHEDKRIFRKKLVNDPEVILSALNRFRSELVGIVIESTFNWYWLVDALMEEGYRVHLANPSAIKKYEGLKHSDDHDDAFWLAQMLRLGILPEGYIYPKEERPIRDLLRKRGHLVRLRTSLMLSLQNIVARNCGQKLNANVLRKTTEDEVSPLLSENEDLHLSGKVSKESMDFLTGQIRCIERFVYDKIRIKDQYRYLQTMPGVGKILSLTITLETGPIERFPHVGKYASYCRKVPSKWISNGKQKGKGNRKNGNKYLAWAYSEAAEMARRFNVEARTFYNRKAAKSNVMVARGALAHKLARAGFYVMRDCVPFDSRKAFA

SEQ ID NO: 317280 - protein, 386 aa, unidentified
MAAVMIGIDPHKGSHTAVAIGADEEPLGQVRASAAQATKLMAWAADWPERTWAVEGAGGLGYLLAQQLVTAGERVLDIQPKLGARVRLLATGASGKNDPNDARSVAIAALRSKTAAEVAAADHAAVLKVWSKRHRDLSRARNQVVCRLHAVLCDLVPGGFGKEITAGQASGLLQRIRPSGAVAQARYDLAAEFVEDLRRLDAQLRDTKKKLAAAVQASGTSVTEIFGVGPIIAATVIGAVGQVSRFATRDRFASYNGTAPVEVSSGQRKIYRLSRRGNRRVNHVIHMAAVTQIRNKHSEGRAYFDRKLAGGKTRKEALRSLKRRISDAIYARLQDDSRRARKPGAREGNRGTALTPARPAHTPNTGSSDKPLPGLTPPYDPGQLST

SEQ ID NO: 317281 - protein, 408 aa, unidentified
MAVNGLPFILDRGCGLDVHKDTVVATIKGSDFETETRTFLTFTDDLYELVAWLQSYSITEVAMESTGVYWRPVYCILEDYCHVILVNARHIKNVPGQKTDKKDSEWICKLLLSGLLKGSFIPEQEIRELRELYRHRRKLVSSRTAEKNRLQNVLESANIKLRSVVSDVFGVSAMQMIQAIIQGQTDPEILANLAKGSLRNKRVELVKALKGNVTKHHIFMLNLILESINNINLQIAQLEAQMEQYRFSMQKDVELLETIPGISRQLALSVLGEIGNDMSYFSDHQNLSSWAGVCPGNNESAGKKYSTRITQGNKYLKASLVEAAWVAIRSKDNPIFAVKHYHISNRRGKKKATIAIAHKLLIAIYHVLRDKEPYQLHTQDKKILEHRRIKKIERFQLEIEKLKNIHIQ

SEQ ID NO: 317282 - protein, 402 aa, unidentified
MNAVGIDVSKEKSMVAVMRPCGEVVASPFEVAHTDSELGKLASLLLSLNGETKVIMEYTGTYYKPIAHTLHEAGLFISAVHAQIIHDYGNNTIRRAKNDKKDAVKIANYGLSEWLNLPQFFPEEDIRLSLKVFCRQYNKYSKLKTMLKNNFISLTDSTFPGVNELFSSPPRKSDGHEKWLDFAAEFWHADCVCGISQKRFTQRYKKWCKTIGYNFSAEKAEDIYVSSLGHISVMPMTETTKLLITQSVLQLNAISETLNTISCEMKRLAELLPEYPVVSQFYGVGETLAPQIIGEIGDVVRFHKKSSLVSFAGLDPVENKSGKYQGKETISKQGSSHLRKALFQVMDCLIKRKPADDPIYQFLDRKRSEGKHYYCYMTAGSAKFLRIYYARVFEYLLGLDNE

SEQ ID NO: 317283 - protein, 330 aa, unidentified
MVTPVLGIDVSADTFHVALQAESGWRDECFPNDRSGFAALGKWLASQGAGSVLACVEASGNYWVAVAIWLREHDHAVHCANPLAVHRFIQSDLERTKTDKQDARQIAAYCLSRLARPDASLRLWEPPRPVEAALRALQRRISEIVERRTEVLNRAQDPQVLPSVRRSCEREARSLLRERERLEREMDQLIAADPVAHTCVGLLRTIPGIGEVTARFVFAEIGDCSRFDGAPQLVAFAGLCPQERTSGRSVRGPNSTTRLGHRRLKSALYLPALAALRHDPGCQALLRRHAALGKPKMKTVVAIMRKLLHIIYGVLKTQTPYDPNRAFATP

SEQ ID NO: 317284 - protein, 372 aa, unidentified
MQSDSEVFVGLDTSKLKISVALAEEGRHGEVRFLGDIENSPDVVRRVVARLSGKYRKLSFCYEAGPTGYGLYRQIRDLGHDCSVIAPSLIPKRPGERVKTNRRDALTLARLHRAGELTAIWVPDPDHEAIRDVVRAREAAMEDRRAKRQHLQSFLLRHGRRYPGLRSWTQVHARWLSNLIFAHPAQYLVLHEYRQAIEDAETRLERLEQQIAELVTSWSMAPVIEAYQAMRGVAFLTAVTFVAEIGDVRRFDTPRQLMAYLGLVPSERSTGELVRRGNITKAGNPRARRVLIEGAWTYRYPARLSRPLQIRQENLPKAVREIAWKAQVRLCARYRRLMATGKRQTLVTTAIAREMAAFLWAIGREVTPRPVA

SEQ ID NO: 317285 - protein, 376 aa, unidentified
MERGSLMLNTTTFVGLDVHARSIKAVALDAMTGEVRSATFGYDAAEVAGWVSSVDPSAKCVYESGVTGFDLQKRLAALGVDCVVGAVSKMIKPSADRKRKNDRNDAEFLARMLSVGNVVEVWVPDDGCEAARDLSRALDDAREDLKRRKQRLSKFLLRHGYVFSETTPTGRRKGSWTAAHWAWIKSISFPEKADDDVLAYYVDAVRQAMEDKARLERLVEAEASKPRWKRRIDSVRCLKGIDVTSAADLVFEAGEFSRFKSARSFAAWLGLTPSEHSSGESVRQGGITKAGNKHLRRVLVESAWHYLGCSPHSKDLAKGQVPDPAARRHAAKGVRRLVERRRAMLERGVHKNKANVATARELACWCWAVGRMIENG

SEQ ID NO: 317286 - protein, 368 aa, unidentified
MGKSSKLYVGMDVHKDSIDVATGDDAAGEVRHYGAIGGEMAAVSRLVRKLESIGKVLVFVYEAGPCGFGIYRMLRDRGHECWVVSPGMTPRSNADRVKTDRRDCLKLARLARAGELTPIHVPDEIDEAMRDLVRAREDAVVMQRQARQRLGALLLRNDIRYNGKTLWSPAHRRFIAELKLPHPAQHIAFEEYAQAVDEAGQRIERLEAAIGDELTRWRWRPVVEALQAFRGIRTIHAVRLVAELGDLTRFANPRRLMGFLGLVPSENSTGNRRRQGAITKTGNSSARRALVEAAWAYRYGARVSVGIARRQSGLPKPVTDLAWKAQLRLCSRYRRLSARGLNRNKIIVAVARELSGFVWALGQQVKPL

SEQ ID NO: 317287 - protein, 337 aa, unidentified
MDYFAGLDISMDETHVCVLDREGVVVRERKTESTAEAIAGELAKAPTCRRILFETGRMAPILFHGLSQLGLPVVCVESRQAYQALKSLATHKTDRNDARGLAHLARTGFFKPVHVKSLSAHAVRSLIIARKKLVGQRVTLENQIRGLAVVFGVRLPRALTAAFIDNALRASEGIAGLSVAMRGLIAARTAVMTAVAAIDADMRRMTRASAACRRLMTIPGVGQLTALAFVAAIDDPSRIRRSRDIGAYFGLVPRLYQSGEVDYTGGISKCGDRRVRTLLYEAANVMLTRYKGQLKLKDWAFAIAKRSTMRKARVALARRLAIIMHAMLRDGTEFVPT

SEQ ID NO: 317288 - protein, 424 aa, unidentified
MNSLSDNEFAAFIGIDWASTKHDICLQVAGSDAREFSILAHRPKEIEAWACALRKRFSSQPIAVCLELAKGPIVYALQKYDFFVLFPVNPATLAKYRQAFTPSHAKDDPSDAQLALDLLLRHRDKLKRLQPQSVNLRKLMRLVEQRRRLVGDKARITNRLIDALKQYYPQILDCFEDRDTQVFCDFLDRWPTLKQARQARKATLTAFFKEHHIHVSTVIEKRIAILKDTTSLTTDAGVIEPNRLLVSVLVEQLRVSLKGIERFDAEINTVTNELPDAALFEALPGAGHVLTPRLLVAFGEDRDRFDDAAEMQKVMGIAPVTERSGKQCWVHWRTRCSTFLRQTIVEWAGQTISHSFWAAAYYQQQRAKGSTHPAAVRALAFKWTRILYRCWKTQTPYDESTYLNALRKRGSPLLQTITKPPLAA

SEQ ID NO: 317289 - protein, 412 aa, unidentified
MLKIVYPVCCGMDVHKSFVVACIASTNNQGVTTYRSGRFSTFTGDLRRLAAWLHAHSCTDVCMESTGKYWIPVYNILESSCRITLAHPKYVKAIRGKKTDKKDATWIADIFKHGLVCGSFIPSADIRQLRDLMRYRAKLTGFSTGEKNRAQNCLTVSNIKLDDVFSDVFGKTASAITQRLLENDTPFDVTPFLNKKLKASADRIQAAVDGHICTHQAGKLRVIRSHMENLTVCKKSLETLILGLAENYLPTLDLILTVPGIQVFAAFGILSEIGADMSVFPTSKHLCSWAGLTPQNNESAGKKKTTRISRAGAYIKPLLVQCALCAIRKKSNPEIRSRYLNLKKRRGHKKAIIAIARMLLTAIYNMIKKNEKYNAALYRKADTPPKNREVSINEAIYILQRQGYLVTAPRSA

SEQ ID NO: 317290 - protein, 305 aa, unidentified
MQQMTQATTRAVSFPNNLVIGLDLGDRWSRYCVLDNAGAVLEENRVRSTDQALEERFGTLSTARFVIETGTHSPWVSRVLENLGHAVVVANARKLRMIYESNRKNDRLDARMLAQLGRADVELLAPVRHRGAKARADLAVVRGRDALVAARTQLINACRGTVKAMGGRLPKCTTAAFVSKVKSSIPPELQAALRPLLSSIRALSEQIESCDRRVRCLAAKEYPQTRLLQQVKGVGPLVALTYVLTLEDPHRFASSRALGSYLGLCPRQAESGNSAPQLGVTKAGNSHLRRLRAKRALHAQLPGFG

SEQ ID NO: 317291 - protein, 337 aa, unidentified
MKYCGIDLHSNNSVVLVSDEEDRIVLQKRLPNDLGQIQAALGPHRDELVGVVVESTYNWYWLVDGLMDAGYRVHLAHPSAIKKYEGLKYSGDFADAAYLAQLLRLGLLAEGYIYPREERAARDLSRKRMQLVRYRTAQILSIENILARQTGARLSGEAVKRLTAAQVEELGFAPDVALAVEANRAVSQTLGQQIEALERRLKERVRLRDEFKLLNTMPGIGETLATTIMLEMGTPARFAKVGNFSSYCRCVDSLRESNDKKKGEGNAKNGNQYLAWAFVEAANFARRYCPQARSFYERKKRKTNGIVATKALAHKLARACYHMLRERKPFNVSRCFG

SEQ ID NO: 317292 - protein, 347 aa, unidentified
MRILALDLGKNKSVFLDYVTGSAGEEGRNYGKIATNAHEVRKLLARCSPDRLVIEAGPAAGWVCDLAGELKIAVQVANGNDERWRWKTVKEKSDRTDALKLAQLSEMDSLPAVYVPGAEVRQWRSLIAYRHGLVDRRTAMKNSIRAIYERQGLGLSAAQKAWSVKAVEELKKQAAARSPVQLWLFQVECELEQLESVQRQIDQVEAKLEEIAESNRSVKQLRTAPCVGPRLSEAVVAILDDPHRFKNGRQVGSYAGLTPRRWQSGQSDRQGHISHAGNGLLRELLVQIAWQGVQRKTWMLEAYERVRRGSDKRKKIAIVAVARRLLIKLWAMLRDGTPWKEPVSAAT

SEQ ID NO: 317293 - protein, 401 aa, unidentified
MKEFNAKEVRIETASALETVKPAQADRKYPAYIGLDVHKETIAVAVAQAGREAPESRGEIANKPKTVAKLVERLNREFGGEVLLFCYEAGPCGYGLYRQLLELGHDCQVVAPSLIPKKPGERIKTDRRDACKLARTLRNGDLTAVWVPDEEQEAMRDLTRARDDMKGQERKARQQLNAYVLRHGHAWPSNKTRWTQTHYNWLESLKFPHDWQQVVLQEYIDAVKATSQRVADITAQMERVLPQWSLAPVVDSLVALRGIDKLAAMVLLAELGDISRFDSPRQLMAFLGLVPSEHTSGGRRRQGAITKTGNSHARRMLVESAWSYRFPARQTAHLKRKAANASDEAKVIAWRAQKRLCGRYRTLLQAGKNTKQTTVAIARELVGFIWDIACHEMPKVQQAVR

SEQ ID NO: 317294 - protein, 350 aa, unidentified
MDRYIGLDAHASSCTVAVIGPSGRRLASHVIETSARALVTVIDTIPKTRHLCLEEGTLAGWLHEVLTPHVQEIVVTAVPQSRGPKNDKRDAFALAEMLRIGAVPRKVYKQRGRFTRLAYLAKAYQVLVSDDVRVQNRLKSLMRSRGVQVSGSAVYTTTGRSAYLDQLLIEARVMADFLYQQHDHLTDLRKQAQKEMITEARKHHEFRCVKSCPGLGDVRAALLLPVVVTPYRFANKRQFWSYCGLAVVSRSSSDWVRTRSGEWIKAPVQQTRGLNKNFNRTLKTVFKGAATTIIGQARDEPLYQHYQRLLDGGTKPNLAKLTIARQIAAITLALWRNEEVYDRTKIAHTT

SEQ ID NO: 317295 - protein, 369 aa, unidentified
MEHFTTVVGLDVSKEWLAAATWPIGAERPTEIVKLPNDPKSVSKFVRRVTAKGPATFVYEAGPCGYELHRQITAMGQRCVVIAPALIPRRPGDRVKTDRRDAEKLARYYRNGDLTEIRVPTSEEEAARDLVRAREAALADRLCACHRLLKFLLRQGRVFRDGKSWSLAHKAWLRTQHFDYPSTRLTYEAYVRGLEEAEERLAVLEQQVFDLANGERYAAGVSYLRCLRGIDTLTAVTLLTEVIDFRRFQKAREVMGYTGMVPSEHTTSFDPRRGRITKTGNAHVRRVLVEAAWNYRRKRVLSQAIADRRKDCPPEVVKIAKKAEDRLHRKFWRLTERGVPNNKAAVAVARELAGFAWAIAQHIPVSAEA

SEQ ID NO: 317296 - protein, 366 aa, unidentified
MEYSTIISLDVSDKTSKVCIMSKIVGRKQILEETTIYTTKDALLAYLKTKNPTWPVVFETGTHCRWMEKVVKSLGMKPIVANPAHMRMVTESNTKNDRNDARELAKIALADVELLHPVSLRSEICQQMLRLLKARDIMISVRTKFVNQLRGFAKSMGFRLPSCSANKVYLLDKSQWPEDFETVAWPIMDILETIEIKIKAYESQIKKLASCPELKDKIERVREVYGIGLLSGCALIASINADPDRFSKARDAGAYFGVVPKQRQSGEMDMQCHITLSGSEFVRNLMVESAQIALRESARDTDIKLKGLRICQRGGKIAKKKAIIAVARCLIVTAVALLKHPERKYIPLSGKGRLELEAMRMIEAVA

SEQ ID NO: 317297 - protein, 434 aa, unidentified
MEEVTDEPLYRDRVCGIDIGKAGMAATIRVPSDKNPARRASETREFATTKRGVLALADWLRCWQVPAVVMEATSDYWKPVFYRLEAEGFEMVLADAKQVKHLPGRPKRDPSDSRWLAQCFERGAVRSCFVPDPEFRIIRLHTRYRRDLTDERTREKNRVEKLLESAAIKLSSVVTDLHGVTGRDIMDHLIAGERNPKVLAQLARARARRKITELEHALEGAEFFTAEHAALLTTMLARIDRLTAEIAALSEVIERLLAPYEEQLQQAESMPGWGRRSAQDAVAETGADMTKFPTGGHLSSWAGKTPLDHQSGKRAGRARHKKGNKYLAAVTGETAVSAGKTATREGARYRKLARSRGKGKAQVALGNTQLKVYHKLLSNPGMRYEDLGPDYYERQAATRRKIAYHVREIEALGLDVTLTRPAPGPDGPGNTQAA

SEQ ID NO: 317298 - protein, 371 aa, unidentified
MDEFTKYVGLDVHKETIAVSVADGQGGEVRYVGEIANTPEALRKLSKQLGKGGGKLRFCYEAGGCGYGIHRQLKALGWDCQVVAPSLIPKKAGNRVKTDRIDSLMLARLHRAGELTPVWVPDGAQEALRDLTRAREDMKHLQRQVKQRLLAFLLRHSERYTGKSNWTQAHYRWLEQVKLPHPVQQIVFQEYVDTVKAMSERVQGLDEQIHSASSESVFWPVIEALMALRGVSLLAATTVVAEIGDLRRFASAPQLMGYLGLVPSERSSGPNRVRGSITKTGNGHVRRILVEAAWTYRHPARKTAILQQRALRTAPQIQDIAWKAQKRICGRYRLLEARGKLKVQVCTAMARELTGFIWAIGQTVPQPEFKA

SEQ ID NO: 317299 - protein, 403 aa, unidentified
MTRYHVGVDVGKARHHVCVRDLSNDTYCRTFSVSNDQEGLSQLVASLDTLSADHDDFLIGVESCPYGLNVSYFLMAAGFNLVEVNTFRAGQFRKAQGKKAKTDRIDARCVAAILSLGDHKPLRIPDPISDNLRELTRFRADLVNEKSMATIHLREALSILFPEFDKVFRQLDSAGSLALLTAFPGPEHVIAAGEERVGEVLSAASPHRMGKGMARRIIEAAQRTVGVTQKQPALGVKISILARRIADLQSTVRGLDRQITVLFNALPSKPEGFPVGRAPSLATIMSEIGDIRRFPTLKKFLSHLGWCPQTFQTGNYRMEHPKMSHAGNKYVRRLIWMLSVFAVQRVPRYREYFQRRVGEGKAKMHILVAVGRKLLSVLYAMLKTGAAYDPDWEENRRLAVARR

SEQ ID NO: 317300 - protein, 455 aa, unidentified
MAKIRSWVGLDVHAAKVVACVVDAESGEMTLHRLGGETAEVVAFCAGLPAPARAAYEAGPTGYGLARALVAARVGCVVAAPGKIERPAQDKIKTDARDAERLVRLLMIDALHAVTVPTPEQEALRDLVRAREDVRVDLMRARQRLSKLLLRHDVRYDDTTSRWGERHRRWLAQIDLGQAGAQATMADYVGAVEALELRRGTLEAAIAQLVPATPCAQAVARLRCLRGIDTLSAVGLAVEIGDFERFERPGQLMAYVGLVPSEHSTGQTRRQGHITKSGSQHARRLLVEAAWHYRRAPRRGTTLQRRQQDQSQVVVAIAWKAQQRLHHLWRRLDSQRHMRRTIVAVAVARHLAGFCWAIVNHDEHHELADQPPRRSAPPRARQRRQVADAGLLSSASRSACGRPTGDSSAGHPLCGSEVGPGGPTTGKAVASSNTSQTARRPGRARRSQPNPTAAR

SEQ ID NO: 317301 - protein, 341 aa, unidentified
MSEVSIIGIDLAKRVFQLHGTCANGAVIFRKKLTRVQLLAFMSKQPECTVAMEACATAHCWGREIEKLGHTVRLIAPNYVKPFVKRQKNDVADAEAIVEAASRPTMRFVELKSEAQQARAMLFRTRQMFIGQRTQTINALRGHLAEHGVVAPKGAIHVKRLADAVEDETIGLLEDVRELAQVYLAQIEGLNVQVAALDQRMKGAAKEAEAARRAQTMPGVGPITALAIETFAPGLNCFRRGRDFAAWLGLVPKQNSTGGKPRLGKTSKMGQRDIRRLLISGAMAVLQAVERFGTPHNTWLIATLERKPRMLVAVALANKMARSLWAMVTKQEDYRIPVAMA

SEQ ID NO: 317302 - protein, 358 aa, unidentified
MPGTVSHINSRTIQVIIGVDTHKDQHVAVAIDGLGVRLDEKYVPVAVCGYEELERWSRSLGQIHAFGIEGTGSYGAGLARFLTDRSHTVVEVNRPDRSVRYRKGKSDPTDAEMAARSVLAGVADATPKAGEGEVEMIRMLKSAKDSAIKARTQAVNQMKALVVTAPAELRETLEGLTTVALVTRCKSFRPGRLDGPKAAAKYTLRSLACRHRQLNEEVQELETELERLTSAAAPALVNAFGIGSNTASSLLIAAGSNPDRLRSEASFAALCGVNPIPASSGKTNRHRLNRGGDRQANAALYRIVVVRLRHDPRTQEYMQRRTAEGMSKSEVIRCLKRYVAREVYSAIQKPAQPIEKAA

SEQ ID NO: 317303 - protein, 420 aa, unidentified
MMNSTNTYPIHPKMTRTYCGIDSHKDSHTIVILNCFHEKLGEITIGSAPSEFSNFLKQAKKYLQTGTTWAFGFEDTSAYGRSFVKFLVEKGYCVKHVDASKVATERGQVLHKTDSFDAECAGRVLINQFDKLPNANPQDKYFIIQNLVTRRNSITKINVMVKNSLHKVVAENYPHYKKFFCKLTTNTALAFIEEYPSPHHLENVTAEELTAFIKTTKGRMTEEKAELILTYIGGDKVRRIEFQATQDFTVRSLVRQLKNNLLELDEIDKEIEKILVHFDCPLTSMKGIDTLTSANLIAEIGDINRFKNAKSLAKYSGVAPVTYASGMTNLQMANARGNRKLNEVFYRLALTSVMPIGTKGLLLNPILYEYYHKKISEGKMKNQALKAVQRRLVNIVFSIMKNNRPYENPESGYVSKEEVA

SEQ ID NO: 317304 - protein, 501 aa, unidentified
MPNCKHNSMKTPASSSAAKRRLRNSNKLLRQNKKKVAPATEPRSLDELTPVHRRAAGIDVGSAENYAAIPLEGLAAGEAAVRVFGVFSVDQDALVEWLQTHQITTVAMEATGIYWMSLYDKLEAVGIEVYLVDPHAVRAVPGRKSDWLDCQWLQKLHTYGLLRRAFRPDAPIRRLRTLTRQRTELVLCGVAHQEHMGKALISMNLQLGLAVSDLVGDTGLRIIEAILAGQRDPKELVKLRDPRCRKSTVAEMEAALTGTYDEEQLFVLKQSLDGWKFYQKQMADCDPRIEKALQAIPTVSLVAPPAPPKPLPAAKSPKPKRKRVDRGNNAPTIDFTAALQRVCGVDLMKVCGLNLLSVLMLIGEIGVDMSRWRSARAFSSWLGLCPGTKISGGKVLSRRTRKVKNRASTILRIAAWTAGKTDTWIGRFYRRVKSRRGAPKAVTATARKLACVIYHLMKYKEEFVFLDTTKYEEQATNHRLSRLRKEAKSLGFQLTEYQRVA

SEQ ID NO: 317305 - protein, 386 aa, unidentified
MPQLNDLSRSLVILEQDATLIAVIEMGQSNWLVAGIVPGVERSPLKKLAVDESALLKLLNRWREEAEKAGHRIERIAIAFEAGRDGFWLARWLRARGIEAHVIHASSVAVSREHRRAKTDRLDTELLKRAFLGWLRGERDHCKMVAIPTLAQEDAKRPNRERESLVGEQSRIVNRMKAALARLGIRGFNPKLKKAVERLDGLRTPEGEPIPPNTLAELKHDMERRRLVRSQIRDIEGTRLERLKQTPGDGPYVTVRLLARVIGVGVETADMLVQEVLSRNLRDRRAVARYGGLTGSPDESGKKRREKGLARSGNARVRRGMIQLAWRFLMFQKDSALAHWFYARTKNAPQTRKTMIVALARKLLIALWRLAREGAIPEGIVLRPAL

SEQ ID NO: 317306 - protein, 360 aa, unidentified
MVYIGVDLHRKVSQVAALTSRGELLWNRRIRSRPDEFVRTFGDLAQPPAGVAFEATYGWGWFADLLAELGLPAHMSHPTATKAISAARVKNDAVDARTLAHLLRTNLLPEAWIGPPACREARRLVRTRTALVRFRSGLKCQVHALLAEHGVQLPELTDLFGKRGRQFLERLPLPELSRSCIQADLQMIDGLTLEIQRLDRQLVSLLKDDARVRRLRAIPGIGFLTAVALVAEIWDVDRFSSADRLCSWAGLTPIERSSAGHIHRGHISKAGSRLVRWAMVEAAARAPRHAPHRQFFVRIMHDDLGRRHIARIALARHLLTLCYYALRDEGGCRAYPVNATVAGQGALESVVASVDGRGFD

SEQ ID NO: 317307 - protein, 387 aa, unidentified
MQKAHDNSKVCRAAFVQDSTLVVVIEMALTSWLVAGMIPGVDREPLKKIAPDPEELLQLLYRWRDEAIKAGREITRIAVAYETGRDSFWLARWLRARGIDAHVIHATSVAISREHRRAKTDRIDTAMLRRGFLGWLRGEPGHCSLAIVPTVAEEDAKRPHRERESLVQERTSTVNRMKSILIQFGVRNFNPVLRKASEKLDAVRTPEGIPLPPNAAAALRRHMERLRVIKEQIKAIERTRLQRLQRDPADKMNAMVFLLVRIIGFGVETAEQLVHEILFRDLRDRKAVARYAGLTGSPDESGSKRREKGLSRSGNGRVRTILIQLSWRLLKLQPGSELVLWYQKRTADAKGSRKPMIVAFARKLIIALWRYVNTGLLPEGFELKPAA

SEQ ID NO: 317308 - protein, 413 aa, unidentified
MLKIVYPICCGIDVHKDFVVACIASTDDKNITTYQSKRFSTFSKGLRELSAWLVSNSCKDVCMESTGKYWIPVFNILETSCEVCLAHPKYVKAIRGKKTDKKDAKWIADLFKHDLVASSFMPPPEIRQLRDLCRYRTKLTYMQCSENRRFQDCLTVSNIQLGSVVSDTFGKSSQNIIDKILENPLDTDFDISPLIHGSMKSKLPDLELAIDGFITPTQAEKMKIIKQHFNSLQDSKNNVEKLIENIATPFQGEIELLLTAPAIKNRMTAIQIISEIGVDMSKFPSPKHLCSWAGLTPQNNESAGKKKSVRISKAGCYIKPLLVQCALAATKSTKHSEIRNRYLNLKVRRGHKKAVIAIARFLLSAIWHMLAGGQEYNPELYSYYNQLPTSREITEQQAIALICRQGYKIKKTA

SEQ ID NO: 317309 - protein, 340 aa, unidentified
MRLIGCDLHASQQSIAMLDRDTGEIVAKTLAHEGGAVREFYASIPPPVVVGIEATGSMGWFLRLMEELAIECRVGHPTAIRKAETRRQKHDRRDAALLLQLLAEDRFPAIWMPSTEYRDLRSLLLHRHQWVRMRTRVQNALHAIALAHGVRRGHALWNREGQALLASLPLPPHTADRRSELQALYQHVEAHIDRLDEQVKHVADERPRATLLMTHPGVGPVTALATEVFVGDPARFSDGKALASYVGMIPREYSSGKRQRLGALSKQGNPFLRFLWCEAAAHAVRRDPDLQRFYRRKVVQKGFAKARVAAARKLGIRLWIMLRDQIDYTEFCRRGLARQS

SEQ ID NO: 317310 - protein, 360 aa, unidentified
MKQYIGCDSHARYSVFVSVDEKGQAGTPVRVDHGGRGLRDYLATLEKGTPVAVEASGGWYWFMDELEKAGLDARLVNPLEAKHRMGGKNKTDKLDAKGLAILLRSGTLPEVWIPPAGLRDLRGLMRTRLATRSHTTVLKNRIHAALRRYGVMNDPQDDGEKIADLFSQKSRLVLSVAIGRLPEQTRRATLHEWEMLDLIEGHIKELEVPIREKIGKLGWVRLLKSIPGIGEILGATVYLEIGDVERFPTPEHLASYAGLVPSVHASGGKSWHGPTSPQANHYLRWAFVEAANAILLHRRQYAGQHVIELYDRLKKHKCHGKAVVAVARHLAEASWWILKKRQQYRPPHAQAVAMSASRNG

SEQ ID NO: 317311 - protein, 302 aa, unidentified
MSIVMGLDQDRAQVSAEWIETTTGELSRARIAPADRDTVRAFLHRFAGEGLEVALEATTGWRFVVEELQRVGAEVHLAEPAEAAALKGKKKRAKTDWADARHLRELLLIGRLPESWIPPAHILDLRARVRTRHLLSHQRTEWQQRMHAVLYHHGFPQHRNLLTLEKREWLAGLTLPAAAREQLTIALSVIDAIELKLIPFDEELRAYARKQPGCRELIQAIYGVGGLTAVTILAELGNVRRFPNSRDVVRYGGLDITAYQSDNHRAPGHLSRQGEPHLREARRGHPQGGRGDRPLGGQAVRC

SEQ ID NO: 317312 - protein, 339 aa, unidentified
MTIMIGIDPHKASHTAVAVDAHEQFLDSTRLAASIDQIDHLRRWAAGFDDRVWAVESARGLGLVLSQQLVAAGETVLDVPPVLAARTWLLGSGRSQKNDPNDALSVAISALRHHGLNAVQPEAHAQVLKLMAKRHRDLSRLKNQAMSRLHAVLLDLVPGGLSGTMHPARAREILESIEIAGAMVAHRTDLAAELIDDIERLQSQIAQSKKRLQRVVAESASSLTSIPGVGPVCAALIIGHVGDVSRFRSAGHFASYNGTAPLEASSGDRRRHRLNPHGNRQLNYALHIIAIVQLRCGGPGREFYDRKLIEGKSHKEALRSLKRHLSNVVFRTLVSDSNI

SEQ ID NO: 317313 - protein, 400 aa, unidentified
MEHQLYLGIDVGKTAHHATGLSAEGTVVHDKSLPQSEPKIRELLQDLAATHGPVLVVVDQPKTIGALVIAVAQDLGIEVAYLPGLTMRRVADLHPGQAKTDARDAFIIANTARTMAHTLRGITLTEEDIAELSMLCGFDDDLASQITQVRNRLRGFLTQIHPALERVLGPRLAHPGVIALLARHSSPARLKTAGRGHVRALLKKHAPRLAEKLTEEIFTALAEQTVIVTGTSAAEKIIGRLADQLAQLGAQRVEIETEILTVVDAHPLTQVLTSMPGVGVRTAARLLTEVVGKDFKDAGHLASYAGIAPVTRRSGTSIRGESPSRRGNKVLKRALFLSAFASLSASPASRAYYDRKRAEGKRHNQAVIALARRRTNVLYAMLRDGSFYQEPTPPTVALAA

SEQ ID NO: 317314 - protein, 358 aa, unidentified
MQHKVKELNFGGQNIYVGLDTHRNQTTVTVLGENLHHKTFSQPTAADILARYLKKNFPGANYYAAYEAGFSGFWLQETLQSQGINCIVVNAADVPTKGKERNQKNDNVDSRKIAYALRKGDLDAIYVPSKECQRDRGLLRARQRIVSNQTRCRNRIKALLNFFGIVYPEKFSKSGTHWSRRFMDWLKSVDLGGSGNDTLAIYLEEAEFLRALLAKTMKKINHLSNQERYAKNVKLLISVPGVGRLIAMILLTELERIDRFKTRDSLCNYVGLIPDVYSSDQTVHVGDITQRGNKSLKKFLIESSWIAARTDPALVMKYNQLCSRMNGNKAIIRIARMLLSRIRYILMHEQEYQMAVVA

SEQ ID NO: 317315 - protein, 427 aa, unidentified
MNYNRNKKLKQITPETLVVGIDIAKGKHVARAVDDRGYEFGRKVVFDNNISGFERLMTWANEKMADHGKTHILLGCEPTGHYWFNLAHWAKENHNAFVVVNPMHVKKAKEFDDNSPSKNDTKDAHVIAQLIKDGRYAVPNLPEGVYAELREGMKIRDQLSSDIQMVEGRIDNWLDRYFPEFRTVFKSWRGKAALYTLEHFPLPGEITAMTAEEILEHWQTVVQRAVGKKKAETLQKAAKQSVGLTKGTRMGKRELGTLLQQYHQLQHEMADTDEAIKGLVFTIPGAKEMTAIKGINVMTVANFFAEVGDITQFEHPQQIQNLGGLTLRLHQSGVYKGETKITKRGRKGLRKTLYLAARSLVLHNPYFRKLHDYYKSRSDHPLKPKESLIALCSKLIRVFFVIGTKQCKFDGEKMLSDIPQMCTQEAA

SEQ ID NO: 317316 - protein, 344 aa, unidentified
MKHYAGLDVSVKETSICIVDEAGRICREMKVVSYPEDLLAVLCDPAWRLERVGLEAGPLSQWLFSGLAEAGVPAICIETRHAKAFLKAQVNKSDRNDARGIAQMMRVGLFQPVHVKTLASQKRRALLAARKILQEKALAIENDIRGLLRNFGLKVGIVGVVGFEQRIHDLVEGVPELADIMEPLLAARRVLREKFAKLHRKVLLLARDNEVCQRLMTIPGVGPVVSLAFISTVDVPARFRNSKAVGPSLGLTPVLNQSGESHRVGRISLCGDEAMRALLYEAAQVMLTRVQKWSWLKAWAMNIAKRRGQKKAIVALARRLAVIMHRMWSDGTEFRWTREMAPTI

SEQ ID NO: 317317 - protein, 386 aa, unidentified
MQTVADRPEAPNAIRNDLVAIFVSLELSRSTWLITSLSPDGGEKMSKHSVPAADIYALLARFSEFKQRAFARTGKSFPIIVIQEAGLDGFWIPRVLQNEGIESHVVDPASIATSRRRRRAKTDRIDGEALLRTLLAYKRSEPRVCAMVKAPTPEEEDRRRLCRERKILIAERVKHVNRIKGLLFCQGVSGYKPLRRDRRQRLDELRRGDGGLLPKHLKAQIGRELARLELLLEQIKAVEAERDALFAVAPAPGPPAMLLNIKGIGPEFAAILWSEGLFRHFDNRRQVASYAGLAPTPWQSGSVDREQGVSKAGNPRLRTTLIQLAWLWLRNQPQSALALWFKDRVSRNGGRLKKTTIVALARKLLVALWKYVTAGVVIEGAIVKSA

SEQ ID NO: 317318 - protein, 402 aa, unidentified
MNCVGIDVSKGKSMIAVMRPLGEVVIPPFEVGHTESELCELSKLLGNLDGETRVVMETTGNYHLPVASFLYDSGFYVSVVNAMLVHSYGNNSLRRAKTDKKDAIKLANYGLDHWLTLPRYIPEDDVRLMLKTTYRQYQQCAKVQTMLKNNLISLLDTAFPDANRLFTSPPRADGSEKWVDFVAAFWHCECVCGLSEKAFTAKYQKWCKKHGYNFSKDKALDIYASSCGHFGVMPKTDTAKLLVEQAVSQLRATSAALAALKQEMQSLAASLPEYPVVMEMFGVGPTLGPQLMAEIGDVRRFHSKKALVAFAGIDAPPYQSGQMDVRSRSISKRGSASLRRTLFLVMGVILQHAPMNEPVYQFMNKKRSEGKPYRVYMIASANKFLRIYYASVKAYLDSLEHD

SEQ ID NO: 317319 - protein, 388 aa, unidentified
MQVVADRAAAPSAIQTDLRAIFVSLELSRSTWLITSLSPGGGEKMSKHSVQAGDIAGLLKRFAQLKEKARARTGRDFPVITIQEAGLDGFWIHRVLQSEGIESHVVDPASIATSRRRRRAKTDKIDGETLVRTLLAYKRGEPRVCAMVKAPTPEEEDSRRLCRERKVLTAERVLHVNRIKGLLFCQGISGYEPLRRDRHERLEELQTGDGRLLPQHLKAQVNREIDRLELLLKQIKAVEAERDALLVAGHTPAAVPASMLLNIKGIGPEFAAVLWSEGLFRHFDNRRQVAAYAGLAPTPWQSGAVDREQGVSKAGNPRLRTTLIQLAWLWLRNQPHSALTLWFHERVSRNGGRLRKTTIVALARKLLVALWKYVTAGVVIEGAAMTAA

SEQ ID NO: 317320 - protein, 427 aa, unidentified
MNYTQNERIMQITEKTLIVGIHVGSETHYARAFNFRGMEFGKLLIFRNSAEGFASLREWAEQVANRNGFTDITMGMEPTGHYWFNLAEYMKKSGMRIVLVNPHHVKKSKELDDNNPKKTDRKDPKTIAMLVKDGRYMEPYMPEGTYKELRTAMDSRWRLVQELTSIKNRVRRWLSIYNPEFLDVFKDWEGKAALLILHECPTPTKILEKGVEGIIAIWKKEKIRAVGKKRAEKLVETAAKSIGSCEGLVSAEIELKMLLEDYERKMQQYEKLVVLIESLALEIRGFDKLLGIKGIGLITAAGFVAEIGDVSRFSHPKQIQKLAGLSLKENSSGKHRGKTTICKRGRKRLRYYLTFGIMPLLSKNEEFRELHHYYTMRKENPLKKMQSLVALSNKVIRVFYALLTKNVAYDPQKMLSDIKREEVLKAA

SEQ ID NO: 317321 - protein, 351 aa, unidentified
MEYIGMDIHKNYSSVAVTDERGDLVDRCRIDHRHREELVGYFNRFPSKTQVVMEATCGWGWLSELLQDLGLEVKLANPSKVKIIAESQIKTDKVDALVLAQLMRTNFLPEAYLAPKEQREARDLLRYRISLVHLRSGVKNRIHALLTRLGIYHTYSDLFGKAGRSFLSSLELSPVHRQALDGYLCLIDTTNELIGKAEVKIRKVVKESEDGKRLLTVPGIGFILAYLVLVEIGDINRFSSHKKLCSYAGLVPSVYQSGSKSYQGHISNRANRYLQWGMIEAAQKAKVIDPFMRRKAEIIASKKGASVATTAIARHLLVALYHILKEKSVYQSPKLRYNLSGKPVDRLVAKS

SEQ ID NO: 317322 - protein, 345 aa, unidentified
MEFYVGIDVSLQESSVCIVDRDGKVVRERKVMSDPDALVHALREDGCAAARIGLEAGALSGWLHDGLKEKGFDVVLLETRHVAAAISAMAVKTDRNDARGIAQMLRLGWFKPVHAKSAGAQEIRALLSARKLLTRKRADIDIGMRGILRAFGLKVGRVSRGRFDERLRELVAGNAMLEKAIGAMLEARNAMVRELIELHRTVLRLTRESEVCKRLMTVPGVGPVASLTFVAAVDDPHRFRSSRSLGAHFGLTPRKYQSGEVDLTGHITRAGDASVRTVLYEAANALITLSVKPSGLKSWAMRLVKRRGAKRAKVAVARRLAVLLHRMWIDGTDFDFGVGRMTPAA

SEQ ID NO: 317323 - protein, 372 aa, unidentified
MNYNTVYVGMDVHKESFTLCSCKYEDEKASHYQRTPASYKNVLRYLAFLRTIYGEDTRFVCGYEAGCLGYSLYHQLENFNVECVILAPTTMLEQRSKRRIKTDKRDAEIIARSLAQHNYSPVHIPTETDNQTKEFIRMRDDHKAELKKIKQQILAFCLRQGYQYDGSGNWTAKHVKWLRSLKPAGLYKEILDEYLLTYTILTDKLNRLDQRIEELASKEEYKESVSKLTCFLGIKTHTALSVIVEVGDFQRFVSARKFAGYLGLVPGQHSSGDDRNGLGITKAGNTHVRRLLVESAQSYTRGKIGYKSRVLRSRQAGNSPQVINYADRANERLRRCYYKMVLKDGKKYNIAKTAIARELACFIWGMMTDNIY

SEQ ID NO: 317324 - protein, 378 aa, unidentified
MDKDSGEVLLQPSSFSNTKDGFDSLIQKLSSYSKDSILIGMEDTGHYYFALLKYLLEKNFTVALINPKTTDYTRKMQNGITKNDKLDTLTICDVLDTPVRKKQYRITKVNSFDLYEQKQLTRHHHNLKEELNVYTNRLQKCIDIVFPEFNSLFSSKYGIIYMNVLKTFGSAENIASTDIRTIRKCFEIKGRGNRISLTAQQLKDSAKSSIGISSAAEVIKIKHLISQIELINEQLAETDKKIEEFSIQNNSPILSIPGISHFSGTSILAELGEISNYSKPSKIIKAAGVAPYHYESSQYDAQHTAITKKGSPYLRKTLYQILLPVINNNNPVFKQYYDLKISQGKGHHCACGHCVRKLLRIIYHLSSTNQQFDDALLR

SEQ ID NO: 317325 - protein, 402 aa, unidentified
MNAVGIDVSKGKSMIAVMRPFGEVVVSPFEVRHTDSELSELAGLLKSLDGETRVVMEYTGNYHAPVAYALHEAGIYVSVVNPMLIHDYGNNSLRRAKTDKKDAVKLACYALDHWLSLPEYLPEEDTRLMLKSCYRQYKQYVKLKTMLQNNLISLLDLSFPGVNSLFSSPPKADGSEKWVEFIAAFWHCECVSCLSPKAFTQRYEKWCRKNSYNFSEDKAAEIYTAACGHIGIIPKTDTAKLLVEQAVLQLRATSAALLTLQKEMQALASSLPEYPVVMQMFGVGPVLGPQLMAEIGDVRRFHSKKALVAYAGLDAPPYQSGTVDVRSRSISKRGSSSLRRTLFLVMSVILQRSPENEPVYQFMDKKRHEGKPYKVYMMASANKFLRIYYAQVKAYLDALEDA

SEQ ID NO: 317326 - protein, 317 aa, unidentified
MSTSGSFIGIDIAKTQLDLAVHGAGAPWQVAYDSAGLNQVVTQLRTLAPTLIVVEATGGLETRLVSALLATSLPVAVVNPRQVRAFAHAAGILAKTDRLDAQVLAQFAATMQPTPRPQPDAATQQLSAVLARRQQVVDMLTAEKNRLSQQLESALRKRLRAHITWLTKELERTEQELTQLIQQSPAWRAQDELLQSAKGVGPVFSQTLLAEVPELGQLNRKQMAALIGVAPFNRESGGYRGKRRIWGGRARVRAVLYMGALVATRHNPVIKAFYERLLAAGKEKKVALTACMRKLLTILNAMIKQQTKWQDIHMSAH

SEQ ID NO: 317327 - protein, 321 aa, unidentified
MYFLGCDVSKRKVDVSLVDERGVELFVDKVPNTATDIASLLLTLSGNYPESEIRCVVESTGCYHHPVTEAATAVGMSCQVYNPIITKQQIKATVRGKKTDRTDALIIARLGLRGEGLLYTPEPYMTAKYYARGQQKLGQLGGAYKLYEAHLTSLLADELSPEVLAALEQIQAAIRLAKHQLAADTVAAAPKDLVGLLKTIPGVGPYVASSLIGEIQVMKRFKTAKALTAYAGLDPKIRQSGHTLNSTGRLTKRGSSYLRRSIFIAASVARQHDPNFKALYDKKRGEGKSYTVAVCVVARKLLAIVRAVWLSGSPYDVEQAH

SEQ ID NO: 317328 - protein, 338 aa, unidentified
MSYYVGIDLHSDNNFIGIIDKKDCRILSKKLPNDLNVVLNTLKPFKRKIKGVVIESTYNWYWLVDGLMDKKYKVHLANPSQMQQYSGMKYTDDKWDSFWLAHMLRLGILPEGYIYPNDIRQIRDLLRKRMMLVQHRTAYILSLQSLVNRNTGRKLKSNETKMLGEGELNIMFSDKYLVMSAQSNCNVMEFLNGQIDAIEKAVIKEVKLRYPFDKLLTVPGIGNILGITIMLESGDMNRFNSVSNYSSYCRCVSSKKVSNGKKKGENNKKNGNKYLAWAYVEAANFMRRYCPEARSWHQRKVSKTKQIVATKALSNKIARACYFIIKDQTDFDTEMLFR

SEQ ID NO: 317329 - protein, 319 aa, unidentified
MFQITVGVDIAKKKFDVALLMESKYKHKLFTNDEAGFEAFIVWLLTFNLLSRPLICMEATGAYSQPLADFLVAKGYPVSVVNPAKVKAFAQSELSRAKTDKADAKLIARYALSMQPGLWTPPPPAIRRLQALTRRIEHLLEIQQMERNRLDTADESITASINSLLNTVEDEIKTIRQAINDLINDNPDLDNRRKLLESIPGIGSSTIAHLLIALSSHQGFTNAKQVVAFAGLAPYLRESGPWSGKTRIAKSGDPILRKALYMPALCAWKHNPVIHDFCERLKANGKNGKAIVCAAMRKLIHIAFGVLKSGKPFDPLWAK

SEQ ID NO: 317330 - protein, 368 aa, unidentified
MEQKERRFVGIDLGKTKYTIKVILSNGKVIGWEGKTTPAGRNDLYKQLLPTDRVGIEVCSLAMKMVREMNEKVGCDIALMYAHQLAVIYNSVKKNDKENALKLARLVQKNSNEELPVVSLPSEQETKRRNLLTENKELKQSRTQEINRLHAIFLRCGYTEVVKKNLATKENREEIFCLLKGFDLEQARRIMHRIDIIEEDINTVDSEINNEVKGDKRIELLESVPGVGMLTAMAFVAYIGDGSRFHSAPQVSASIGLVPKIDMSGSINRYGGISKHGCGYLRSLLVMASWSLIRSKTDSALKLKYNYMVKFQSKNKRKAIVAIARKLAELLYIMLRTGSKFEVRPFRKSSTKELAECAINQKEESGAA

SEQ ID NO: 317331 - protein, 458 aa, unidentified
MAKKAKKIKTKKGLRLEVVNPNAAGIDVSSTEMQVCVPEDRDGDNNRRFGSFTCDLHEISAWLKACKIDTIAMESTGVYWVPLYMRLVADGFDVLLGNAKAIKNIGEKKTDEVDAEWIMLLHSYGLLKASFQPCNYAREIRNLTRHRDNLLRTSSKEVQHMQKYMVLMNIKLANVISDILGKSGQDIIRGIIEGERDPKKLALLADPRCKASKEEIEKSLEANWDENLVFTLKQAYDLYHYIQKQIVDVDKKVEVIINKYKADLPQEMVKKKECVRSNKAEAAKNKVSIDIEQYAYELWGVNLMHIPGINKGSLLKLIGELGHDFISKFETFKEFCNWANLAPNNKISGGKKISSKVPKRKNPVGQILRVAANSLQNEKSSLGIYFRKMQARKGRQPAIVATANKIGRVIYTMVKEKVEYDASLGQNKQVDILKKKLNRTQKELEKLQKQISVCKEAA

SEQ ID NO: 317332 - protein, 331 aa, unidentified
MKFTETIGIDVSKLTLDACIHGQQTLIQVPNTKHGHLKLLSWAKKCTGCSIENILFCFEHTGIYSFTLAQFMTEMKLNYILVPGLEIKRSLGIQRGKNDQIDARKIAQYAYRRRDEVTTYKAPDKSINKIRQLLSLREKLVKQRSEFLSTLKDQANFIKESKNKLLFSIPQKLIKELNKQIENIEKAVNIVLEENPEIMDNFKLITSITGIGRQTALLLIIVTNNFLRFNDYRKLASYAGVAPFPYTSGTSIKGRTKVSPLANKKLKSLLSSCAVSAIRADPEIKIYFTRRTESGKHKMNTINAIRNKLLSRVFAVVKRRTPYISLYRYAA

SEQ ID NO: 317333 - protein, 426 aa, unidentified
MIPAVVERCAGIDVHKRFVTVCVLIGPAHLEPEPQRRRFGTCNGELWQLRDWLLEKKCQQVVMESTGPYWRPVFNVLEEAGLEVVLANPQQVKNLRGHKTDMKDCWWLAHLLRHGMIRPSYIPSRAIRELRDLTRRRKQLIRNGAMERNRVQKVLEEANIKIGSVLSDVFGASGQDMLLALVEGKATAQEIAQLAKRQARKKIPQLQAAIEGHRMTETQRQLIRQCMSHMAFLEQQIEEVDQQIQEKIGAFQFSESYGLLQTVTGIKAEAAATVLAEVGDTVAAFPSAGKLSSWSGVCPGNNESAGKRKSTRTTKGNPYLRDALLECAWAASRKKNSQMQHLYRRLEHRLGHKRAIVAVAHALAQAIYQVLSTRRPYVDSAEPPRSATKVNRLIRHHTRRLRKLGCWLQQTTQQLQRSAEQHQRLT

SEQ ID NO: 317334 - protein, 341 aa, unidentified
MDKELYFGVDVSKKTLDLAYYDGETIDWKNAHIKVSNDDAGFKKIGSWVAKVGKDFDTFLFCLEYTGLYNQNFRLWLESKEYIYSMVEPRKMHRFEPDLDDDQRSLDRIKTDELDAFRIAIYCEQNHKKILRNPSKLPSPVYFKLKRLLAERKQNTKQSVLYKQQLHDICAYDTDLSVERKKLLLKNMKENQKAIDKEIDSYMNEDASISKNFNLLSSIPGIGRIIALETIVLTENFTAINNPRKYACYIGIAPFKKESGTSVRKKTGVSKKGFSEAKADLSIAVLSAIRNNPSIRDYWIRKRKEKCGGIVLNAIKFKLVLRMFAVIKRGTPYVETDAYKN

SEQ ID NO: 317335 - protein, 410 aa, unidentified
MEVLYPRCAGLDVHKKTVVASVRLATENKLVTEVRTFGTTTPGLLALSDWLLENGCTHVAMEATGVYWKPVWHVLSDGEIELVLANAAHVKNLPGRKTDVSDAAWLAELMAHGLIRASFVPDTQTQELRALLRTRKQLVRERTRHLQRTHKALEDANIKLESELSDLLGKSGRSILDAMIAGESDPVRLAALAHPNVKCSQASLQEALRGRVTRHHRFLLKLHLGQIDGLDTAIETIDREVEDNLEPFRTAAELVSTIPGVSSLSAEGIIAETGIDMSRFPTDGHLLSWANICPRNDQSAGKRRSTRMRKGGNWLKTTLIQCAWAAKRKNGSYLQAQFFRLRARRGEKKAICAVAASILTAVYHILKDGTPYQDLGADHFQRRSKMTNTQRLVRRLEHLGYAVEIKPLAA

SEQ ID NO: 317336 - protein, 471 aa, unidentified
MRRPYPTAGQFLPLAPGSPGGTASQAKQPETGRGGGRVDEVSDEPLYRDRVCGIDIGKAGMVATIRVPSDSNPARRAAETRSFGTTRREVLALADWLRCWQVPAVVMEATGDYWKGPFYRLEAEGFECVLADARQVKNLPGRPKRDPSDSRWLAACFERGAVTSCFVATGEFRVIRLHTRYRRDLIEERTREKQRAEKLLESAAIKLSSVVTDLHGVTGRDIMDHLIAGERGPKVLAQLARGRARRKLCELEAALEGAEFFTAEHAALLAAMLERIDGLSAQIGKLSEVIERLVAPYEEQLQQAESMPGWGRRAAQDAIAETGVDMSRFPSGAHLASWAGRTPLDNQSGKRKGKARSRKGNRYLAGITGETATAAGKTQTREGARYRRLARRRGKAKAQVALGNTQLKVYHKLLSSPGARYADLGPDYYERQASTRRQIAHHVGKLGALGFEVTLCRIPAPEDQAADTPAA

SEQ ID NO: 317337 - protein, 391 aa, unidentified
MIFVGIDVAKDTHYAAVSDDSGAVLVKPFAFQNNAEGFCLLLKKLSEFDRSKLLIGLESTGIYSENLICFLYESGFRLAVINPIQTATLRKTAIRKTKTDKVDTMLIIKSLMVNSYRLYSQRDADSLKLRTLCRFRQNLKNSKARMKIQLAEYVNLVFPEFGKFFKSGIHIAASYALLKKYSSPKEIAALRTSTLCTLLSKASHGRFGKDTAEALKSLALSSVGVKNPYISIQIAQTIAQIELLEQQIKDLNSAIEEAMESINSVLMTVPGIGAVNAACILGEIGDIKRFSKPCKLLAYAGLDPTVRQSGQFTAKSTRMSKRGSALLRYALINSAWQLTLNDTTFKAYYDLKRSQGLNHYGALGHVAHKLTRVIFKLLTSDTPFNPAKLVA

SEQ ID NO: 317338 - protein, 350 aa, unidentified
MIIIGCDYHPSFQQIAFVDTETGELQERRLQHREEAEKFYRELAAQGMKVRVGMEASGHARWLERLLSELQLELWMGDAAEISARRVRKQKTDRQDAQLILQLLLEDRFPQIWVASWENRDLRQLLWHRHRMVQARTRIMNQLQAVALNEGLRSKKRLWREAGREQLEGFRLAPWASHRRRDLLELLDRMNPTIAKLTQAIDVEVEKCPAARRLKTHPGVGSLTALAFVLIIGKADRFQCGKQIASYLGLVPLEKSSGNLRRLGHITKQGNSLLRFLLVEAAQVTARSLPEWRSKYVHLTMRRGRKIAKVAMARKLAVRLYWMMRKEWDYEQLRKFGSHAGKPGTGDGVK

SEQ ID NO: 317339 - protein, 349 aa, unidentified
MSILGGLDVHRAQITFDWVDRDSGEARRGRITPATRAGVGAWLGELPGAGGGFAVEGCTGWRFVVEELQAAGLVAHLAEPAETSSLRGPKRRAKTDRTDARLLRELLEQDRLPSSWIPPTWILDLRTTVRLRKTLVDQRTAWQQRIHAALFHHGLPRPTQELLSRASRAWLEQVTMPPASRQALAVALRQIDGLDAELDPIDQWLRALARRQAGCRALMSHHYGIGAITAPTILAELGDARRFVGGDQVVRYMGLDITVYASDGKRSPGHLSRQGPEVLRWALFEAAKAAARPSSPDFAYYQQVKARQGGNRATLAVARKLARRVRHTLASLGDAALAPVEDLAVAEAA

SEQ ID NO: 317340 - protein, 415 aa, unidentified
MEIVYERVAAIDVGKKEVAVTVRVPGQISGTRAQQTRKFRTFYQVLRQMVGWLVDHGVTHVAMEATGVYWKPVFHALCEADTLEVVLVNARHVKNVPGRKTDVKDSEWLAQLLECGLLRGSFIPPKEIAAIRELTRYRKKTIQARTRELQRLSKVLEDAGIKIDSVASSITTLSARDMIEALIAGERDPRVLANLARGTMRTKIPDLTMACAGRFADHHALLARLHLDHVDHLTSMIEGLDERIEQVLAPFAEQLRLLRTIPGIGTRAAQVLISEIGVDMSRFPTAAHLASWAGLCPGNNESAGRRISGRTRKGNAEVRDILTECAWSAGKTGSYVGAQFHRLHRRFGKTGGGKAAVAVAHTLIVIIWHVLHDQSEYRELGHDYFTRRDNPEAAKRRLIHNLEALGYRVELTATA

SEQ ID NO: 317341 - protein, 405 aa, unidentified
MFTNLFLLPLSLKPLPGVDPSYQKKRFSTFNNSILQFKNWLIENQCRDVCMESTGKYWVPVFNLLEDEMNVTIANPKWVKAVKGNKDDTKDSKWIGDLFRLGLVQGSYIPCKPIRILREFTRYRYKLTSCRTSEKNRYQNALTVCNVALDSVVSDIFGKSATSVIDCLIEQSGNSINHEEIASRLLRSLKKKSDSVIESIEGYQMTDPPKYRMRLVRAHLDYITSTINDIDTMLDSLIAPYENAVQLLCAIPGVDRNSAITVISEIGTDMTPFSNSKRLCCWAGLTPGSNESAGKKKSVRITRAGVYLKPALVQVAHAAVKSDKSPYYKQKYERIMKRRGKKRAIIAIDRMILTAIYQMLSTGEAWNPTDLYKTDMPEPLKEKQKKKAIKQAKKLLIREGILSES

SEQ ID NO: 317342 - protein, 340 aa, unidentified
MNEITTVGLDLAKNVFQVHGVDAEGTTVLRKQLRRAQVLAFFSRLPRCLVGMEACATAHYWARELRTLGHEVRLMPAQYVKAYVKRNKNDAADAEAICEAVARPTMRFVPAKTAEQQAAVLLHRGRERLVRQRTMLVNALRGHLAEFGVIAPQGLRNVGRLIAIIRDEKDARLPGLARQVLQVLAVQIEQLEAAIAALEKQLMGWHKSNPVSQRLATIPGIGPIIATAIAAMVAEPSGFRSGREFAAWLGLVPRQNSTGGKNRLGGISKRGNQYLRRLLINGASANLLRSKATNADPWVIGLRRRRPSLVVAVALANKTARIAWAVMHREENYQRMATAA

SEQ ID NO: 317343 - protein, 335 aa, unidentified
MKALSKPERLVGSKSRIEHKEGSNNMEQFVGIDVSKAWLDGEAVPQSRPMRYGNDSAGIAALVSALVADPPALVVLEATGGFETEAASALAAAGVPTVVVNPKQVRDFAKAMGILAKSDRLDARVLALFGQRIRPQVRPLPSPEQRDLAELLDRRAQLVSMRAQERTRLATALAVAKPSLREHIQWLDARIGELEIDLTARLRTSAAWKVKVDLLKPVPGVGKVLLFTLLARLPELGHLNRCDIAALAGLAPFADDSGERRGQRFIRGGRSEVRKALYMATLSATQHNPAIKPFFARLTAAGKPFKVAMTACMRKLLTILNAMLKTNQPWQPRVA

SEQ ID NO: 317344 - protein, 435 aa, unidentified
MRREQVSVFRERGLRHDECRGAEPQCLVANSNKERKTDTMKSYILRPTEPVQSQITTLLVGTRSPVLFIGLDVHNDSIAVSLAPDDSTEVRRYGIIGGEHDDVLKLVKKLQAAHPGASLKLCYEAGPRGFALCRCLRTHGLDCILVCPSKVPRKPGERVKTDRRDADQLARLYRAGELTGIYVPEPADEAMRDLIRARYQVGQQQHRARQQLKMYLLRHNLRYAGNSSWTPAHLRYLAQIKMPFPVQQIVFQEMLEVISEATERLERYDQEIERAVPGWRWEPVVQALMSLRGMALLHAATLVAELGDFNRFEHPGQLMGYLGLVPSEHTTGNDRQQGGITKMGNAPARRALVEAAWQYRAPARLSPHLKKRQEGLPKTITDIAWEAQRRLHHRYTHLTRVGKKKSQVAVTAVARELAGFVWAIARQVKPHAAKP

SEQ ID NO: 317345 - protein, 310 aa, unidentified
MDSDSVFVGIDISKTTLDVDSYPVNEARRFLNDDASRENLCEWLIARKPTLIVMEATGGLEMPVAALLAAAGLPVAVVNPRQARDFARAIGVLAKTDAVDAIVLARFAQAVRPAIRELKSDEAQELEAVLTRRRQIVEMITAERNRQLKAQARIAKQIKGHIAWLEKRLDEANGDLERLIKNSPIWKHKSELLTSVPGVGRVVATTLLAELPELGTLNRRQIGALVGVCPFNRDSGARRGKRLISGGRSSVRAALYMAALAATRFNPTIKVFYKHLVDAGKHKKVAIVACMRKLLITLNVMIKTDTAWKY

SEQ ID NO: 317346 - protein, 348 aa, unidentified
MATTYIGIDLHRTVIQICVLDEQGEVVREERISYHSLAEGLRAVEAVKGFAPGCRVAVEALGLNRWFVNACQAAGLDVLVCDARKLGLRKLGKKTDRRDAYEIARRLRLGDLDRMARTYYPSDAEYGRRKLLRVRHYLVQMRQQTTNQLRAMLNAYQIEAPRCELYSGPSQAKLAALRLPEPELQAAFDALRAVLERIQAEIRALSRRIDALPRQEAEIRTLVAMLPRIGAQSAATLRAEIGDARRFRTARAVAAYVGLVPTVAQSGDVAHHGRLTKQGNRELRWILSQWAVRLISFDPLVADWAARKGRRMHRNKVRMALARRLLVGVWITLSRGEVFDLRRCLGLA

SEQ ID NO: 317347 - protein, 419 aa, unidentified
MSKSNIARQLAQVQPRTLHAGVDLALEKNVVVVINEKAERLDHFSFPQDRGGYDYFLRRLEGLRQKYQASEVVVAMEPSNYFWKLLARELEEKKITYHLVNAYTVKKHREGDQLDRSKDDRRDADQIAELSRNGNYTETHLQKGTYEDLRQYATLHDQLVQGIRREKHVLWGLVGQAFPELSQVFKNLVGETGQALLMACASAVFIRQLSVEDFIAQVRAAYSGKKLHVSKLRRAHQLAVSSIGVTEGLGAIQLAIQLHLVELQTFQKQLKRVTNAMTTCLATLPEAPYLLSVKSLQTVSAAIFLAEVGDPNRYQTAAQWVKLAGIQPAPNISGKKQRNQTPMSHQGRARLRTMLFFTCLRLVQQDDHFAQIYAHLQRRQNNPLTKMQALGVLMNKLLHILWALIHNQTFYNPSFGQSI

SEQ ID NO: 317348 - protein, 426 aa, unidentified
MTNSLFIGVDVSLQSNQICVVNFDQHKFFNLKFSNTPDGCEEAINRIKDIYDKFYFDKIIVVCEATGMYSFHLACYFSSHEYLNNFNTEVYQINAHDFAKYKDSFPDVEKTDPSDAYILADFARVGRTKQLHPFRGSQHIALQRLTRQRYHISKNLVKEKLYVMNNIYLSFSGLIIANKKNKPFSNMFGATSCAIFDNFDSPDQIAETPVDDLLDLISKVGKNRTKNPNEKIDLLNKAIRSSYRLDQTAYNGINIAVASSLNTIRFLENELKQVDKAILDTVSGLNSNAYNSLLSIRGIGKVYAAGILAEIGDINYFKHNSNLAKYAGLYWNRTQSGKFEKEDKKFSQHANKYLRYYLIEATASCVRMNFPFIKNFYDSKFKEVTKHQHKRALVLSARKLVRLIFGLLRKNQYYSPIDSNTQSLIN

SEQ ID NO: 317349 - protein, 352 aa, unidentified
MLIIGCDFHPGFQQVAIFDNLTGEIEEKRLQHRAEAEQFYRALAGQEVRVGMEACGHYPWFERLLAELGIELWLGDAARVRASVVRKQKTDRRDAEHLLQLLMEERFPRIWVPSLEVRDVRQLLVHRHKQVQARTRTKNQLQAMALSCGVQRKRRLWTKAGRAELEQLALLPYASERRKRLLEALDGLEAEIGELDRRVAEEARERPEAVLLMTHPGVGAVTALAMVLTLGPAERFGSGKQVGSYFGLIPSEDSSGGKQRLGKISKQGSSFLRFLLVEAGQTAARYDPQLKRFYRRLAVRKNRSVAKVAVARKLATRLYLMLREDWTYAQLCQAVMQVSPSHSVAGESEPSA

SEQ ID NO: 317350 - protein, 342 aa, unidentified
MTPTVPAYDLFVGGDIAATTVAVAWQRQGAPLSRPLTIPQSPAGYATLRERLHASGVPPARTLIVMEATGSYWITLATTLHQAGYAVSVINPAQAHAFAKALLKRAKTDAIDAQTLTQLAALLQPAPWTPPPAVYHELLQRLAQRDGLLDLRQQVRNQRHALLQHPTVVAAVRERMETLIATLSAQIAAVEAELVPALEQDAAWAAAAARLQTIKGVGLLTASWLLVTTVCFTTCPTPEAATAYAGLAPNERSSGTSVYQRPRIGHTGNARLRTALYMATLSAAARNPVIKPFYDRLRAAGKPMKVARCAAARKLLHLAWALVTKEQDFDPRYAQRQPASAR

SEQ ID NO: 317351 - protein, 359 aa, unidentified
MVMIGTDSHKRTHTVVALDDIGRRLDELTVAATTDGHLKLLAWSRRWDQVSFALEDCRHLTRRLERDLLGTGARVVRVPTRLMAGARRGGREPGKSDPIDAEAVALAALRHDGLPIAELDGPAREVRLLVDHRRDLVAERTRIQSRLRWYLHELDPTLAVPSRGLRRFCVMDSLAKLLAEHDGVLARVSREQLARCRELTVQINQLERELRILMRRLAPTLLALPGCGVLSAATLFAETAGARRFRSKDAYARFTGTAPIPVWSGNTAGKVRLNRGGNRTANCALHMIALTQTRGIGPGAAYVEKLLAAGKTRTEALRLLRRRLSDAVFAALRADEPPTTLRCADENDTSTDNELLAAA

SEQ ID NO: 317352 - protein, 374 aa, unidentified
MAEFNKYIGLDVHKEKISVAVADQGRRQPRYWGEIENRPEAVKRLLARLSAVGERLRLCYEAGPCGYELYRRIVAAGHDCAVVAPALIPRKPGERIKTNRRDSLSLARLDRAGELTPVWVPDAEQEAMRDLSRAREDMKIIDKQLRQRLNGFLLRQGRIWSGRGRWTQAHWRWLETQRFDSPYQQIVLEEYVEAVQAAQQRTAELDKQLQEASESWSLRTAMQAAMALRGVDRTAAITLLTELDDLSRFENPCQLMSYVGLVPSERSSGDRRRQGKLTKAGNAHARRILVECAWAYRFPARKTALIQRRAEKAPLAVQAISWQAQKRLCGRFRRLQARGLSTPKTVTAIARELCGFLWAVVCEAQRPGTFSAPA

SEQ ID NO: 317353 - protein, 366 aa, unidentified
MKKGTTFVALDDSKRKLVVGILQPGAEEPEVREIPNEAKLLRRLFERLRREGPVAACYEAGVSGYDLDRQITGLGVACQVIAPALTPRRPGQRIKTDTRDAKKLVRLVRAGELTAIRVPAEAEEGVRDFVRCREDVRRDVGRWRHRVVKFLDRHGRRYVAGRNWTGRHWTWLRSQRFEIPARQRTLEVSLFTLEQALARQAELDREIEALAQSEPYREPVGWRRCFRGIDTLAAMILLVEIGDFHRFQRPRELMAYLGLGPSEHSSGERERRGALTKAGNTHARRAVVEAAWHYRPRPGLGRALARRSEGQPDACRGHAWRAQQRLHRRYRHLVGHGQRPPGAVAAVARELVGFLWAAMTHRPLVA

SEQ ID NO: 317354 - protein, 372 aa, unidentified
MKSTTKFIGLDVSKEKISVAIADEGKDKPRYYGTIAHAPAALRKLIKELGPASSLSFCYEAGPTGYETYRWIESMGAHCVVIAPSLIPKRSGDHVKTDRRDAEQLARLFRAGELTPIYVPAREDEALRELVRARESAKEDAHRARQRVLKFLLRHQIHPPEQLKRRWTKKYRVWLGQLTFPNAPMQIAFTEYLHAMDEIEQRIGRLEKALIEEAATSSKADLIQILQSLRGIGFLTAITLAAEIGSFARFRSPAQLMAYLGLVPREHSSGVRTQRGSLTKAGNGRLRRTLIESAWSYRHRPAIKGDLARRLEGLPADIQLISWKAQERLHRKFRRLVYGLNKHKNVAVTAVARELTGFIWAIARTLELPNAQ

SEQ ID NO: 317355 - protein, 403 aa, unidentified
MNSVGIDISKGRSTIAVMRPFGEVVISPFEVRHTGSELSKLAKQLKSLDGETRVVMEATGNYHASVAKLLHNAGLYVSVINAKLVHGYGNNELRRVKTDRKDAVKLANYGLDRWLTLPRYIPEEDTRLLLKNCYRQYRQYSKVQTVLKNNLISLLDTVFPNANRLFSSPIRGDGSEKWVDFVAEFWHCRCVSEKSERAFTSKYLRWCRNHGYNFSEAKAHTIYAEASGHIGVMPKSETTKLLVEQAVAQLRATSTALAALKHEMQSLASQLPEYPVVMDLFGVGPTLGPQLIAEIGDVRRFYSKKALVAYAGLDAPPNDSGDVTGRHKSMSKIGASSLRRTLFLVMSVYLQTAPLDEPVYQFMDRKRAEGKPYRVYMMASANKFLRIYYATVKAYLESLEHTA

SEQ ID NO: 317356 - protein, 367 aa, unidentified
MKKLTTTMMQQTLNKQDRCLTVGLDLGDRSSFYCVLDEAGNVLMEQKVSTTPKAIKEIFGAMPRSRIALETGTHSPWVSRLLSELGHEAIVAHARSVRLIGESRRKDDRLDAMTLARLVRIDPHLLCPVKHRSAEAQADLTVIRARAALVRTRTMLVNAARGLTKSYGERLRGCNARGMNPKAAQDLSPELKYALEPMMLEIESASERICEYDQMLESMARDRYPEAELLKQIKGVGTLIALTYMLTLEDPYRFRKSRDAACYVGLQPGRRNSGQSEPQMHISKEGDPYLRALLVQAAHHVLGPWGVDSDLRRWGMKLAEHGGKRGKKRAVIAVARKLAVLLHRLWVSGDVYVPIRPGGRDTLPAVA

SEQ ID NO: 317357 - protein, 379 aa, unidentified
MNGPIYEQSVIVGVDAHKYSHTAAAMDAWGQEKGRLNFTNDSLPDCLSWLKTLGRREDVIVAVEDANSYGCHLVAALAGQKFAVRSVPAVLTERDRRHSTQRDKSDFRDAKRVAKVILSKYEETLPVIASLATSAELAIATELNLLLSERRDVVKECTAIKNQLHSLLHQYYGDHYADEFSKAFNKQAMIFYQANLAQAISVDSLSASKAGKALIAESILRRIQRLKLLQEQSAVILKQITKIGETSKPVVALHENIHGCGLLTAGAIMAELVTIRRFGGRDKLAKYAGIAPTLKSSGSHHRLYTNPFGNRLLNKALHTIALSQIAIKGDDRGKIYYRKKLKEGKTKLWALRCLKRRLINLVFRILKQTEVGSAETAIS

SEQ ID NO: 317358 - protein, 342 aa, unidentified
MYYIGVDVHKKTISYCIKDASGQVHREGTIGATRNELDVWIRTLPEPRMIAMEATIFTGWIYDHLLPHAEEVKVAHPLMLRAIAAAKKKNDRIDAGKIADCLRCDFLPECHMASTEIRDRRRTLRYRNLLVRQMVQMKNRISGLLMETGVIHNKQRLHKVGYFRELISNNEEVHENIRPLLRLSRETIVRCQKTEYALVSSLERDPLLAERIKRLRTVPGVGPITALTWALEIGDVARFRSVKQAISYCGLCGAEKSSADKVLRTPLSKQRNKHIQHVLVEAAKLAPRQSHELALIREREMQKGNRNRATLAVARKMVAYLLAVDRREREFVPAEGHTTAAA

SEQ ID NO: 317359 - protein, 343 aa, unidentified
MQRVTTIGLDIAKSVFQVHGVDAIGNVVIRRQLKRRYVLAFFQKLPPCLVGIEACASSHHWSRELQARGHTVRLMPPAYVKPYVKRQKNDAADAEAICEAVTRANMRFVATKTPEQQSCLMLHRTRHLFIRQQTAVINAIRAHLAEFGVVAPVGRRGVAELLDVVAASSEERVPEVARGCVAALGVQLRMLKAQILEFDRQIMAWHRSNETSRRLDEIPGVGPALATALVASVADPKAFRSGRNFSAWIGLVPKQHSSGGKDRLGSISKQGDRYLRSLFTAGALAVIRYAKIHGTRHRPWLAALLARRPTKVAAIALANKIARMAWAMMVKGERYKEPAALAA

SEQ ID NO: 317360 - protein, 366 aa, unidentified
MSSLTQSSGPIHLGMDTSKNKIAVGILRWGEQIPDVEMIINEEATIRRLVDRFPDRSQLRVCYEAGPTGFGLYRLLRSMAVACDVVAPALIPKAPADRVKTDRRDCQRLARLHRAGELVAIRVPTEAEEAVRDLCRARADLVGDRTRTRHRLSKFLLRHDRIWRQDAWTVKHEQWLTGQRFGDPALRSTYGHYRAVLAARDAELAAIEADLAHWYTHGPFADAVTRLAAYRGVARLGALTIASEVGDWRRFPAARTFMGFTGLVPSEYSSGESVHRGRITKAGNAHLRTQLIESAWAYQHRASLGAVLRRRQDGVDPATAARSWTAQQRLCARFRRLSSRKTSRNIVTVAIARELAGFLWAEMTAA

SEQ ID NO: 317361 - protein, 523 aa, unidentified
MPVTRSRKRSSSRRPEVLQKPRGVIHPRVQKVGPEHFGIVSVDCAKARSKWMLCDFYGNVLVPPTVVEHNRPALTAATTQLRQAMARHDLRDVIVAIERTGRYHHATQRAFAAAGFEVRIVHPFATKQFRQASDPGTKTDDTDLVAIHRAACSGFALIELPRDDHWKELQLLIRYRRDLVFKTSALCAQIREHLEAALPGYATCFYNLWIRACAFPLVRAFGSAEALLQAGLRGLSEVLRQQHVRYQERTLQRVLAWAEQAARSDQAAALHLRVALRLEDDRQQKSLEILGLERDIASRLVRTPYVLLLSFPGINVVSAADFAGEMGPIGNYANSRCITGRAGLRPARYQSDQVDRPNGPLVRCANRKLRAAILGIADNLVCCNRHFNVLALRWRAEGKDPRHTRVKIAQRFCRIAYQMVAGGQVFRHPCLQQRSYILDKLNAFHREHDTAMPQALTDLQAAIEQLPRSAYAEEARPLAQELQRIEQGRRRGPQLLGDILPIVLARLGVGALQSRESGEHDLT

SEQ ID NO: 317362 - protein, 344 aa, unidentified
MSKAITIGLDIAKHVFHAHGVDERGLTLFSKRISRGKVLEFFAAQPSCTVALEACGGAHHWARQLIQLGHEVRLIPPAYVKPFVKRQKNDAIDAEAICEAAQRPSMRFVAVKSEEQQAAGLVFRTRDLLVRQRTQLINAIRGHLTEYGWIAPKGPSYVAMLAELIEEEEMASSLPEAARAMFRLMLELLAGLDGKIADLDKEIARRAREDEVSRRLMTIPGIGPISATAIAALAPPAETFAKGRDFAAWLGLTPLQRSTGGKQKLGGTSKMGERTLRRLLIIGSSAVVQQASKRGAPKGSWLEQMLARKPRMLVTVALANKTARIVWALLVKQENYRAPVAARA

SEQ ID NO: 317363 - protein, 317 aa, unidentified
MTEKLKVVGIDVSKARLDVCVLPEGAASSEANDEAGIVRLVEALRRLQPHLVVMEATGGYETEAALAISGGGIALAVVNPRQVRDFAKATGLLAKTDAIDARVIAQFGVAIDPQVTAMPDEDAQELQAMMVRRGQLIAMRTQEKNRLALAFGTMRKPIKEHIAWLDRAIEGLDIDLTHKLRTSPAWKAKEDLLRSFKGIGPVSARTMLADLPELGSLNRKKIAALVGVAPFNCDSGTFRGQRHIWGGRARVRTALYMAAVSAIRTNPLIRAFYEHLTASGKPRKVAIVACMRKILTILNAMAKTQTRWQPPAALQPA

SEQ ID NO: 317364 - protein, 420 aa, unidentified
MEEIAMEKVYDICCGVDVHKKLIVACLRSGRENEVRQFGATTRELLEMAAWLDEAKCEMTAMESTASYWKPLYNVLETWGLPVMVVNAHHMKAVPGRKTDVQDAEWIADLLQHGLLKASYIPSKEQRELRELVQYRKSLIEDRGRELNRLQKMLEGGNIKLSGTVTKINGKSARNILDFIVGGGFFDEAKYDEMLAKKEIACNLKASREQIIDDLNGVLSPIQRRVMKELLSHLDELDEHIRNLDDDIDRFMKQKDKDAAEAIQEIPGIASNSAQTVISVIGSDMSRFPSDKHLAKWAGLCPGNNESASKRKSGKTTKGNKLLRTTLINCAHSAVKVKKSYFAAQFARISAHRGKKRAYVAVAHSMLIAIYHVLNEGVAFKDLGADYYNQFNRERKANGLLKKLKALGYDVTVAAVPAIA

SEQ ID NO: 317365 - protein, 397 aa, unidentified
MHQQAERVVIGMDPHKRSATIEVMTAEESVIGGGRFGTDEAGFAAMTDYVNQIRPAATDRVWAVEGCNGIGHHVAMRLLAAGEHVLDVPPKLSARTRVFATGQGRKTDATDAHSVALVGVRMAGLRPVVDDEQLAVIRVLADRRRSLGEDHTRTVSQLHHLLLELIPGGAKKNLSAAQAKALLAKVRPRDVAGKTRRRVAAELISDLERIHVRKKAADKELRALVGATGTGLLGLHGIGPNGAARLLVEVGDITRFPDRGHFASWNGTAPIDASSGDHVRHRLSRAGNRQINRTLHIMATVQLRNPGIGRDYYDRKKAAGKSSMEAMRCLKRRLSDLVYRQMLDDALTPEKVTGPGGQRGNDSDSSATGSQPQHRLFGQATPGPVTNQPKPALPKVS

SEQ ID NO: 317366 - protein, 371 aa, unidentified
MNTVIHIGIDVHKDSYFLSAFNFSSNRNFGQSRIDSKSNLVIKYVERLRKEHQGCEFVCGYEAGPTGFGLYRDLERAGIPCVIMAPTTLPKASGNRVKNDRLDAQELARHLAFGTYSAVQVPTVQDEAVKNFTRLRNTRKESLKKAKQNLLSFLLRMGRTFSEGKSYWTLLHFKWLKGQKFDDMVDQETFDEYLQEVHDQQEKVERYNQRIEELAERDEYREKVAKLCCFRGIETHTALSLVSEIGDFSRFATAQQFSAFLGLVPSEESSGQRERRGTITKAGNTRLRMLLIEGAKSTLRASAFGKKSKRLLARQKGNDAEVIAYADRANRRLHRVYGRLTTRGVHHNKATVAVARELSCFVWGMMNNRID

SEQ ID NO: 317367 - protein, 394 aa, unidentified
MSFFIGVDVSKEKFDACCISEKEEKVFSLMCTMDRQGFEKLVLHLPANKTSLLLGMESTASYHLPLFSYLTAQGYGVVIINPLLINNFAKRSLRKTKTDKKDAFTIAQFLLREKEAFAPQATDHLATELRDLARRREKLTDHVTSLKGDMKRILSVIFPELEHITGAFTKCTLRLLMEYPSAHALRKADHAAVADIFITKSRGTRPRVSIKTLMEAAASSVGVVSPAKELTLKQEASLLIHVQEQMKETTEVIMNLLNQRMKHDMEILCSIKGIGENTALNFLIEMGGEIEMYENDKKLIAASGLDPSTYKSGKYEGKSRISKRGNRHLRRVIWLMATRVIINNTIFRVYFYKRRSEGLPYKMAVLATAHKLIRIMFVMLNRKTYFVEGGIKYS

SEQ ID NO: 317368 - protein, 402 aa, unidentified
MNAVGIDVSKGKSMVAIMRPFGEIVSAPFEIKHTASGINSLVELINSVEGESRIVMEHTGRYYEVLAHQLSKANLFVSAINPKLIKDFDNDSLRKVKSDKADAVKIARYTLDKWQNLKQYNVMDELRNQLKTMNRQFGFYIKHKTAMKNNLIGILDQTYPGVNTYFDSPARSDGSQKWVDFASTYWHVDCVRKMSLNAFIDHYQNWCKRKKYNFSQSKAEEIYGKAKELVPVLSKDAITKLIIKQAVDQLNSASTTVESLRTLMNETASKLPEYPVVMAMKGVGTSLGPQLIAEIGDVSRFTHKSAITAFAGVDPGVNESGSYEQKSVPTSKRGSSDLRKTLFQVMDVLIKTHPQDDPVYQFLDKKRAQGKPYYVYMTAGANKFLRIYYGRVKEYLSSLPES

SEQ ID NO: 317369 - protein, 367 aa, unidentified
MKKISTAGTQQTMNISRQKLTIGLDLGDRNSWYCVLDEAGQIQVEQRVRTTAKALGEVFGAMPRSRITLEIGTHSPWISRLLSELGHEVIVANARKVRLIGESRKKDDRLDARTLARLARIDPELLCPVKHRSAQAQADLTLIRARAGLVRARTALVNTARGLAKSYGERLRGCNVRNMNPEKAEGLSPELQAALQPLLAALESLSERIVEYNERIEKLAQQSYPQVALLKPIKGVGTLIALTFLLTLEDPHRFHKSRDVGCYLGLQPGRRNSGQSEPQMHISKEGDPYLRTLLVQGAQHILGPFGVDCDLRRWGLKLAERGGRNGKKRAIVATARKLAVLLHHLWVSGEVYEPLHNSSQTTVAAAA

SEQ ID NO: 317370 - protein, 454 aa, unidentified
MIAAVVERCAGIDVGKRFLKVCVMVGPLSEEPRFEIRKVDCTSTALEGLRQWLKAEGVTHVVMESTGPYWVPVFNVLEADVKVVLANPVEVKNRKGHKTDDQDSWWLAHLLRHGMIRPSFIPEKATRDLRELTRRRKKLVEQAAQERNRVQKQLEYGNVKLGNELSDVFGLSGQLMLKALVDEKRTAEQIAELAQGSLKKKKAAIAEAVRGQRLSETQKEMIRSSMRHMTFVELEIEQLDGLVAGLIRESGQQKQHELLQTIPGIKAEAAGNLLAETGPDMKQFPDAGHMSSWGGVCPGNNESAGKHKSRHTTHGNPWFRAALTECAWSASRTKGSAFETKYESLKPKIGHKRALVAVAHLLSHAIYNVLSRGEAYRETKPKELNEIQRQRLIRHHTRRLRRLGFWLPAEKLTPLQQWYATHCIPNMDPPQPKRRGRKKGQLQDGDSERGVVNG

SEQ ID NO: 317371 - protein, 431 aa, unidentified
MKKTAAVKRINRGQPVLAKGRAVVGIDIGKRKHAATALSPQGEIIAQLASFPNTREGIDRLERDVLRKAGGPGKVLVAMEATGHYWMCVYHELRRRGYECAVLNPVQTHAQGRTRIRKTSNDRICSEDIARVAQSGKAHATRVPDADTAELRMIARHRQRLLRAVMATERYAHTLVDRIFPEYADILSKPFLPSGQKLIGQLGLAPDNLAARPKEARQVLHAASRGRIAPETIDRLLDAARNSIGTRQTEQVAEGQLVSIFEHLKLLRGQIAAIEDDLAERIERINSPLLSLGISTTLAATIHAESDPIADFRTPDQYVAYTGLDPSLRESGDTIHRQGKISKRGSPTLRHALYLAAFVVCRKHAYFQRIYRKHRARGKTHRNALVIVAHHTARVIWRLLTDNRPFTKRPPIKSNPRLKQKRSQSRRRKAG

SEQ ID NO: 317372 - protein, 462 aa, unidentified
MLRNESLYVGVDIGKQHHVAGFVSNTLLARHEHFEGCPVLIFDQSREGFRQLLDRVQSFVPLEQCFFLMEKTGHYHRALEQYLLELDISVYVMHVQERPKGMLKSDKRDALMLANHLYNQLEKGIQVADKSQLVRRAVPPSEAAAQLKGLTRHRYELMHESTQRKNKLTAICDELFPEYTVIFKNPNIGTALAIREKFPTPHDIATASLTSLIKERVYCHPSDAKFAQLQQLALQTIGTKDVARQRCLVLEQKQVIKELKLLQEHIEELDAEICTIIQKSREGKILLSLGIIGPIQAAIIIAAIGNIVNFEKASQLKAYFGWAPKREQTGISYDRSSLSHTGTRTMKQMMFLIVISAIRLDNEWARKYERLVPIKCGYDERTRSHKGKLKVIGCIAGQIIEMIYALLKKDAETLRNLPPGETPPEPMLYDRAIHQAHKQGNYHSLKPLTKPEPIVLLPKQSP

SEQ ID NO: 317373 - protein, 337 aa, unidentified
MTLYCGIDLHANNSVLAVQDEDDQIYFEKRLPNDLATILSVLEPYRAELSGCVVESTYNWYWLVDGLMDAGFCVHLAHTGAVPQYAGLKHTNDESDARHLAHLLRLGILPEGYIYPKAERAVRDLLRRRLQLVRQKTLNHLSLQSLIVRETGERLTANQVKALDNDTIAERLVDPICLGGQITGLLMHWLEEAIAMLEKEVEKHLTPREEYQLLMSIPGVGKILAATILLETGTIDRFPSPGHYGSYARCVSTEKISNGKLKGRGNRKNGNKYLAWAFMEAAHHSAIWSPEIKRFYEKRKAKRHILVAKKTVANKLARAIYHMLKRQESFDVNRAFG

SEQ ID NO: 317374 - protein, 410 aa, unidentified
MDVVYPRCCGIDIHKKTAVACVIVSDTKGPPRKEARTFGTMTDELLALADWLMSEGVTHIAMESTGVYWKAPFNLLEGQFEVLLANAQHIKAVPGRKTDVKDAEWIADLLRHGLLKPSFVPDRPQRELRELTRYRTVLVRERAAEINRVQKTLEGANIKLGDVASDILGRSARQMLEGLVAGTAEPSTLAQFARGRMRQKIPQLERALAGRFAVHQRLLVAQQLAHIDYLDEAIDSLSAEVAERLAPFEATLERLDVIPGVGRRTAEILLSEIGTDMHRFPTAGHLASWAGMCPGQHESAGKQHNGKTRKGCQWLRAALIEAAAAAAKTKDTYLAAQYHRLVRRRGSDKATVAVGHSILVIVWHLLQHDCPYVDLGSTYFDERDRTATERRLVQRLEHLGYSVHLDRSAA

SEQ ID NO: 317375 - protein, 344 aa, unidentified
MKILKQVVGIDVAQKELVVSLGRLREDLSVELYASKTFSNNQKGHNSLIDWVRKTSDSTVAIQFVMEATGVYHEALAYLLVDRSCNVVVVLPNKISNYFRTLQVKTINDYTSAESIASFGLERKLDNWQKPDPTLKKLRQLCRERDQLVQTRTIAKNQLHAEQAEAEPNAGTVRRLKQQILFLDKQVHQVKGEIEAKIKSKEELTQAVKLITSIPGVGLLTAATVLAETNGFELIRNKKQLASYAGLDVREKQSGTSVRGKSSISKRGNRYLRKAMHLPALAAKRCDSKFKSIYIRLVEKHGIKMKGAVAIQRRLLEMTYIIYKTKTPYQTNFQADLKKEKQPA

SEQ ID NO: 317376 - protein, 425 aa, unidentified
MSVMVQVETTNQKKEGNKMISIGIDIAKEKFTVCALEQGSKIIWKPFDVHLNKTKVEEFLKKLDTLNEEVKIIMEATGKYHLPILYELKDKEYFVSVVNPLKMKQFCRVLNFRKAKNDNIDAIQIAEYGLMYWKELQEYKVDSESFRILKELNRSYQHYMDLRINQMNFIDQTISQTFPGIKKLIPHASGDFSKDKLLDFLEIWWHKDLVLEKPEEKFIEDFKNWAKEKRYHPNADKAKSIYKLAEESISIQPSNSSYIKTSIEEGIELIKHINQILHTILSQMIEISEPLEEYQEAKKFSGISDKLAVQITAEFGDLSKFKNKKSLISFVGIDSPPYESGNFKADQRKITKRGNAILRKVGYQAMKCMMSAKDTENDIYLYMVKKEKDGKAKKICKFAGLNKFLRTYYAKVMASKQEKKLLKVA

SEQ ID NO: 317377 - protein, 379 aa, unidentified
MREYTTQVGMDVHARSIVCKAPVVTSGEVKEHCLRGSTMVLDLLEWLGKLPQPVRLAYESGCTGHELARTLKAAGFSCDIAAATSIPKSPKNNRHKNDRNDASILLREMPSPASDISYIWIPDRETEGARDLVRAYTSPATLVSSQRRRIAAFLLRHGCVWNERTSSGRLRSTHTATYRAWVASCDLGCEGANLTLRPMPGGLCALEESRAAFKESVEGLRQSLRWAPYVDAISLPLGIGSATALLAAAEFGSFSRFGSGRKVSRWIGCSATDRSSGPRCSPGHIPREGPTLLRRLLIEGPASICRGKDYTKRHVRTCGVSPEIGRLARKANRRLKSRFDELVDAGKHPNVARVAVVRELACWIWVIGLKVESEIGSMA

SEQ ID NO: 317378 - protein, 448 aa, unidentified
MSKNKQSNQTLNLALIHPKAAGLDVGSMNMMVSYPGSDGIQTVKEYSAFTEDLQHMAKELQQAGVTHVGMEATGVYWMAVYEVLERYGLSVTLVNARHYKNVDGQKTDVKDCQWLQQLHAHGLLRASHIAEEQYRELRTYIHERGILQQQKSDTLNRVHKILTQMNIKFQHVISDIEGVTGMEVIEKIAQGETSAEVLLSGVKTGRLKTTREELVKSLQGIFKPHYITVLKNHLAAYHFYKKQMLQYEQIIEQLLQKMLLQSEQVVTVRKKTTKPRKNQYHFNLKEYLHKIAGVDLTAIDGLDENTVLTIISVVGLNMNKWPTADHFTSWLNLAARPKKSGGRIIGYQKRFTHNPATQAFRMAAQTMWQQKGVLGHLYRRLSHTKGSKKAIKAVARRLAVIFYNMVKKQIVYDPKIVAIDEENLRKRKILRLQKEADKLGCKLEYVSI

SEQ ID NO: 317379 - protein, 385 aa, unidentified
MQTPIDLNQSRIVLKQDSTVIAVIEMSLSSWLVAGIVPGVERQPLKKLAIDESALLMLLNRWREEAEKAGRKVERIAVAFEAGRDGFWLARWLGARGIEAHVIHASSVAVSREHRRAKTDRLDTELLKRAFLGWLRGERDHCKMVAIPTIEEEDAKRPNRERESLVGEQTRIINRMKATLSRLGIRGFNPKLKKAAERLEDLRTPEGELIPSNTLAELRRDIERRRLVSDQIRQIEDARLERLERMPNEGPHAMVRLLARAIGVGIETADMLVQEVLSRTMRDRRAVARYAGLTGAPDESGAKRREKGLARSGNARVRRGMIQLAWRFLMFQKDSKLAQWFRARTENARGTRKTMIVALARKLLIALWRLVTTGEIPAGVVLRTA

SEQ ID NO: 317380 - protein, 443 aa, unidentified
MLEETQDTEEIIGRVAALDIGKAELVCCVRVPSAQGSGKRAQEVRTYQTMTRSLLVLADRLGELGVTRVVMEATSDYWKSPFYLLEAHGFDVWLVNAKDVKHLPGRPKTDKLDAVWLAKVAERQMLRPSFVPPPPIRRLRDLTRYRADLVAARTAEKNRVEKLLEDAQIKLSVVASDIFGVSGRDMLAALIAGERDPKALAQLARRRLRAKLSLLEEAFYGHFSDHHAFLLQTMLARIDQATADIATVEAHIDAEIAPFAQAADRLDEITGVGRAAAQVIIAEIGVDMGRFATPGQLVSWARFAPGVKESAGKKKGKATTGHGNPYLARVLGEAAAAAGKTNTFLGERYRRIARRRGTKKAIVAVGRSILIIIWHLLSDPDARFHDLGPGFYDTRIDADRRKRNHVRQLEAPPGAAACLLTVDFRIRPPAAVSGAGASAPASS

SEQ ID NO: 317381 - protein, 417 aa, unidentified
MNTMTMHPYAAFVGIDWADTKHDVCIQSADSLRREFAVIPHKVEEIDEWARSLHRRFPGPIAIALELSKGPIVYALQKYDYFVIFPINPSTLAKYREAFQPSRAKDDPTDAELALDLILRHPERFEPLQPQSVELRKLAALVEQRRRLVSDRVRLTNRLRNTLKQYYPQTLEWFDRINTKLFCDFIERWPTLTQVKRARTTTLTTFFRAGHTRNPALLETRLASIRSSQHLTLDEAVIAPNKLHALMLVGMLQVILDAIKTYDQTIAELAPKHDDYDLFSSLPGAGPSLAPRLLVAFGEQRNRFKNAAELQKYSGIAPVTERSGTKHWVHWRWRCPNFVRQTFVEWAAQTINKSYWAGEYYRQQREKGSAHQSALRALAFKWIRILYCCWQTKTQYDEATYLKALQRRGSPLVAKAV

SEQ ID NO: 317382 - protein, 404 aa, unidentified
MGYRAGLDWGATAHAVCVLDEASGQVVARLDIKHSAEGLAEMLARLARIAPAAELPIAIERPSGLVVDTLIEAGYPVVPVHPNVVKACRPRYRAAGAKSDPGDAYMLADILRTDGHRFRPLQPCSDEIKALRALTRTRDDLVAERVALANRLRSLLDSFWPGATAIFAEIDSPIALAFVQRYPTPDSAARLGEKRLAAFLAQHSYCGRRAPAELLGRLRAAPAGRAGEAEAEINGELVRSLAAILAALVGEIARLTARLEHAVAALPDGEIVMSFPRAGRVNAAQILAEPGDVRERFLTEDQLAAEAGMCPVTHASGKSRGVVFRWACNHRLRKAIACFADNSRHSSPSAAAKYRGARQRGGDHPHAIRVLGRAWVRVLWRAWLHRKPYDPAQHRATQLVAARG

SEQ ID NO: 317383 - protein, 395 aa, unidentified
MQIPQIVVGIDIGGRSHRVTIAGPEGQLLEEFDMEHTAAGFGDFFQRLETHERRLKLPVAIAMEGFNGHARPLDTQILMRGYRLYNVNNLKLARFKEIFPGPAKNDPIDSHKIVELFELRAHLPLAKDVLQEVAAAPAENEKLKRLTRRRRQLVEDKVRVVNRLQADLQSVSPGLLAITGNVDNRWFLRFLTSRDELPQLGRLHHSTLLKIPGVGQHYAETIEQWQRQAYFAPAVEWVGPMIVADGQRILELIEQIEQLEGQIAGLAQQSEIAQALFSMPGFGPICSAELAGEIGTLERFASERSLALYLGMAPLDDSSGTYQGSKPPRQVNRRAKAAMMRAVDQHRKQVLSSQRYYHKKRLEGKRHNQAIRALGRHLVRVIWSLIGQRRAYEIR

SEQ ID NO: 317384 - protein, 317 aa, unidentified
MSFVGIDVSKTQLDIAERPGNKRWSAVNAEADIGEVVEMIGALSPQVIVIEATGGMEVPLVVALSQARLPVVVVNPRQVRDFAKAVGRLAKTDRIDAEILAHFGEAVKPKVRALKDEETRTLTALVMRRRQVIEMLTAEKNRLGISPKVVHKDIQQHIAWLQARMEDIDRHLESAIRKSPVWREKDDLLRSVPGVGQVLSVSLITGLPELGTLSRRQIAALVGVAPLNRDSGLFRGKRTVWGGRAHLRSVLYMATLSASRFNPAISRFYRRLIEAGKKPKVALTACMRKLLVILNAIMKNRIPWQAEYSTCPTPNIP

SEQ ID NO: 317385 - protein, 412 aa, unidentified
MQDILTCVMGLDVHRDIIVACLVKGAVDAEPEAETRTFSTLIPEMQKLRDWVIEAECRNIAMESTGIYWQPIYEMLESCFDGEISILVVNARHMKNVPGRKTDMKDAQWIATLLRAGLLKGSFIPDKTFRELRHLTRYRKSVVHDITAQKNRIDKFLQSSGFRFTAFLSDTFGASGRNIIRHLIERGSIDREALDKCLKTKTRNRIDEILVALNGSLSVHQRRFLNIVFLHLEDLEAHKHTIEDEITEEVLKHTDALNLLCSIPGIDVTAAAAIVAEIGTDMSAFPDSQHICSWAGLSPGNNESAGKRKSVHINKGNPYLKSMLCETAWIMASHRKLYLSGWYWKVKQRKGAKRATIALARKVLSIIYTMLKTGTPYSEECFEQRRQRCERKRANRMVNELQKLGYTVVAPN

SEQ ID NO: 317386 - protein, 358 aa, unidentified
MSKRTWKLGNVKPLALAEGDQIVVGLDVHKKTVYAALRCNAQEQATWVMPMRPETVVASLAPLKSALKKIVYEAGPTGYGLARALRKAGLPVEVVAPGKTPQPANRGSKTDRIDCRMLAEYAEKGLLKAITIPTEIEEADRQVVRLRDPLVVKLRRAKQQIKSLLLQQGIAEPVGLAHWTNDGIEALKKARLSDQIRLALDVLVEDLEHLVALKRRVEKHLSGLMKQKRHREDSHRLRSHLGVGPLTAGTFVTEVYQPKRFARPEELTSYVGLAPRVRQSGETRREGPLVKAGRGALRALLIEASWTWIRHDKHAAVVYRRLVGNTGSAQKAIVAMARRMAVNLWCMLCRGEDYRATA

SEQ ID NO: 317387 - protein, 437 aa, unidentified
MPRRKSPSLPSDPATTALLQTLNPHAAGIDVGATDLWVCVPPSAVAAPVAPSGLAVLPPYVRRFGAFTADLHAIAAWLRQCQVTTVAMESTGVYWIPLYDLLENAGFQVLLVDPRQVQRAPNRPKTDVHDCQWIQRLHSLGLLTAAFRPEEPIRVWRAYQRHRATLIEDAGRHLQRIEKALEQMNVKLPEVVSDITGVTGMGIVRAIVQGERDPKALAQLRDHRCKASVAVITRALQGTWQPEHLFALQQSLALYDYYHEQIQACDRVIEAHLQELALPEVPPLEPTRRVRRRRDNEVTFDARQRLHHMAGVDLTAIAGIEESTALVVLSEIGTDMSRWPSEKHFGSWLGLAPNPKKSGGKVQSSATRPGVNRAAQALRLAAKNLQRSKSVLQVLPADRRTARPGKGYYGHSIQTGPHRLRAVEARDSLCGPRAGGI

SEQ ID NO: 317388 - protein, 339 aa, unidentified
MKYTPVGVDIAKHLIQVHFIDENTGDVVDKQLRRRDFLEYFSNRESCLIGMEACGGSQHWARELTKLGHKVRLLQARFVKAFVMGNKNDVMDARAIWMAVQQPGKEIAVKTEEQQSVLVLHRSRRQLVKFRTMQINSLHGTLLEFGETIHKGRAAMEREFPEALERMKERLPPYLITVLENQYNRLNELDLLIKDIEKQLTSVAKQNETCKRLLDIPGVGPLIATAAVATMGEASAFKSGREFAAYVGLVPRQTGSGGKIRLLGISKRGDTYLRTLFIHGARAAALLTKEPGLWITELKKRRPVGVATVAMANKLARTVWAIAAHGRKYDKEYVSIRSY

SEQ ID NO: 317389 - protein, 433 aa, unidentified
MLKLNYMSTLFVGIDVSSKTNAVYAMDFEENKYISSSFGNNQPGADQLVNMIAECMQKHKNLDTVLIVLESTSVYSVHISNFLSTSEVLMPYKPYVFCVNPKAASNYRKSYIGMEKTDPTDAYLIADFGRVGRTKKLEPWRGGQFISLKRLTRHRMHLSECITREKTYMVSNLYLKFSELQLLEGDDKPFGSLYGATSSAVLTEFLSPQEIIDMPEEELLTFLAGKSRNRISDLSKTSELLRKAARDSYRLDKCMYEPLSISLASSFNCIHAYQKEIKLIEQAIEKCINGMNPNALLILQSIPGIGPIWASGILSEIGDITVFHSSDALAKYAGLYWPKGDSGDFTSEDNKMSKAGNPYLRCYLGEAANSVRKHIPEYADFYARKYAEVTKHQHKRALALTSRKLVRLVFGLLVKNQLYTGEKLDAEYNIESN

SEQ ID NO: 317390 - protein, 320 aa, unidentified
MMTQSDQVVVGIDVAKDKIDACIRAVKERKTCPTTAPGRRSLIAWLRKHRVGKVVMEASGGYERVWAKALRQAGLEVRIVDPKRVRHFAGSAGRLAKNDKIDAEMIAWFAETFSEAPGQIDDPAQEEMKALVKGRQGLIDVRARLEMQKEHEAPALVRKARARLLKKLAEEIAAIETEIAATIKTTPDFARRAEIIQSVPGFAEGTAMALLGGLPELGQVSDEAAAALVGVAPYDDDSGKRRGERCIKGGRRWVRNALYMPCVGAATLNNPVFKAFYERLIAKGKPPKVALVACMRKLIIILNTMIARGEKWDPNRYKVA

SEQ ID NO: 317391 - protein, 346 aa, unidentified
MKVLLKQTVGIDVAQNELVVSLGKMDEQINIEVYDYKVFPNTKKGFSSLVSWVNKQTSTTTEVRYVMEATGVYHESLAYYLCSIQKQVSIVLPNKISNYARTLDIKTITDKSASQAIARFGLERKLEVWLPPLKIFNDLRQLCREREQLVQERTMLKNQLHAERTSATSSKNSVQRTKKRIALIDLQEKEIREEIAILIKEDQTLVEKMKMVSSIPGIGNLTAVTIIAETNGFELIKNKRQLVSYAGLDVREKISGTSVKSKPRISKRGNRNLRKVMHFPALAAIRTDERFRDIFLRLVSKHGIKMKAIVAIQRKLLELTFILWKNNSYYKSEHQYQIIPFQEVTE

SEQ ID NO: 317392 - protein, 384 aa, unidentified
MQKDNILFIGLDTHKEQSQVAYTLDHRTAEVNDLGRIQTTKTGFVKLARQLQSKYPHATLHFVYEAGPCGYWIYRLLTSLGHCCFLVAPSLIPKKPGDRVKTDKRDAQNLARLLKNNDLDPIYVPEPEDEAVRDLSRAREVAMRDLNDAKHQLKSMFLRNNIRYTGSDSWSLKHLRWLTEIVLPHPCQQIVLQEMIQSISERMARLKRFDNELTHQVKQWRYYPVVKAIQAMRGVRLLIATGMIAELGDLSRFDTPRKLMKYVGLTPSEHSSGEKRRLGGITKSGNGRARRLLIEGAHSYRHAAKISKEMQLRQEGLPKAIIDKAWVAQLRLCRRYQRLIMRGKPRNVVITAIAREMIAFIWSISREVVLPKVDPKTRLSRVPA

SEQ ID NO: 317393 - protein, 430 aa, unidentified
MEASIATTEAVTAYIGIDWADQKHAIALRSAAEPNKIEHQLIDQKPEALMEWIGGLEQRFGTQGKILVCLEQSRGALIYHLMGYDFFELYPVNPLQLARYRETFSPGGAKDDRPDSELLCELLYCHGERLRVLKPDSVLGRKLNFFNEGRREAVDQRNGLSNAIKSQLKVYFPLALELLDQDTSTALAADLLLGWPTLEAIQKQPAHRLRKFFYGHNCRGEQRMLKRLELVQKAKPLTQDSAVIEPAALRVQLLARQLKNLLPDIARYEDKIAQLFAAHPDRFLFENLPGAGEALAPRLASAFGSDPQRWESALEIATLSGIAPVRRASGMKSGKKGQRKASVHFRQACPKFLRQSFHEFAGCSIRYCSWAKAHYDALRARGKGHHAAVRAVAFKWIRILFACWKQRTPYDPQRYLQALQRRGSPLAIAC

SEQ ID NO: 317394 - protein, 431 aa, unidentified
MKPIVKQNTEPDPAEDFVAFLALDWADEKHAFRLQVVGQSKIETGTLEQKPEVLGPWLAQLRERFGGRPIAVGLEQSRGALIHALMAYDFLVLYPIHPTTVAKYREAFKSSGAKNDPLDAGQILEILTKHQDRLHRLNPDTVETRLLGRLVEDRRKAVDLRTTHIQALGANLKEYYPQALELTNDNLKSRLACDLLIKWPTFEDFQQAKPSTLKRFYYGHNVRRPEVLERVLTLAQKSQALTTDPALVESGRRLTQRYARLIQALNPAIEDYEQRIQRVFDAHPEVKLFSDLPGAGAALAPRLLAFFGTDRSRYAAALNVQSFTGIAPVTKSSGKSKVVYARAACPKFDRQTFHEFARLSVSQSQWACNYVQYYTDKGKKYHTIIRALAYKWIRILFKCWQERTPYNEDKYMATLKIRGSIFATWHLQKKS

SEQ ID NO: 317395 - protein, 416 aa, unidentified
MTDQKQFYAGVDWASESHHVFLTDGDGRKIGERVFRHGGEGLAELAAWLTATSGATEAGQIQVAIEVPHGPVVETLIERGCQVHAINPKQMDRFRDRFTLAGAKDDSRDAEVMASALRTDRRCFRLLAAADPVVIELREWSRMAEDLGAERNRLTNRMREQLWRYFPALLELENDLGAEWLLDLWEAGPTPAKAARIRAATIAKLLKRNRIRRVDATHVLAVLRTPPVKVAAGTTEAASAHIATLIARIRLVNRQLKQAHQRLDTLTARLVPTEETEPGQRKQHDVEILASLPGVGRIVLATLLAEAFDALQRRDHAALRSLTGVAPVTKRSGKSCIVIRRQACHDRLANAMYHWARVAIQHDSRSRLKYAALRSRGHSHGRALRSVADRLLNVACAMLKTGTTFNPSLAEQKLSC

SEQ ID NO: 317396 - protein, 422 aa, unidentified
MEDERNWFVGVDWASETHHVRVSDARGRKLGARAFAHSGEGLAAMAAWILEVTGAPPEAVFVAIEVPYGPVGESLMERGFRVHAINPKQLDRFRDRFSPAGAKDDTRDAEVLGDALRTDPRCFRALQPLDPVVVELREASRMAEDLKQERNRLGNRVRELLWRFYPQMLGLTDDVAAPWFLDLWRLIPIPEKATRVREVTVDRLLKRHRIRRLSAADVLEALRRPAILLAPGTVSAAVSHREAIAKRLDLVNRQMLAVDERLDRLTQSLAGAQERAGGQRPEPCDVTILRSLPGVGRIVLATLLAEAVEALQRRDDRALRCLAGVAPVTKRSGKSRIVLMRQAAHVRLRNAVYHWARVAVQHDPRSQAKYAALRARGHGHGRALRSVADRLIGVACAMLKAKTIFDPNLASQRAPNLGKPTC

SEQ ID NO: 317397 - protein, 372 aa, unidentified
MKEDSVIFIGLDTSKLKISVAVADGLRNGEVRFFGDISSEPASVASMVNKLSKRGAKLHFCYEAGPTGYGLYRQIVELGHDCVVVAPSLVPKRAGDRVKTNRRDAVSLARLHRAGELTAVWVPDEAHEAIRDLVRAREAANDALKQARQQLQSFLLRHGRIYTGRTPWTRAHTRWLTRQAFDHPAHQILLAEYCQAIEDAGVRLDRLTQLVVETAASWSMAPVVAAYQAMRGVAFMTAVTFVVEIGDVRRFDNPRQLMAYLGLVPSESSTGERVKRGGITKAGNMRARRVLIEGAWTYRFPARVSPTIQARLEGLPRAVREIAWKGQVRLCARYRKLMAAGKPKVVAVTAIAREMAAFLWAIGQEVVPIAKP

SEQ ID NO: 317398 - protein, 349 aa, unidentified
MTIVEDRPVITGGVDTHADLHVAAALDPLGGLLGVREFPATATGYAQLLGWLDGFGPISLVGVEGTGSYGAGLARHLAAAGIRVVEVDRADRQDRHRQGKSDPLDAVSAARAAQSGRASGAPKGRDGAVEAIRALMVAKRSARAERTQAINQARALIVTGPDELRARFAGHTPAQLVEAIAALRPRPGDVPGYATRVALRELGRRAQFLDAQLDRLDELIGPLVTARAPGLLRLHGVGPDTAALLLIAAGDHPERLRSESSWAHLCGVAPIPASSGKVSRHRLNRGGDRQANHALWRIVITRLGSRPGHPATRAYVERRTKEGLSKKEIIRCLKRYVAREVYHQLRAGA

SEQ ID NO: 317399 - protein, 344 aa, unidentified
MDYFAGLDVSVKETSVCIVDDTGKIIREVKVASEPEALLAVLKNHAYHFKRIGLEAGPLSQWLFSALAEAELPIVCVETRHMQALLKAQINKTDRNDARGIAQMMRVGLYRPVHVKTLRSQKLRMLLTHRKLLQSKAIAIENDLRGTLRNFGLKVGMAGTVKFEARIRELVENLPDLAMLVEPLLVVRRVVREQFAILHRRLLAIVRDDEVCRRLMTTPGVGPVVALTYRATVDVPARFRKSKAVGAVFGLTCSKYQSGEIDRSGRISRCGDEMMRVMLYEAAQSMLYSKKWSWLKAWAMQIARRRGMKKAIVALARRLAVIMHRIWVDGTEFRWTREPASAAA

SEQ ID NO: 317400 - protein, 352 aa, unidentified
MTELSKERVIQFVGIDLAKRSFHLYAVDGEGREVLSRKLTRGRLSAVVARLAACTIAMEACGSAHHWARLFRTFGHEVRLIAPQFVKPYVKSNKNDAADAEAICEAAQRPSMRFVAVKTVEQQDIQAIHRMRSLAVQQRTAQINQIRGLLLEYGIEVAQGRAALQRRLPEILEDADNGLSERFRAELHELAEELRHLNERVAHYDEQLEQIAQGDAQARALMTIPGVAAKGATALLAAVGEDPRLLKNGRGLAAWLGLVPRQHSTGGRDRLLGISKRGDVYLRNLLIHGARAVLRCVERKEDRTSRWATALKARRHTNIAVVAMANKIARIAYAVMTTGKPYDPTIDTLAKA

SEQ ID NO: 317401 - protein, 401 aa, unidentified
MKSASSVSARLTASALDMRLKGGAMNPIYIGVDFHARQQTICYLKTETGELVTDELKHKDKDAVRKFYAEFPGHVIIGLEASGYSPWFEAMLEQLNCEVWLGDATEIRRRARWRQKNDRRDAELILDLMVHNEFPRLHRPAVVSREVLRMLRYRQKLTKIRTISKNSVQALALQAGLAKGPHLFSRSGQEELNTTLMSPAMQWQREHWLQLLTTLNQQLLETMVWLKEQGKADSRVSRLRTHPGIGLQTALCIVHSLEPVSRFRNQRKVAAYAGFDPVERSSAEHKHFLGISKAGSRVLRYLVVEAAHTAIRYDEDLRCFYKRLAARRGKPKAKVAVARKLLIRAYIMLRDEIDYAEFQRRAVAAALARAIQRPPVPEVLIGQPASPGNNNPTSGRAPRRS

SEQ ID NO: 317402 - protein, 430 aa, unidentified
MAPINGECMMDKERRWFVGIDWAAQEHVVSLYDGAGNKIGQRKFSHGGTGLTDMIAWLLKASGGEPGEIHVGIETPHGPIVEALLERRFNVYSINPKQLDRFRDRFTVAGAKDDSRDADVLSDSLRTDMRAFRKLSIADPLIVELREWSRIDEELKVEHGRLTNRLKHQLWRYYPQMLELADDVGAKWFLELFEAVPTPEKAANVREKTIARILKNHRIRRFDAAHVLAELRKPALAVAPGTIEAATAHIRSLIGRIRIINGQLADAGQQLDRLCKKLSEPVADEDGEAAPGQKPEQRDAAILDSLPGVARTVLATLLAEAPDTLQRRDYHALRALCGSAPVTRRSGKSRMVVRRYACNHRLRNATYHWAQNAIQHDHTSRAKYDALRARGHGHARALRSIIDRLLSVACAMLDSGTLFDPEFASKRATG

SEQ ID NO: 317403 - protein, 369 aa, unidentified
MAKSITYVGLDVHKDTIAVALAEAGLRGEVREYGKIPNTPAALQALTVKLVPARRELRFCYEAGPCGYGIHRQLTEAGHECVVVAPSLIPRKPGERIKTDRRDAINLAKLHRAGELTAVWVPDQAHEAIRDVVRARQAAVRILRQARQQLSGFLLRHGHHYHRPAWTQLHRRWLASLKFEQAVHYIVLEDCIAAIEAATARRDRLEGHIEAALPAWSLAPVVHALQALRGVGLVAAATLVAELGDITRFTNPRQLMAYLGLVPSEHSSGRTRRQGGITKAGNGAARRMLIEAAWSYRFPARISREQLLRQERLTRPIRDIAWKAQERLCRRYRTLARAGKLPTVITAAIARELAGFIWAIARQAQPATS

SEQ ID NO: 317404 - protein, 390 aa, unidentified
MFYAGIDVAMDKHDCVVLDSDGDVVFEVFTFENSRNGFKTLKRVLQSCSKNPKKIKVGLEATGHYSDNLLAFLNSIGYDPALFNPLHTNLFRKGLSLRKTKTDHVDAHTIATMLRTEDLKSYSQQSYHFTELKSLTRYRSNLVSNCSRCKVSLVRLCQILFPELKSIVPTLHMSSVYTLLSELPSADRIAKCNLTHLTALLSSASHGRYGRDKAVEIRDVARASIGIKSTVKELELQQTIDRIQIYLQQIESVEEEINRLMDEVDSPITSIPGIANRMAAVILAETNNFQYFDRAEQVLAFAGLEPSVYQSGQLTSTHSKMVKRGSKYLRYAIFNATKYVCIWDPTFNAYLAKKRAEGKPYNVAVSHAAKKLTRVIFHLVKTNKEFVPQA

SEQ ID NO: 317405 - protein, 406 aa, unidentified
MRDYMGVDWADREHAVWVEDEQGAKVAELTVPHTAEGLSEFGRWLHERRAQGSDLWAAIEKPDGRVVDFLLDHGVVVYPVNPKALDRARDRFRMSGAKSDPFDARVLAAFLRTDHPHLRPLRPNSEPAQELKLLTRDSQRMVRQQTRLVNQLTATLKEYYPRPLELFEELTTALARAFLETYPTPEALTALTPKPWQRWARAHRLSAGRTQELWEGLKPPHLPVPPHVGRAKARLVRVLVAQLGATVDAVNEYRKAVEDFFAPLPAAEWARTLPAGQSGITVPTLWAELGDADGRWQSVQHLQGHAGAVPVTERSGKQEFVKFRFACNTHLRHAVHQLAWLSLPHSEWAHAYYTQYRKRGHDHHQALRALGAKWLKIIFVMWTRHIPYDENYHLATMARQQLRRAA

SEQ ID NO: 317406 - protein, 427 aa, unidentified
MLKQNTEPDPAPDFAAFLAMDWADEKHAFRLQVVGQSKIETGTLEQKPEVLGPWVAKLRERFGGRPIAVGLEQSRGALIHGLMAYDFLVLYPIHPTTVAKYREAFKSSGAKSDPLDAGQILEILTKHQDRLHRFNPDTVETRLLGRLVEDRRKAVGLRTTQVQALGANLKEYFPQALELTSDNLSSRLACDLLLKWPTFADFQQAKPSTLKSFYYGHNIRSPEVIERVLALAEKSQALTTDPAIVESGSRLTQMYVGLIQALNPVIVKYDQRIQRVFDAHPEVKLFTGLPGAGPALAPRLLAFFGTDRSRYAAALNVQSFTGVAPVTKSSGKSRVVYARAACPKFDRQTFHEFSRLSVTHCQWARNYVQYYTDKGKKYHTIIRALAYKWIRILHKCWKERTPYNEDLYMERLKKRGSIFATLHLQTK

SEQ ID NO: 317407 - protein, 343 aa, unidentified
MTKITTIGLDLAKNVFQLHGVDGSGAVVLKRQLRRAEVEKFFAKLPPCLVGMEACGSAHHWARVIGRYGHEVRLMPPAYVKPYVKRNKNDGRDAEGVCEAVGRPTMRFVAVKSVEQQATLAVHSTRALLVRQRTMAANALRAALSELGIVAAQGYEGLRKLIVRLEEPNEDIPEVMRAALLVLAKHWQVLDADERVLEQQIAKQARCNQDARRLMEVPSVGPIIASTVLAKVPDAKLFRSGRDFAAWIGLTGKDHGTGGKHRPGRISKQGDRVLRTLLISGASAHLRQQKTRGVTDPWLCDLLARRPYKVAMVAFAAKTARIIWAMLVKGEPYCDRASAPAAA

SEQ ID NO: 317408 - protein, 369 aa, unidentified
MVWTAPYGISCARMRLLRSQTREPSVNQIIRIGMDTSKNIFQLHGVDASEQVVLRKRLGRAAMLAFFAELPPTLVVIEACGAAHYLARELGRLGHTVKLIAPQLVKPYVSRNKNDGRDAEGLCEAASRPRMRYVPVKTAEQQGALMLLGVREQLVGRRTQLSNTIRGHAAEFGLIAAKGLDKLAALLAAVQQNESVPVLARELFAMLARQYAQLQVELKAIEARLRAWHRANELSRRLAQIPGVGPVTAAALVMKAPDPHAFGSGRQFAAWLGLTPKDHSTAGKTRLGRITRAGDERLRQLLVVGATSVVKQAKGRGRGPNWLIELLKRKAPKLAAVALANKMARIAWKLMTTGESYESARIEAQGAAA

SEQ ID NO: 317409 - protein, 347 aa, unidentified
MGIVVALDVHRNQITYKLLDRDTGEVTRGRVAPAARVDVRTWLAQFAGHEVEFALEGTTGWRFVVEEIERAGHRAHLADPAETAAKRGRKRRAKTDNADCDLQLRLLLAGELPESWIPPAHILELRARVRMRKTLIDQRTAWLQRVQAQLFQQGVPAGLRLRSEVGRQALAAADLSPAGRELVELGLRMIDALDQELVPLTRELGVFARRQAGCRALIASLYGVGPVSATAILAELGDARRFSSSDDAVRHAGLDVTVHQSDSKRAPGHLSHQGPEVLRWALFEAALSGARVGSPDHGYYVQVAERIDHTRACLSLARKLCRRAYHVLRELGDEALAPVEEAIAAAA

SEQ ID NO: 317410 - protein, 346 aa, unidentified
MRIIGCDLHARQQTISMLDTESGEVIEKTLAHEGETVREFYAALPKPVLVGLEATGSMFWFLRLLEELGIQYRVGHPAAIRKAETRKQKHDRRDAALIRRLLVEKRFPQIWLPTAEQRDLRTLLQHRHQLVRMRVMTQNGLQGLALSQGLRRGAKLWSQAGQQALDSLPLADYSRTRRQQLQELRQQLNQRLQQLDQAVREQAEQRSGARLLLSHPGVGPITALATEVFLGDAQRFPNAKAVASYAGMIPSEHSSGGKQRNGSISKQGNPLLRQLWVEAARAAARKDARLKQFYRRKLVQKGLGKAVVATARKLGIRLWIMMRDQIDYTEFCRRAEPRCPHAGMPE

SEQ ID NO: 317411 - protein, 458 aa, unidentified
MKRNKPSGTTQSGLAMVHANAAAIDIGATLHMAAVGADRSAEPVRSFGTFTTDLSRLADWFAECGVKTVVMESTGVYWIPIFELLDERGFEVFVVNARDAKHVPGRKTDVSDAQWLQRLHSHGLLRASFRPKGEIAELRAYVRQRERLVDYAASHIQHMQKALTEMNLQLHHVVSDVTGATGLRIIRAIISGERDPAVLASLRDTRCHSGAEMIRKALIGHYRSEHLFALEQALALYDVYQEKVRVCDLRIEAVLQRLGTLRDRHGGPMPLPRQRGGRQSNGPGFDVRGALYGLLGKDLTQIHGMGPYLALKLVAECGDDLSAWPSAKHFTSWLCLAPSNKISGGKVLSSRTRRSGSRAAALLRLAATTVGRTDTALGAFYRRLATRTGKAKAVTATARKIAVLFYNAVRHGMDYVDPGASSYEARYRARVIDNLQRRAKTFGFVLQPTGPTPGGAVS

SEQ ID NO: 317412 - protein, 404 aa, unidentified
MIFIGDDWAEDHHDVHVMDADGARLASRRLPEGLPGIRGFHELVATHAEEPSQVVIGIETDRGLWVQALGAAGYQVYAVNPLAAARYRDRHQVSGAKSDAGDAKLLADLVRTDRHNHRPLAGDSAEAEAIKVLARGHQNLIWARTRHTNALRSALREYYPGALEAFEDLHDRDALAVLGRAPTPAEAAHLSMAKIRSALKHAGRQRNIEARAQEITAALRIEQLAAPAAITAAFAATTRAAVGIITELNRQISDLEAELATHFETHPDADIYLSLPGLGVILGARVLGEFGDDPDRYTTAKSRKNYAGTSPLTVASGKKRAVLARHVRNRRLYDAIDQWALCALTNSPGARAFYDQHRAAEDSHHQALRALGNRLVGILHGCLRHHTTYNEHTAWAHRQITQAA

SEQ ID NO: 317413 - protein, 444 aa, unidentified
MTRASTPRLRGASRQEPTTPRGKRGDQMTGIMFVGVDVSRDDHAIQLLHADGARVARMRIGNTPQGATSLIERLVDAAERCGCAEMRVGMEATNLYWWHLFHQLYAAPELERFQLKVALINPARIKAFKQSFGDLPKTDRLDALVIAEYMRFNQRIPFAFKPDPRFAPIQKLTRARFHLARALAQEKNRALSLLYLGFSAYGPDKPFSDVFGATSTRLLSELTLSEMASLTLPELAERVFSTTHAYFKSGHQERILNELAQLIRGSYRLDALMEQSVHLALRTHLQHIRFLETQINMLDREIAERFRPIPSTLQTIAGLGPVLEAGIRSELGPIERFENDGKLAKFAGLVWRNYQSGKFDAQDRPLTRSGNRYLRYYLVEAANFVRVRDARFGAYYQQKYDEASDHRHKRAIVLTARKLTRTVYVLLKRGRVYDPERVTADRAC

SEQ ID NO: 317414 - protein, 368 aa, unidentified
MTKVRYIGLDVHKETIVIATADAGREPAMKLATIPSDARRLLVRLRTLTPKDGRLVVCYEAGPTGYGLYRRLCEAGIECHVVAPSLVPTKAGDRVKTDRRDAVRLAHFLRSGDLTDVYVPDEADEALRDLERARDAAKRAERTARHQLSKFLLRHDRRYNKSGNWTLGHLEWIRRLKFEHAAQQRVLNDYLKTVEDATERVARLTSDIEELVESSALAPLITALQAFRGIALVSAVTIACEVGDLRRFSTAGQFMSYVGLVPSEDSSGQRRRQGSITRAGNSHLRRILVEAAWHYRYLPTMSRELRRRNRPVAEGVRRIAWEAQKRLHRRLFHLIHKGKNSKAAVIAVARELAGFVWSVAQEPELLAT

SEQ ID NO: 317415 - protein, 388 aa, unidentified
MNRILKIGMDVHSKNYTLCAMEPTIGSEDRIFGEIQVAPDYKEVLYFIESLKMKLGLNDEYSIECGYEAGCLGYTLYHQLTNAGLKCVILAPTTMLTQQGQRIKTDKRDARLIAQCLCYGGYHPVYIPTGEDDAVKEYLRMRDDHKLAQKKLKQQINAFVLRHGHQYVGTKWTIKHITWLKKLELDPMYRETLNEYMASYEEQEAKIERYDKRIEEIAAEARYQENAKKLGCFLGIRTHTALSLIVETGDFKRFAKGNTYAAFLGLAPGEHSSSTNVNRLGISKAGNTHLRCLLIEAAKGICKGAIGHKSKVLRSRQSGQAAGVIAYADKANTRLRSKYYRMIRHGKKKNVAVAAVARELACFVWGMMTGNISVASSTCTSALDVSQG

SEQ ID NO: 317416 - protein, 431 aa, unidentified
METRLNQRLLKITNATLIVGVDIAKQVQWARFTDYRGVEIGKAIRFENDRAGFENIIARIEIIRNNNVMRYTFDNVLIGMEPTGHYWKPLAHYLNKVGYRVVGVNPYHTKKAKELDDNSPTKSDKKDALTIARLVKDGRYFDPYLPEDIYAELRVLTNSRVSIMKRNNAVKNTIIAILDEYFPEIYKVFKNPLTGKASRQILRSCPFPSLILSLSEEDILAEIKKAVKKTVGIKKVRELTEVAKDSIGVGYGMTSAKQRLGQLLDELEMVERHLSNTEASMEQLLAATGYGESLLSIKGIGVVTAASFLGEVGDPLRFSDARQIANYAGFNLTEDSSGKSKSGTVISKRGRSQLRSLLYQMAFTMVGQNAEMKELHNYLTTRTKNPLKKKQSLVVIAKKIITVIYSLLKKQAMYDPALALGTVRREMLKAA

SEQ ID NO: 317417 - protein, 341 aa, unidentified
MSKRLVPNCAVLHCGIDVSAAMLAVAVQPEGSDGFELREFANSTAGRRQLVAWLDRWQAPVRVSLEATGIYSLDVALALDRAAGIEVAVLNPRTVHRFAESLRRSKTDAADAVALAEYSRRMPFVAWVRPPEAALELRAISRHSATLTEEHARLKNRLHAACGSTSTPRCVREDLRRSMAGLEKRLLRLRREALAAIAKDAGLEQKFQHLTGITGIGEASAVQLLGELAGLDPEMTVGQWVAHSGLDPVHEISGTSVHKPSRISRRGSRHLRRALYMPALSATRFDPYMKAFYTQLQARHKTKLQALTAIARKLLHAIFGIFKTGTPYHPEKLFPQLLLTS

SEQ ID NO: 317418 - protein, 368 aa, unidentified
MNEVSRFFVGLDVHKESIAIGVAEVGREEPRFLGTVGPDPAQLRKALRRIGPPAALHIVYEAGPSGYGLVRDLGARGYRCEVIAPSKIARRPGERIKTDRRDALLLARLARSGELVRVVVPDERDEALRDLSRSRSDAVRARLKARQQLQALLLRHGHRYSGKSSWTQAHERYLAAVSFTHAAQHVAFTEYRGAVRDAHERVERLTEALRTQLESWRMRPVVEALMSLRGIDVVAAVTLVAEIGDIRRFTHPRELMSFLGLVPSEHSSGQTRRLGAITKCGNAHARRVLVEAAWNYRFPARISRVLQVRQENQPKPIRDIAWHAQLRLSARYRRLLARQLPKNKVCVAIARELTGFIWDLARQAKPLA

SEQ ID NO: 317419 - protein, 347 aa, unidentified
MKFYIKQHKHYCGIDLHARTMYLCILDSKGQVKFHKNIKTSPDALMEAIKPYLDDLVVAVECMFSWYWVADFCEDNNIKFILGHALYMKAIHGGKAKNDKVDSHKIASLARGGTFPMAFVYPRGMRSTRDLLRRRMHLMRKRAELLCHIHNTNTQYNYDRICKNLRYKSNRKLVDGRFSDPSVQKNVDLDIELISFYDDKLTAVEYYIKKHAKINDYESHMLLNSVPGIGKIISLVILYEIYDINRFPRVQDFASYARLVKCRAESAGKSFGTSGAKIGNAHLKWAFSEAAVIFLRGNPKAKAYVNKMTKKYNKGKALSILAHKLGRAVYFMLKRKKSFNMEKFLPA

SEQ ID NO: 317420 - protein, 458 aa, unidentified
MAKTPRRSKASTKALAPIHLNAAGLDVGATFHVVAVPRDRDDEPVRTFRSFTGDLHRLADWLTSVGITTIAMESTGVYWVPVFEILEARGFEVLLVNARHVKNVPGRKTDVNDAQWLQQLHQHGLLRGSFRPRDGVARLRALLRHRERVIDYAASHVQHMQKALMLMNVQLHHVVTDITGVTGMKIIRAIVDGNRDPAVLAEYRDVRCKASPEVIREGLNGNYRTEHVFALRQALELYEFHHVKVAECDVEIEAALRELNDDREPPGTPMPKVRHAKGKNEPAFDLRSAMYTLLGTDVSQVHGIGPYTTLRLVAECGDDMTKWPTAKHFASWLCLAPGNKISGGRVLSSKTRRSSSRAAALLRVAAVNIGRTHTALGAFYRRLAARAGKAKAVTATARKLAVLFYNTLRFGMTYADPGADRYEQDYRSRVVHQLHRRARQMGFTLVPDAAENSSAGVS

SEQ ID NO: 317421 - protein, 427 aa, unidentified
MTQTIPASTFAATIGLDWADQKHDLWIQAATGGKPEHLILEQTPEAIHEWVAKMGARFPNQRIAIAVETSRGAIISALQAYAFIVLFPINPKMLCSYREAFCVSGAKDDRTDAMLLEEYVRFHFAKLRPLQPDTELTRKLGGLVENRRDLVDERTRLVNQLHSLLKTYYPLMEVLFDDLTTLLATQFLLKWPELASLKKAGAVALRKFFYGHNCRSAQTLEQRLQAVEKAQPLTIDPALIEPAVLKVKALAGMLKVLHEAIAEIEDHTSQAMDAHPDAPLFRSFPGAGPVMAPRLLVAFGTNRDRFENAQETQQFYGIAPVKKQSGQSKVIHMRYRCPKFGRQTFHENAGHALRKEGWTKEFYDQQRERKKGHHAAVRSLSFKLIRIYFRCWKDSKPYDRARYEKALDTHGSPLSAALKNKVSKPTK

SEQ ID NO: 317422 - protein, 405 aa, unidentified
MWYAGIDWADQHHDAVVIDEAGKRVGTTRVAHTAAGLDTLVTFLKGIGDVAAHPDHLACIVETNRGLLITAVLDAGLPVYPVNPKTVDRHRKPSGAKTDAIDAYLLARTGRSDLADLRRLTPDSPLIAELKALTRDQDTLIQSQTRLVNQLTACLKAYYPAALELFGKLQQPTTLAFLQAFPTPEQARAATVEQIAAVLKEAGHPTAAAKAAQIRGRVDQPQLRADAVVTRTNTRLMLTLAAQLRVLLPEIAAYDEEITRLFRQHSDSRAFASLPRAGTRLAPRLLAEWGDDRGRYTDAASVQALAGTSPVPFQSGNFVKAHRRYACNKPLRNTLQQFAWQSTQKEAWALTYYQRKRRDGKSHAMAVRALANQWVRLIYALWAKHETYDPATFLAAQQAHAPRAA

SEQ ID NO: 317423 - protein, 368 aa, unidentified
MSDIIRIGVDTSKSVFQLHGVDAAEQPVLRKQLRRRDMLAFFGRLPPTKVGMEACGGAHYWARELVALGHEVKLMPPQHVKPYVRRSKNDRNDADAICEAMSRPRMSFVAIKSAESQAAQMLMTMRERLVSYRTQLINTIRGHAAEFGFAAAKGPAHVEPLLSRIAEDATLPELAKELFAMLGQEFSRLKVELREIELKLKAWHRQDEMSRRLAEVDAIGPIGGCLLSIKAPDPKAFRCGRDFAAWMGLTPKDHSTAGKIRLGAITRAGDEALRRTLVVGATSVIKQVSKGKGNPSPWLRDLVARKPPKLAAVALANKVARIAWKLMVSDDRYDAARAGIVSPGASLAPCSRRQGRSAPPAAVASGQP

SEQ ID NO: 317424 - protein, 395 aa, unidentified
MYSVLVGVDVSKDFFCACGLDDEGEELFSGTYEMNSHGFSEFFKIVSSRSGRLDRVMVAMESTGCYHINLFSFLTSQAIRTVVVNPLLISNFAKLSLRKTKTDKKDASTIAKFLLAHQEEISQLSVSQDLQDLRDLSRDRESLCHLIAATKVEMKRVLRATFPELESIGNLYTRVMLRFVQQYPSARLAKAAKLRDIAKVLKGPYVGNKLTFSAEQIHRAAQSSVAVVSPAKEVILQGKISTLLHLEGRLEEVTKLLTDLCKATRIQDLEILTSIKGVSTKTAAPFLAEMGQVGSFPSSKKLIAFAGMDPSVHQSGKFVGTSKLSKRGNRHLRRVIYLMTTSVVSQNAFFKAYFLKRKEEGLAPQKAIFATAHKLIRVIFAMLSQRTHFKVKGAI

SEQ ID NO: 317425 - protein, 318 aa, unidentified
MTKSSTRTAGIDTSKHKLDVAVHGAATQFTVENSKAGWQHLADELTKTGVERIGIEATGGYERDVTRYLQAAGFEVVVLQPNQVKAFAKVQLRRAKTDRLDAELIAACTYIFDAHNKLPPDPRFDALADHLTFIEQIDDDIARSKTRLEHIVNKRLRRIAEAGIRRLELLRAVELKRLLAELRCHADLAERFELVLSIPGIGERTALTLIVRMPELGRLSREQAAALAGLAPFVQQSGKRQGETHIGGGRSRLRRALYAAALPASFRWNPALKALYGRLIGRGKSHSSALIACARKLLVFANTVVARGTPWQDRSATA

SEQ ID NO: 317426 - protein, 351 aa, unidentified
MIIIGVDYHPSDQYIAFVDTETGECSERRLNHSEGEAEKFYRELVAQGASVRVGMEATGYTRWFERLLAELGIEVWIGDAAKIKTKRVRKQKTDRNDAQLLLKLLLDNNFPQIWVPSPENRDLRQLLWHRHRMVQMRTRIMNQLQALAMNEGQRRKSKLWSEAGRAQLEKLPLAPWASRRRKDLLELLDRMNPSIEELTAAIEREARKWPEALRLMTHPGVGPLTALAFVLIIGTVERFQCGKQIGSYVGLIPCEDSSAGHQRLGHITKQGSSLLRFLLGEAAQAAARCDADWRRRYMHLALRRQRNIAKVAMARRLGVRLYWMWRKGWEYSDWIKFGSHAGQLGTGDGVQ

SEQ ID NO: 317427 - protein, 419 aa, unidentified
MTDSIHWFLGVDWATEAHDTCLTDATGKVHWARRPVRHDVAAVHAFLDTLLTYTNAAPSEIAVAIETPRGALVDAFLERGFNVASVNPKQVDRFRDRFTTAGAKDDDRDARVLADARRTDARAFHPVEPDAAATVQLRELTRTERDLTVQLAALASQLREQIYRVAPPLLTLSPAADDPWFWTLLEHLASPALRTTLSRTDVQKLLKDHRIRRVSVDQVWTQIHAPRFHLAPGVDEATWLHIDVLLPQMRVVDAQRRRCEKRIAGLLAEMAEAAPSEAEPGEHRDVTILQSLPGVGRTITATMFGESAQALAHRDYATLRLRTGVAPVTKKSGKRKKRPFVLMRRACSPELRDACYHWGRVSIQVDEACRRYYDRLRQRGHTHGRALRSVVDRLLRIAVAMLKHRTLYNPERLLAAAAA

SEQ ID NO: 317428 - protein, 434 aa, unidentified
MGICTLEDFHLPISGQAIVMELQRNKVCGADIHKKFLVATILSRDGTEITQRFGMTLDDLLKFKSWVIENQCEQVAVESTGVYWIPIHAVLEDAIDLIVANAYKIKHIPGRKSDLIDSEWIAELCLNGMIEPSRIFPKEDRELRRLTRAREGYVNDKTREKNKIHHALESCGIKLSSVLADVFGKSGRYLLNCLLDGVELEEMIKGIPVKSIRKKADQIREAVRGSLETTQIILIRGGLELIGSIQRRIDELDREIKNRIASREEDLRIAMSIPGIGFTSAVTILAEIGDFKDFAKAEQLAAWSGLVPSVYQSADKLVTGSITKHGSRHIRWILVEVAQAIARTNKSKLKRFFRRVQVKKGYNVAAVALARKVLCILYHLLMNREMYQEDEVTKTKSIDIDLSSLSTKLGFEEMIRVLVKAGYEIRKTNSGTGG

SEQ ID NO: 317429 - protein, 422 aa, unidentified
MKTLLSQKFTAYIGIDWADAKHDVCLQVAGETRRYFSVIDHTPQSIDRWAKSLFERYGAPIAIALELNKGPLVAALQKYEYFCLFPINPSTLARHRKTFVRSGAKDDPTDAQWALELLLTHPQRFPQLIPQSPAMRILASLTEHRRALVSERVRVSNRLICTLKQYYPLALELFNEHDTVVFCDFLMHWPTLEHLKRSRQSTFLKFFNEHNARNPRLNQTRWEIITKAMPLTQDPGVIRPSQLYATVLASQLKGLISATKDFDREIEETANTLDDYPLFKALPGAGRHLAPRLMAAFGEQRDRFSDARAMQQYAGIAPVTHRSGKKTVVYWRYQCSTFLRQTFVEWAAHSIPQSAWAEAYYRQQRAKGSSYQAALRALAFKWIRIVYRCWKTSTAYDEKTYLQALMRRGSALIAPPPEVVTS

SEQ ID NO: 317430 - protein, 324 aa, unidentified
MDAAPNRIETYVGIDVSKAKLDVAVGDDGPAFTVANTPEGHADLVARLTPLRPRRVLLEATGGLEAAAAATLAAAGLPVDVVNPRQARDFAKAMGRLAKTDAIDARALAQFAAAIRTEPRPLPDAATRELDALLDRRRQLIEIQTMETNRLKSAASKPIQDDLEAHLAWLGDRIKAVDLELDRRVRSSPAWREKDDLLRKIPGIGPVLSRTFLARLPELGRLSRGAIAALVGVAPMAAESGCRKGRRRIAGGRAEVRWVLYMAARSARSHNPLLRPFAERLEAAGKPDKVIQIAVARKLLILANAVIRDMTPWNPNHHESLSPA

SEQ ID NO: 317431 - protein, 441 aa, unidentified
MSHGRALSRGDRRRNERLARLRSVVRRDFAVVAVDLASAKQAAVVTDHDSMVLGRRMFTGNTWVIDDILDWAEPIAAKAGYAGVVVGCEPTGHRWKPLLDRSRARGLELVCVNPMLVHRGREEEDFTRDRSDFKDATIIAKRVAELRCYVPYVMEGHWCRLRHLGARRADQLVAAGSARQRLRDLLECAWPAVLSAAADPLDALTWRAAMAVSTDPGRIVAMGFGAFADAVREQLPRWGGTRRNLRILRAIFDAAHAPGGVETERAAACERAAYALEDWHYALDQVTDVEHRMVAVLDALDLYELVTTITGLSVVGAAAILAETGDPARFDCARTWAKHAGLCPRANESGNFHGSTKVSRRGRPGLRLAAWRALWGALRHNPVYAARYTHLTTRADNPLCDGQARAAIAAALLRQLFVVVTRRVAWDPAIAAGTGVVPQAA

SEQ ID NO: 317432 - protein, 370 aa, unidentified
MGPAVEPQLREAPVLSEGSWVGLDVHARSVVAGVIDRASGEVRSLRVPSGCDATVAWLQTLPAPVQVVYEAGPTGYRLARACAGAGINCVVAAPSRIRAAADGVKTDRRDAERLARLLRLGEITPVRVPEPEEEAARDLVRAREDARGDLMRARHRLSKLLLRHGLVYDATAWTRAHDAWLRRKRFESGPLAIVFDECYGRMLNAKTRRDALDKAIAELAATPPYVDVVERLVCLRGVSTLTAFALTVELGDWHRFRPQSLGPFLGLTPSENSSGERRRQGAITKAGNTHARRLLIEAAWHQRRPPRLSVTLERRRTGKSLAVRAQADRSARRLHGRWHALERRGKPRSVVVVAVARELAGHCWALATME

SEQ ID NO: 317433 - protein, 344 aa, unidentified
MHIASIGIDLGKTTFHLVALGERNKILLRRKFSRSQLLAYTANLPASLIGLEACTGSHFMGTALREQGHQVRLIPAQFVKPYRKSNKNDFIDAEAIAEAVTKQNMRFVQIKTQEQLDWQAMHRVRDRLVQRRTALINEIRGFLLERGITFPAQPIHLRKNLPTVVEDAEQNLSPRLRWLLARLWQEWKQTESDIKAITDELERISKEDARCQCLLQIPGFGPLVSTATVAAIGNGAAFRRGRDFAAWVGVVPRQYSTGGKQKLFGISKRGNIYLRRMLIHGARAVLFRIKYDSGGFGQWVHRLAQRAPRNKVVVAIANKPARMAWSVLSSGKQYRHQPLQPAAA

SEQ ID NO: 317434 - protein, 396 aa, unidentified
MANFYHSPVVGIDVAANFSVATALKPDGTVFKKNLNIKHNQNGFEKLLDFLKKIEEEFNSVPAVFCESTGIYHLTLLQFLVKHQVVIHVVNPLITNSNKNWNIRKAKTDKLDSYSIAKLCKTGDVKTSCILTEDFLHLRFLVREYYQIADNAAELKIKFSNTIYIHYPGLQFAFAKLTGKTPLAFIQAYSTPNDLINAPKEEVITFLRKSSRKGLEWAKNKYEKLIKTAHEANHIGINPNLFTNKVKRFSETYSFLQVQLSNLFDEIQNYIENSSFAESFMQNYDLLMSFKGIGPMTAITLLSEIGDIRDFSNAQKLVAFFGVDPSVNESGNFKGDKNKMSKRGTSLGRRVLYTLAMASIRKSKSGKENNKVLHHYYNVQLSTKKKEKSPISCCNE

SEQ ID NO: 317435 - protein, 425 aa, unidentified
MADCTQNTEVPTLVALDIAKKAHDAMIAYPNGKTVSMKVPNHLDGYWHFLKQARQHGETLHVAFEPTADYHRNIAFWLQEQGCKCFLVSSLSCARAREMLFNNWDKNDRRDTGVILYLLQQGLMKPFYDPLVAGTFDIQEIANNYHQISLARTRAMNSLFNHYVTLYFPEIERFFYSSRAEWFCQLLLKFPTPRSITRYREDTFVRRAWKVVGRKVSKDKLLRQIYRCAQNSIGLPVTLDSFALSTFRLQVQRFLDLSEQRKRLELTADKFLSERADYHQLRSIPGVGPIVALIIIAESGDLRRFRHYRQYLNFCGFNLAAHQSGSQKGSYRLSKRGNARLRYGFWLAATVAIRKRENSLQPNIVATSKKTPITRMYVARAERPSLPRSLESLMRWSKPTPPTKVIMKSVTRHSSDGPLGRFATR

SEQ ID NO: 317436 - protein, 343 aa, unidentified
MKLSRVGIDLAKNVYQLHGVDRSGKAVWKRRLKRHQWLKELLDKTEPGCEIGMEACASAHHWGRELQSRGYTVKLIPPQFVKPYVKSNKNDARDAEAICEAMSRPNMRLVTVKTVDQQDIQATHRIREELKVRRTAKGNQIRGLVAEYGLVAPKSLGSLRAAIPCWLEDAENGLTHYFRSLLHGLWDDLLMLDDRMCEMDKTIKRLAKSNEDCVRLQKLRGVGPMTSTAMVATVGDARQYHKSRQMAAGIGITPRQHSSGNKHRLLGISKRGDVYLRTLMIHGARSVVTGAKHKDDPLSRWVTEIATRRHPNVAAVALANKNARMAWAILRNKTDYDPAFAMS

SEQ ID NO: 317437 - protein, 342 aa, unidentified
MRGYHYVGLDVHKKSISYCVKKGDGTVVSEGKIGARRQDLDEWLKGLPKRWIGGMEATMFTGWVYDYLEPHAVELKVGHPLKMKAITAAKHKSDALDAGTISDLLRCNLFPECWMAPQEIRDLRRVLRYRNLLVREAVRMRNREAGILMECGLEYDKKRLHGKKYFRDLMESLDDDTPRTVKELLVLTRSNYEIFDSGQKRLVKELEQNEALRERIERLMSIPGVGVVTALTWALEIGDPNRFPTVKDAQSYCGLCAGRDESAGKSKRGPLSKQRNAHLQTMLVEAAKLAPRHNPQLAAAHQKEMERSSNPNRATLAVARKLVAYLLCVDKSGEKFELRDSA

SEQ ID NO: 317438 - protein, 385 aa, unidentified
MRHTEQTEAAREGAVVFAAMELSKTAWLLAAQASPSGKTSSHRLDGGDVAGLLALLRRLRSRELRSDGDEVQVVVGYEAGYDGFWLQRLLAAEGITCWVMDPGSLQVDRRARRAKTDRLDAAMLLRALMAWCRGDRAACRMVHVPSLEREDARRTHRERQRLIAERVQHVNRIKGLLATQGIYDHQPLRRDRWERLEELRTGDGRVLPLRLRREIEREIKRLELVLEQVDAIEAERDAAVAAPAPEDADAGKVALLSRLGGIGTELATVLVREGLHRPFANRREVAAYAGLTPSPFASGDRHRDQGISKAGNPLLRKSMVELAWLWLRYQPDSGLARWFTERVGAIRGRVRKITAVALARKLLVALWKYVTTGLVPEGARLKPAR

SEQ ID NO: 317439 - protein, 290 aa, unidentified
MNYSHFVGLDVGKKSFDASLVSLDQELSHHTFPNTPEGIEELLHWIKQHGVEVETALFCAENTGSYVIDLCLSSYQYHFPLALECPLTIKKSIGLQRGKNDRIDARRIAQYASLHYRKLRLYELPDKDLVRLRNWLVIRDNLVKQKVSSLKLLELTRETSRLADLMVPMTFLENQICQIKEKISYVEEEMEKIITENITLSTNYQLLTSIKGIGPVNAIVLLCVTDNFQRFSAPRKFACYSGVAPFEYSSGTSIRGKTKTSHLANREVKVYLTRAAITAVSYTHLRAHET

SEQ ID NO: 317440 - protein, 465 aa, unidentified
MSLAALPVGRGLVAGSGMALLYSVRDDPRGVAAGVQWRPRFADRSLAPARRAVRSHRNVVASSRLAQTYPAADSTHTSTMGNTMPCYDVFLGIDVGKYFHYAYAMDACGNKLFATVTAQTNQALRRLFQRARHYGRVLAVVDQPNNIGKLVVTIARDMQIDIAYLPGLAMRNLARTYTGNCTTDKRDAYIIADAARTRPDALRPVDRDHEIFTQLKYLNGLDNDLRRHYTTHVNQLRSTLLSCYPELECALRGQKLHFTWVLSLLAHYQNPERLRRVEPSRLASFARRRGARSPESLIGAMCQSIRQPSVAMGATDQLSLGIGLHANYMLRLAEDRQAILAHVDALCGQLPHTEILLSIPGIGIRTAARILMCVGDLSAFATPAHLASYAGICPQQRLSGVSINSSGPNRGVSSRKCVPMWPLLLARGHKNTNNNAAGVIIGLPMVNTRTTRPPVVSGLLVYFPR

SEQ ID NO: 317441 - protein, 355 aa, unidentified
MTASYDYHIGVDYHKSYSHLVVQDSSGKTLRSGRVKNDRQSLGGFLERYRENSHAVVEATRNWMVMYDWLDDICDDVVLAHPLKVKAIADAKIKTDKIDATVLAHLLRADLVPEAWAPSERARDLRVALRERMFYVRLRTMTKNRIVTVFDRYPEQTAQLKKLGDLFGKAGRVQLAQVNVSEIDRIQIDRGLAFIGDIDGRIKQSEATIRAMTKANANVKLLKTIPGIGEFFARLIDAEIDDVSRFRNPKKLAAYAGLVPSTYSSGGKTFHGKIIKQGNKWLRWAFVEAVTPAIASDAQLHDQYEHLKIRGTNKARVAIARKLLTIAFQILRDQRAYEPRGTSTTEGASTISRLS

SEQ ID NO: 317442 - protein, 342 aa, unidentified
MTQPASARITVGVDTHAEVHVAVANDNFGRRLDAISVPTTPAGYGELLGWARRLGPINAWGIEGTGSFGAGLTRFLHRHGQVVVEVNRPDRQTRRRRGKSDPLDAEAAARAVQAREGVIPKAGDGQVEMIRSLRVARATAMKARTQAINALKGLLVTAPDELREQLRALSAVRLVQTAAELEPGPVTTPAAAARLGLRSLARRYQALSAELTILDTELDRLTVTAAPKLLALFGVGSDSAGALLVAAGDNPDRLRSNACFSMLCGASPIPASSGKTQRHRLNRGGDRQANAALHRIVIAQLRHDQQTKDYLDRRIREGKSKKEAIRCLKRYVAREVFAALQP

SEQ ID NO: 317443 - protein, 377 aa, unidentified
MHSENIAVYVGLHVHKETLAVAIAAPERLGEVRYYGTINNEAQAVRRLFQKLQGLYGNILSCYEAGPCGFGLYHQLTAMNIKCQVIALSRIPKSPTDRIKNDYRDAISLDRLLRAGELTPVWIPDLTHEAMRDLIRARAAAKRDSRVARQRILSMLLRTDKHYAGKHWKGKHRTWLANQSFSQSSQQIAFQHYCQNLEQIEDRILQLDQEMSRLLPEWSLCNLVCQLQALKGVGQLIAITLVAELGDFSRFSNPKQLMAFLGLVPGEYSSGNSIRPRGITKVGNSELRRLLYEAAWSYRTSAKVGAWLIYYRPDSVTQYSKDIAWKAQQRLCSRDRSLTAKGKKSQVAITAVARELTGFMWDIALAAQSPFSQQKQN

SEQ ID NO: 317444 - protein, 276 aa, unidentified
MEFIALDSHKRYSFASVEEHTGAVLKEARIEHRRGAIAEFLSAWKPGTQVAVETIGNWYWIVDEIEAAGMVPQLVHARRAKLMLASSNKTDKLDAHGLNRLQRTGTLPTVWIPPAMIRDLRDLPRTRMVLSGERTKLKNRIHATLAKYAIYLEEASDAFGKRGLEELERKLELLPPHSRFCVERLLGIIEKLQDEITHFEARMKKEFRTSRPLELLKTLPGVGFILSVVINLETGEVGRFPCASRLASYAGTTPRVHASGGKVRYGPTRLDVNRYL

SEQ ID NO: 317445 - protein, 433 aa, unidentified
MIRAILEHCAGIDVGKSVVAVCVMTGEAAAEPHVEYGTYGTFTADLERMKEWLLAAGCTHVLMESTGSYWKPIFNVLEDRLEVYVANAEDVKGRKGHKTDKQDSWWLAHLFRHGMVRTSFIPPLAIRELRDLTRRRRKVLGMATSEKNRIAKVLEDANVKLGSVLSNLFGVSGQLMLEALLEGKATPEEMAQFAKRRAREKIPQIAASLEGHRMSEHHRLLIHMSLDVLRCLESQVMALDEEILRRIERHGYIRQLQLIESVPGIQQDAAVVILAETGGDMSVFPTEQHLSSWAGVCPGNKRSAGKDFRGRTTRGNRWLRSTLAQCAWALSHSKEGPLREKFWKVAARGGKKKAVLATAHAQLRLVYRVLSTDHPYSQLPAHQCDQARRLRMIRHHLRCLGRLGISAGPMLAQLSGARHTKTRQIASVEPTQQ

SEQ ID NO: 317446 - protein, 408 aa, unidentified
MNTLYVGIDVSSKSNVVYLMLPNGDKHSNFSVANSHEGSTQLVKRILSALTSHSLDTVLIGLEATSIYGYNLVYFLREDATLAPFNRKIHVLNPKQVKKFHDAYNDLPKNDYVDSFVIADCLRFGRINKEVYMGDYRYKALQNLTRARFFAVQNLVKEKQRFMNVLFKKYSTMTQEKVFSDTFSTTALAVYDEFESAEALANMDLHELTDFIIEKGKNRFPDPDAVAKAIQKAARSSYRLPKTMNDSVNQVLSISITSMKALESQIKEFDKAIKAQMELLPNVLISIPGIGPVYSAGIMAEIGEIDRFNSQAALAKYAGLAWKQHQSGGFEAEVTRLIPSGNRFLKYYLCEAAFSLVRCDKEYSDFYHLKYKEVNRCQHKRALALTARKFVRLVFRLLKDNRLYCPAK

SEQ ID NO: 317447 - protein, 381 aa, unidentified
MEKACGLDVHKDSVFACILNEQGEKILEKRFGTLTPDLTELRDVLVEHGCGRVAMESTSVYWMPVWRALESDFELTLANPYFISQLPGRKSDAKDAAWIGECLQKDQIRGSFVVGPVLQQMRQYTRQCRRLTKSRVRLAQQMDNQLQRCNIRFSNYVSNQGNNVSQRKIIRAIISGERSPDALCSLVHGRTLNKHGREVIRASLDGIFSNADVEMLKQCMEQIEFLNDQQAACLTHLEELANAHFAKEISLLCSIPGIKRFSAYCILAEIGNDMSYFPKATHLVSWAGLRPRNDETAGKIRSRKTLHGNKYLRQVLTECGWSVTRSNKTFLGRKFNQLSKRMTSRKALVAIVRKMLVIIYNVLKTGLPFDPRRNMQALLPD

SEQ ID NO: 317448 - protein, 379 aa, unidentified
METSSKTCVAVDTEQATLFVALELSQATWLVGLHSPIADKISINRIDGGDTDKLLALIEKKREQAARQLGRPVRVVSCYEAGRDGFWLHRFLIGHGIDNRVLDSASILVDRRARRAKTDRLDAAALLRVLMALVRGEEQVCRVVQVPSIAQEDERRLSRERERLLHERNSHIARIKGLLALHGVRDYRLVVGVWKERLDAIRTANGHALPARAKTEIERECRRLWLAKEMLAEVEREIEQMIERDSAAAGKLIRVRGIGPTFASVLTHEVFYRSFDNRRQVGSYLGLVSIPWQSGGVRRDQGITRSGNARARRCAIELAWLWLRHQPGSALAGWYRTRIGTMTGRMRRIPLVALARKLIVALWRYLQTGTVPEGAVLKA

SEQ ID NO: 317449 - protein, 370 aa, unidentified
MQFVGIDLHTNKFTCCYRDEKHPVEGKEEVRIETYSLTGLGLADFFKTLNLETYVLVEATITTFSFVRLLQPLVKEVIVANTYELKQISLGRKKTDKVDADKLCRILKMQVLSGEKTISPVVVPPEEIQELRGLFSTYRLLKKQTTQIKNRIHSVLKEKLYGFTREKIFTEKGRECIRGLESGTVLFFQISLLFSELEHLEGLIESLQDKIKEQAEPYMREIKILTSMKGVSVFMAIAIITDIIKVNRFKDSKSFTSYLRSAPKVESSNTTVNMRGTNKQGRKLSATLLSQSMNHILDASPKLNKWYTRLSQYKKAGLVRTGLRRRVFAEIYQMLKKGEYHYGREVEKHEAKLLQYRKLLEKKKNSVKTA

SEQ ID NO: 317450 - protein, 325 aa, unidentified
MKASTRKAGKQRKPVVGIDVSQDTLDAGVLPSGEEWSTGQSPEEVQALAERIAALKPELVVLEATGGLELPVVYALVERGVPVHRAEPRRARYFARSVGLLAKSDRIDAFGLARFGATGELAPQSFPDAHTRRLDELNTRRRQLVETITAESNRLRAASDAHARASIQRHLAWLKSERKALEEQIRACIAACPETQGKLERLCTVPGMGETTTSLLLGACPELGTLNRWEAAALTGTAPLNNDSGKYHGPRRTWGGRKDVRCALYMAALVATRHNPVIRAFYARLLAKGKPKKVALTACMRKLVVILNAMLRHGTVWRPTAPAAA

SEQ ID NO: 317451 - protein, 567 aa, unidentified
MSIPSAQAALPQPVPSPDPAPDAAGPTDVQVIRPYGVGIDTHSKFIQGCVMYQCKGSGGQVVVRQREKEFKTHWLDLVAAKRWVMGIVGAYGDASTLRYCIESTGTYHLPVLKAWGGIPSVVNPLLAGASHRKTDVLDARTLAHHSITGLWKASFIPSEQAQILRVLWARRREMARRATRAANQLNNIVLRFGFTFGADVSMRSIQGESILSDLVDGRPVMVDGAPPDGLPADVRPIVSALLTDLRSDLKEAHGAVVASENFIKARDWPTGQGTMPGEQLLNILRTVPGVGVTTALNWLAEITDPRRFQSSKQVAAFAGCDPSLKVSAGKITSYVRRQGNLRLHQALLYAATGLLRRRDDPLGNWGRSIAGRHKKGGHKKACGAIARRLACGLWEVHRRGVPFSYEQYTLAQTIVCPLTPLGVILSPRSVKVLREAGIRNSHQLAAAYAAGKLAAITGFGDTSIDLVKQWIAKEGKHVRSGDPHFSEAGAPEKTQARMYSLEPGLKFTKKGDNRKDTSEQNSEANASDATGAAAEARASAAAPVRRSGTAGGSRALRSAATANGGHQ

SEQ ID NO: 317452 - protein, 313 aa, unidentified
MSQNNPPILYIGLDVAKLTLQVDLAGKPHSLANDAKGHARLLKLLRPHPKVQVICEATGGYEQPAVHSLQAAGLAVTVLEASRARAFAKAQGQRAKTDPIDAALLSAYGRACQPLPTPPLPVHQRQLAEVVQRRRQLVELLTQERNHTEHYQDVFRQRQARQLIKLLQQQIDQCEQTITTLLAEDPLQKQKAQRLQAIPGVGPVVASTMLAEMPELGTLNRQTAAALAGVAPYNSDSGNVKAPRHIAGGRAAIRCALYMAALSAVRHDRILKEFYQRLLKTGKRPLVALTACMRKLIILMNHLLKNPHFQLAT

SEQ ID NO: 317453 - protein, 385 aa, unidentified
MQVMIEGQSRFQPFGLPYWGFIHLNKGVGSMTASYEYHIGVDYHKSYSHLVVQDSSGKTLRSGRVKNDRQSLGGFLERYRDNSHAVVEATRNWMVIYDWLDDICDDVVLAHPWKVKAIADAKIKTDKIDATVLAHLLRADLVPEAWAPGERARELRIALRERMFYVRLRTMTKNRIVTVFDRYPEQTAQLKKLGDLFGKAGRIQLAQVKVSEIDRIQIDRGLDFIGDIDVRIKQSEATIRAMTKVNGNVKLLKTIPGIGEFFARLIDAEIDDVGRFRNPKKLAAYAGLVPSTYSSGGKTFHGKIIKQGNKWLRWAFVEAVAPAIASDAQLRAQYEHLKIRGVNKARAAIARKLLTIAFQILRDQRAYERRGESNTEGASTISRLS

SEQ ID NO: 317454 - protein, 368 aa, unidentified
MGYHTEAFVGIDTSKLRNAVAIAEGGRDGEVRFLGEFPATEAAIRKLASKYRRLMFCFEAGPTGYWLYRLIKSLGHECLVVAPSLIPKKPGERVKTNRRDALSLAKLLRAGELTAVWVPDERHEAMRDLSRARQAAKKDQQGKRQQISSLMLRLGRIYPGKKTWGPAHMNWLMAQKLEHREQRTAFEELIEGMRQESERVERLEEAIREAVPEWSLAEVAAALQAMRGIDLIAAVAVLAELGDLSRFRNPRELMGYLGLVPSECSTGETVKRGGITKAGNGRARRILVEAAWSYRYPARVSREKLPKVSAAPMRVREIAWKAQTRLCRRFRSFERKGKRRTVIATAIARELSAFIWAINREVMAGQQR

SEQ ID NO: 317455 - protein, 355 aa, unidentified
MKRRHFIALDVHCAFTEVAVVRETGNVVLKERCATTIPTLVTIIQKVPRPRSLVLEEGALADWLWRNLRAHVDDMVVCNPRRNHLIAKEGEKDDPIDAEKLAQLYRGGYIKAVHHGDSLGRAIFKQHVALYHDLVRQRVRQAQHVMALVRRHGVFVRERHFAKPESRAGLLTRLPESRLLRNDVRLLWKGYDLACAQEEYARRILVRLAKKQEVLERFVQLPGIAWVRAATLYVWLDTPWRFRSKSALWKYLGIGLERRHSGTGPENLRVPFVVNRLLKTTILGAAKSAVLQGDNAFAEQYRRWLENGLSPRMARRNVARSLATTLWGMWKNGSAYQPDWVGVAGAANKAVEVSV

SEQ ID NO: 317456 - protein, 340 aa, unidentified
MEEYDGREFVGIDLHRRRSVIVRMTPDGQRIGPAVRIDNDPFELAQQVASWGESPEVVLEATYGWYWAADVLADAGANVHLAHPLGVKGFAYRRLKNDERDAADLADLLRMGRLPEGWIAPPEIRGLREAIRHRSKLVALRSGLKAQVHAVLAKQGVRVPMSDLFGVGGQKLLDELQLDAPFSARVASLRRLIDAFTFEIDILTKRNSAQLKTHPGFQAIQAIRGVGPVLAAIFVAEIGDVSRFARPQQLCSWAGMTPKHRESDTKVHRGRITKQGNPLVRWAAVEAVQTLREGPLGRARVRIGERRGANIGKVAAARKLLTLVFYGLRDGHIRCLAPTA

SEQ ID NO: 317457 - protein, 407 aa, unidentified
MGVFVGVDWGGGAHAVCVLDAQGAVLDRFGADHDREGLGTLLERLARHGEPGGTRVAIERPSGLLVDTLVGAGFVVVPIHPNLVKACRPRYRAVSAKSDPGDAYILADILRTDGHRLRPLGPQSDAIKALRGLVRGRDELVATRVALANQLAALLDGFWPGAAAIFADVASPIALAFVERYPTPEAAARLDVERLAGFLAQHRYCGRRSPEALLARLATAPRGRAGEAESEAKGELVRALARTLQALVAEIARITGRIEHAVAELPDGRIVMSFPRAGRVCAAQILAELGDVRERFPTEGQLAAEAGLAPVTYQSGKSRAVGWRWACNKRLRAALTCFADNSRRESAWAADVYRRARARGCDHPHAIRVLGRAWARVLWRAWTDGQPYDRARHAAAKPFLAPAAATG

SEQ ID NO: 317458 - protein, 347 aa, unidentified
MRFYTKQHKYYCGIDLHTKKMYLCVLDGTGAIVLHRNIKTDREVFLKTIEPFREDMVVAVECMFTWYWIADLCVEENIPFILGHALYMKAIHGGKAKNDKIDSHKIGALLRGGMIPMAYVYPAKMRATRDLLRRRNHLMRKRAELYAHMQNTRTQYNLPDFLGCIAKPQNRQGIVERFEDPSVQKMMETDLAVIEAYDPIIAKMERDIVRMADQHDPVAYALLKSIPGVGRILGLVILYEIEDINRFPTVQDFASYCRLVKSIKESNGKKYGSSGKKIGNAHLKWAFGEAAALFLKGNEPGKTYYEKLANKHSKGKALSILAHKLGRAVYFMLKNKKPFDQDKFLGL

SEQ ID NO: 317459 - protein, 409 aa, unidentified
MQVMYQRCAGIDVHLRFLVVCLSIIEAGQRRKEIRSFRNETADLLALRAWLLQEQCSHVGMESTGVYWLPVYRRLEGFFELVVANAQHMKAVTGRKTDVQDAEWIADLLQHGLLTASFVPSQEQQDVRDLTRLRVSLVQERARLVNRVQKVLEEAGIKLSTVLSDVMGLSGRAILQALCDGESDPERLASLMHSSVHASREQVVAALTAEVREHHRFLLRELLTLIEAQDRSIKCLEREIERHLHPFEEQMKRCEQINGVSQHVLYVLMAEVGTDLSRFPDAEHLSSWAGMCPGQKESAGKRLSGRSRPGNRYVRAALVQAAHGVRRSHTYLGERYRRLKKRRGSKRAALAVGHSILVIYYHMMKTGQEYQEKGEEFFQRKDHGKVERQLIQRLERMGYQVTRAPQPAA

SEQ ID NO: 317460 - protein, 337 aa, unidentified
MKVTLIGIDLAKSIFQVCGVNQAGKRVFNRQVRRAKLMALLIQHPDATMAMEACSGSNYWGRELQQRGFQVKLIPPQHVKPFVKGNKNDRNDAFAITEAARRPNLRCVEPRTLAQTDMIQVHRVLDRMIRQRTALINQLRGFLNEYGVVVSRGKEKLLSAIPDLLEDADNGLTSSSRALFQAMVDEWRQLNEAIDRVEKVLKGQAKADEAAQRLMKMKGVAERIATATIAHVGNGHGYQNGRHFAANLGLVPKEHSSGGKQRLGGITKRGNRYLRRMLIQGAWSVIRNVDKNDDRMSRWARQLIERRGKHKAVVAVANKMARIMWSMLYHQTEFRAH

SEQ ID NO: 317461 - protein, 315 aa, unidentified
MRAVPCFVGMDVAQAQWEIALRPAGERWVVSNDAGGVVTLVERLQALHPTLIVLEATGGLERAATVALATAGLPVVVVNPRQARDFARATGQLAKTDALDARALAHFADVIRPTPRPLPGAQTQELRALLGRRQQLVVMRTAEQNRLAGTSERLTKDIVAHITWLNAAIATLDNDLETILRASPLWRENDDLLQSAKGIGPVCARTLLLELPELGTLTRQQIAALVGVAPLNCDSGTLRGRRMIWGGRAHVRTVLYMGTLVATRFNPQIKVFYARLLAAGKVKKVALTACMHKLLTILNAMLKHRTPWQPQEVQS

SEQ ID NO: 317462 - protein, 347 aa, unidentified
MSEITLIGIDLAKNIFRINCLDENGKRVMNKNLHRESVVQFFASLSECTVAMEACASSHYWGRTMKSLGHTVKLIHPRYVTPYRLGDKNDANDAAAICAAAQRPDMRFVRLRSQRQSDIQGLHRVREGLVAERTATINRARALLAENGIVIKQGPTNVFSALPVIIDDYENNLSGMMRQLLRMQYALLLALREQLSELGKMLQALVTQEEAYQRLMQLPGLGVITATLLGSERGNGSAFRNGRAFAAYLGLTPRQHSSGGKNVLLGISKHGNRYLRTLLVHGARTTLRSILFGRSPFGGGPIEAWATELLNRRGKNKTIVALAGKLARMAWAILAKGVSFQKAACAA

SEQ ID NO: 317463 - protein, 426 aa, unidentified
MRFIGLDVHKDFCEVAVVEGDACWSGPRVRSTPEDLEVFAQSLGPKDQVVLEATGGALAIARILEPHVGRVLMANPMAVRAIATAKAKTDRLDARTLAKLLAAGFVPGVWISDERTRLLRRLVSRHAHLVRQRTRAKNEVHAVLQRTLAGRPPVSDLFGKRGRAWLGAQDLPADERQTVEASLRHIDFLDGELRLVDRTMAIQVLSWPEVRWIMTIPGMGAVAAAGVMAAMGDVRRFPTSRHLVGYLGLDARVRQSGSGPARHGRISKQGSAEARHLLVEAAWAAMRTPGPLRAFGERIRARRGANIATVAVARKLAVLCWHVLTREEDYAFGQPSLVREKIRRLELAAGAPNRNGYRNPVRVFATPAQRRLEREVGDQAEKAYRRFVKDFRSSGKKGAGATTGARISAARKGQAARQEQAPDPAL

SEQ ID NO: 317464 - protein, 323 aa, unidentified
MNKGIKYFGLDISHLVFDVTDSEGNYYQFKNNGLGFKKFAKLLNLDSHCVMEATGYYHYQLAYHLLESGIKVSVENPLSVKRFIQMKLSKIKTDKSDSKLICEYAQQVELKLWKGNSKAEMECLQITRVLSVYTKQSTMLKNKLHGEAVLGEPSKAVVRSLKRSLTHLKKEMKTLEDKLLVLVKQSHQDLLTRLKTIPGIGPKTAIMLVVLTGGFDRFTSASELCSYAGLTPVIRQSGSSVKGRPRISKIGNQKLRNLLFMCSFNACKCNKACRDLYERIVAKGKSKKLALIAVCNKLLKQAFAIAKSGLIYDETYRSTLMKN

SEQ ID NO: 317465 - protein, 339 aa, unidentified
MKVYAGIDLHSSNNYIGIINDQDQRVYQKRLPNQLNNILQSLEPFKESMEGVVVESTYNWYWLVDGLQAHGYKLHLANPSAIKQYEGLKHTDDKWDSFWLAHMLRLNILPEGYIYPKEERPVRDLLRRRLLFVRHRTSHILSLQSSLTRNRGYTISARDIKKLDSCDAATLFDNPFLAVAARNSISAITFLKIRITEIEKAVKSHIQLTPEFEYLLTIPGIGNILGLTIMLEVGDIARFPKVGNYSSYCRCVKAERLSNSKKKGEGNRKNGNKYLSWAYVEAANFFRRYCPKANAFYQHKKAKKNGIVAIKALSNKLARASYYIMRDQVPYDPEKLFSQ

SEQ ID NO: 317466 - protein, 415 aa, unidentified
MTQSKDNKILSVVHPVCCGIDVHKMIVVACVLSPGKDGEVKKVIKEFGTFTDDLFDLKKWLLEFECPVVAMESTGIYWQPLHNVLEDAFEIVLVNARHMKNVPGRKTDVSDSQWIAELLRHGLLKSSFIPPKHVRQWRDLSRLKKKQISTLSSYKNRVHKLFESANIKIDSVVSDLFGVTGRNLIDLLLSNKAISLDEVKSCTRGKLKPKVNELYRSIKGFFNDHHRFVLESLMRTIAYLEEEIKLLHTRLQDLLSDRKDVINRLIEVPGIQENSAFAILSEIGDTLETFENSPALCSWAGVCPGNNQSAGKRKTGKIRVRGQLLKTTLVEVAWAAIKKKDSFYREKYRRLRLRRGPKKAIVAIAHKILKAVFDIIRNGNRYKELGLVHFEKKKEKTLSKLILELEKHGLKAVPA

SEQ ID NO: 317467 - protein, 331 aa, unidentified
MKELKKVVGIDVAQKELVVTIGRLLEDLSVDLFSYKVFKNNEKGFSALVEWVSKLVENHEEVHYVMEATGVYHQKVAYFLDTNQLKVSIVLPNKISNYFRTLEVKTITDKTCSQVIARFGLERKLDLWKRPKTVYKNLQQLTRERDQIVAERVIVKNQLHAEKVEAEPNSMTLKRISERIKLLNKQENEIKNDISKILKNNAELKEEIDRMMTIPGIGELTAVIILAETNGFELIRNKKQLTSYAGLDVKEKQSGTSIKGKPKISKKGNRSIRKAMHFPSLVAVKWDENFKELYARLVSKHGIKMKALVSIQRKLLEMSYVLYKKIGRAHV

SEQ ID NO: 317468 - protein, 393 aa, unidentified
MIYVGIDIASEKHDCCILGEHNKKLESFSFSNTRDGFISLLAACKKYAEPEQTKIGLESTGIYGDNLRDFLRRNGYEIHTFNPLLIKKSMQATTLRKTKTDKSDASFLASYLARELPDPDPQISYHISELKSLTRARFSVVGACSKATTQLKALLVQVFPEFHTAFSDVFGVAAIAILRKYPTAKKLSAAKKTAVAKILSEASRHRLGEEKAAMLIDLAKNSVGCHSETKALEMQYYLDQIELNTAYIRRYEAAIREIMNEIDSPITTIPGIGLVLGAMILAELGDVTRFAAPEKGLAFAGLDPSVYQSGKDTPASGPMVKRGSPKLRWALLMAARSTIVHNPNIAIYYQKKLSEGKHYNVICSHIAKKLVRILYSLLKKNTPYSLFYPQISA

SEQ ID NO: 317469 - protein, 400 aa, unidentified
MIAVGIDVSKCKRSVAGIYNAGEILLPPKVYTHTYSALLSLVSLLKKQNDDIRIVMEATGHYHYPILKLLLGHHFFVSVVNPYIIKKYNDNNLRKVKTDKQDAIRLAFYALEKSYCLNAYVPAGEKYADLKFLYQQYTQRIHIIQKEKINLCHLLEESMPGLYDMLSTSVRNPSKNLLYSFVKRFKSFNRIKRMGKERFLNSYFKMAAEIGSRRRKNYALDIYEMAKDCIATGSTEPYSTMAQEECLRSLILAEEAANRLCEQMNSIANTLPEYPLVRSMYGVGDKIAPQLIALIGDIRKFKSGKALNAYAGNDAPPYQSGQFESKNRHISKRGSTELRKVCFEIMCCIKVHKSSEDPIYKFMQKKENEGKAKKVAIMAGINKFLRIYYARVSEVYQKAL

SEQ ID NO: 317470 - protein, 359 aa, unidentified
MEQKRFVGIDLGKRTYEMKIIGINGKVTGTNGQTNPSGRKLLYRKLLATDRVAIEVCSLGMVMAKEIQKEVGCEVVLLNPSQLVLIYRSLKKNDKEDALKLARLVQKYKNEELPKVELPTEHEENLRQILTEIRQLKNDRTKEINRLHAIFVECGITEIKKKDLATIDNRIKCIKMLKGIALAQAERILKKLELVETQTEEVEELLDKEIDGDKNIEKLTEIPGVGKQLASAYVAFIGDGSRFPNASTIGAATGLVPRLDMSSTVCKMGHITKCGNKNLRTLLILAAWSHVRSRDGGALKDKFLYMTRFQSKGKKIAIVEIARKLAELMYILLKNDTSYEKRPSPTISQLVDEAMKFSS

SEQ ID NO: 317471 - protein, 325 aa, unidentified
MAIQQKNEVPFEEVVARGCGLDVHKKAIVATVSGTDIRQETRTFQSTTRSLTQLKEWLLELSVTHVAMESTGVYWKPVMNILEPGGFTIMVVNARHIKYVPGHKTDKKDSAWICKLLRAGLLKGSFVPQRDQRDLRDLTRYRRKLVQQQAAEHNRMIRIFEDANLKLSSVFSNIRGRTCTSLIDEVIRGETDPQKLAALCTHPRLKHSQEEIAEAVEGHFTEHHRFMIRAIRRSIRNIEEEIEVIDREIERRMQPLQERIEQLCEVPGMQKSSVRELLAEIGVDMEVFPTAEHLTSWAGLAPGNNESAGKKKVHTPTTATRQRRP

SEQ ID NO: 317472 - protein, 344 aa, unidentified
MKYFTGIDVSLRSVSICAVDETGVVRYENKVAAEVDVIVASLRRFSGEISQIGLEAGTLTQYLTYGLRKAGFEVICLEARQTAATLAAMRNKTDRNDARGLAQILRSGWYRTVHVKSLESHQVRALLASRKAILTKCVDLENELRGLLKIFGVRLASRVGHGSFDEAVRGVIASEPLLARALVPLLDARTVLYRTYLKLDNAVKAVVRTDPVCQRLMTVPGVGPVTSLTFKAGVDDVNRFRSSRTVAAHFGLTPRRYQSGETDNPGRISKAGDRDVRMALYTAAHALMTRSDAWSTLKAWGLRLAKVRGHRRAVVAVARKLAVILHRMWVDGTDFRAARLQGAQ

SEQ ID NO: 317473 - protein, 269 aa, unidentified
MDHFAGLDVSVKETSVCILDDAGKIVKEVKVASEPQALLKVLGNPTYRFKRIGLEAGPLSQWLFSALAEAELPVICVETRHMQAVLKAQINKTDRNDARGIAQMMRVGMYRPVHVKTLRSQKLRMLLTHRKLLQSKAIDIENDLRGTLRNFGLKVGMVGAARFEARIRELVEGLPDLAVLVEPLLVVRQVLRQQLAVLHRRLLAMVRDDEVCRRLMTTPGVGPLVALTYRTTVDVPARFRKSKSVGAVFGLTCSRYQSGEIDWSGRISR

SEQ ID NO: 317474 - protein, 340 aa, unidentified
MGEVTTIGLDLAKHVFQVHGVDAEGATVLRKQLRRAQVLAFFSRLPPCLVGLEACATAHYWGRELRALGHEVRLMPAQYVKAYIKRNKHDAADAEAICEAVGRPTMRFVPVKTADQQAAVLLHRGRERLVRQRTGLVNALRGHLAEFGVIAPQGLRNVGKLIAIVRDEGDARLPDLARQVLQVLAAQIEQLAAAVAAIEKQLMAWHKSNPVSQRLASVPGIGPIIATALAATVVEPSGFRSGREFAAWLGLVPRQNSTGGKHRLGGISKRGNQYLRRLLINGASANLLRSKATNADPWVIGLRQRRPPLVVAVALANKTARIAWAVMHRHENYQRVPAAA

SEQ ID NO: 317475 - protein, 404 aa, unidentified
MWFAGIDWADTHHDILVLDERGQKLASFRVMHTSKGLDELASRLTAICGPEHKAELACIVETTRGLLITHLLEAGFAVYPVNPKTVDRKRSASGAKTDQIDAYLLAKHGRSEIADLRRLEPDSPLIAELKALTRDQDGLIQMQTRLVNQLTACLKAYYPVALTLFTKVQQPSTLHFLLAYPTPQEAMNASCEEIAELLKSTGYPTPKKTAASIVHQVHQPPLTADEVTCRTKSRLLIALIRQLQPVMEEIAAYDQEIERLFLMHADSHLFRTLPRAGKRIAPRLLAEIGDDRSRYQDTASLQALAGTSPVPYESGNYAKPHRRYACIKPLRNVLQQFAWQSIQTEAWASEYYERKRREGKSHTVAVRALANVWVRILFALWLKGEHYQSAIFEQARHMHAPRAA

SEQ ID NO: 317476 - protein, 412 aa, unidentified
MNAVGIDVSKGKSMVAVLRPLGVVVAKPFEVGHTASELGKLSAFLKSLDGETKVIMEHTGRYYEPVAQAIHDQGLFVSAVNPLLIREYGGNSLRRVKTDKADARKIARYALDNWAELREYTPMDIIRYELKTLNRQFHLTSRNRTACSNNLVSLLDQSFPGANRWFQSPTRKDGSQKWVDFAMAFWHVDCVRGVSRAAFTERYRKWCKRHRYNFSAEKAEQIHREAREMIALVPKSATTKLLIQEAAAQLLSLSCTAEILRAEMNHMAAELPEYPVVMGMCGIGTSLGPQLMAEIGDIRRFAGKQSLVAFAGVDPMPNQSGMKNSRSNRSSKRGSPCLRKTLFNIMTVLLRNAPLDEHLYQFLDRKRAEGKPYYVYMTAGANKFLRIYYGKVRDHLAALVIPLHDTTSADPQ

SEQ ID NO: 317477 - protein, 419 aa, unidentified
MKNSKTKNMKTVNERTLIVAIDIGKSVHHGYFRGPNGQDIKPFPFYNGQKNYQEFWLKILTFKQEKSLKQIVVGFESTGPYAEPLMNFLATKPVKLVQINPMHTKRLKELTWNSPNKTDTKDPRVIADIISLGHALTVVVPKGPAAELRRLTQARQRASKNCTALVNQLHHLVFVIFPEYTQVMKKITSKSSLYLLKHYTSPEEIVKCGFDNLHVALKRVSLGRLKNGQAKALFEAARDTTGIDEGKESLLAEIRHLISCIERELQFMDHLEDQMSQYLKQIPYSQSILSIKGIGEVTAAGLIGEVGDFRHFTTISEIMKLAGLNLYEISSGKHFGQRHISKRGRAYLRKLLFFSALNTIRTNGIMHARYLMMVERGMPKVKAVVAISRKLLRIIFAVVRNHTTYMQNYNSLNYLKLAA

SEQ ID NO: 317478 - protein, 448 aa, unidentified
MAAVIIGVDPHKGSHTAVAIGGDEMPLGQVRVRACDGQAGQLLDWARAWPQRTWAVEGARGMGYLLAQQLVAAGEKVLDVQPKLGARVRLLAAGDVNKNDPNDARSVAVAALRAPGAEVRADDHAAVLKVWSKRHRDLGRLRTQAACRLHAVLCELIPGGVSRRITAGQAERILGPLAPADAVAAARIELAAGLIEDLRRIDAQIRETRKKTDTAVRASGTSLTGLFGIGPIVAATVIGESRDVARFPDRDHFAAYNGTAPIEVSSGSRRTYRLSRRGNRRLNHAIHMAAVTQVSHRHSEGRAYYDKKIAEGKTPKEALRSLKRRVSDAVFARLRADALRAAARAGEDPGGQTGNGSVPGAAGSHPACRLFGKATPGSPAHPTTITAAPEPVCTAGLSSAAANSPPAAKTRVQVERPQRSEDERPGRGARRRPHSAARKGTGKVGPAP

SEQ ID NO: 317479 - protein, 339 aa, unidentified
MPITIGLDIAKRFFQLHAINRDTGEVERLKLRRSEMTIHFANRLPCLVAMEACGSSHHWARELRALGHEVRLIATKFVRPFVRSNKTDAADAQAICEAALRPEMRFVPVKTEHQQAILSLHSMRDGLVKARTAQIHQIRAAFYEFGIDMPEGRHWCVKSLPAAFERLEGKIPQMVIDALQLQLELIRDLTGRVQEIERKLEAYKKTDERCSRLLKVPGVGMLTATAIVASVGDAKAFRSGREFAAWLGLVPRQSGTGGRVRLFGISKRGSPYLRVLLIHCARAVVARQKRHSAWLEQLLARRHWNVAVVAQANKIARTIWALLAHDRSYDQDYSKTQIV

SEQ ID NO: 317480 - protein, 409 aa, unidentified
MLTKCACGLDVHQATVVVCLLTILDHGKVKKQMRSFGTKTRELVELRQWLESEGCTHVAMESTGVYWKPVYAILEEGPFELTVANAQHIKHVPGRKTDVKDAEWIADLQLHGLLKPSFVPPKPIRQLRDLTRYRRKLVESRSAERNRLLKVLETANIKLSSVASDVFGVSGMLMLEKLAEGKATPAEMAELAKGRLREKIAELEPALEGRMEEHHRYLLQLQLRRLRDLDQDLKQLDSRIQAKLQPYREEMDLLMGIPGVDWGGAAVIIAELGPDMKGFPSAAQVSCWAGLAPGNHQSAGKRRHARVTKGNVHLKTALVEAAHAASRAKGTYLRDKFYRVKARRGAKRAAVTVAHKILVAVYHMLSQKVPYKDLGDVYLDKLNQHQLTRNLIRRLERLGYCVTVQPQAA

SEQ ID NO: 317481 - protein, 274 aa, unidentified
MTYIGIDISKATFVAAFLHGKSYRTETFPNDAKGIRRFISKLDPAIHHCVMEATGNYCFLLLYLLDKSGIRASLINPKKIKNYARVMMSVTKTDSKDACLIADFGERFKPEPYKFPSEQIMILKQKKTVLRQLQKQLTATKNLLSSLEPLPVKDKKCVNSLKQTITFLEKQIKYMQQEMEAVVTEVFDRQLKLLTSIKGIGVTLATALIIATGGFTYFDNAKQLSRFIGICPTIEQSGTSINIRGHINRNGDETLRSMLYVAAWSASQHNKACK

SEQ ID NO: 317482 - protein, 354 aa, unidentified
MKRTTKYVSLDVHQATTLASVRAESGRVVARTILPTEAAAIVAFFRGMRGAIHVVFEEGTQAQWLHDLLAPLVDRVVVCDRRGTSQEGNKGDRTDADQLSEQLRRGALRAVYHGSPQREALKELARTYSNLVQDGTRVMQRLKALFRARGIRTPGTRVYHPDDRSVWLAQLPQRGVQFRAATLYAELDVLSELRPKAKAAMLTEARRDPAWRVLRSIPFLGPVRVALLLATMQTPWRFRTKRNLWAYTGLAVVSRSSADYQLVHGRPLRRRRSPMTRGLNRNHNRVLKAVFKSAATAATGRAGALQDFYHSMIARGMREELARVTLTRKLAAITLRLWKTGERYDPAKLTLQTR

SEQ ID NO: 317483 - protein, 330 aa, unidentified
MKQWEFTLGVDVSKNTLDISCSELSEHIKIKNGTEGFVLFLKWCRDFKIDLQRSFLVMEYTGGYEYKLLQFCEAQKILYTRIPGLAIKNSLGIARGKNDKVDSARIAQYGEEKHKSLKASKPLNAAIASLKELLSFRKRLVRENAGYQASIKEREHMYDVNKKDIVVKTLQQKQKANIKSIEAVEVEMMKIVAKDEKIHTNYKLITSIRGIGKVNGLMTIAYTENFTSFDNPRSYAVYVGVVPFDHSSGTSIKGRKRVSHIANKELKQELNQAARSAMQWDKEMSSYGQRKLQTKCYKIVLNNIKFKLILRMFAVVKKGEMYVDNYKKTA

SEQ ID NO: 317484 - protein, 358 aa, unidentified
MEAQGKKIDFTDQNIYAGFDAHLKSWKVTVMAEDIVYKTFTQPPRPEVLFNYLQEHFPGGTYHTAYEAGFCGYWIHDKLVSFGINSIVVNPADIPTTDKERVQKEDKRDSRKIARSLSSGNLTPIYIPSLKTQRDRSLLRTRAMLVRDLARYKNRIKSFLYFYGISIDSSFSNPQSHWSNRFMNWLESIDMGEESGKEALNVLISECKNLRASILNITKQVRRLSQSETYHERVILLRSIPGIGLLTAMIILTELETINRFRNIDNMCGYIGLVPSTKSSGEKEKTGDITPRGHNVLRTAIIESSWTAIRNDPSLMRSYVSYIKRMDENKAIVKIAKKLLSRIRFVLTNNQPYICSIV

SEQ ID NO: 317485 - protein, 390 aa, unidentified
MYIVGVDIGKNNHEATIIDDTGSIIGKSIKFTNSHNGGNKLIEHIKKYTRNSKVIFGLEATGHYWLSLYSFLMTKGYEINVINPIQSDSFRNLYIRKTKNDTKDSFIIAEVIRFGKFTNTKLCDDKILALRQLCRYKLSLTTEISELKCRITTVLDQIFPEYNKLFSDIWGVSSKAVLEKCQTPEGILKLSINDLTELLKTKSKGRLGFNKAEEIQNAAKNTFGIKIAKEAFKFQIKQLISQILFLEKQMKSLDSEIEFYYNQFNSHLTTIPGIGFVTAAIILSEIGDIKRFKNSSSLVAYAGIDPTVKQSGQFVSNNNKMSKRGSPYLRRALFLAASTCVLHDSPLNKYYNKKRNEGKHHLVAVGATANKLTRIVFAVMRDKRDYTPIN

SEQ ID NO: 317486 - protein, 450 aa, unidentified
MAQGSGLTRGDRNRNRKLADLRDVVRRDRAVLAIDLGEDKQVAVVMDHECRVLARKTVRAKAHHLDALLAWGTERAGKSGFAGVTVACEPTGHRWKALMGLADGAGQAFVCVQSMAVHRSRETDDYTLGKTDHRDAYLIGKLVTRLECYLPERADETWARLRHLGARRAALVTDVTAVRQQAADLLGCAWPAALGAAARPVESLTWRAAMAVVTARCAGRPERLRKIGYDRFLAAVRRELPRWGGKVVRHRIVKALWDALTDRRGVLQQRPGAIERIELLPEDWRELRRAVAETEKRMLAVLDELGLTGLASSIDGVTALSAAVILAESGDPRRFSSGRALVKHAGLNPSERTSATISGQTQISRRGRPGLRTAAWRAVWGALRYNKVLQARHARLTGREEGRRLADGQARMACAAALLRWLWAVITAGRAWDPAIASGQAPARTMAGAA

SEQ ID NO: 317487 - protein, 342 aa, unidentified
MKDIRAVVGVDIAKHVFQLHEVSKETGEITNVQLKRKKFLAHFSNRSACLIGMEACGGAQHWARKLVALGHDVRLLPALQVKAFVCGNKNDMADARAIWMAVQQPGVRTAAIKTEAQQAVLAMHRIRQQLIKFRTAQINALRGLLTEYGEGMPLGRSGIARRLPGIFANLADRLPAVLVDTLREQFARIGRLDEEVVEIERRLRDWYRQDDACRRLAEVPGVGLLTATAVVAAVGDAKTFRSGREFAAWLGLVPRQTGTDGRVKLLGISKRGDTYYLRTLLIHGARSVLTHSKSPSEWIVKLVKRRPINVAIVAMANKTARTLWALLAHGQLYQREHNSSPA

SEQ ID NO: 317488 - protein, 332 aa, unidentified
MYLGIDVHKRYAQVAVMDEAGEIVEEVRVENANLDDLAQRYAGAEAALEATSNYYHIHDTLSEHLDVTVAHPKELNQIANSDKKTDRVDAKELARMVRLNSVPESYVPTDEVREARALVRGRQTLVENRTKYANKIHGLLSDHGITEDVKPLTKEGREFLGELSLPMPWDSLLESYIELIETLNEEIRNLEETIEERAGSLKETQLLMTIPGVSYYTALTIYAELGDIGRFDGDKSVVSYVGLNPVIRESGDSRIEGSISKRGSGRVRWLLVQAANTAVHTSNDEYLSRFYERLASRKNSQKAIVACARKMLVSIYHMLDRGEVYDPPDVSA

SEQ ID NO: 317489 - protein, 345 aa, unidentified
MTPAPKYEWFVGIDIAATTFVAVWAESGQAPTRPSTFDQTAAGFAAFQAQLPAHGAPDQILIAMEATSSYWIRLAVTLHQAGYAVAVLNPKYVKKFAESLPRRSKTDALDAHVLLRFASERQPSRWTPPPAAYHELRQRLMARDALLEMRQQARNQQHALSQWPVVVAAVTDRFDAVISNLDEQLTTLDQEITTALQAGAWAASAALLLSIPGIGIQATAWLLVTTFNFTLCDSPEALVSYAGLSPLQRESGTSIRGQPYVGRGGNARLRTVLYMAALSASRYNPPVHAFYTRLRERGKAGKVARCAVARKLIHLAWAVVKHGQMFDPAYAAAPHAVLAAEAHAG

SEQ ID NO: 317490 - protein, 427 aa, unidentified
MLNAQVEKLSLVRGDVIIVGVDVAKKKNVARFFDTDGFELCKYFKFRNDRAGILSFISKCLNIKEQQGAERIVIGMEPSGHYWEPLAYFLKEYPIVQVLVNPYHVKQSKEMDDNSPDKNDIKDARLIAKLVKDGSFFKTYLPEGVYRDLRNLTSEREQQCAKLNSAKNRLVALLDRYFPEYVKVFKNLLGKTSVFILKIYPFPEDIEKLTEEELTGVIKAASNKRLGSKKAKELKKAAESSVGLTEGLDSARYRIKSCLEEIEFHLKQLEATEQKMSALLSQTGYKLNLLSIPGVGIVTAARFLGEVGDLSRFEHPSQVIKLAGFNLRGSTSGEKQNSKTVITKRGRSRLRCLLYQVALIAAAKNPQLRALYYYFKTRPKNPLKPNQALIAVANKLVRIMFALIKKNEFYNPALVLGEIRESQLKVA

SEQ ID NO: 317491 - protein, 380 aa, unidentified
MTWKECGQVVRLTRTYMKCVIENTELSSPEGTRRQFNGSKADIKLGIDVHQEFYVVVEQEGGGNPKPPQRLKKEAFLPWAAKLRKRAGQVHAVYEACGFGFGLQRQLSALGITCYVVCPQKLDERKRRVKTDGLDAKALCLKLDRFVQGNKDALALVRVPSEEEEQLRAIHRQREQLVKARKQLEAQGRCLMVNHGVEPVKSWWKPRTFAQLPVPAWLKELLCNSQPILLALEAKIRALSVQLQNAAGANQPRGLGAMSSVVIDREVGNWDRFSNRRRVGSYTGLCPGEQSSGKTRMQTSVTKHGNPRLRAALVETAWRLVRFQPKYKPILKWNEVLRKGALATSAARKKAIVAVARQLAIDLWRIRTGRVRAEQLGLSN

SEQ ID NO: 317492 - protein, 410 aa, unidentified
MEATPTSTYAGIDWSWGHHALCIIDEHGRRVEEVTVSHTRPGLATITALLRRRSVARVGIERGDGPVVEHLLRDGFEVVVISARQVASLRARHGSAGNKDDRFDAFVLADALRTDAGRWAVVRPDSEETLALRMLVRARQDLVGHRIAVHNQLLATLQHNFPGAVGLFSQLDIPISLAFLRRFPSEARAAWLTAGGGELRMAHWLTANSYCGRHTPRRLVDHLTTAAQGRTIGAAAEASEVIVTTLVDVLTELRTQQDALEHRIREALLAHPDGPIFQSLPRAGVIRAATLLAEIGDCRARFPDAPALAAAAGVAPSTRASGKHRTVSYRRGCNKQLRAALVDWAQDTPRANAWASDTYQRARQRGARHPHAARILAQSWTRILWRCWHDHVPYDPDLHGRLAVLQQQAA

SEQ ID NO: 317493 - protein, 342 aa, unidentified
MAEYVGLDVSKEETSFCVMDISGTVLSSGKTLSDPDALFRMLRQHTVCPERIVLETGTLSNWLARGLRDHHMPVDVIDARQAHAVMKLQHNKTDANDARLLAGIARTGFCLPVAVSSEAAQKHRILVKARRHLVNQRRDTQNAIRGFLASLGLRFVKGSGQFVARVREALMARPDLNPMIEPLLASAEAQAEQIKHLEGEVKAQAWEMASCRLLMTIPGVAHNTALAYVATIGEATRFASSRAVGAYLGLTSRRHQSGEMDYSGRISKHGDGLLRSLLYEAANSLLTVVRKSHPIKDWARRIKKRSSHKKACVALARKLAVIMHRMLISGETFRWPEEAAAA

SEQ ID NO: 317494 - protein, 467 aa, unidentified
MTPRKGEKVRVCKGMEDLALTHPQAAGVDVHSAVHFVAVPVESVPDGFVNLDEQLPKGVRKFGANTGDLEAIGAWLKDCGVKTVAMESTGVYWIPLFELLASQGFEVILVDPRQTKHAPGRPKTDVLDCQWIQRLHSYGLLAGSFRPADEIVVWRGYQRQREMLIRYAAQHVQHMQKALEEMNVKLTEVVSDIVGQTGMKIIKDIVAGQRDPQKLAKHRNEKCKATEAEIASALYGNWRAEHLFALEQGLELYEFHHRQVGACDERIEACLRGFADKSGGAPLPPKARGPQTRARNAVVFGARALLFRMAGVDLTVIEGINETTALVILSEIGTDLSRFPSEKNFVSWLGLCPNHRGSAGKIFRRGVRRGANRAAKALRMAGQGCYKAKNALGAFYRRIQARSGGAKAVVATARKIAERVYRLLKYGQEYVRQAEQAYEASYQARLVKGLAHKAESLGYKLMPIEMN

SEQ ID NO: 317495 - protein, 387 aa, unidentified
MSQTVAALIPAAVDYERTLVLAIEVSNKSWVLAAQVPGLPHTKAKRTINPEAEALLAAIAGYRARAAAMGRSIERVIAVYEAGWSGFWLARWLMRHGVEVYVVQPSSVPVDRRMRRAKSDGIDSELLLRTLLAWLRGEPRVCSMVPVPDEADEDARRCVRERTELISERVGLTNRIGAVLATLGVNDYNPLLRNRGHRLAELRTGLGEPLPANAHAKIKRLLARLELVLTQIAELERERDAVVETEASDKASKMIQQLTALRGIGVQSATVLVREAFVRRFANGKALGSYAGLASSPYSSGGIDREQGIGKAGNRRVRTVMVELAWLWTRYQPGAAQVCWFRERVVSTGRRVRKIMVVALARKLLIALWRFVIDGVVPEGAVLKPAA

SEQ ID NO: 317496 - protein, 410 aa, unidentified
MQTLVERGCGMDVHQATVVACLLVVLKDGKVQKQIRTFGTTTRELLTLREWLLSEGCTHVAMESTGVYWKPIYAILEGAFEIVVANAQHVKKVPGRKTDVKDAEWIADLLCHGLLRSSFVPPQPIRELRELTRYRRKLVESRSAERNRLLKLLETANIKLASVATDVFGVSGRLMLQALVQATATTQQMADLAKGLLRKKIPELKLALEGKFEEHHRFLLGVQLRRLQAVEEDLRLLEQRIQEKLKPYAMQLALLQEIPGVDWTLAAVIISELGVDMSVFGNVSQLASWAGICPGNNESAGKRKSSRIPKGNVYLKTALVEAANAAAKAKGTYLRDKFYRLKARRGYKRAAVAVAHKILVAIYHMFSHQVCYHELGDLYLDKLNQHHVTRNLVRRLQRLGYSVTLEKKAA

SEQ ID NO: 317497 - protein, 358 aa, unidentified
MTYVGIDLHANNMVNVALNGNGKVIREAKLPTSRRSLEDFFGDFEGPVRAVVECTSNWYWLSDWCRANGVELTLVHAKMVKAISYAKVKTDTVDAKTLAELLRADLIPEAYQVQHDRRELRELTRGRLRLIQWRGKLQSALWGQAIKYNVQIGGTQWRYLDKLGDWLGPQLPPAANLQAQLLIEQISQVQSHIHRIEEEIEKQVPFEASAERLMAVPGLGKVGAWTILAEIGDITRFPSAKQFVSYCRLVPGSKNSGGKSRHKSGNKDGNKYLRAAFGQAAVSAYTHYKVVKKFYHKIKRRSGRPVARAVVAKELAKGVWYMLTRNEEYKGFKGQPVRAAASAHWRRISPKRGLDAGR

SEQ ID NO: 317498 - protein, 368 aa, unidentified
MDAPQNGVNAPNWLTHTQLKGTSTMKISTLSIDLAKNVFQVAGFNSNHKRECNKRLNRPKLNAFMANTPPCRVVMEACYSSHYWGRVFTSYGHTVDLIPAQHVTPFVRGNKNDSNDALAIYEASLRPNIKFVPIKTEAQQEILMLHKIRERLLQNRIAATNQLRGLLVDFGYVFPVGIKALEQGLIALESDSALRPLLRTMVSDIYTEYKTLVKRIKAIEAMLTAHVERDTNAKILHSIPGVGVLNASAYAASIGNGQAFKNAKELGGWLGLTPKQYASGDKSKMSGITKRGNSYLRKQLIHGARAIIARSHHKTDALSLWINQLREKKHFNCVVVATAHRLARLMWILLTKQTLYSPQFVQNTQKDA

SEQ ID NO: 317499 - protein, 405 aa, unidentified
MGVDWADQTHAVWVVDESGTKITARTVPHTAEGFVEWGRELDEWRVQGIERWAAIERPDGRVVDFLLDHGVVVYPVNPKALNRARDRFRQSGAKSDPFDARVLADFLRTDHLHLQALQPSSDAAQELKLLTEDCQRHIRQQTRLVNQLTTTLKAYYPRALEVAELTTALAREFLHAYPTPEALTVLTARQWQRWARGRRVSEARIGALWAVLQQPQLPVPAHVVRAKARLMQSLVEQLTPVVVAVAQYRKTIDDFFARMPAAQWARTLPIGKHGITAPTLWARLGDAPGRWESFRHLQAQAGAVPVTKRSGKQRVVHFRFACDKALRHVVDQVAFLSLLSSDWARVYYDQQRARGHGHRQALRALGAKWLKIIFVMWHRQVPYDEQYHLATMTRQQLRQRQTKIA

SEQ ID NO: 317500 - protein, 386 aa, unidentified
MQKLNDLSRCLTPLEPDSTLIAVIEMSLSSWLVAGIVPGVERQPLKKLAVDESVLLKLLHRWREEAEKAGYMIKRIAVAFEAGRDGFWLARWLRARDIEVHVIHASSVAVSREHRRAKTDRLDTELLKRAFLGWLRGERDHCKMVAIPTIKDEDGKRPNRERESLVGEQSRIINRIKATLVRLGIRGFNPKLKRAAGRLDGLRTPEGEPIPPNTLSELHRDMERRRLVRDQIRQIESARRDRLEHAPGEGAHAMVRLLARVMGIGIETADMLVQEVLSRNLRDRRAVARYAGLTGSPDESGKKRREKGLARSGNPRVRRGMIQLAWRFLLFQKDSTLAQWFRARTENARGTRKTMIVALARKLLIALWRLVREGVVPDGVVLRPTQ

SEQ ID NO: 317501 - protein, 423 aa, unidentified
MNSDQPELAAFVGLDWADEEHAVCLRVAETGKVHVSKIKQKPESLREWVEGLRNEFGGQKIGIAVEKSRGGLIHALMEYEFLILYPINPKALAKYRESVCVSGAKDDPSDAALLMDLIYCHRDRFRPWYPDTVATRKIQMLSEYRRDLVNDQTARTNRLEALLKGYYPQALNLVGDLNTVLACNFLSRWPSLPSLQKAKPAQLRKFYLDHGCRRAEIIEQRIEEIRKAQPLTEDDAVIHTSVLMVQSTVNELHVLITAIKQFEQELEIAFGQHPDHELFESFPGAGPVMAPRLLAAMGSDRTRFETAVEVQQFSGIAPVTRKSGRMHYVQRRYACPRFIRQSFHEWSRLSIRFSVWAAAYYEYQRGKGKGHHAAIRALAFKWIRIVFHCWKERVPYNEQIYLDALQRSKPAWAVQAGIIKKVA

SEQ ID NO: 317502 - protein, 322 aa, unidentified
MSKHSIVCAGIDTGKYKLDVALNGSRQQLQIDNTTDGHAALSSWLKRHKVERVGIEASGGYERNVVTRLRGDKFVVVVFQPAQVRAYAGFLLQRAKNDKIDAALIAACTAATKKIHAPPDPRLAPLAERMTLIDQLTDQIARFKNYREGSRDLRMRQLWKEQIAHFNKLLRAELKELVAAIRQHRDLAERLDLIESVDGVGLKTAVAILVRMPEIGSVTREQAASLVGLAPFDDDSGMHAGIRHIAGGRERLRGSLYKASLSAAFHWNPQLVALYQRLIAAGKLHKVALIACARKLLIFVNTVVERGTPWVSSRSPAVRAAA

SEQ ID NO: 317503 - protein, 425 aa, unidentified
MKSTQNEKISQIKFETLVVGIDIGKETHYARAFDYRGIELARLLKFSNTDQGFQRLEQWMRDICKQQEKTEIIAGFEPTGHYWFTLGDHLKRQGYKLAIVNPFHVKRTKELDDNSPTKNDRKDPKTIAMLVKDGRYREVYIPDDIYQELREAVSERERLQEQLTSIYNRVVRWLDIRFPEFTTVFKDWRRNAALITLRSFPTPEKVMEMGVDKIVETWRKQMKRASLKRAEALVKAASRSVGRTSGKVASEASLQNLLAEYDLYCQQYDKQEQLMQDLLMQVPNADKLLDIKGVGLITAATFVGEVGDISRFQDPRQIQKLAGLNLVENSSGKHKGKTTISRRGRRRLRHSLFFSMIAMLGKNQEFRLLHQRNLMRENNPLNKMQSIIALCGKLIRVFFAILTKGVDYSPEKMLGDMEQSTRVAA

SEQ ID NO: 317504 - protein, 468 aa, unidentified
MARQQCAQLFAASAHRSRRPWPVKVSLECECSQPIPERPTKTSPDSIPADAVLVAIDIAKVRNEVLIEAAGAKRRRRLSVLNTRVEHDDLIEALLSYQRPVVCAFEATGNYHRPLAWRLVEAGFEVRLGSSLALARTREALHNSWDKNDPKDAQVILHMLRIRATQIYHDPLRAGINDVQELSKTHEAIAKAKTEIQHRILTHYLPLYFPEIERFKGNSRSDWFFAFLDAFPTPASIATLTKEEFVAAAWDVVGPKVSKSQILMDIYETARTSIGLPLPIDAPAIRMFRMVVAEARSLIRLRHVIETQADELLRHSRDYQLLRQIPGIGPINALTIIAEAGDLRRFHHHRQFLKFCGLDLSTQQSGQYRGQTRLSKFGNARLRRTLWIAGQVAIRQRENGFRHKFERYIAKNRDNPDLRRKAMTAITAKMARVVHAVVKSGSDYRPFIEGRHQVEEPLSARAVRASSR

SEQ ID NO: 317505 - protein, 347 aa, unidentified
MNVVHYIGFDVHKKSISYCVKTVAGEIVKEGKLAADRATLTEWAEKQMQPWRGAMEATLFSAWIYYTLKPYAVQLEMGHPARMKAITCGKKKSDKIDARTIADLLRCNLLPVCYVMPPGLRDLRRLLRYRSLVVRESVRMQNKIAGLLMETGSPFNKEKLHGKKYFAQLIQTLEQVPESVKDLLQMSRSAMEMFETTQKRLVKQLLVNPALAQRIERLAGIRGVGEITALTWALEIGDPHRFRSNGDAMSYCGLTAAWRSSADKQQRGPISKQRNAWLQTTLIEAAKLAPRWNPQLAAVHAHELERGHRNRATLMVARKLVAYLLAVDKSQKPFEVRDTASTAACAA

SEQ ID NO: 317506 - protein, 412 aa, unidentified
MLKIVYPVCCGMDVHKSFVVACIAATNDQGVTTYRSKRFSTFTGDLHRLAAWLRAHSCTDVCMESTGKYWIPVYNILESSSKITLAHPKYVKAIRGKKTDKKNAKWIADIFKHGLVSGSFIPPADIRQLRDLMRYRSKLTGFSSGEKTRAQNCLTVSNIKLDDVFSDVFGKTASAITTQLLESNAPFDVSPFLSKKLKASAEEIQAAVDGSICTHQAGKLRVIRSHMENLAACKKSLESLIFGLAEKHLPTLDLILTVPGIHVFAAVGILSEIGADMSVFPSSKHLCSWAGLTPQNNESAGKKKTTRISRAGAYIKPLLVQCALAAIRKKSNPEIRSRYLNLKKRRGHKKAIIAIARMLLTAIYNMIKRNEKYNAALYRKADVPPRNREVSVNEAIYILQRQGYLVTAPQSA

SEQ ID NO: 317507 - protein, 351 aa, unidentified
MRTSQKITGIVTTIGIDIGKNTFHLVGFDQRGAIILQQKVSRSQLERRVANIPRCLIGMEACSGSHHIGRQLAEIGHDVRLIPAQYVKPFLKGHKNDYRDAEAIAEAVQRPTMHFVTIKTPEQMDLLALHRVRSRLVGRRTGVINQIRGFLIERGITVRQGPMPLRRALSEILSSDTGALSPRMVGLIADLAQDWRRLDERIAAVSAEIEALAEQDDSCQRLMTVPGVGPIISSAVVAAIGNGTGFKQGRDFGAWLGLVPKQESTGDRTILGKISKRGNKYLRTLFVQAAHVVLERRPSAAMRGLWPWVEQASKRLHRNMLAIALANKLARIAWAVLARGGTYQPRTTHAA

SEQ ID NO: 317508 - protein, 339 aa, unidentified
MNEVTLIGIDLGKHSFHLHAQDATGRMVFRKKLSRQQLLRTLANVPCCRVVMEACAGSHWLARQLAGMGHEPRLISPQFVRPFVVGNKNDFGDAQAICEAACRPSMRFVSPRNEAQQTVSAMHRLRERLVRERTATVNQIHGFLLEFGISLPRGAALMSRLPTVLDHETLPPRLVGLVVRLRAQVHYLEEQIRQVVQDLKASLREDDKSRRLLEIPGIGPITASALAVELGDARQFANARQFAASIGLVPRQYSTGGKPTLLGISKRGDRNLRRLLVQCARAVMQHTASRTDALSLWVKTLSTRRHSNVVACALANKLARIAWAVLARGTHYQARALTT

SEQ ID NO: 317509 - protein, 339 aa, unidentified
MDEISMIGLDIAKNVFHVHGVDASGAPVLRRGQVEKFFAKLPATLVGIEACGSAHHWARVIGRYGHRVRLMPPGYVKAYVKRNKNDGRDAEAICEAVGRPNMRFVAVKSVEQQATLSVPNTRDLLVRQRTAAANALRGMLSELGIVAAQGTKGLRTLMQQLEQPSEAIPELMRNALLLLARQWEALDAAERMLEQQITRAAKADAEARRLMAVPCVGPMIASTVLAKVPDPHMFRTGRDFGAWIGLTGRDRGTGGKHRVGRISKQGDRMLRTLLINGASAYLLHQKRRGVTDPWLRDLLARRPYKVVMVALANKTARIIWALLTKGGEYRARASVPAAA

SEQ ID NO: 317510 - protein, 406 aa, unidentified
MSAVMIGIDPHKGSHTAVALDGVETKLGEIRVSSSVIQVERLLEWAKGWPERTWAIEGAKGLGRLLAEQLVTAGERVVDIQPKLAARVRLLNTGAVNKNDPNDARSFSVAALRSPSLKEIGPESHAAVMKIWARRHRDLSRTRNRIACRLHAVLCELVPGGFAKEISAVQAARVLENIEVHGASAAARMELAGELLEDLRRIDGQLRDVKRRLAKIVKESKTTLTEIYGVGPIVAATVIGDVAEISRFSSKDRFAAYNGTAPIEASSGNNKVHRLSRRGNRRMNHAIHMAAVTQISHRGTVGRAYYDRKISEGMAHKSALRALKRRISDALYGRMIADARSAAAAIEEGPGGQLGNDSISSVAGSHPQTPTLRSGHSRARSNPRSLRSAANIGNPPRRAKATRRAS

SEQ ID NO: 317511 - protein, 362 aa, unidentified
MANNNKEQPKMTAGLDLGDKYSYLCVIDNESGEVIEESRLRTTPDDLRRRFVLEEQLKIAIEVGTHSSWVNRILHECGHEVLIANPRKTRLIYGDKRKTDKLDAQKLARLARVDPELLYPIEHRGEESQAHLALIHSRDVLVRARTQLINHVRGTVKSFGARLPKCSAESFHKKAADVLPSELAEALEDVVETVGSLTERIRDYERRIERVCKENYPQETELLRQVAGVGALTSLTFVLTLEDPDRFEKSRTVGAYLGLVPGKDQSGEQDPGKRISGEGDEMLRRLLVSSAHYILGPFGPDSDLRRYGEKIAGRGGKNAKKRAVVAVARKLSVLLHRLWITGEVYEPLHNARLSGALGEEVA

SEQ ID NO: 317512 - protein, 317 aa, unidentified
MDKIYDICCGIDVHKKLIVACLNHKRKKELREFGATTRELMELAEWLQKNECEIVAMESTGSYWKPLYNIMESYGLHAIVVNPAHMKAVPGRKTDVKDAEWIAELLQHGLLQPSYIPSKDQRELRELVQYRKSLVGERTRELNRLQKMLEGANIKLSGTVTNINGKSARKILEYILSGNEIDEKKYDEMYEEKLIAHNLKASKEQILDDLKGFMSPLQRRMLKELLQHLDELNVHIENLNDEIDNFMKPEEKQASQMIQDVTGIGNTSAQAIIAVIGTDMERFPSDRHISSWAGLCPGDNISAKKRKGGRSEKEMPC

SEQ ID NO: 317513 - protein, 335 aa, unidentified
MEVFLGCGIDVSAAQLVVALEGEAGRWLQRSFPNRAPGHQALIRWLQKTGVRVRVCLEATGRYSLDLALALHAAAAIEVAVLNPKVVHRFATTLCRSKTDPADAQVLAEYARRMPFQPWHPPQAAALELRTLTRHIAALTRQHTQQSNRLHALSASRTGSRWVQQDLKRSLRDLDRRIEKMRRAALALIAQDDELRPRFALLLSMPGIGEISALHLLGELALLAPGLSVRQWLAHSGLDPAHHESGSSVHKPSRISRAGNRYLRRALYMPALVAVRHDPHLRAFYQALLARHKAKLQALMAVARKMLHAIFGMFRGQSEYDGSRLFPALALASAA

SEQ ID NO: 317514 - protein, 342 aa, unidentified
MKATTIGIDLAKHLFQLHGVDQHGKTILKRQLKREQMLSFFSNLPPSLIGMEACGSAHYWANKLQGMGHTVKLMAPQFVKPYVKTNKNDAADAEAICEAVTRPTMRFVPIKSSEQLAILALHRARQGFIKARTAQANQIRGLLAEYGFILPQGITHIGKHVPELLEDSENGLPGTFRHLLMRLHEHLKMLDKQVNELEDAIVSWHKDSAASQTLAQLPGIGPITASALVASIGNAKNFKNGRQLAAWLGLVPRQHSSGGKQNLLGISKRGDIYLRTLLIHGARAVLRVAERKESFSGSWLAGVMARRNPNVAAVAQANKTARIICALLAHDRKYDAHYGMAA

SEQ ID NO: 317515 - protein, 356 aa, unidentified
MSRILAIDLGKFKSVTCLLDSDTNQTEFWTMATDRHYLLAVLKNYTPDLVVIESCGLAGWVHDICTQEGYEVLVCNPNQEAWKWKRIKRKTDRDDALKLAKLAALGQLVPVYIPCRQQREYRRLVKYRQVVLGRINRVQNNIRAIFAQRGMEMVRGQKMWALERLELIAQHRKPLAECALEELWRGELDLELIQLEHLRQHQHEVHKQLQALARADERVQLLQTIPGVGRKTAEVVVAYLDDPHRFQNARQVSSYAGMVPRRYQSGEMDRQGRIHKRGPRQLRSALVEAAWLMLRYNPWAKSVYDRLTSGQKTRKKKAIIAVARKLLVRCLVMLLRKEPWNKETVIRQPAVIAVAV

SEQ ID NO: 317516 - protein, 388 aa, unidentified
MHVVAERSEPLSAIRTDLGAIFVSLELSRSTWLITSLSPGGGEKLSKHSVSSGDLSALFGRFDSLREKARARMGQDFPIVTIQEAGLDGFWIHRVLYKAGIESYVVDPASIAVSRRSRRAKTDKIDGETLVRSLLAFKRGEPRICAMVKAPTPEQEDRRRICRERKVLTTERICHVNRIKGLLFAQGVTDYEPLNRDRRDRLEELVTGDGRSLPPHLKAQISRELDRLELLLAQVKQIEIERDKLLHADEQVAHGPAKLLIDIKGVGPEFAAVLCHEGLFRHFDNRRQVAAYAGLAPTPWQSGQVDREQGVSKTGNPRLRTTMVQLAWLWLRHQPESSLTLWFQARLQRNGGRFKKTTIVALARKLLIALWKYATSGVIIEGALMKAA

SEQ ID NO: 317517 - protein, 437 aa, unidentified
MRRKQSKANKSVSLQVLPVINPNAAGVDVGAKMHVVAVPCDRDPQPVRTFGAFTPDLHEMAAWLKRCGIQTVALESTGIYWISLYEVLEQYGFEVRVVNARHVKRVPGRTKTDVLDCQWIQKLHSFGLLNGSFRPDQQIRKLRTYMRLRDNLVVESTQAVHHMQKALFEMNVQLSNVISDIVGETGLHIVEAIIAGERDPEQLASLCSSRIKASRQTVAKSLHGNWDEALLFALEVALETYRFAQAEIQECDARIQDHLTQFESRAELTNSPQNLKTQLHRVCGVDLTKIPGIKEQAAQIIISEVGLDMSKWNSEKQFSSFLGLCPDNSISGGKVLHRSTRKVYNRAADTLRLCAQSLTHSKSALGAKYRRLKARLGAPKAIVAMGHHLARLVYRMLRYGQNYVEKGIEDYEKKFRLQRVKWLKKEAKALDLQLVAA

SEQ ID NO: 317518 - protein, 315 aa, unidentified
MSHPATPSRFIGCDVGKTAIVVFDAASGRTDALANTPEALSGFAASLEATCFVVCEATGGYERDLLAALIAAGVPACRADARKVKAFIRSFGTLGKSDAIDANALARYGRDRYAELPLWSAREPERVRLQALVLARRDLVKDRLAYANRRAAPAAEPVHPYLEALLESFDAQINAIEADIKTLCAACEPIAKAVKVLVAIPGVGQKTAAALIALMPELGSLPRRKAAALAGLAPHPNQSGKTDAYRRTRGGRPEVKRVLFMAAISAAKHNPTLSAFYKRLLSAGKKPLVAITAIMRKLVVIANAKLRTANALQVS

SEQ ID NO: 317519 - protein, 346 aa, unidentified
MLYVGLDLSRKRLDFHLLDEQGETVEVGAAPPDADGLLGLAARVGRLRQPVRAAIESMNGARFIHDQLEQAGREVEIADALKVKGLAPLACKTDRIDAWVLAELSRRDLVPAIWLPDPEVRAERERARFRLHLVRHRSSLKQRVHAVLLAHGKPCPVSDLFGVSGRALLERLALPEPWAATVQASLRLIDELEREIAACEAELRRLGADHRYVPLLCTVPGISWVLAYTIAAELGDIGRFPTPRKLAGYTGLCPRVYQSGERDLRGPLAKQGPRYLRWALVEAATHACTHPAYRDRYQHTKARIGKQRGAKVAQIDLARRLTEAIWHMLTRNQPFAPKGATDPLAA

SEQ ID NO: 317520 - protein, 345 aa, unidentified
MVMIGIDPHKRTHTAVAIDSGERVLDERLVYATGAQVPELLEWAKRLDGGERVWAIESAGGLGYLLAQQLLAAGEQVVDIPATLASRVRLLGTGRSEKNDPNDARSVAIAALRAAELVPVRVEDHATVLRLLAGRHTQLGWAYNKTACRLHALVAELVPGGIGKELVVSQARSLLADHQPVGTVAIERHALAVEMLDELDRLNTQRKTLRKRIGVAVTASGTTLTDIFGVGEVGAAIILGQVGDVTRFPTADRFAAYNGTAPIEWSSGNPKHPIRRLSRRGNRTLNHVIHIAAVTQLRHRHSPGRGFYDRKRAEGMTSRAAIRALKRRISNTIYRHLVTDATRRS

SEQ ID NO: 317521 - protein, 342 aa, unidentified
MTTIKYFVGVDIASSTFTACVGATPWKVVLKPHTFENTENGYQTFLDWLASQQIGAKQSVVCMEATGVYSEGLAYFLFATGYAVAVQSPLEVKRAFKPYGPKTDAVDSLQIAEYACRHIDKLSFWQPRNEILEQVKALLATREQFVSQNVAHKNALQAIQRKPLRTFFAEQAHAQMIEQFKKQIQAIDHEIRRLIESDPTFKEMLLLLLSVPGVGLLLASHMILLTQISLDHKELASYLGIAPNEHSSGTSVFKHATSRHFGPAAVRKLLYLASCSVRTHQTQFTSYFARKTREGKPARLVLNNIANKLIKIICAVLLTKTAFIKNYHSVQPLVFQNTLTGS

SEQ ID NO: 317522 - protein, 421 aa, unidentified
MKRADTRKVRSVRDDTLIVAIDVGMEMNRGYCTTPDGRSTKPFKFDNTREGLDTLWGMVMASKNRFKCNEVIVGYESTGPYGEPLVHYLMKKPVKIVQVNPMHTKRVKEINDNSPLKTDDKDPRVIADIIKLGRALSIVIPEGDAAYLRRLNNSRERHVRERTALVNQLQQLVFLLFPEFKKVIKDIKCRTPLYLLKKYPTPEAISVLETHVLGEEMRKKSRGKFREHHADMLITLARNTIGIKEGVSGLSMDIRHILVQLEMLKNLIAEIENEMEIALGRIPYSSKLLSIKGLGVVSVAGIIGEIGDFKKFGTQPEIMKLAGLDLYEISSGKMKGQRRISKRGRSLLRKILYYAAIQTIRKNGILHDYYTRLTDRGMKRMMALVAVSRKLLGIIYAIVRDDSEYSVNFESMKRQVIKKAA

SEQ ID NO: 317523 - protein, 370 aa, unidentified
MSIKRILVNTIDTDLEYEVIGIDLAKNCVSAILLTTDGEIFGIDRLDYQELEKSAQELSPTIFAMEPCTEMNYMVQKLEDWGHHCIVISGKNVKDYVESHFSNQKTDLNDAQALAFLTKDTQLRTVKAKDPEQLKYASLTTLREQYVKQYRQTMVSLKGICQVWGLSISKGISGKARLKDMIENHAAFPAELRTALVGMVAHAQAVQKDLKSVTKILEELAKKDKACQLIQTVPGLGTICSCRLRATVGDIQRFKHPKDFPAYYGLVPRSMATGHNEKKGKITHRGDKTMRSLMVQGAGIVINQATKGNLHSKQLTKWILKKQKEKMPWGKLVCAVAAKLLRIVRAILISGKPYNPKIAGVAKCSLPKAS

SEQ ID NO: 317524 - protein, 348 aa, unidentified
MRFYTKTHKHYCGIDLHAKKMYICIIDGEGNILLHCNINCNPTEFLRTIAPYREELVVGVECMFAWYWLSNLCRVEKIEFVLGHALYMKAIHGGKSKSDKIDSKKIAAMLRGGMLPIAYEYPLEMRATRDLLRRRNFFVRKRGELMGHIHNTVIQYNMPALGFDLACESNRHQVAELFADPEVRKIIEMDVAMIDSYDDALKILEHDIEKSARQHDKRAILLLCSIHGIGPILSMVMLYEIQHINRFETVQQFASYCRLVKCSHESAGKRKGTGGAKIGNAHLKWAFSEAAVLFMRYNPQAKKLVEKLTKIHGKGKALSILSHKLARAIFHMLKNNRPFDRDKFFAAA

SEQ ID NO: 317525 - protein, 400 aa, unidentified
MRAVFGIDVSKASSEVAILVNGEKVHGYTMSNDAIGFTRLLGDLKTVHKPEIIFEATGVYSRRLQAFLDEHGYAYTRLNPLEAKKQLDSLRVRKTDQIDAEKLAQSQFVLNRKPTYAQEEVYQNLRDLSRFYQNLTEDIVRAKNRLHKVLQVTFPELETILSTPTGEQYWNLVIAFPCKDFVLDLSKDELSESIRLSTSKRISDKRVAYLAEKLTALANQSYCAVKKTSPMLEEVRYYAKELLRLSEQRQTVLDQMVELAQPLPEYDILLSIPGIAETTATSIIGELGDIRRFQSANQINAFIGIDLRHYESGNFIAKEHITKRGNPYARKILFKCIHNIASASHTNPCHIADFYEKRKRQSQTTSTKPHTIASIHRLIRTMYYLITHNKLYDYTSTQNQ

SEQ ID NO: 317526 - protein, 397 aa, unidentified
MIAVGIDVSKSKSTVAVIDSNGAVLASPYTIAHTQPELHALAKYLKELKEPVTILMEYTGHYHYPVLKQLQSEGFPVCLINPYQMKKYGDTEIHKAKTDKKDALRIATYALEKSYKLVPYSSMEQKYEDLKFLSRQYEQRISFVAKLKVQLLDLLDQTMPGITKQLSLTSRNPEKCALLLFIKRFKSFDEIQRMGKTRFLSSYETMTKKTSDRYAAQKGLAIYELAKDSITTRGDDPYIWLSQTQCVDLLSVAQNAADEIILKMQNIAQTIPEYAVLRAMHGVGDRLGPIILAEIGDIRRFHSGKALNSYAGNDAPPYQSGQFESRNRHISKRGSSALRKACYEVMQALKLTKPQDDPVYLFMLKKEQEGKPYNVAKMAGVNKFLRIYYAKAMELYR

SEQ ID NO: 317527 - protein, 346 aa, unidentified
MSTVYIGIDLAAKECTAAVMDQGGKLVSVCEFPTSEKHLASFMQDYEGRAVVLLEECDLAFWAARVILPYAQKVEVADPVRNAWIHKDPVKNDRIDARKLAEIARAGRYHPVYHTPDERIYALHMAVKAYDQLSGDAVAAKNRIKAKLRAQGVIGEGSRVYGARGRQEALARVGNPEVRGIIAADYERLDFLLAERAKAKGRFLALAAGIPVVRAWQAIPGVGPYVAAVFCAYITCPQRFSDKRKLWRYCRLGITQCVSGGKELRRQRLDRRGCGQLKHASMTAFLGAMHAGGDNRFKRAYAHTLAGTGSEVHARLTVQRKILAVMWAMWLHGTPYDDTNKPHKWA

SEQ ID NO: 317528 - protein, 409 aa, unidentified
MLFVGNDWAEDHHDVELVDDDGRRLARRRLTEGIEGIAQLHELIAGHLPEDATAADVVVGIETDRGPWVTALVAAGYQVFAINPMQVARYRERHSTSGAKSDQGDAHTLAELVRLDRAHHRPVAGDSDLTDAVRVLARSHQNLVWLRQRQGNQLRSQLREYFPAALMAFPELTGRDALAVLTVATTPQAARDLDVETIIEVLRQAGRQRNLRATATRIHQALTAEHLAARPLTAQAFGITARALVGVLAELNRQITELESQVSAYFGRHPDAEIYLSQPGFGTILGARALAEFGDDPDRYASGKARRNYAGTSPITRASGKKIVVLARYARNRRLGDALFQQAFAALTGSAGARAYYDAMRARGIGHNDALRRLANRLVGTLHGCLRTHTTYSETTAWTPQTHHTDQAA

SEQ ID NO: 317529 - protein, 322 aa, unidentified
MAMLSFGGIDVSKDRLDVMVLPEEQCSSVPNDAAGWAKLVEQLRGFSISAIGIEASGGYERGAVRALLAAGMSVRQVNPFKLRQFARASGVLAKNDPLDARMIASFVAVMPTRPAQRQTPAAERLAEMLAVRRQLSAEKVAAENASRLLEDAMLQRLSRRRIARLAADIDMLDGHLVEVVGTDAPLAHRYRLLTSMTGVGTVLACTLIALLPELGGMTRKQVAALVGVAPYAFESGTLKGRRCIWGGRANVRQVLYMAAMSASNWNPGLKAFHDRLKAAGKKPKVTIVAVMRKMITTLNAMLRDDVVWADRLRGRHSVPTVR

SEQ ID NO: 317530 - protein, 342 aa, unidentified
MNKVAIAAIDLGKHSFHLHAQDDRGHEIQRKKFNRVTLIRYLANLEPCTVVMEACGGAHFMAQEVAGLGHTPKLIAPHLVRPYVKSNKNDFADAEAICEAATRPTMRFVPPKNQTQQALAMSNSIRESFIKDRTATVNRIHAALLEVGVSLAAGFKAIKELPALLEASSFSERIKKNLMLLHGHFNYLDGQVQVLNKNVECQAAEDDLSMRLMTMPCVGPITSTVLAAELGDGKQFKCGRGYAASIGLVPKQHSTGGKNVLLGISKRGDRNQRRLLIQCARVYLIHLERQKGALADWVRRLLASHHHSNLVVCALANKFARIAWAIAAHHTEFDAGPNAMNA

SEQ ID NO: 317531 - protein, 368 aa, unidentified
MEELITGFVGLDAHAESTAIAVAEVGRAAPRFVGSVGARLSELTKALGKLGQPHSLHVVYEAGPCGYTLARELIRLGYRCEVVAPSKIPRRPGERIKTDRRDALKLAGLARAGELVSVSIPDERDEAIRDLSRARVDAVRARHKARQQLKALMLRQGRRYTGKTSWSAAHERYLAEVSFAHPAQDIAFTEYRQAAGEGEARVRRLSESLSREVQHWRMHSLVSAVMTLRGLDLVAAATVVAELGDLRRFAHPRELMGYLGLVPSEHTTGSKRRLGAITKTGNTHVRRVLVEAAWNYRYPPRISPALQLRQEQQPPEIRAIAWRAQLRLNHRYRRLKARGLHHNKICVALARELAAFVWDIGRHVTLGI

SEQ ID NO: 317532 - protein, 346 aa, unidentified
MRYYAGLDVAMKETFICIVNEEGKRVYEGKAFSDPLPIFEKLSKSGYKLEKVGLEAGSISSYLTKGLIELGVNAICIDARKMAAILSVTINKTDKNDARGIADAIRCNHYKEVHLHDIEDAALNILLKSRSTLVQTRTKSKNTIRGHLKLSGIRLGSVSDKKFSEVVQNAYTKMHDQARLGIDSLLKVFNMINKEIELLDKQLNEVCKQEEVVKLLMTTPGVGPVVALTYVAGIGDPLRFENSESVGAYFGLSPKQYSSGETVKQGSTSKCGSTDVRHHLVEAAIVMLTRFKGWCPLKAWGLKLMKKSGLRKAAVAVARKLSVIMHRMMITGETFRFSNSVKVAAA

SEQ ID NO: 317533 - protein, 336 aa, unidentified
MVQIYGIDLGMSSFDVSFLSESGSVRHLSGVKNTVHGISKFLLSLPSSAVLCAEHTGVYGDLLLRLCTLNRICLCFVPGYQIKHSLGLQRGKSDPLDACRIREYAERFYDLLRPCFYPGEEMSELQELYRTRSLLVESRKRLDTLNIGDNCKSSVSLAADHARRAVLAELNTQISGLDHEIEALIQNSSEFSRNYQILTSIVGVGPVTSCELIIKTENFRKLDTAKKCAAYAGIAPYPKESGKMKCGHKISPMGDKQLKTLLFLCARSAKEHNKEIRLYFLKKHKVEKKHFFVAMNNIANKLLRLIYSLIHKQQTYDRDYIQRDPRCVVISDTNKC

SEQ ID NO: 317534 - protein, 309 aa, unidentified
MDIIAGIDVSKARLDVAIAPSGITLSVDNNDQGIDELVQHLKAQHVDLIALEATGGYETLVAAKLSASGLCVIIVNPSQVRSYANAIGRRAKTDEIDAQVIAAFVLATKPQIRPLRDAQTQALSALVDRRRQIVQMIVAEENRLRLAIEKPTQKSIKRLLVALRREMESIDTDLDDHIRKSPVWRVREALLTSVPGVGTATARTLLAEIPELGSLDRRQVAALAGLAPWTRQSGKWKGKSFTGGGRSKVRTVLFMAALVASRYNPILKAFRDRLVDAGKPKIVAIVATMRKLLTILNAIIRDQKPWQDA

SEQ ID NO: 317535 - protein, 421 aa, unidentified
MKTITMHSDGTRAGQPETRWDIAVDVGEAALDWYGEAADKAHKGHLDNRSEAILACLEHLKAEARRLGFGGVRIICEATGGYERRLLRAARQLGCATALVSGEAVHKMQVVENNDTGKSDTKDPRTILLLAKWKKTLTDRPLTGEWLLLRELNARYDRLERDSSQCKNRIHKLLVSTFPDLSFKKDWLFDSRAAQAVVELYGLNAAAIIEDGRERFTAKLRRRRVGLKTIGRLWADAQRTQLIPSDPAWLALLAEDIRALFAELAVLRTRRQATREHMIALVGRLQARGETRLQAHPDLISPFMLARVLAETGPLSDFADFRQLWRYGGLNLRPRESGTMKGQPRQAKRGRARLRHVLAQAILKRVVHGQLYGEYYHRKRGAGMCGGKAMTAVARKFLKLLFGLEHSATAFDPQRVFQSAA

SEQ ID NO: 317536 - protein, 338 aa, unidentified
MQTYAAIDLHSNNGVLAIIDETDRVLKQRRLANKLELFVAELEPFRATLQGVAIESTFNWYWLVDGLRAKNFPVILVNTAAIQQYEGLKHADDQYDSWWLAHMMRLGILPKGHIYPPGERAVRDLLRKRATLVRQRTANILSVQNLEARNRGTKISSKEVKHLTGARIAELYENEDLALALTTTLKVIETFTEQTRLLERAVLAKARLRSEFKLLLTVWGIGEILGLTIMYEAGDMSRFAGPGNFASYGRCVDAQRLSNGKKKADNNAKNGNKYLAWAFVEAAHFATQHYPEARRFYDKKAAKTNRIVAIKALAHKLARAAFHVLRDQQPFDPKKVFV

SEQ ID NO: 317537 - protein, 408 aa, unidentified
MVNKIAGIDVHKKVLMVVVMDARAPESKPERRRFSTLPSELRRLSTWLREQGVEEAVMESTAQYWRSVWLELEPHMRLHLAQAFSNRAPRGRKHDFKDAERLVRRLVAQELVLSFVPNGEQRIWRNLTRTKLQLIRDRVRLQNQIECLLEEMRIKLSIVVTDLLGVSGLRILHALAAGETDAKSLASLGDGRLRCTEEQLVEALTGRSHPMHRQMLALQLERLRLLDEQIAKLNILIAQAMKPHQDAVIRLAEVPGLGIDSAQQIIAEVGVTAGSFPSAAEFTSWVGTCPGKEESAEENSSSRSAKGNKYMRRVLNQAAHAAARSKGCHFQTVFRRLLPRLGYKSAVWAIAHRLCRLVWKILHEGIRYIEQSIEAQPMHLIQRTKALARQLRKFGYNVQITVPDSAPA

SEQ ID NO: 317538 - protein, 337 aa, unidentified
MSVYVGIDVHRKRSQVAVVTGDGTIELNKNVVNGSEPMLRLIGDLPPGTPVAFEAAFGWGWLAALLEDYGFEAHLVHPLRCKAIASARLKNDKVDAATLAQLLRADLLPEAWIAPPAVRQLRALLRHRAGLVRLGTQQRNRIHAVVADFGFDRSGSYLSGPGRGWLAGLELPPVSREVVADCLAVIDGLAPVIDRIDGELRQHAKADPRVKTLTTLPGVGQFTALVMLAEIGDISRFGSARKLASWAGLTPTVRGSDRTVRHGHISKQGSAWLRWVLNQAAQTAKRSPDFAATYSAIAKRRGKKIATIAISRKLLTRAWHLLDDMQATNTNEPPRRP

SEQ ID NO: 317539 - protein, 341 aa, unidentified
MNKPSTICIDLAKNVFQVALFNQHGKLKSNQKMSQAKMVAFIAQYPASMIYMEACGSAHYWGRYFQNNKHHVHLLPAQIVRMYRAGNKNDANDALAIYEAAQRPDIHFVSVKTTEQQDIASVLHLRESYIKQRTAISNRIRGFALEYGIKFPQSITKLRALLPLELEDPNNGLTSSARFVLHKLLNQLIELDKPIQEVTDYLIAYVKQIPACQLLMTLRGVGWIVASALYARMGDASAYKCGRDASASIGLVPAHSGSGGHNKLLGISKKGDRTLRAVVVHGARSVVSNIKDKSDQLSCWLRALLERNHFNKVVIALANKTVRMACAMLKSNQPYQEKLPA

SEQ ID NO: 317540 - protein, 376 aa, unidentified
MERGSLMLNTTTFVGLDVHARSIKAVALDAMTGEVRSATFGYDAAEVAGWVSSVDPSAKCVYESGVTGFDLQKRLASMGIDCVVGAVSKMIKPPADRKRKNDRNDAEFLARMLSVGNVVEVWVPDDGCEAARDLVRALDDAREDLKRCKQRLSKFLMRHGYAFSETTPTGRRKGNWTAAHWAWIKSISFPEKADNDVLAYYVDAVRQAMEDKKRLEKLVEAEASKPRWKRRVDSVRCLKGIDVTSAADLVFEAGEFSRFKSARSFAAWLGLTPSEHSSGESVRQGGITKAGNKHLRRVLVESAWHYLGCSPHSKDLAKGQVPDPAARRHAAKGIRRLVKRREEMLGRGVHKNKANVATARELACWCWAVGRMIENG

SEQ ID NO: 317541 - protein, 418 aa, unidentified
MEVLYPRCAGLDVHAATVVACVRIASGATIQYEHRTVSTNTRGLLELADWLTAHQVTHVAMEATGVYWKPVWHVLEEHVTLVLANAMHIRNIPGRKSDKNDATWIADLLALGLIRSSFVPPAPIQELRDLTRTRKQLVRENARHKQRIQKTLEDANVKLTEVISDILGTSGRAILKALVAGETDPERLADLASGRLKATRTQLVEALHGRVTAHHRFMLNLHLTQIAALDTAVADIEARIREALAPFRAAVSLLMTMPGVSDTAAAVIVAEIGDDMCKFPSAGHLLSWAGLCPRLDESAGKRRSTRIRQGAPWLKTTLVQIAWPAARKKHSYFQAQCLRLKSRRGPKKAIVAVAASMLTDVYYMLRDGVEFHDLGDQHFRAPRQGTLDESAAPTAPRPRCQRGGESRLNNQVIRTVSF

SEQ ID NO: 317542 - protein, 317 aa, unidentified
MEQLDGSTKIAGVDVGKFWLDAALAEPGAPLRVRNDAAGIGTLADWLQQHGVGRVGLEASGPYDRPVRHALQAAGLAVVLHQPAEVKLFGRLRRQRAKNDRLDARLIAAATAGIERPAQPADPRLAELAEWLTVYEHVAATIAGLKTLLESVSLDALRHCVLAQIDRLKAGKAELAATVMAAITAQPDLRQRLGLLMSLPGFGPIVATSMLIRMPELGDMQHGQPACMIGVAPHDRDSGTWHGTRCITGGRSRPGRMLYIAALAARRCDPDLKAFADRLEQHGKPKKLILVAIMRKLIEAANIVLKRKAPWIPKTAK

SEQ ID NO: 317543 - protein, 408 aa, unidentified
MWFVGDDWAEDHHDVEVQDASGRKLVRARLPEGVAGIAGLHELIAGVVGADAEPDQVSLGIETDRGPWVAALIAAGYRVFAINPRQVARYRERHGTSGAKSDAGDAHTLADMVRTDAHQLRPVAGDSPLAEGIKVIARAHQNLIWDRHRQVLRLRAALREFFPAALEAFADLTASDALELLATAPDPDRAARLSRSKIAAALQRARRRDVEVKAEAIQAALRSAQLTQPAELTGAYAATVGSHVALIAALNAQIAALGKQVEAHFGRHPDAEIYRSQPGLGDLLGARVLGEFGDDPDRYDGARARKNYAGSAPVTRASGKKTVVLARHVRNRRLADALHQQAFCALSASSGARAYYDSLRARGAGHHAALRQLSNRLVGILHGCLKTRTCYNEATAWAHHHQDQHTAA

SEQ ID NO: 317544 - protein, 427 aa, unidentified
MPYRIAGIDVHKRMLTVVVCDVEVGSEYEFERRQYGSAPTQMRLLAAWLVEQQVEEVVMESTAQYWKPVWATLERYWKPICQKREGARAMSGTLHLAQAQSNRGPRGRKNDFADPERLVKRLVADELTLSFVPVAEQRLWRTVMRTKYQLRCNQVQLQNRLEALLEEAHLKLSSLVSDLLGVSGRRMLTAIAEGETDPAAVAARADYRLRATPQELCDALGACGELHPVYRRLLKTALEEWQRTEAQITQLGQEMATLLAVHQEKVQRLAEVPGLGVDSGQQIIAEVGASAATFPSAKALSSWVGVCPGEEESAGVNHNRRSPKGNRHMRRILSQSANAAVKLKGSVFAVLYRRYVVRFGHNQTIAVIAHRLCRLIWKILHQGVRYEERGPAVSQKSKQRRTLRMVRQLRSLGYRVELLNPQTSFPA

SEQ ID NO: 317545 - protein, 367 aa, unidentified
MQWIHTKKQHRVAIAYPNDEVIVEFSVKNTPSEIRKMVRKIKKNAPDKVKFCYEAGVCGFTLQRRIEALKCKCSVIAPSLTPRKPGERKKTDRRDAKKLLGLFMADMLTEVYPPDEQQEAARELTRCRAAAQENLKRIRHQLQKMLVRHGYVFIDGQHWTQKHYRWLEAIEFDQPLLQDVFECYFTEMRHCLQRVQTLDKELEKLAQSEDYREAVGILCCFYGIKTLTAISIIAEVFDFGRFASPRDLMSYLGLTPSESSSGEKEHKGPITKTGNVRVRRLLTEVAWHHRHAYGVSKVLRKRREGQPQWAIDIADRAGIRLRRRYRRLVHKGKLPCKAVTAVARELTGFIWSAMIEYEARKNRKKAA

SEQ ID NO: 317546 - protein, 381 aa, unidentified
MKTNSDTTRTLYFGLDVHKEQTVIAILESDRDAEPRQYGSIATTQHALERAMRRIAKQQHRTLTDLHVCYEASGCGFWIARRLLQMGVRCDVIAPSLIPTRSGDRVKTDKRDAAKLAKMLRSNDLVPVHIPDAPDEAIRDLCRARTDAVDDLRRAKTRLLALLRRLGYRYDGKTHWTHSHRNYLRDLKMPDPAHNRVLEDNITTIDFHEARIARLEQEMLQLLADWQRKPLVEALMAFKGFQLVAAMVTVSEIGTFSRFEHPKKLMAFLGLVPSENSSGKSRKQGGISKCGNPHARWLLVEQATHYRVPPKISPQLSERHRDTPRWIKELSWKTQTRLSHRFTLLRKRGMHHNKIKTAIARELTGFVWELGTRFESKQAAI

SEQ ID NO: 317547 - protein, 448 aa, unidentified
MDEHDFTLGVDLACNAAHVATLADAAGRLVWSNHRFRTNTVELERLWARVPAGAQLQLVIEPTRNAWVPLAAWFRMRGVTVILVPPEQSADLRRYYQKHTKNDRLDSVLLARLPLLHPNGLNVCHDLGPADPLRRTVRRRAKLVRQRITSLNRLTALLELLGPGYNEAFSGGLTTKTAQAVLSRYADPRKLLRTPATRLVQVVSQASRGQYGPILVSQLRGAAAEAVALYGMAGVDFAELAADIEAEMRSITTVQAEIDQLDIRIQRLYLDADPDQIVQSAPGVGPVLAPTIHGLFGDPHRFASLAAARAFTGLVPDTNESGLSQAPPRPTKAGDPGLRTALFMAADLARQTDPTMAAKYRRLVVERKLHHNSAVCHLAAALATRIVACLRAGTPYQIRGFDGQAITAAQGRVLCQRLRVQPHERPRPPRRQPKAGQATSEVAQRLTA

SEQ ID NO: 317548 - protein, 344 aa, unidentified
MNKFNVIVGIDVSKKTLAVCVSAQAKIEHFNIANDVKGLSALVTKLKEMEQDSGKVLICCENTGHYSEKLAMVASGEGYFVWVVSPIIIARYEVSLNRIKTDLDDARKIKDFAFAHQHLATKYQAPDIKIQKLKELFQCRKHYVDARQREINFLKSSQDAANPSGFCSDMCRRTIAELSPKIVEIENAIMELINKTPKYSRQYALLKSVPGIGPITAQRFLFVTECFSKFNNWRKMACYIGSAPFERQSGTSVKRKPKTSKKRNRSFKADIFEGITSTATRKGQFYFDYYTYMRSFNHEHPKIINNIINMVLKVIFALIKNDKPFDKQIFLTHKKSWAKNLELS

SEQ ID NO: 317549 - protein, 393 aa, unidentified
MICVGIDVAKDKHDCIILNSEGKILAGAFTFPNNAEGFDTLLHKIHSCENSNDKIKVGLEATGHYSYNILGFLLNQGLPTYVINPLHTNLFRKSMSLRKTKTDRVDAKTIATMLMSNVDLKSYTNTAYHNEELKSLTRYRFVKVRERAQLKQSVSRLVTILFPELEKLVPTLHMSSVYALLIEFPGAKQIAGAHLTHLNHLLNDASKGRYGRDMATKIRDAAQHSIGSVMPAKSLELLHTIRLIRELDSEIEDIEAAIQTIMNELQSPITTIPGMGVRMGAMILAEIGDFSRFDSPDNILAYAGMSPSTYQSGQLSLTGAYSHMEKRGSRYLRYALYNATKYVCHWDPTFSAYLAKKRAEGKHYNVALSHAAKKLVRLIYAMEKSRQPYKRTA

SEQ ID NO: 317550 - protein, 344 aa, unidentified
MGDVSTIGLDIAKSVFQVHGVDVVGAVVIRKRVSRAKVLEYFGELLPCLVGIEACPSAHHWGRELQALGHTVRLIPPSYVKAYLKRSKNDANDAAAICEAVTRPSMRFVPIKTKEQQTALMLHRIRQLLVRQRTMLSNALRGHLAELGIVSAKGRNGTAELLRIIADGADSRISAAVRSILDVLARQHSAIGTEIASIDKSIMALHRACEASRRLAEIPGIGPVGATALVAEIGDWNTFSSGRSLAAWIGLVPKQHTTGGKDRLGSITKQGNRYLRWLLVVGAMAVIRYARKHGTQKRPWLARLMERRPTKVAAVALANKIARMAWAIMVRGERYKEPKLLLAA

SEQ ID NO: 317551 - protein, 356 aa, unidentified
MNKRSKLDFSGQPIYIGLDVHKKSWSVSIFTQHGEYKTFSQPPEAEILSQYLRHHFPGAQYRSVYEAGYCGFWIHDELKDKGIQNIVANPADIPTRDKERRTKRDRVDCRKLARGLRGDEIQGIYTPPRWKLEDRSLTRTRLSMGRKQARCKNQIKSMLLFYGVLIPERREMGHWSRRFIRWIEGIRMERASGDLALQIHVEELSHMRQILAKLNRAILALARTEQYRSWVSLLKTIPGISTLTAMILLTELYEITRFRSVDELCSYIGLIPDTQSTSEKEHVGGMTQRHNSQLRWLLIEASWIAVRKDPVMMEAYQEYCKRMRKTKAIIKIARKLLNRIRYVLKNQAEYVTGVIE

SEQ ID NO: 317552 - protein, 357 aa, unidentified
MGKSIRNFAAVTRVGLDLAKKVFQVHAVDAKGEVVVACKVARGRLAAFFAELPPCVVAMEACSSAHHWGRQLLMVGHQVKLIPPAHVKPYVRRNKNDAADAAAICEAAGRPGQRFVAVRSIDNQAELMRHRARELLAGQRTSLLNALRGHLAEIGVVAPQGAQHAYHLKRLAADGFDESGEVLVPDCVRVALRLLIGQIDALDETIGAIDRELAASVKADETAKRLMTIPGVGPVTASAITATIQDMSAFASGREFSAFLGLTPRQSSTGGKERLGRITKMGNRYLRKLLVVGACATLCHRKGHNDALRAWASALLERKTVKHKFKLTAVALANKIARIVFVLMTRGGQYDDRPVAA

SEQ ID NO: 317553 - protein, 412 aa, unidentified
MKDLLEISCGLDVHKEKIVACILTGPLGKPTRSEIREFSTLIPDMIALRHWIVSKNCHHVAMESTGIYWMPIYEILEDAFSGDITLLVVNARHMKNVPGKKTDMRDSEWISTLLRAGLLNGSFIPEKRIREFRDLNRYRKSVIRDITSQKNRIEKFLQSSGFRLSSFISDIFGASGRNIILHLIEHGQIDKTALDSCLKTKTRNRIDEILMSVNGTLSEHQKAFLRILMTHYDSLKKHLAEIETSLEEDMAPFALQIEQLNSIYGISTTASCAIIAEIGIDMKPFKTAEHICSWAGLCPGNNESVGKRKSTSVTKGNPYIKSMLCEIAWVIAGKRNTYLSAWYWRIKQKKGAKKAIVALARKLLVIIYTMLKQGTLFDESCFETRRKHCEQKQLSRYIRELEKHGYHVEAQS

SEQ ID NO: 317554 - protein, 367 aa, unidentified
MSSIAAARGLTYLGLDVHRDTISVAVLGPDRDAPEVSRIAHDEPSVRRLVAQFPDRRGLRACYEAGPTGYELARLLHRMDVRCQVIAPTLIPTAPGDRVKTDSRDCRRLARLHRAGELVAIRVPTVAEEAVRDLCRARADLLADRTRARHRLSKFLLRHGEVWRGGATAWTVAHERWLVSQRFDDPALTATYGHYRAVLDARDAQLEAIEADLAGWYGRPPFADAVARLSAYRGVTRLGGLTLASEVGDWRRFASAPQFMGFCGLTPSEYSSGNSTWRGRITKTGNAHLRAQLVESAWAYQHRPQATLELRRRQHGLPPEVVARAWTAQLRLCGRFRRPQARKNAKQLVVIAVARELAGFLWAEMTA

SEQ ID NO: 317555 - protein, 346 aa, unidentified
MDQIIRIGMDTSKHIFQLHGVDGTERPVLRRKLKRNQVLAFFAELPPTVIGMEACGAAHYWARELRKLGHEVRLMAPQHVKAYVKRNKNDGRDAEGLCEAMSRPTMRFVPVKTEEQQAALMLAGVREQLIARRTQLGNAIRGYAAEFGITAAKGLDKLEPLLAAIAQDATVPALARELFALQGKDYARLQVDVKAIEVKLRTWHRANETSRRLAQIPGVGPIGATALVMKTPDPGAFASGRHFAAWLGLTPKDHSTAGKTRLGRITRAGDERLRSVLVAGATAVVQHAKNGHGRPSPWLVALLARKPPKLAAVALANKIARIAWKLMTTGESYDGARMAGAAALAA

SEQ ID NO: 317556 - protein, 362 aa, unidentified
MKNDNKESLWKPRPEQTVGVDLGDRFSHYCVLNRDGEVMEEGRIRSSEEGFRQHWKGEARQRVIMETGTHSPWISRLLQSLGHEVIVANARKLRAISQNESKNDRQDAEMLARLGYSDPKLLRPIRHRSAERQGDLNLLRARDTLVRARTMLINSVRGLVKSAGGRLPAASSESFAAKVTAAVPVELAAATQPLLQQITALTAQIRGLDRTIEKLAERYPEIHILRTVPGVGPVIAAAYVLTLDGVDAVKHSRSVGAFLGLRPRQGQSGDSDPELNISKTGNIYLRRLLVQAAHYVLGRFGPDSALRRWGLKLAAGGQRAKKRAVVAVARKLAVLLHHLWRTGQNYRHFPDAITPPASTALS

SEQ ID NO: 317557 - protein, 403 aa, unidentified
MERTAGIDLASEEHRLCVVEQDGRRREERRYRHSEDGIAALVRRLVELDVARVALERPNGLVVDRLLDAGIMVVPVHPNQLAAARDRYRSGGGKSDGFDAYVLAELARTDMHRLGVLEPDADETRALRALTRAREDLVEQRVALANQLRAQLDAFWPGAARIFSEVDSPICLAFLERYPSPQDARGLGEKRLAAFLARHGYCGRKSAAELLDRLRSAPQGRAGELENEARRAVVLGLVATLKPLVEQIKLLTSEIRGLLADHPDGAIFRSLFRDPKSVVTAAELLAEIGDRRERHPARDSLEGIAGQSPVAVESGKKKVATFRWACNKTLRSAVSVLADASRKHNPWAKKIYEDAIARGKDHPHALRILGRAWLRVIWRMWQDHTPYDPTRHRSLNRLSPAEG

SEQ ID NO: 317558 - protein, 450 aa, unidentified
MKIFIGIDIGKEFNLASFLNENGVEIDKRFKFKNNHLGFLSFKDNIDKLTYDCDFNYDDVLIGFESTGHYWINVDWFITEKLHIKTVMVRNDAVRHTRALNSQGKGKNDSLDSRTIAECLKNGYYFDVQGRKEDYIVLRRLTRERSELEKEIARYKNRFRAWLDVNNQIFLENFSNVFSAGALALLKVYQSPLDIIQDSYLEVREKLREVGYNRTNNTFKIYYEEAKTYKNIINGISYADRLEISEYIETLEMYMKKKESLDEKIEALMNFLEGKVYNSLSEIKGIPKAQIASLIAEIGNVNNFKSARHLISYAGLNIQGEGSGKNKGYSWISKTGNRRIRKEIYVITFTLVKHNDYFRGLYCYYKSYKRTNEKSNKEMLVALACKILRVIYGMLKYNMEFDLNEMLKNYDFRNINKEKFIDEFLGNSEKKQKIISCEIEELFLSNRKSS

SEQ ID NO: 317559 - protein, 341 aa, unidentified
MGEVNTIGLDIAKSVFQVHGVDAAGAVVIRKRISRAKVLEYFGELPPCLIGIEACPSAHHWGRELQGLGHTVRLIPPSYVKAYLKRGKNDANDAAAICEAVTRPSMRFVPIKTKEQQTALMLHRARQLLVRQRTMLSNALRGHLAELGIVSAKGRNGTAELLRIIADGRVSPAACGILKVLARQYSAIGIEIVSIDKSIMALHRRCEASRRLAEIPGIGPIGATALVAEIGDWKTFSSGRSVAAWIGLVPKQHTTGGKDRLGSITKQGNRYLRWLLVVGAMAVIRYARKHGTQKRPWLGRLMERRPTKVAAVALANKMARMAWAIMVRGERYKEPKLLLAA

SEQ ID NO: 317560 - protein, 409 aa, unidentified
MEVVHARCAGLDVHKKSVYGCVICWEANGEKRQEKRSFGTVTADLLRLADWLREHGVTHVVMEATGVYWRPVWAMLEGQFELLLVNPHHVKAIPGRKTDAKDCEWIAELLQHGLVRGSFVPPTEIQDLRDLTRYRVELTQSQARMANRIQKLLEQANIKLSSVASDTLGVSGLKMIEAIIAGEQDPEQLADLAQKRLREKIPELRLALEGRVRDHHRFLLKEFLEEWRALGARIRRMEEEIDRRMVPFEDAVRLWQSIPGMERLTAYNLVAEIGVNMAQFPSAQHLASWAGLCPGNNQSAGKRMSGTTRDGNKWLRRTLCQGAWAVTRKKDGYLASQFRRVAARRGMKRAVMAVAHSMLIIAYTMLKTGRTYHELGGNYLERINADQLQRYYVKRLQKLGLTVTVAPAA

SEQ ID NO: 317561 - protein, 380 aa, unidentified
MEKACGLDVHKDSVFACILDEQGKKILEKRYGTLTPDLIELRDTLVEYGCGRVAMESTSIYWIPIWHVLESDFALTLTNPYFIKQLPGRKSDVKDAQWIAECLQKHLLKSSFVAGDLLQQMRQYTRQHRRLTKNKVRLEQQMDNQLQRCNIRFSNYVSKQGTNVSLRKIIKALIAGERAPAKLCRLVHGRTRNKHGEQVITNSLSGVIQQTDVEILIQCMEQLNLIEKQQAVCLNHLEELANTHFAEEISLLYTIPGIKKLSALCIIAEIGNDMSSFQKATHLVGWAGLRPRNDETAQKIKSRKILHGNKYLRQTLVEISWAAARSKKSFLGKKFNILSKRMLSQKALIAITRKILVIIYNVLKTKLPFDKNRNMQATIA

SEQ ID NO: 317562 - protein, 385 aa, unidentified
MKEQNFVPREFEIFGGLDVDKKSIAVTFMSHQGILQSFSMPYRAEHLLSYVGKHFDGKKIAFAYEAGPTGWGLYDKLTSEGYLCVVAAPSMIPKVPGQRVKTNRLDSQKLSEHLRGGQLKSVHVPSESYRQLRQLVQLRDTFVQDIVAMKLRIKALLLFEGLEFPPAPSGSQWSLIVRGKLKRLSCSSAVRFKLDQLMESLESSEKRVLKTIKEIRRFYQQDPELCQAMVNLKSIPGIGEIVASHLLARIGDPQQIGNVRQLAGFIGLAPSEHSTGDRVARGHITRSGDGRLRSKLIQAAWSAIRQDPELREFYRSVYQRHPRDRAARKAIVAVARKLTTRIYAVLKQQRPYVVREIVHSAPLTQEETSPQGTTRRPAEPGETLS

SEQ ID NO: 317563 - protein, 332 aa, unidentified
MENFYFIGVDVSKKKLDFCVMFEGKVLHEEETANHQGAIMSLLYQLEEDYGISNSQMLVCAEHTGQYTFPLACACKAVECKLWLENPAEIKCSSGVQRGKNDKVDAKRIAIYANRFQDKVQYYECPTEDIERLKQLESERTLYVTDLAKYKGQMKDQKDYMPKALYERKVKRLQALMDDLEEAIQAITDEMDEVIASCPVLFRQRELLMSIDGVGRVVATNMIITTEAFTRFDDSRKFNCYAGVAPFSYSSGSSQHSKAKVSHRADKVMKRLLHLAAVAVTHRAGGELKKYYERKVAEGKNKMSVINALRAKIVARMFAVIKRNEKYKPILS

SEQ ID NO: 317564 - protein, 326 aa, unidentified
MTRIICGVDVASQSLEARVGQQGAADSFPNSSEGIAALEAFCRAHQVELVAMEATGGYEQLAFARLSEQGLPVAILNPRAVRQFAQSMGRLEKTDRIDAGMIAWYAEVKKSPPLCLAPRTQLELRARVTRLRQLTEVRTAQLNQQRLVVNRAVQDGFRQMLAFLAAQIEELEQAIAQLIGADPLWRELNQAFRTIKGVAFRTVARIMAEMPEIGALSNKTISKLAGVAPLANDSGKHQGKRAGRGGRAAVREILFIVASVVGRHEPDFIAFQQRLRAAGKPPKVVRIALAHKLLVRLNAKAREVRQRLTELQPNSMVRPAGSCKAY

SEQ ID NO: 317565 - protein, 327 aa, unidentified
MSAYLGIDVSKDWLDIALLREYQAIEHGHFDNTAEGFHQLQHFLKKRKAQAAHVCLEATGYYGLDVALFLHQAEYRVSVVNPARIKAYADSQLSRTKTDSNDALLIADFCRTQQPEPWTPPPAEQQELQALVRHLQNLNDMRQQELNRRQAGIPSQALLKTLDEHIAFLDHQIDDLLHQIHDHIEQHPHLRRQRELLTSIPGIGDITAFKLLAEIVDVTAFDSARQLAAFAGLTPRERRSGSSVRGRTRLSKRGSSRLRSALYFPAIVAQRHNPILQPFAQRLLAAGKSKLQVVAAVMRKLLHLVFGILKSGLPFDPHFLDKQATLS

SEQ ID NO: 317566 - protein, 426 aa, unidentified
MNCNTQNEKIEMLTDEWLLIGIDVGSEKHYARALTNRKVELSRKAFGFSNDEEGFVAFEAWTTDIMRTNGRKYIICGMEPTGHYWINLANFIKEHGMVLAHINPAHVKKSKELDDTNPNKNDRKDPKTIAGLMTEGRYVFPYMPEGIYAEIRDLNNLRLQATQSLARVKNRLARWFSIYFPEFPSLYTDINAVSAKTVLKQAPLPEDIIVLDVDGVNQLWREAKIRAVGKKKAAQIVEAAKRSIGRKESLRAARIEIKEILEDLEKYSSREEELMELIYEAVSKVPNADKLMAIQGIGIRTVAGFIAEVGDITRFEDAKSLQKLSGMAIVSNDSGKHNGQSSISYRGRKILRWTLVQGAVSVVAKNEEFAAIHEYYTTRPRNQLKKMQSIVAIACKLIRVFYTILTRGVSYDGQKMIKDIVRPSAA

SEQ ID NO: 317567 - protein, 427 aa, unidentified
MNEIESNSIDRFRQFKKGIRGSKEHLIVGLDIAKRKHHGFLGDANGRTLLKGLIVENSAEGFRHLLTQVRFYMDREGLSRVVFGLEPTSVYHKPLAEHLIEQGHLVVYATNEAIKKNRSLIDGRWDKNDTKDSANVADLVAQGKCHYYDLPELRLRDLRSLLLFRKRLKKQLHSCRVRIRNNLVAQYFPELDELWNTAEAENLAIVQWYLDPARIRQLSCEQFIAKVTTHNGGLRQQRRLRCIWEAAGTSIGCQPGPALALEAELVVDALKFVRQQLDRVERAIATLAEGFEEYSYLKTIPGFGPYVAAMTLASIGNPHRFENRAQLIRLAGLDLSANRSGEKSRSAVPVISKKGKADFRYALYQAALVASSLTTDFRAYYHRLLEGRQRESGIRTKMLVKIAAKMLVIAWTLMKRKEPFNPAYIQA

SEQ ID NO: 317568 - protein, 346 aa, unidentified
MEQYVGLDVSLKLTAICIVDRTGKIDREGVVASDPETIAAFVRSHAPHVARVGLETGATSTWLWTELNKLGLPVICIDARHAKAALKMQINKSDRNDAVGIARIMQCGWYKEVRVKDLDSHAIKALLVSRALLVKIKRDIENQIRGLLKNLGLVIGRAKMNVFAVRAAQLAESRPELAAAVEPLLKAREAVGRQIADLDRKVMRLARNNAQVRRFMTAPGVGAITGLCFLATVDDPTRFKRSRSVGAYVGLTTRRYASGEIDWTGRISKCGDAMLRSYLYEAANVLLTRVAKWSTLKAWGIRLAKRSGLRKAKVAVARKLAVILHRMWIEGTEFKWSSKEAANQPA

SEQ ID NO: 317569 - protein, 328 aa, unidentified
MFTLGVDVSKNKIDICLLAAGVKGKKKHKVFTNDPGVARRVTDWLDAQKCPSDSVTVVLEATGIYHENLAYGLHDAGVKVCMANPHRVREFACGMDILTKNDRVDAFVLACYGELKHPEPWVPPSPEVRKLRALLRQRDALKEDVQRTANRLEKAHSTATPREVITSLQRTHSWLSDELERIERLITDHTDNDPGLKADLDLLKSIKGVKDQVGREMLAILKDGAFRSASQVAAYLGITPVEKTSGSSVRGRPHMSKTGPSGIRAKLYVAAMSASRWNKPAKEIYERLIARGKAKKAALGAVMRKLVHMCFGVLKTRLPWDENYAATA

SEQ ID NO: 317570 - protein, 364 aa, unidentified
MSKCRRKAKKGKSINLSALGVSESDRVHVGIDVHKRSYHVGVLVNNNPVRTFVIPPNPSRTIEFLRHLEAGLVRIVYEAGPTGYGLARAFQEIGWPIEIVAPGKIPRPANRGSKSDRLDCIELATLSKEKNKLKTVAIPTVQEEQDRQIIRLRAQIKKKEKRVKQQIKSLLLQYGIDAPPGLSNWTQAGIGALATLEISPDLRFVLDSFVAELECLIRERKKTEKRIKEKSAEERFAKNKAILESHPGVGILTTMGFLTEVYQPGRFKDDSQVALYLGLAPGVKQSGDRRIAKPLLKAGQGPLRCLLIQAAWAWVGSDRRAAAVYNRLLRNTGFKQKAIVGVARRMAINLWWMLLRGEEYRSAA

SEQ ID NO: 317571 - protein, 352 aa, unidentified
MMIIGCDFHPRFQHISFLLEESGECGQRRLLHTAEAEQYYRSLSGTRVRVGIEATGSYGWFRRLLSELGHELLVGDATQIRASNPRRQKTDKRDAEHILGLLAQDRFPAIWQPPAENEQLRQLLLHRSRLVRLRTRVTNQLDGMAKNEGLLVPGGWSGKRRMAIEALPLPGWYGERRKDLLGLLDRLEERIAPLDRAVSQAAAHNAEACLLMTHPGVGPVVSLAYVLTIGNWQRFARGKQVSSYFGLIPAEESSGDKRRLGHISKQGNTLVRWLLVEAASTAQRYDASWHRQYLRLSMSKHHGVAKVAIAHKLAVRLYWMLRSGEDYQHARERGSHARQSECPGGRNTRPIE

SEQ ID NO: 317572 - protein, 350 aa, unidentified
MTMVGGLDVHRQQITFDYVDDDGLVHWGQIRPATRQTLRGWLAEHCPDGDSEFALEGCTGWRYVSEELAAAGLGVHLGDPAETAALRGRKKRAKTDRADARLLRTLLVEGRFPESWIPPAHVVEVRTLGRLYCTLMDERRAWQQRIHAQVFHQGCPPIRALLTRAGREALAGAELSAAGRQYVDTALRRIDELSAEIDPLRTQLISFARRQPGCRALQRHYGVGWLCAVIIWAEIGDARRFSSSDQLVRFAGLDVTVYSSDAKRAPGHLSRQGSPELRWAAFEAAKSAARRGSPDHGYYHKLAAKKDGHNGKNPTLAVERKILRRCYHTLRELGDAALALPDIRPQEVAA

SEQ ID NO: 317573 - protein, 444 aa, unidentified
MHFNKLLQMLDSSPYLSVGLDVGADFTWMSIALPNGSFWGRPFKIIHDDPYSREMAVAKIKEAQELYSLKSRCFLESTGIYHIPLLCFLRDKGLDCSVINPIITKNSTNINIRKLHNDKFDSKKAALVGLNASLKTSIIPDEDIADLRNLVRDYYYFKDLQSAVVLKLNAELKVSFPAYLKVFSRITTRSSLKLLGAYPLAKDMLAAPKEELVGIIRSTARFGDAYALSRYEAILEAAKDAAIFGRSLPSNAVRIRLYIESYQTYQKHLDSLLLALHEAVDRLHGTPVYDRICLLQSLRGVGFLSAVVLMAEMGDFDLFSSPKKLYAYFGLDPAVKQSGKLNGDKVHMSKRGSSLARRVLHMVALNNLKVDKGTKTPVNPVIYNYYTGKCANKKKNVAVGAVMHKICNIIFAMLRDNKPFEIIPPEVHCKQYVLNHTASVTNAA

SEQ ID NO: 317574 - protein, 361 aa, unidentified
MADSITWVGLDMHKESIIAAVVGSDGSLLGRFETTNSPKGKDRLIARMKTFPGVQCAYEAGPCGYDLKRFLEQESVPCEVIAPSLIPRRPGDRIKTDRRDAEKIARMHRMGELVPIHVPTPRQEALRDLLRAREDASEDLLRKRHRLTKFFLRQGRRFEGKSWTREHWRWIRAQVFDDTNAADVLVEYILAVDQEVERVARFDQRIEEASKDPEIAPVVSRLTALRGIRTLTAVTLVAELVDLRRFSSPRDLMSFAGLVPGERSSGGKVRRTGITKTGNAHLRRVLVEAAWHYRHPTQKTGETIRKRREGQPPEVLETVRKADIRLHRKFFRLVTKGKRSTVAAVAVARELVGFVWAVGKA

SEQ ID NO: 317575 - protein, 342 aa, unidentified
MKQYVGLDVSQKETSVCVVNEAGQISFEGKVKSDPGALTALLRERAPHAERIGFETGAMASWLWHELRRVDLPVVCIDARHAHAALSVRMNKSDQNDARGLAELVRVGWYREVKVKSEDSQKIRAILVARSRLVAIRRDIENQVRSLIKEYGLLFPRAIGKQFRNQVSELLGEDHQLLGVIAPLLSIHEHICEQQTKFDDEVRRLAKSDETTRRLMTVPGVGVVTALTFRHTIDDPSRFRSASTVGAYLGLTPRRNQSGETDTSGKISRWGDRLLRSYLFEAATVLLYRTKKWSSLKAWGMKLAKRIGVKKAKVAIARKIAVILHCIWVDGTSFDWGQAKPA

SEQ ID NO: 317576 - protein, 317 aa, unidentified
MAETYVGIDVSRDSLDVAIHASDKGWRFTNDPDGISKLCTFLVELKPALVVFEATGGYEMPLYVGLDEAGLPAAPVNPRQIKNFARASGRLAKTDILDARVIAHFGFALHPEARRVPDSQEIKEIVARRTQMVQMITAEKNRLRSARKSIRTRIQSHIDWLEKELDDVDSQLKQSIEDNPEWSKKDKLLQSAPGVGPVLSTALLAGLPELGKLDRKQIAALVGVAPLNNDSGTKRGRRTVWGGRAAVRGPLYMAALVATRFNPTIRQLYHRLLSAGKLKKIALTACMRKLLVILNAMVKHGTPWIYAPSTVQSCQSP

SEQ ID NO: 317577 - protein, 389 aa, unidentified
MLPNGDKHSNFSVANSHEGSTQLVKRILSALTSHSLDTVLIGLEATSVYGDNLVYFLREDATLAPFNRKIHVLNPKQVKKFHDAYNDLPKNDYVDSFVIADCLRFGRINKEVYMGDYRYKALQNLTRARFFAVQNLVKEKQRFMNVLFKKYSTMTQEKVFSDTFSTTALAVYDEFESAEALANMDLHELTDFIIEKGKNRFPDPDAVAKAIQKAARSSYRLPKTVNDSVNQVLSISITSMKALESQIKEFDKAIKAQMELLPNVLISIPGIGPVYSAGIMAEIGDINRFNSQAALAKYAGLAWKQHQSGGFESEVTRLIPSGNRFLKYYLCEAAFSLVRCDKEYSDFYHLKYKEVNRYQHKRALALTARKFVRLVFRLLKDNRLYTSAE

SEQ ID NO: 317578 - protein, 416 aa, unidentified
MNAAGIDVSSRKSTVAVLRPFGEVVRLPFDVAHNTEGLASLAEQLKALDGETRVVLEHTGRYYEPVAKALHEAGLYVSAVNPLLIKEYGANSLRRVKTDKADAVKIARYALDNWADLRDYTPMDTIRYDLKTLNRQFQLASKQRTASANNLIALLEQSFPGIRKCFDSPVRSDGTQKWVDFVHTFWHVECVRKQSLNAFSERYRKWCKRHGYIFKQGNAVEVYSLAKNAVVLVPKSEVTKVLVQEAANQLTSISRSVETYRAEMERLASTLPEYPVVMAMYGVGKSFGPQLMAEIGDVRRFERKQSLVAFAGIDPMPNQSGDKNVRSNKSSKRGSPYLRKTLFNIMGIYLKCSPQDEPVYQFLDHKRSEGKPFYVYMTAASNKFLRRYYAQVRDYLSTLDDLPPVDMDSTGLETSD

SEQ ID NO: 317579 - protein, 335 aa, unidentified
MFYSGIDLHRDNCYITTVDDSGVIVKQQRVPNTPPLVLDYFTSLGNEHRTVVESTTGWYWLNDLLESAHIPLVLAHAKYLKAISYAKVKTDKVDSHTLAILLRMGLIPTAHKISPELRGLRDTMRMRLRLVQQRSACYRRDDSILAKFNAPENVPEPYRIQSAAIDQIVQSLTSQILVLERSLHPLLIPNTDIQHLLNVPGIGKLSAFTIYLEIDGIERFESEKHFFSYCRLVPAADNSNRRMHHHSSKDGNKYLKIAFSDAAVHAIQYYPEYKAFYKKIARRGNTAIARTIVAKELAKIVYHILKNNEPYRGFKGLPISRQKSLQWPRLPSPDA

SEQ ID NO: 317580 - protein, 403 aa, unidentified
MNNVVGIDVSKGKSMVSVLRPFGEVVAKPFSVGHTGSELKELADYLKSLDGETRVVMEHTGRYYEPVARFLHEEGVFVSAVNPKLIKDYGNNTLRKVKTDKADSRKIARYGLDNWAELRQHTPMDTIRMQLKTLNRQQSLYTKTKTMMKNNLIALLDQTYPGVNALFDSPVREDGSQKWVDFAMTFWHVDCVRNMSLTAFAERYRKWCKRHGYNFSQSKAVEVHAGAQDLIAMLPRDALTKTMVRQAIDALNAVSASLERLKAEMQALAAQLPEYPVVMAMHGVGDSLGPQLMAELGDVTRFTHRNAITAFAGVDPGADQSGTHEAKSTRVSKSGPPELRRALFLVMDCLLKTQPQDDPVYRFMDKKRAEGKPYLVYMTAGANKFLRIYYGRVKEYLASLEEN

SEQ ID NO: 317581 - protein, 338 aa, unidentified
MTVVTVGIDLAKNVFAVHGVNAAGKAILVKPLVRRAKLLELIATLPACLIGMEACTGAHYWAREFQKMGHTVRIMAPQLVSPYRMGGRHGKNDAADAAAICEAVARLNMRFVPIKSIEQQGQLFVHRAHQGYVSERTALINRIRGLLSELGIVLPQAFKAFLSGVAQVLEDLPGYCNQVIGDLLNELFHIEEKIKSSEKLIQQIARDNSAAQMLMQFRGIGPMTATAIVASIGNGHDFRNGRQFSAWLGLTPRQQSSGGKARLGRITKAGDSYLRTLLVLGAKSVLLGAAKNDDPVSKWALQLKERRGYGRALVAIAAKNARMCWAMLHLKDEFRFPV

SEQ ID NO: 317582 - protein, 345 aa, unidentified
MKKIIIGIDFSKETFDATLFDCRNSELSEAVQSAVHEKFTNKKEGFQAFVTWIKSSVKKINLDELLLCGEKTGKYSLPLSNFLYAKGYSIWLDSGLRIKRSLGISRGKSDKADSLKIALYAYRYQDMAVCYVPLSKNVSRLKELFLYRQHLVSQMKAMAVRKNVTDDFNKELGDVRFIVNSSTKIIQQIKATIKKCEEKMQELIEEDEELKTTHDSITSVKGISLINAAAFIAYTNNFKDFGGNAKKIATYWGVAAFAQESGTSVHKVARVSKIANKMLKSLLTQAARIAVRWEPKFRQYFEHLISRGKHQGVALNNVKNKLIHLITALAVSQEKYNPAYKCINR

SEQ ID NO: 317583 - protein, 413 aa, unidentified
MYIVGIDIAKKSHQAAIMKPDGTLVGRSFRFTNTKQGFEFLMDKLAAVDSSFENFEFGMEATGHYWLNLYTWLADNHATVHVINPLQSDALRNLYIRKTKTDSVDAKIIAQVIRIGQYSETKLADDRMLMMRDLCRQRFFLVDMVANLKRKIIVMMDRIFPEYQGFFSDTFGKSSTAILKHCTTPEEITLFGEDNLAQLLQVASNGKFGLKKAQELISLARNSFAARLSSKTLSLLVKQMMDQMELLQNQIGILEKHISSHFKSFGTKITQIPGIGPVLGASILSEIGDISRFANPKKLCAYAGIDPSVKQSGQFLGNENHMSKRGSGYLRRCLWMASFVSVNHCREITIVYKSQVSKGKTHFQSMGFVCHKLLNIIYTVLKNDIDYSPMLCINPAITARTSRRIARAALKAR

SEQ ID NO: 317584 - protein, 343 aa, unidentified
MSEITAVGLDLAKRVFQVHAADREGRAVSRKRLRRSHVLSFFAKLPACLIGLEACAGSHFWARELQALGHEVRLIPPQYVKPYVKTNKNDATDAEAICEALIRPTMRFTAVKSVEQQSVLMLHRTRELLVRQRTMLINALRGHCAEFGIVAAQGRSRARELIELVEDPADDRLPSIARQALQCLTSQVGSIQIQIASIEKKLLAWHYSCEASRRLAEIPGVGLITATAVVASAGNATQFRSARQFAAWLGLVPQQRSSGGRERLGRISKRGDGYIRRLLVHGARARLAWSRRKKEVRSAWLTGLLARRPANVVLLAMANKTARVAWAILSRGERFENRNGAAA

SEQ ID NO: 317585 - protein, 437 aa, unidentified
MDRVIIGMDPHKASVTIEARDTREVLRAKGRFGTDNRQYKAMLQVARQWPERLWAVEGANGIGRPVAQRLLADGERVLDVPAKLAARARVFDTGQGRKTDATDAHAIVMVALRDKGLREVGLDPALMALRLLCDRRDEISHARAQALNRLHRLFLELLAGGAPVKKSTAQYKALLATVRPRDVVGKTRRRMAAEELADLARYDAKLKAMKAELKAAVQALGSHLMDIHGIGPAGAARILADVADVARFPDRNHFASWTGTAPIDPSSGEHTHHRLSRAGNRRLNHVLYMAGIVQLRNDTEGRTYYRRKCAEAKTSLEALRCLKRRLSDVVYRQLVADAKARAATVEETGPGGHSGATLSSSATDLTPDIGSSDEPQPGPAPTTLPSQAPTRKTSGSRTAATSRRRAGGVNVERPTGRTTLTPTSVGAHSTASRTPTP

SEQ ID NO: 317586 - protein, 391 aa, unidentified
MTYVFGVDIAKYSHTCLIINHHGEVIFKSFDFDNNLKGFKTLGSILDSLDASCQIKIGFEATGNYGHNLKNFLIKSSYDFMEIHPVLINRFSKANSLRKTKTDKVDVSLICSYLNTVDYKSYSKESYHNTSFKSLVRSRDVLVKERSSQLVRLTNLLDSVFPEFKPFFKDSLKSATSQYILKNYTTPSRIKRMTRKSYKKMSSQLRRTISYAKFCQLKDLAANTVGTEDALSLFQIQSILELYNHLDKIIQDFDNLIKESFKNRNSSIQTIPGIGLISAATIYAEIGDINKFDHPDQLVAFFGLDPAFYQSGETEFTGRMVKRGSSLLRQLVMNCPQYSLMHNHKLYDFYLKKRDEGKPHRVALTHIAKKLMRIIYTLETKEIAFDFNQMK

SEQ ID NO: 317587 - protein, 329 aa, unidentified
MTASSASLPVAGIDVSKRRFDVCLLQRDGTKAAASFDNHDQGFAQLDGWLKAHHADKILAGLEATGPYGVSLLWHLHAQGQSVCQLNPRHLKHYARSQGRRVKTDRTDAALIASYLKNTERLHLWQPPAQALIELQALVRRRQELMAALQAERSRLDSCRNALVHASLQRQIAHLKEELAQIDQALDTHVLEHRELQKDMRLLQSIDGIGQKVAQTILAEVPAINAFSRARDVAAFAGLTPTLAQSGTSVRRRGRMSKEGSALLRKMLYMAALQAVKRPHNAFHPMYEGFLLRGKAKMCAIGAIMHKLIRVAFGVLKHQKPFVLNFAKI

SEQ ID NO: 317588 - protein, 338 aa, unidentified
MAMYCGIDLHSNNSYLSIRDEAHEDIACRRLRNDLSKILEFLEPYRGELRAIAVESTFNWYWLVDGLKDAGYDVRLVNTTKASDYSGMKYTDDRHDARWIAHLLTLGILPEGYIMPRQERGLRDLLRKRSFLVHHRTSLYLSVKSIFARSRCENISTQEIKNLDSEAVRRMFDDPHVAESVTAMLPVVRVVTAQIKAVEKTVVETGKLRDEFSLLLTAPGIGEVIALTIMCETGDIGRFPGVGNYGSYCRCVNSVKISNNKKKGKGNRKNGNKYLSWAYSEAAHHAVRYEPRAKRYFNRKKSHSHQMVAARALANKMARACYFVLRDQVPFDPSRTFC

SEQ ID NO: 317589 - protein, 414 aa, unidentified
MDILYTRCAGLDVHKKTVVACLLTQDAQGKAVRHTRTFGTMTADILDLLDWLQAHDCVHVAMESTGEYWKPIYNLLEGRCDLLVANARHIKSVPGRKTDIKDAAWIADLHQHGLLRPSFIPPAPQRALRDLTRYRSSFVRERATTCNRVQKLLEDANIKLASVATDVLGVSCRAMLDAMIAGNTNAGALALLAQGRLQEKRDDLERALQGRFAAHHRIILTELLCQIDSLDASIARLSKEIETACVPFDEAVAHLDTIPGVARTTAEVILSEIGADMSRFPTPGHLAAWAGVAPGNCQSGGKRLSNRTRQGNKTLKCALVQAAQAASRTRGTYLSAQFARLSARRGRKKAIVAVAHSILVIAYRLLERREDYKDLGGDYFDRRQPQVTTNRLVGRLQQLGYEVTLCPLTPAEAA

SEQ ID NO: 317590 - protein, 339 aa, unidentified
MSKLTQPRQAMVFCGIDVSAATLAVAVQQENQRFEERVFDNTASGHKALIGWLRKDKVPARVSLEATGIYSLDLALALDQAEGIEVAVLNPKLIHRFAQTLRRSKTDSADAQVLAEYSCRMPFTPWSAPELSGLRLRTISRHIQSLVVEQTRQNNRLHNAEKSATTPRCVVNDLKRSMASLKLRIVRLRREALELVRSDEAMRKRFDLLILIPGIAAISALQLLGELAPLSPEMSVRQWVAHSGLDPSHQVSGTSVHKPSRISRAGNRHLRHALYMPALVAVRRDPHLKAFYETLLNRHKAKLQALIAVARKLLHAIYGILRTQTAYDGSKLFPLMETT

SEQ ID NO: 317591 - protein, 346 aa, unidentified
MENNTLAAVDIAKEIFEVGVSDQPGRVALRKRLPRDRFLEFFAQLPPATVVMEACGSAHYWARRIEELGHVVVLLPPQYVRPYVMRNKTDRTDIDALLEAFRNEQIRPVPIKTVTQQVIATLHRLRSGWLADRVRSINALRGLLRELGFFIPEGRRHVLPEAWEIIHEHRRGLPDALKPSLAALCEEIASLSTRIEDVEAQLEALARQIPLIARLRSVPGIGLLSATALYAFIGDPSRFPSGRHMASFIGLTPREHSSGLRRFLGRISKRGDAYLRMLLIHGARSVLWHAKRMKHRDRLRSWALRLERKVGHNKAAAALANKLARISWAVWKNDRDFEVVPEPQAA

SEQ ID NO: 317592 - protein, 355 aa, unidentified
MSSAKYIGMDVHKETISLAVMNDAGKLLMESIIETKASTILQFFAGLRGDLRVTFEEGTWAAWLYDLLQAHVTEIVVCNPRKNALLNEGNKSDRIDARKLADLLRGNYLKPVYHGEYGLRMLKELSRTYLTVSKDLVRVMNRLKALYRSWGIAYSGKSVYMPSQREVWLSKIKEAGVRRRAEYLYQQLDTLLPLRKEVRGELLSESRKHRATEILRDIPTIGSIRSAHLVALIQTPHRFRSKRQLWAYSGLALETHDSAQYRYVGGQLLRCRKPQQLHGLNHDHNHDLKGIFKGAAHKAASSPGPFHEFYVRLLAKGTKPSLARLTLARKIAATTLTVWKKGVRFDPEQLKSQVA

SEQ ID NO: 317593 - protein, 343 aa, unidentified
MGEVSTIGLDIAKSVFQVHGVDGIGAVVMRKRVGRAKVLEFFGGLSPCLVGIEACPSAHYWSRELQALGHTVKLMPPSYVKAYLKRSKNDANDAAAICEAVTRPSMRFVPIKSEQQQSGLMLHRTRQLLVRQRTMLSNAIRGHMAELGIISAKGRNGTAELLQIIANVADDRIPPVARFCLDLLARQYLSLSAEVASIDKRIHAWHRACAQSRRLEEIPGIGPIVATALIAEIGDWAAFRSGRNLAAWIGLVPKQHSTGGKERLGSITKQGNRYLRWLLVAGAMAIIRYARQHGTRRAWLSRIMDRRPAKVAAVALANKIARMAWAIMVRGERYREPKLLLAA

SEQ ID NO: 317594 - protein, 313 aa, unidentified
MTTSSAWIGVDICKKYLDVAATIGTPVRIANDADGRTALARRLKCENVRGVIVEATGGLERALVQALEGEGVPASIVNPARVRKFAEGTGQLAKTDRIDAMMLARFGDYMKPAPTSLADAPRQKLRDLIAYRSQITREITARSAQIRLYTAPDLLARAQSAIETLRSERKALEREMEALIKSQEAMRALHRRLLTVPGIGLIGAATLIAELPELGRLSRRKIAALAGVAPFPNESGDRRGYRAIRGGREEVRQALFNCARVAIVHNPVAKPFYERLRARGKGHKVALVATMRKLLTILNAMLKTNTDWTCKPA

SEQ ID NO: 317595 - protein, 353 aa, unidentified
MKKYIGCDMHKKYSVFVAMDEKGRLEPAVTVANDNLELRSYLATIPAENPIAVEASGGWYWFVDELEQAGLEVHLVNPLEAKKRMSGRNKTDRLDAAGLAMLLRNGTLPEVWIPPAQLRDLRGLLRTRLGLRNHTTVLKNRIPAALRRYGQYLPGEPKNLFAGKGRVQLAVYVGSLPEETRLATRHEWDLVEEVEAHIKALEMRIRLSIGRLGWVRLLKTLPGVGAILSATIYLEIGDVNRFASPERLASYAGLTPTVQASGGKVRLGRTSPVANHYLKWAFVEAANCVVMRKQKLQNTHAVRLYERLRASKNHGKAAVALARHLAEASWWMLNKKQAYREPAPASMSSSENG

SEQ ID NO: 317596 - protein, 317 aa, unidentified
MERFIERNWVGIDVSKNHWDVAVFGKKRVRRFTSDPAGCRQLMAMLVEQALTHVCLEATGGYEQRLVTALHEQGMHVSVVNPRQVRDFARAQGQLAKTDAIDAQMIAAFAAMMQPAPHEKPSENQEKLRSLRARRRQVSGSLVQEKNRLATQPDRDAHRSIEEAVDFYQQQLESLDTQIKRLVQADAEFQHRLSLLVSVPAIGDVTAAALMADLPELGTLNRRQAARLAGLAPINRDSGMFRGKRMIGGGRASVRHALYMPTLVAIRHNPVIRDFYQQLLSRGKCKMIALTACMRKLLLILNAILKENKPWKSTLTT

SEQ ID NO: 317597 - protein, 354 aa, unidentified
MIIVGCDYHPSFQQIAFVDTESGELREERLAHREGAEKFYRSLAAAGQQVRVGMEASGHARWFERLLAELQFELWMGDASEIRRKRGRKQKTDRQDAQHILGLLLKDDFPKIWVPSWENRDLRQLLWHRHRMVQARTRIMNQLQAVALNEGLLCRKKLWRERGRQQLEAFRLAPWADRRRHDLLELLDRLNPTIAELSQAIEQEAEQCPSAQRLMTHPGVGALTALAFVLIIGDADRFQCGKQIASYLGLVPLEDSSGNRRRLGHITKQGSSILRFLLVEAAQVTVRSLPQWRRKYAHLMMRRGRKTAKVAMARRLAVRLYWMMRQGWDYQQWSKFGAHAGQPGTGDGVQSNIE

SEQ ID NO: 317598 - protein, 430 aa, unidentified
MKSNTQNAKIEAITEKTLVLGIDVGSETHYARAFDYRGIEYSKKPFKFSNTEAGFATFKEWILDLKERHEKDKVVPGMEPTGHYWFNLGKFLQDNEMKPVLVNPHHVKKSKELDDNNPTKNDRKDPKVIAGLVREGRYMIPYLPDGVYADLRTASNIRFQLQAELTRIQNRISRWFNIYFPEYKTVYGKPDAKSGMLILKAAPLPEDILTLGIDGVNQIWRDAKLRAVGKARAKTLIKAAEHSIGSKEGTMSARMEIRMLLEDYESRNTRLQEVMVLIEELVRKIPMAEKLLEIKGVGIRTVSGFLAEVGDISRFNNPKELQKLAGLALVENSSGKHKGETTISRRGRKRLRYLLFEVAMSLVAKNPEFRELHNYYTTRRLNPLKKMQSLMAIAAKLIRVFYAMLTKGVDYDPKKMISDIKRPTVYLQAA

SEQ ID NO: 317599 - protein, 349 aa, unidentified
MSIGVDTHKAAHVLVALDEQGRTLGIRDITNSPDGWGEALRWTQGWPGERVWGLENSGSWGKGLAQALLAQGEAVVCEVSPQRTAQYRRRGRTQDKTDHADALAIARLLVAEGEQLPRVQADDASTELRLLSDHRDNLLGERTRLINQLHDQMVQLDPAYKVNSGPLKQRRGILYCRDWTLAQPSGVASTRLLIVHQLATQILRLDDELTAITMEISVRVQATQTPLLALRGVGEVTAARLIGELGSPPRIRSATALAALSGIAPVAVSSGGRTGYRLNRGGNRRLNRAIHIIALSQRRCEPRAQAYYAKKRAEGKTAREAMRCLKRRLVDVLYRTLCQDRGVPAASAA

SEQ ID NO: 317600 - protein, 392 aa, unidentified
MFYYLGIDVGKFSHSLCLLKEDGSKTIFQIENNRSGFEKLRKKLDVIDTKNILIGMEATGHYFLNIYDFFLQFGITVDQLALLNPLQVKSFRNTNLRGTKTDNVDADRIASLLRFGDFKRCNVSIDNITNIRELTRLRSDLVANSSSIKRKIISVVDRIFPEFGTIFSNKFGKTALELMIKYPTPEELSDVSVDELMKLVKGLSKRGISKDKIKKLHNAAKNSIGISFGKIAFKIELEILITRLRIFKEQIDSLDKTINEMMDDFDTKLFTIPGIGTTTGPAIFSEIGKIENFPSAIKLIAFAGLDPKSRESGTYQGRTPISKRGSKYLRNAIWYSAMVACRVNPTFKKDYDKRRKNGKSHRYSVTAAANKLTKVIYHVLKYDCSFNPKKLV

SEQ ID NO: 317601 - protein, 380 aa, unidentified
MKTHDKFVGLDVHKDTSVIAVADAGRDGEVRAFGTISSDLHALERTLSKLRADGSTLHVAYEAGPTGFVIYRHLQKMGIDCLVVAPSKMPVPGGKRQKTDRRDAELLARLLRAGELTSIAVPDEVDESIRDLTRTRSDAVDDLRRAKQRLKSFLLRQGYHYHGTADWSEKHLRYLRGLALPLPAHRAVLEEYLLAFDHCVSRVARLDDLLAAQVPKWRMYPAVQALMTLRGFQLIAATVLVSEIGDIRRFDHPRHLMAYLGLVPHEHTTGETRRLGGITKAGNVHARWMLVETVQSALRPPKVSKELTERQEGQPAERKELSWKTQCRLHKRGWALINRGKLKPKVTVALAREMAGFVWAMLRLVPAPTPPPDGPVLRRA

SEQ ID NO: 317602 - protein, 339 aa, unidentified
MTVKTVGLDLAKDVFQVHCVSATGRKIINKKIKRAKLISFFETLPRCVVGMEACGSSHHWARELSRLGHDVRLMPAAYVKPYVKRGKTDAADAEAICEAVRRPTMRFVEIKSEDQQAVLAIHRARDLVVRQRTQVVNMIRSILREFGHILPTGIEAASKFAREHGTEEQLGMPEIADGILGVMCHQLNGLNARGDGLTKLIEQQAWLDADARRLMRMPGIGPITASAVVATIGDAKQFETGRDLAAWLGLTPLNKSSGGRERLGRITKKGDRYIRKLLIIGMTSRALMAKNSPEKADTWTAKLLDQKPFRLATVAMANKSARIIWAILTKGEEYRQPIA

SEQ ID NO: 317603 - protein, 314 aa, unidentified
MNIIGIDVSKAKLDCAWFRDENKVKAKVVANRLDGWEELIKWAQANTGAGISGLHFVMEATDASNGANVSVVNPAHVKHYAKSLGGRTKNDKKDSVVLARYGLKECPALWQPAPLEIRTLKALSARLSAVEKDLQREKNRQEKAAATDTPTFVLESIRQMVGHFETERETLEKFIGQHIKQHNNLKENKVLLESIPGVGKVVARQMLMVLGSHQFNSASQCAAYLGLVPVQRESGSSVKGRSQLAKNGNPAIRAKLYLAAVTATRYNPDIKAQYGRLTNKGKSKMSALGAAMRKLVQICFGVLKHQQPYQPQVG

SEQ ID NO: 317604 - protein, 341 aa, unidentified
MCDYIGLDVSLKETAISVRRGGGRVWRGKCPSDPAAIAAVLRRHAPEAKRVVFETGPLSVWFFHALSAEGLPAICIDARHAKAALDMAPNKTDANDADGLAHLAEIGFFREVRVKGYDSMLVRTLVAARRHLVRISTELSNQIRGLMKTFGLVVPGAKGGRFEAEVRRLLAGQDSLRHVIVPLLEAWTVVRGRAAELGRQLLGIARHSEACQRLMSIPGIGAITATSFTTAIEDPANFRNSRSVGAWIGLTTRRYQSGEVDYDGHISRRGDAHLRGLLYEAATVVLTRTSAESALRTWGLKLRERIGFKRAAIAVARKLAVIMHAMLKSGQPFKREAEAMT

SEQ ID NO: 317605 - protein, 366 aa, unidentified
MEYSTIISLDVSDRTSKVCVMSKIAGRKRILEETTIQTTKDAFRAYLSAKNPTWPVVFETGTHCRWMEKTVKSLGMKPIIANPAYMRMVTESNTKNDRNDARELAKIALADVELLHPVSLRSEICQQMLRLLKARDVMVAVRTKFVNQLRGFAKSMGFRLPSCSACKVHLLDKLQWPEDFENVAWPIMDALEMIETKIKAYESQIKKLAACPELKDKIERVREVYGIGLLSGCALVASIDADPDRFAKARYAGAYFGLVPKLRQSGEMDMQCHITLSGSEFVRNLMVESAQIALRESARDTDIKLKGLRICQRGGKIAKKKAIIAVARCLIVTAVALLKHPERKYIPLSEKGRLELEAMRMIEAVA

SEQ ID NO: 317606 - protein, 340 aa, unidentified
MQQSNLFFIGIDVSKPWFDASLMEVKNHQKQPMITERFNNDPTGIKTFQKWLIKNAVTFDKNSLVVIENTGVYHRHIWHYCSKEQLPIHIGNAAHIKWSLGITRGKSDAVDSKRLCMYACKQADEIKTSAVLNPVFMQLKDLMTARSALVKQLHGMQNYLKELKSSHNKTLQQVIEKAHRQALDGIKKSIKNLEEQIEKIIVADEGIYKNYQLIKSVPGIGHLTAIYLICCTNNFAGKVSGKQLASYAGVVPFEHSSGISIKGRSRVHKMANKDLKKMLHLCALVVLRYSPEFKQYFQRKKAEGKNGMSVVNAIRNKLILRVVAVVNKQQPYVENLTKAA

SEQ ID NO: 317607 - protein, 344 aa, unidentified
MSESYEGRQLVGMDLHRRRSVLVRMTETGEPLETVRISNDPEHLRQVMARAGEAPEVVLEATYGWYWAADTLAELGAHVHLAHPLGVKAFSYRRVKNDERDAKDLADLLRMGRLPEAWIAPPATRELRHQVRHRAKLVGLRSNLKCQVHAVLAGAGVPVAMSDLFGATGQQLLARVELSPAARARVNSALRLIENLDFEVELFANLVAGRLREHPGYAAVQQIPGIGPVLAAVFVAEIGEITRFARPAQLASWAGLTPKHHESDTTVHRGRITKQGSRLVRWAAVEAVQRVPAHTGLGQVRDQVGARRGRNIGVVAAARELIVLVFYGLRDHHLRCLPARPRAA

SEQ ID NO: 317608 - protein, 338 aa, unidentified
MSTKKASDPTRLWAGCDLAKATFDLAIWGHQDMPDMRVRHVQRKADAIPAVLDWLRQSAPEGIRLGIVMEATGAFSEETARWFLAQDSDLIVAIVNPALTCAYMRSLGLRNKTDLLDAKALALYGQERRPVSWESPTEEMVQLRDLVRTRAELIDAQTAMKLRLNDHDRSSKTATTALEQVLVTLGAQIEILEAEIEAMINGNEVWRSQSKHFRSIKGIGPVTVATILAELGDLRRFLRSRQLTAFAGVSPRKKDSGTSVRGKARMCKQGSTRVRAVLYMAASSAARFNPDMKTFYEHLLAQGKERRSALGAVMRKLLVLMRALAKSDRDYISCQVAA

SEQ ID NO: 317609 - protein, 319 aa, unidentified
MSNQEPKETFIGIDVSKDQLDVCVHLHDNRQSFDNTEKGISSLITFLRPLKPTLVVLEATGGLEMAVASALAADQQPVAIVNPRQIRDFAKATGKLAKTDNIDSGIIAHFGAAIRPEARPLKGPEAQALDALNSRRRQIVEMLTMEKNRLSSATKWTRTDIESHIAWLEKRLKMVNTDISQSIKKSPVWKAKDEIFQSVKGVGPITSLALLTSLPELGVLNRKQISALAGLAPMNRDSGKFRGKRTIFGGRAELRAVLYMSALVASKHNPVIKEFYQRLVKAGKSKKLALTACARKLLTILNVMVRNGTKWQDPVIKNA

SEQ ID NO: 317610 - protein, 428 aa, unidentified
MSNRDCNKQVEKRQQIKKTTLIIGIDIGSKFNAVAFMTKEGEVLGKFPKVYNSREGFDYFVQAIEEVKAKKGLKSVLIGMEPTGHYWRKIAFFGKEKGYQVKFVRTTAIKHQRELDESSSAKSDIKDAITLANITREGKYIDTVIEEGVYRQLRTLSKVREKISRGSVRAQNTLSAVLDDYFPELKQIFWSMKSRSLWAILKHCPFPQDVLQCDISTITKILSKSSRRKTTAAMKAQDLFDAAQISIGLKSIGEADRFRLRHYLEEVMRSEALLKEIVIRLKSLLKQTPYAEFLLSIPGVGPLSVAVFLGELGDPAHFSNPKQIIKYAGYDPQEKDSGLRVGRKKISKKGRWLMRKILFFMGMRVCQLCDFFKNYYQRKLKIENRFGELLKKKEALCAVVIKLIKVIFALFRDKRKYQDQVAPLAMAA

SEQ ID NO: 317611 - protein, 298 aa, unidentified
MENIALIGIDLGKNSFHIHCQDRRGKAVYRKKFTRPKLIEFLATCPATTIAMEACGGSHFMARKLEELGHSPKLISPQFVRPFVKSNKNDFVDAEAICEAASRPSMRFVQPRTESQQAMRALHRVRESLVQDKVKTTNQMHAFLLEFGISVPRGAAVISRLSTILEDNSLPLYLSQLLLKLQQHYHYLVEQIKDLESQLKRKLDEDEVGQRLLSIPCVGTLTASTISTEIGDGKQYASSRDFAAATGLVPRQYSTGGRTTLLGISKRGNKKIRTLLVQCVKWSTKTGHRVRVFPVSVF

SEQ ID NO: 317612 - protein, 444 aa, unidentified
MKTSSSAPVGVVPDVAAWIGLDWADQQHVGCLYDVASGQQESFTLESCPEAIPQWLAQLRQRYGRRRVAIVLEQRRGALIHALLGCEFVILYPINPQSLARYRQAYFSSGAKSDAKDAPLLMELVRHHPDRFHPWQPDDPETRSLQLLTEARRGWVDQQTALTNQLTQLLKGYYPQALELAGELTSPGACQFLKRWPRLAALQKARPSQIQKHYQRYGRLTAEELDRRLEQIRQAQALTGDPAVLRHGTLMVQALVDQLLPLFDTLRGFEREIAALFAQHPDRPLFDHLPGAGKVLSPRLLAAFGTQRDRWQQAGEVLTYWGIAPVTEQSGRGRWVHWRMACPKFQRQSWHEFAAHSRQHCGWAQAFYQQLRARGKGHHAALRALAYKWIRILFRCWQTRTPYDEQIYLNSLKQKQSPLLAVIEALPPRSAGRKAAAQLAEAAL

SEQ ID NO: 317613 - protein, 352 aa, unidentified
MFYVGLDIHDKRIAICILGETGQIVRRAQVRTIDEMMRILEALPGRFEVCYEASCGYGHYHDLLRPIAARVTVAHPGRLRLIFRSKDKNDRKDAERLAKLLYLGEAPAVHVPAADVRTWREMITCRGRVIAKRTRAKNSVRTLLRCAGVVPPSRPALWTKRGVAWLRRLELSTESQRLRRDLLLEEVEALSRQTERIELHLNQRAKYSPAVLLLRSIPGVGVRTAEAVTAFIDDPDRFRGAKAIGRYFGLVPSQDQSGDRNRLGHITREGPAVVRQLVAEATWQAVRRSPTVRAYFERVRRGDPERKKIALVATAHYLVRVMLALLKRGTTWEEVIAPPDEPRRAVPTAAAI

SEQ ID NO: 317614 - protein, 349 aa, unidentified
MDHKTPVTTYVGLDISLAETHICVLDQDGTRLYQGAVPSDPDALADIVQRKAPNCERIGLETGATTPWLWRALRGRGLPVICIDARHASRALSMRKNKTDKNDAQGLAELMRIGWFKEANVRSPQTQYVRSLLTARYQLRMSRKDVLNQMRGVVKSFGLFAGSTATRRFPAMVQEIIQDNPQFGSLLAPLLAVHEALTRQIAVYEDELKNIAERDPDARRIMTVPGIGYLVALAFMTAVDDPARFSSSNKLGPYLGLAPRVRQSGETNWSAGIGHAPDKMMRSYLYQAATVVLTKTASWSALKAWGLRVYKRSGFKRAAVAVARKLAVIMHAIWINGTEFEYSQKGKAA

SEQ ID NO: 317615 - protein, 453 aa, unidentified
MPRKRKTKVQTIQPVINPHAAGADIGAREIYVAVPTAQTAEPVRCFATFTEDLRALVEWLKAEHIKTVAMEATSVYWIPLAELLEEAGIEVCLVNPRHVKNVPGRKSDVMDCQWLQYLHSVGLLRGAFRPAAEIRGVRALWRQRDALVRHSSWHVQHIHKALDQMNLQIHHVIADVTGVSGLAFLDAILAGERDAARLAQLRDRRLRAGEATLVKALTGDYREEHLFCLRQSLAGFRFLEAQIGEIDAELERRLRQLTPAKASPTAAEPPAKKPTGKHVPAFDLRNLLTQLHGVDLCAVPGLSVLTVQTLWSELGADLSAFPTGKHFASWMGLCPDNRISGGKILGSSTRPTANRVAKALRMAAQGLHHAQNELGEYYRRMRARLGGAAAITAVAHKLARIVYAMVHTHQPYRSEPHDTTSTVHRERTVDRLKAKAKSLGFHLVELQPAGEVT

SEQ ID NO: 317616 - protein, 355 aa, unidentified
MDSKKYIGMDVHKESISIAVMNGAGKIMMECVIETKASMILQFFDGLRGDLQVTFEEGTSAAWLYDLLKPHATKVVVCDPRKNASMKEGNKSDRIDARRLAELLRLDHLNPVYHGEHGLRSLKELVRSYLTITKDLGRVMSRVKAIYRSWAIPCTGKQVYAPRHRAEWLGKIGEPGVRRRAEFYYQQLDALRTVRQEVRRELLAEGKKHQPWRRLCQIPSIGPIRAAVLLGILQTPHRFRTKRQLWTYSGFGIETHSSADHRSVDGQLQRAKKPISIRGLNRNCNHDLKNLFKGAAIVASSKPGPFQEFYTALLTKGIRPEMARLTLARKIATIVLIVWKRGVCFDAQHLKPQTA

SEQ ID NO: 317617 - protein, 307 aa, unidentified
MCCVLMVVIAPTKFANTTKGHDELVSWLKGHKIDHAHICIEATGTYMEPVAECLYDAGYIVSVINPALGKAFAQSEGLRNKTDTVDARMLAEFCRQKRPAAWEAPHPLERALRALVVRHQALTDMHTQELNRTETAREVQRPSIDAHLLWLEAELKRLEKQIKDLTDDDPDMKHRRKLLESIPGIGEKTSAVLLAYIGLKDRFAHARQFAAFAGLTPRRYESGSSVRGASRMSKAGHVSLRRALYMPAMVATSKTEWGRAFRDRLAANGKKGKVILGAMMRKLAQVAYGVLKSGVPFDASRHNPVAA

SEQ ID NO: 317618 - protein, 410 aa, unidentified
MRYYLGVDWADQTHAVWVVNESGTKTAARTVPHTAEGLSEWGRELDEWRAQGIELWAAIERREGRVVDFLLDHGVVVYPVNPKALDRARDRFRQSGAKSDPFDARVLADFLRTDHTHLQALQPSSEAAQELKLLTEDYQQQIRQQTRLINQLTATLKAYYPLALEIAELPTALAREFLQAYPTPEAVAALTERQWQRWARAHRLSETRTQALWNLLQQPQLSVPAHVVRAKARLMRSLVAQLTLVVAAVVEYREAIEDFFARMPAAQWARTLPIGKHGITAPTLWARLGDAPGRWESFRHLQAHAGAVPVTKRSGKQQRTIQFRFACDKALRYVIDHVAFLSLHSSVWARAYYDQQRARGHAHRQALRALAAKWLKIIFVMWQHQAPYDEQYHLATMTRQQLRHGQKQIA

SEQ ID NO: 317619 - protein, 386 aa, unidentified
MQASTVDTLTAGHIGTIFVAIELSQRSWLVTLHSPDKGKMSRHKLEGGDHAGLLALVDRERDRTTRTLGAVPAVASCYEAGYDGFWLHRLLLAAGITNYVFDPASIAVDQRARRVKTDRIDGERMLRTLMAYLRGEPRVVRIVRVPAAEQEDARRGSRERGRLIKEQTAHTSRIKALLRLLGMAVGNPHRRDWLNWLAAERDWQGQAVPPRVMTEIAHEHARLMLVREQLDALTKTPASEDPTPAAAQMTERSELLRRLKCLGPAFATTLTSEVFYKDFRNRREVGSYFGLTPSPWRSGGIDRDQGISKAGNPRARCAAIELAWLWLRHQPDSKLTLEYRKRTLDAGKRIKRVAIVALARKLVVALWRYLTTGLVPEGAVLKAVKI

SEQ ID NO: 317620 - protein, 470 aa, unidentified
MPDTPNQSHTAISIPQEAAATGTPTPRRFAAFIGIDWGDKKHAWALQVEGSAQVERGEILHTPEAIEEWAAELRRRFPTGRLAVALEQSRGPLVFALTKYENFTLYPIHPTSAADYRKIFRPSGAKSDGPDAAMHLDMLLRHRDKLRPLNPDTVETRMLQFLVEDRRQLVDQRTQISNRLVADLKSYYPQVLEWFEQPYAPVALDFLERWPTLDELQKARATTLHQFLKQHKCRDQAKNQTRVEAMRGAVAATHDIAVVTAGRWAVCAAVRLLRDLNRSIQEYDRKTEELAQAHPDFAIFDSLPGAGAALVPRLIAAFGTQRDRYESAAEIQKYSGIAPVTEDSGHQHWVHWRWSCPKFLRQSFHEWAAQSAQQCDWAAAYYQAQREGKNKSHHAAVRSLAYKWIRIVFRCWKDRRPYEDSRYELALIRRKQATPASPKPSPFELPIQWTSCGSFKKLALKTHNKSDKVY

SEQ ID NO: 317621 - protein, 351 aa, unidentified
MTIEHSIGFDVHKKSISFCIKRADGSIFDEGRFRATRHEIKGWVGKQTASWHGAMEATLFSGWIYDELKPYAARLDMGNPSMMKAISAAKKKNDRLDARKIADLVRCDLLPKCYVGPREMRELRRMLRYRNAMVGHAVQIKCRMSGLLMESGAEYNGKQLHGKQYFSELMEGLEEVPASVKELLQMSRGMLEMFEKTQRQLVERLNEAPLLKKRLALLRTIGGVGEITSLTWALEMMDPRRFSSIGDALSYCGLTSALNVSADKAQRGPLSKQRNGHLQTVLIEAAKVAPRWNAQLAEVHEKELSRGHKNQATLEVARKLVAYLLAVDKSGRPFELRKPVQQPAEEVLAVG

SEQ ID NO: 317622 - protein, 454 aa, unidentified
MANQADRTPTCVLVAIDIAKQWNAALIEYPDGKRQRFQFKHEQEDYDRLVRLLRSTGSSCRIAFEPTGVYHRTLAYRLLQEGFHVCQVSSVAGARYREAMFNSWDKNDPKDAQVILELLKQGITQQYHDPLVNGTHDLEEISKTYQQISGARTKLRHAIITHYLPLHFPEIERFWYSSRNDWFVRLLMQFPTAAAVGALSQEEFVAAAWKVVGRKVNQRRLLEEIHELAQNSIALPLAADSIAVETFRLQLSRYDALNQQRNALEARAHALLRDRHDYQRLCEIPGIGPIIALVILAEAGDLRRFSHHKQFLKYCGLDLAKVQSGVSRGHERLSKRGNARLRCALWQASISAIRMVPDMAAYTASKAGIRAFTDILRADLAETGIRVTEILPGLTKTNIILKRHRGDRAAEQEYFERFKIALDPDDVARSVLFALSQPPHVQIAQLYILPVNRW

SEQ ID NO: 317623 - protein, 371 aa, unidentified
MGKSSKSLFIGLDVHKDTIAVAYAAEDRGTEVVSLGMIGTRQYDIDKLIRKLEAKGATLLFAYEAGPCGYWLYRYLTRRGLSCAVVAPSLIPRKPGDRVKTDRRDAVTLARLLRSGDLSSIYVPTVDDEAIRDLSRAREDAVRDLKRHKVRLKAFLLRQDIRYEGRANWNAAHLRWLARVVCPTPAQQIVFQEYVHAVSEQTDRLGRLETELQTAVTTWRLYPVVAAVQALRGLNLTGAVTLIAEVGDLTRFDTPRKLMSYLGLTPSEYSSGEHRHQGGITKAGNGHARRALVEGAWAYRYPAKVSRHLQLRLENVPAEVRAIAWKAQLRLCKRYRLLSARGKHVNQVVVAIAREMAAFAWAIARTVPIAA

SEQ ID NO: 317624 - protein, 467 aa, unidentified
MTPPKDFCLDPGPPAPTPTFPPSPVLSDALQICHPHAAGIDIGEAEHWVAVPPGCDPQPVRRFGTFTVDLDALADWLIDCGVTTVAMESTGVYWIPLFELLEARGVQVLLIDPRQAKRAPGRPKTDRLDCKWLQRLHAYGLLAGAFRPEDQVCVLRSSLRHRQMLLTSAAQHIQHMQKALQQMNLKLTQVVSDITGVTGMAILKAILAGERDPVILAKLRNSHCQHREDEIAKALQGTWRAEHLFTLQQAVALYDFYHQQLALCDRQIKAHLETFADKSAGQPLPPKARRHKKTNEPRFDARTPLYRLAGVDLTTIEGIEENTALILLSEIGTDMHRWPSVKHFCSWLGLCPQHQISGGKVLSRRVRPGAHRVTVALRLAARTLHHSQSALGAFFRRMKARLGTPKAITATAHKLARLVYSLLQHGSAYVQQGLDAYEAQYRERKVTTMAKQAKALGYTLVPLAAQG

SEQ ID NO: 317625 - protein, 361 aa, unidentified
MTMIGAERPESSTGVEVILGVDTHLDFHVAVALDHLGRRLGDSSVPTTPKGYERLLRWAEGFGPLRCAGVEGTSSYGAGLARHLRARGIEVLEVERPKHRRRSSRGNLQKKSDPSDAEAAARAVLAGEASGVPKSGDGEVEMIRALRAARRSAIKARTQAANQLQALRVTAPEQLRRRLRGLSTKELVCVAARFRLADDPRDVPTATKFALRSVARRYEVLSEEIAELEAHLDRLVAQAAPQLVSLPGIGTENAATLLVVAGDHPQRLGSEASFASLCGVAPIEASSGKVVRHRLNRGGNREANRALYMTCLARMRRDRRTQDYVARRTQEGKSKREIIRCLKRYVAREVYRVLISWAYPG

SEQ ID NO: 317626 - protein, 458 aa, unidentified
MEEPQEVPADGEHERVLERVAAIDIAKASGVVCTRVPDEDRPGRRKTHLWTVQATSKAVIELGDYLRARQIQVVTLESTSDYWRIWFVILEAAGLKVQLVSARAVKNAPGRAKTGKKDAVWLAKLTGKGLLQPSFIPPYEIRRLRELTRLRAALVHDKSRYRARLEKLLERARIKISAVLSTLDTDTARAMIGALIAGQRNPRVLADLAIGKARARRAELTLALEGRREDHHSIQARILLDDIDALNRQAGQLTGTIGELISQIPAAWGTDADGTTGPHAGTSPQAPVLPAIAQLDAITGCGIIAAQAIIAGIGLDMTVFGTPGRLVSWAKRCPATRQSGKKTSGGKAGKGNPWLNGILGEITASAARTDTFPGERYRRLARRRGKRKAMVAVARSILVIIFALLSDRSVRFRDLGPDFYDTQINRDRKIRNHIRQLQALGIEPDDLSAFLTKNPPAA

SEQ ID NO: 317627 - protein, 392 aa, unidentified
MSQHFRFDASRSLTALEQDSTIIAVIEMSQTKWLVAALVPGVERQPLKKFDAHEETLLKLLHRWRHEAGQAGRNIKRIVVAFEAGRDGFWLARWLRARDIEVYVIHPTSIAVSREHRRAKTDRLDTELLMRVFLGWLRGERRHCSMAAIPTIEEEDARRPNRERQNLVTEQTRIINQMKAIFTRFGIRSLRPTMRKVAENLEDLRTAEGTPLPQNTLAELRRHLARLRVVRDQIRAVEQERLRKLAVAPAAEKKGPHAMVRLIARVLGVGVETADMLVNEIFSRHWRDRKAVARYAGLTGSPDESGSRRRERGLARAGNVRVRSGMIQLAWRFIRFQKNSALAQWFAARTADGRASTRKTMIVALARKLLIALWRLVTKGEVPQGVVLRPAS

SEQ ID NO: 317628 - protein, 393 aa, unidentified
MIGAPSSDRVVIAVDPHKASWTAAAVDSSLQPLDVIRVPVTPQGYRQLRGFARRWRDSDWAIEGAAGLGAPLTQRLTADGIDVVDVPAKLAARVRVLSTGHGRKTDEADAVSVGVAALTATRLNTATIDAAITALRALVEHRDDLVKTRTQTVNRLHVLLTHLIPAGAPRGLTADRAADMLRQIRPRDPAVKTLRGLAVDLVTEIRQLDRRIAKAASDIQTAVDTSASTLTELCGIGTLNAAKILARVGSVHRFRSAAAFASYTGTAPIAASSGDVTRHRLSRAGDRQLNCCLHTMAITQIARDTPGRTYYRKKRAAGKSHREALRCLKRRLSDAVYRQLLRDATTRAGAGPAGHAGATLASSAAGSHPFTSTSDKSLTGPANRNHTTGGHDV

SEQ ID NO: 317629 - protein, 381 aa, unidentified
MRQVCGLDVHKDNVFACILNENGVIFQEKFGVLTPELEQLAAALQEHDVSEVCMESTSIYWMPVWRVLEPYVAELKLVNPYFIKQLPGKKSDVKDAEWIATCLLKDLIRGSYVPADIIQQLRQYDRRISDLNAECVRKLGKLDAAMQRCNIRISNYVATTDGKSYKDVVRLISEGIRDPAELLKVIHGRITNRVGKDVILASLTGIISDTDIDVIRQLREEVDLAQRHKDECQSKMDVICQQFFPEQLKNLQTIPGVKGRSATAILAEVGSDVSSFQDAAHLVSWCGLKPRNEESAGKIKARSITHGNRYLRKTLIECAWAASKTQGCYLNKFSYYQTVVRRKNKMKVQVAIARKILTAIWYVLHESVAYRDYNPDIAPAA

SEQ ID NO: 317630 - protein, 318 aa, unidentified
MSTGNDFYGVDVAKAELVIARKGEPGICTIANEAGAIGVWLKTLPPGSTVAMEFTGRYHRLLVELATASGCTGYVLNAKDVSFYAKALGGRSKTDKVDAHVIARFIAEHHEGLHPWEHAQPHAAEIWELLLRRADIVVHRASLRQTMRDAQAVAVAAKQFDDSFDGLLEAIDERIESLQRQDAQMAAASRRLQTVKGVGPQGGAMLAALLSRIPFANADALVAYSGLDPRAQDSGQKKGRRRLSKRGPPPLRRQAYLMAKAAARSKVFKPIYEALKARGFAATQALVIMARKLLRVAFAVWKSGKPFDESVIAPAAGA

SEQ ID NO: 317631 - protein, 366 aa, unidentified
MKKNSTVATKRKKIFREKKLTIGMDLGDRFTYYCVLDEAGEVVGEQKLATTKQAMKQAFSRMPSSRVALETGAHSPWVSRQLTQLGHEVIVAHARNVRLIGESSRKDDRLDARMLARLARLDPRLLSPVQHRSAQAQLHLTVIRARAALVGARTALVNSARGLAKSYGERLRKCGTQQVSKDLAAGLGVELKAALEPLLAEVTSLNQRIAEYDRRIEQIATEMHPEVALLKQVKGVGTLIALTYVLTVADPHRFRRSRDVGCYLGLRPGRRNSGNSQPQLHISKEGDRYLRTLMVQGAHYILGPFGQDSDLRRWGLKLSERRGSNAKKRAVVAVARKLSVLLHKLWVSGEVYQPLRNHRAVESAVA

SEQ ID NO: 317632 - protein, 360 aa, unidentified
MKYYIGLDAHSTTSTFAVVDENGQCVLRETVKTSEQSLVHVINRINGERHMTFEESTISQWLYLQLKDKVDNLLICNPTYVAKKQGAKTDFRDALHLAQELRTNHLQPVFHDTSHWMEIRTTVSGYLDIVEEIVRFKNRLKAVFRAEAIQTDENSFYKNKVRIKELKNPSAKFVAEKLFDQIEFLELEKDKYKEVFEGNRKKYRPIRNLMTIPGISIIRANIIAAIVCQPARFENKHKFWGYCMLVRHIQISGGKIYGNKRFFGRRELRNVFIGAAENVMRLDGELRDRYDALRAKGTDHKDAKLNLARQIASIALCLLKNNDKYNENYSEYLKERKKTQKEFFEPSLYLTARINFQAIS

SEQ ID NO: 317633 - protein, 429 aa, unidentified
MRTESTPGARGPVFCGVDTHADSHWLCVLDWRGRRVLSRRFPADAGGYEALAGAIAAAGEPACVAMEGTSSYGAGLTRHLASLGMPVREALSPARTQRRRPGQGKCDEADAERAARAAMSGSRLGTPKSQDGWVDGVRCMLAARSGAVKARTSAINTARSLLTTAPEGLRSRFRGMAGPRLMEELPSVRAEGALGAALGALADLWAAARDAALDMERAIEASLEENCPALLAMYGCGPVSAAKLAVAAGDNPGRLRSEASFAAICGACPIPASSGKTVRHRLNRGGDRQANSALHEIARQRVMRDPETAEYAERARARGKSDREVMRCLKRYVAREAYRALMRPHEIRRPEDASGLVAARRAAKVSQVRAASILGTSEKYISMLERGQRELKPIRRAYEAWVEAGLPLDWDRQAFEAERKMDSKKHLAK

SEQ ID NO: 317634 - protein, 400 aa, unidentified
MRAVFGIDVSKTSSEVAILVNGEKVHGYTILNDAIGFNRLLGDLKTVHNPEIIFEATGVYSRRLQAFLEEYSYAYTRLNPLEAKKQLDSLRVRKTDKIDAEKLAKSQLVHNRKPTYVQEEVYQHLRDLSRFYQNMTEDLVRTKNRLHKVLQVTFPELENLLSTPTGEQYWNLVMAFPCKEDVLSLSQSNLCEIIRQSTSKRMSEKRIAYLTDKLIKLAKQSFCAVKKTSPMLEEVRYYAQELLRLSERRQVVLNDMVALAQPLPEYDILRSIPGIAETTATSIIGELGDIRRFQSSNQINAFIGIDLRHYESGNFLAKEHITKRGNPYARKILFKCIHNIASASHTNPCHIADFYEKRKRQSTIASTKPHTIASIHRLIRTMYYLITHNKLYDYSLTQNR

SEQ ID NO: 317635 - protein, 341 aa, unidentified
MVKTPAITGGVDTHADAHAAAALDGIGGLLGVSEFPATPAGYARLLGWLNSFGTVCLVGIEGTGSYGAGLARHITAAGIRVVEVDRSDRQDRRRKGKSDPLDAVSAARAAQSGRASGAPRGRDGAVEAIRALMIAKRTARAQRTQAINQARALILTGPDDIRTRFTRHGPAELVAELAALRPRPGSMVRYHTLLSLRELGRRAQFLDDQLERLDLLITPLVTARAPGLLKLYGVGPDTAAMLLIAAGDHPGRLRSEAAWAHLCATAPIPASSGKVTRHRLNRGGDRQANHALRRIVITRMSCHPATRAYVQRRTAEGLSKKQIIRCLKRYAAREIYPHLPG

SEQ ID NO: 317636 - protein, 412 aa, unidentified
METLVERGCGLDVHQGTVVACLLTVRKDGKVQKQVRTFGTTTRELLSMREWLLSQGCTHVAMESTGVYWKPVYAILEGAFQIVVANAQHVKKVPGRKTDVKDAEWIADLLCHGLLRSSFVPPKAIRELRDLTRYRRKLVESQSAERNRLLKLLESANIKLASVATDVFGTSGRLMLRALIEGKATPQEMADLAQRKLRSKIPQLQLALEGKLEEHHRFLLKLQLDRLERAEGDLAVLEQRIQQKLEPYTTQLALLDEIPGVDWTLAAVIIAELGVDMSVFQSVSQLASWAGVCPGNNESAGKRKSSRIPKGNVYLKTALVEAAHAAARTKGTYLRDKFYRLKARRGYKRAVVAIGHKILVSIYHMISQNVSYNDLGDLYLDKLNKNHLTRNLVHRLERLGYSVTLSLQQKAA

SEQ ID NO: 317637 - protein, 343 aa, unidentified
MSITMIGLDTAKSVFQIHGVNETGKAELKRKVRRSELIAFFEQQERCTVVMEACGAAHHWARILTGLGHTVKLIAPEAVKPFVKTGKKNDAADAAAICEAASRPDAQFVPAKTVEQQGILALHTVRSLLVKQQTMLANAIRGLATEFGFVVPKGLHNLEPLVALVDADEAVPAQARQAIAELHERFGELAKGIQSCEAGIVKHARSDATARRLATIPGIGPITASLIAATVVDISLFKTARQFAAWLGLVPRQHSTGGKTRLGRITKAGNKEIRKLLVLGATSMLGRAEGWHSALGGWLRDILQRRPVRLVTVALANKMARIAWAVMTRNEVYRAQSGVAATA

SEQ ID NO: 317638 - protein, 349 aa, unidentified
MWTRVMIVLGADTHKRSHTLAAVNVATGQVLGDKTVQVGPRGFATLLGWARELDGQRVWALEDCRHVSGALERFLLGRGERVVRVSTRLMAASRRSSRQRGKSDQIDAVAVARAALAAGIETLPTAALAGVELDIRLLVDHRERLVRTRVALNSTLQWNLHDLWPELALPGGALFSKKWTSKIARRLARAEQTMRVRIARDELRRVRELTHTINALETEIADLVAQVAPQLVAERGCGPLTAAKLVGEIAGADRFATDAKLARAAGIAPIPASSGRTDRHRLDRCGNRQINAAIHRMAVTRARCDPQTRDYIARKKAEGKTNRDAIRCLKRHLARRIWQLLRAPTPSGP

SEQ ID NO: 317639 - protein, 390 aa, unidentified
MYYCGIDVAKRKHAIALLDEHGQPVQRPFTIDNTRAGFDQLLQALAHLPGPVLIGLEATGHYWWALYEDLTQHDHPVVVLNALQVHAFRKSGVRKVKSDRTDANWIAEFLRFSQPTPAQPTTPVLLQLKEVSRFRYHLTEQIGDSKRKLLSILDRVFPEYETLFSSVFLTSSRQLLTQAASAQELATFDLAELTDLLKTTSRSRFGRTKAVAVQAAAQQSVGVRFLADAAQLEVRCLLAQIELLEAQREQVDTALAQLMAQVPQHLTSIPGVGPTTGAALLAEIGDIQRFDAPEKLVAYAGIDAAVYQTGQFEARQMHMSKRGSPYLRHALWQAASMAIMHDAELRAYYDRKRQEGKAHGTALGAVCRKLLTRVYIVLKENRPYRIRPAH

SEQ ID NO: 317640 - protein, 398 aa, unidentified
MTESSDYESVQVFIGVDVGKDTHHAVAINRSGKRPFDKALPNDENKLRSLISDLKQHGQILLVVDQPATIGALPVAVARSEGVLVGYLPGLAMRRIADLHAGEAKTDARDAAIIAEAARTLPHALRTLKLADEQIAELSMLCGFDDDLAAQTTQASNRIRGLLTQIHPALERVLGPRLEHPAVLDLLQRYPSPEKLASLGEKKLAAQLCKLAPRLGKRLAADIAQALAEQTVVVPGTNAAAVVLPRLALQLITLRKQRDEVALEVEQRVLAHPLYPVLTSMPGVGVRTAARHLTEVACRAFASAAHLAAYAGLAPVTRRSGSSIRGEHPSRRGNKALKRALFLSAFAALRDPLSRAYYTRKMSQGKRHNQALIALARRRCDILFAMMRDGTFYTPQGS

SEQ ID NO: 317641 - protein, 424 aa, unidentified
MKPHPDVEFAAFVGIDWSDTKHDICLQAGNSEEREFAVLAHRSAAIEAWASALRQRFAGRPVAVCLELAKGPLVYALQKHDFLVLFPVHPATLAKYREAFVPSHAKADPSDAQFALELLLRYRAKLKRLTPQSVPMRTLLRLVEQRRRLVGDQSRISNRMTDALKQYFPDVLAWFADRDTLLFCDFLSRWPTLKQLKHARRTTLLSFFHDHHVRSQSRIDERLHAIKSATPLTDDPAVIRPNQLLVLALVEQLRTTLQAIDRFDAEIASVSQTLPDYSLFRALPGAGATLAPRLLAAFGEQRERYQSAAELQRYTGIAPVTESSGNKHWVHWRLQCPTFLRQTFVEWAGATIPRSFWAAAYYRQQRAKGCSHHAAVRALAFKWIRILYRCWQTRTPYDESTYLNALKRRGSPLLTSIAGTASNT

SEQ ID NO: 317642 - protein, 341 aa, unidentified
MDTMIGVDLAKSVFQVHGASMVGELKFRKKLTRPQFEKFMTEHGPAVVVMEACGGAHYWARVMSELGHEVKLIAPQYVRPFVKRQKNDAADAEAIVIAAQRPEMRFVVPKTEDQQARAALFRSRERLVRHRTEMVNALRGTLYEQGQSFPTGIRHLSRIQALLDDPENGLHRLVQRECLDLIEQIAQTTERIDAKTKQATTLSAQSDVTRRLQTIPGVGPLTALAVETFAPQMESFNSGRDFAAWLGIVPRQHSSGGKQRLGKISKAGQGDIRRLLIMGAMTRLTPMGRRGIASGSWLARMLDRKPKMLVAIALANKMARQIWALLTKQEDYRDPAQMAAA

SEQ ID NO: 317643 - protein, 406 aa, unidentified
MSMNAVGIDVSKRKSTVAILRPGGKIVVKPFDVPHLSSDFQSLEKLIRELDGETRIVMECTGRYYEPIARELSQAGFFVSAVNPQIIRNFQGQDNPLRKVKTDKADSVKIARYTLDSWANLKQYSLMDELRSQLKTMNRQFDFYMKHKTAMKNNLIGLIDQTYPGANTYFDSPTREDGSQKWVDFIDTYWHVDCVRKMSLSAFTDHYQKWCSRRKYNFSKSKAEEIYGKAKELIPVLPKDNFTKRIIKQAIEQLNAASQTVEQLRSLMNETASRLPEYPIVMAMKGVGPSLGPQLMAEIGDVTRFTHKGAITAFAGVDPGVNDSGDYSQKSVHASKHGSPVLRKTLFQIMDVLIKTKPDDAVYLFMDKKRSEGKPYYVYMTAGANKFLRIYYGRVKEYLSSLPESE

SEQ ID NO: 317644 - protein, 330 aa, unidentified
MKNWNVILGVDVSKLTLDISCAARKLHLKIENQSKGFSLFKKWCKTNAIHLQETLVVMEFTGGYEYRFMQFCESQSIAYTRISGLEIRNSMGMVRGKNDQVDSFRIGRYGEEKIKRLSPSKPLNTKILSIRQLLSFRKRLVREKAGLENTLQERRHMYAVNKGDTITRIIKSKIRTNQKYQLEIEKEIDAIITGEEEMSQNYRIITSIKGIGKVNAWMTIAYTENFTSFPDARKYAVFVGVIPFANTSGTSIKGRPRVSHLAHKELKQELNQAAKTAMQHDPEIHAYAERKQQTKCFNLVLNNVKFKLILRMFSLVKRRELYVENYKRAS

SEQ ID NO: 317645 - protein, 355 aa, unidentified
MTSTQYIGMDVHKESISIAVMNAAGKIVMECVIETKASMILQFIDGLRGDLHVTFEEGTWAAWLYDLLKPHVTEVVVCNPRKIALLQDGSKSDRIDARKLAEQLYMNKLKPVYHGEHGLRTLKELARCYLTITKDLTRVMNRLKALYRSWGIPCAGNEVYAPLHRAEWLSKIAETGVRRRAEHYYQQLDALRALRQEVRRDLMVESKKHKAWKLLRQIPGIGPIRAALLVALIQTPHRFRTKRHLWTYSGLGLETHDSAQYRVVEGQLQRSKKPVTLRGLNVNHNHDLKDIFKGAAMRASTADGPLHDFYEALLAKGRKPTMARLTLARKIAAITLIVWKKEVRFDANYLKPQAA

SEQ ID NO: 317646 - protein, 373 aa, unidentified
MPKYSTAFGMDVHLRSTTVCALDADTGEAVTRRFPGNPWGEIAGWMDGFPGPSLAAYESGYLGFAPQRELAGLGVECVVAAVSKIPRSAADSASKNDRNDAARMAKAILAHDISPVWIPSPEVEGIRDLAGAYDGATARLATAKQRLLAFLARRGFVYGGTTPAGNPRKYWTYDFLRWLDKVRPEDDGGVRALAALRNEVEAAAEARADLLSEYRAAVDASPIAAEVAALQSIKGCAFALAAAFSAEVGDFTRFRSGRQVTAYFGLAPSQRSSGDSVRLGGISGAGNALVRKLAVEGSWCYAAARHQPKLMPRDTGVPLEIRVHGRKGSERLLRRREEMLARGMPAAKANAATAAELVRWLWALGMMCREGAE

SEQ ID NO: 317647 - protein, 345 aa, unidentified
MALNHRWCVGVDLHKDTLTACVFCGCCGEVSYRKIACLCRRQIAEYFAALPRPHAVAIESVGFYRWLWEMLEPIVEELLLADATQARALAGRRLKTDREDALNIAQLLAAGRLPTSYAPPIEVQWLRDLTRHRNSFSRQHARILHRVKSIMNANNRPGPARMQSDGLIRYLKAQGEKLPARHVEMLWQCLDAVVLTERQIEQVERTIGELMRRDFFREVYGILTSFPGVALVTAATVIAEIGDFRRFAGAKAIGRYAGLNPRVYASGGKQRMGHIAKTGSSDLRWILQQAAWTAIRYDEHVKRIFLRIAKRAGRKAAAVAIARKLLTWMHAAVIKGEPYRTRVAA

SEQ ID NO: 317648 - protein, 343 aa, unidentified
MSMVRIVVGGVDTHADSHVAAVIDGNGGVLGIEAFPADRTGYAALLSWLWGFGDVVRVGVEGTGSYGVGLARFLHEKRVAVVEVDRPNRQARRKVGKSDPTDAVSAARAALSGTAAVIPKTRNGPVEQMRVLLVARRSARAQRIQTLNQLRQLVFTAPEPIRRRFKDRYKTGLVTEAARMRPRKGADPVSFTTNTVIRDLARRIQGLTAEMLTIDQALVELIATTAPSLLALYGVGPDTAASLLVTAGDNPARLGSERSWAHLCGVTPIPASSGKTTRYRLNRGGDRQANSALHRIVLTRMAGDDQTRRYVTRRRAEGRNTSEIMRCLKRYVARQVFKHLQMA

SEQ ID NO: 317649 - protein, 350 aa, unidentified
MIIIGCDYHPGFQQIAFVDTETGECGERRLEHREESEKFYRDLRAQGAAVRLGMEASGHARWFERLLGELGFELWIGDAAEIRTKRVRKQKTDRQDAELILRLLLEDRFPRIWIPSGENRDLRQLLWHRHRMVQARTRIMNQLQAVALNEGLRCKKRLWRDAGREQLESFELAPWASRRRRDLLELLDRLTPMIAELTQAIEQEVEKCPAAQRLQTHPGVGALTALAFVLIIGRADRFQCGKQIASYLGLVPLEESSGQRRRLGHITKQGNSLLRFLLVEAAQVTVRSDQEWRSKYFHLAMRRGRKIAKVAMARRLAVRMYWMWRKRWDYEQVKKFGSHAGQPGNRDGVR

SEQ ID NO: 317650 - protein, 321 aa, unidentified
MKYLGIDVSKDKFNVSVSLWNGEFENNQTGFKSLIKWLKKKKIELSYLHCCLEATGRYGEELALYLSDKEIKVSIVNPACIHAFGQSQLKRNKTDKIDAQLIARFCEVNQPPAWIPPSAEMREMRELIRLIESFEEEKQRHKNRLESRLFSEASIQAINQAILGLESQIEQLEMKVKELINKDNDLKGKVSLLQTIPGIGEKSAIRFIAEIPNIENYTKAKCLAATFGITPKQRLSGSSINSSSISKLGNKRLRKAFFLPALSAKLHNPIIKNFCKQLSERGKKAKQIICAAMRKLIHIVYGVLKSGKPFDPNYQNLSFSS

SEQ ID NO: 317651 - protein, 341 aa, unidentified
MKKNIFFIGIDISKADFAASIYKTPKEPIVTKEAIPNNPKGFEMLLLWLKDHLIDRKNCRICMEATGVYSQAISYYLLFQGFPVSVEPPLKVKRAFDPVGHKTDPVDSKQIAEYAYRFQDELTSWKPRDETLEKIRQLLSVREQFTKQKVALKNAIQAYHKQSVQVALIKKAHQETLAQLKKQIARIDKELAKLINQDPGTFQKVNNLKSIPGYGMLLAAHLLVITENFTKIQNYKRLAAFIGIVPYKHQSGTSVCKRAKIRHFGPMPSRKLLRLAAQSVATHDTTFRRYYLRKVAQGKAKALVLNNISNKLLKIACTIIRNNTRYIKDYRSIHPMYLKSA

SEQ ID NO: 317652 - protein, 360 aa, unidentified
MMIIGVDYHPSFQAMAFLMEETGECGEQELNHSDGQAEKFYRELKQRGMCVRVGLEATGYSRWFERLLAELGFELWIGDPAEIKAKRVKKLKTDRKDAQLLLRLMLENNFPQIWVPSPENRDLRQLLWHRHRLVQMRTRIMNQLQALAMNEGYRWKKKLFSEQGRAQLEKLALAPWASRRRQELLELLDRIHPTIEELTAAVEQEAQKRPEVLRLMTHPGVGPLTALAYVLIIGTPERFHCGKQIGTYVGMIPCEDSSARKQRLGHISKQGNSLLRFLLVEAAQAAARSNPEWRRRYMHLAMRRNKSIAKVAMGRKLGVRLYWMWRNGCAYSPSFEFGSYVGQLGTGHRSKKNKEDHSSE

SEQ ID NO: 317653 - protein, 326 aa, unidentified
MQLSIIGIDLGKTSCSLVGLEAGGKVVLRRRLHRDTVVEFCSKYPACVVAMEACCGAHHIGRALAGQGHEIRLMSPEYVRPYVKAQKNDDRDAEAIAEAASRPTMRFVTLKSEEQLDMQTLHRVRDRLVGDWTSLMNQIRSLLLERGHVVAQGRARLAVALAELLDGEKRVLADRIHELIVDMRRQWVALDERIKAFDTEFAAAAKAQDGAKRLLSIPGIGALNATALVAAVGDAGTFARGRDLAAWLGLVPRQVTTGGRPKLLGITKRGSKYLRKMLIQGVSVASGMSGIGSGRHVRILVRRVACCRRFGWHGSPMQSGCIDRRS

SEQ ID NO: 317654 - protein, 356 aa, unidentified
MVIVAIESHQGALHMQISTIGLDIAKNVFQVHGIDAAEKVVVRKRLRRRQVLEFFKALPPCLIGMEACATAHYWARELTKLGHEVRLMPAKDVKAYVKRNKNDAADAEAICEAVRRPTMRFVRIKSAEQQGQLMQHRTRDVLIRQRTQIINALRAHLAELGLVAAQGNAGVNELRAIVTDEQDTRLPIDARASVIVLAAQLEALESVIGAIEKRIKMQHRSSEASQRVEAIPGIGVIGATAIVATVADPTIFRSGRDFAAWIGLVPRQDSTGGKQKLGPISKQGDRYLRRILVVGAIAVLRRAQENPGKYPWLTQLLARRPFKVVAVALANKMARMAWALLAHGGTYRAPELVETA

SEQ ID NO: 317655 - protein, 394 aa, unidentified
MFCGWDWGSTVHGVCLIDDQGAVVKRWMVQHTEDQLVSVFGELAQLVEGGDVGRVPIAIERGEGLVVGLIAGAGHPVWVVEPAAFKAARPRWGSAGAKSDLGDAFMLADYARTDGHRLRRVEPVARATRELAALVRARTALVEARTAASNQLWAILAEHWPGAAVVFQKLTSQIALAFLTDYPTPQTAALLGEGRMGQFCRRHSYRGGKSPAELLRRLRAAPASANPITPTILEAIVRGSTAQIRLLNTEITRLERAIADALATHPKTPLLQSLPRVATVSLAALIAEVGPLLERCENPEQVAAMCGAAPVTRASGKSRTVGFRYTANKPARVAITGFADNSRHELPASVRGPTLWISGSGGYGQLTRRLAGDTTSSRSRRPFPSPVTATCSMR

SEQ ID NO: 317656 - protein, 322 aa, unidentified
MSISVLGIDIAKQKFDVALLLDGKTKHKACKNSVEGFETLTLWLERQGIQKVHACLEATGSYGEDLAIYLHEAGHIVSIVNPARIKGFGQSELIRTKTDKIDAALIARFCLAMNPGPWNPPSPEIRSLRALVRRVDSLIDMRSQEKNRISTAHETVALLIKEHIAYLDQEIEKIRQQIAELIGKDPHLKRKKDLLDSIPAIGKATIPHILAELDDLGKFNHVREMVAFIGLAPKETISGSSIKGKPRLCKIGHARLRRALYMPALVSIQRNPLMIAFYNRMKDKGKKGKVIVCAIMRKLVHVIYGVLKSGKMYDPNYKPAFS

SEQ ID NO: 317657 - protein, 366 aa, unidentified
MKKNSTVAVGRKQIFKQAKLTIGLDLGDRTSHYCILDEAGNVILESNLPTTSNGIRQAFRRIPRCRIALETGTHSPWVSRQLAQMGHEVIVAHARNVRLIGESSRKDDQFDARTLARLARIDPGLLGPVRHRSAQAQIHLTVIRARAALVSTRTALVNAARGLTKSYGQRLNKCGTEQMNRDSSKGLSQELREALDPLLREIESLNEHIAEYNGRIEQIAKEVHPEVARLKQVKGVGTLIALTYVLTLDDPHRFRRSRDAGCFLGLRPGRRNSGQSEPQLHISKEGDRYLRTLMVQGAHYILGPFGQDSDLRRWGLKLAERGGRNAKKRAVVAVARKVAVLLHKLWVSGEVYEPLRNNHKVQSAVA

SEQ ID NO: 317658 - protein, 366 aa, unidentified
MGKSSTVFVGMDVHKESIELATADEGEARHYARIGGEAASVDRAVRKLRSVHRELEFVYEAGPCGFWIYRKLRAQGLACMVVSPSMTPRRAGDRVKTDRRDCLMLARLARAGELEPIYVPDAKDEAMRDLVRTREDAVCMQRQARQRLQALLLRNEIRYVGKTAWSAAHRRWIAGLKLPDPAQQIAFEEYVTAIEEAGARLERLAQAIGAQLEHWRWRPLAGALQALRGISAIHAVRIVAELGDLTRFVSARKLMGYLGMIPSEDSSGSRRRQGSITKAGNSSARRALVEAAHAYAHPARVSWVIARRQTGLAKSVTDLAWKAQLRLCARFRRLAARGLNRNKIVVAIARELSGFVWAIGQSVKPL

SEQ ID NO: 317659 - protein, 319 aa, unidentified
MAQDSRIVGIDVSKAKIDAFIRSLEIGISQPSTPAGERNLIAWLRENDVQAAVLEASGGYEKRWVAVLRAAGFSVRIVDPKRVRHFAKSAGRLAKNDPIDAAMIAWFAETFSDTVGLPHEPDREELDRFVTARVGLLKLQTQIENQGEHKQPPLVAKAHQALLRTLRRQLAKLEAAIAAKLEASSQIARRTEIIVSMPGYAEQAAAGLIAWLPELGQISDKEAAALIGAAPYDDDSGEHKGKRTIKGGRRKLRNLLYMPTVGAATQHNPVLKAYYRRLLARGKPPKVAVVACMRKMIVILNTMLARNETWNPPAARCPS

SEQ ID NO: 317660 - protein, 404 aa, unidentified
MEIYSAPPPPLRGRIIGLDCHPDTYTAAVFQGTTPHNARKVCARENLSLQRLLDWAAREFTREDLFLMEAGGNSFEIHRRLLALGLRGVVLESCHVGKHAKTYADNDRMAAARIALVYLAGNAPCVWVPDALSCERRQLLHAHQSAVVDHTAATNALKGYLNQFAIRPGSRSLKLERTRAWLLKERDWSPLQQQLLAEYFAQLDSHAQRRQRLTRLIAQEVCAQPLMLRCMKLLGIGMINAFALLAVIGDVRRFDRPEKLVAYIGLNPGQRQSGRGKDLKLGLGKRGRGDIRHLLIQGAQAVLRMGRGTPLGQWGWKLFARKGERNIAVIAVARKLLVQVWHLLIGNAPTALEADKSFSIKMQKLTVTLGRQLRTQLGLPPNLRECVRELQRRMLHPPPCDEPV

SEQ ID NO: 317661 - protein, 325 aa, unidentified
MSTKASTPTEWVGIDVCKAKLDVYILSDHRYRVFENTEDGIAELIVWLQSYSAVGVVCEATGGYEADMARRLYACGMHVSVVNPRPVRDLARALSKLAKTDPIDAYVIAKYGEVTEPAPTVFASEVADELKQWVTRRQQLVEILSAEKNRRTLLPKGVARDEVNDHIEWLDEKIKKLDKKIDTLSESTAEWRATKKILRSPKGIGPVISASFLVLLPELGQLNRGQIAALAGLAPFNRDSGNFRGQRKIWGGRGSVRALLYMATLSALRSNPPIRLFYQHLLKKGKVKKVAIIACMRKLLICLNAMVKNNEEWDDHKVTALLQKS

SEQ ID NO: 317662 - protein, 375 aa, unidentified
MGDYSEAFVGLDTSKLTNAVAIADAGRGGEVRFFGEIENTPSATAKLVRKLSTKYKRLTFCYEAGPTGYGLHRQIKDLGFECVVVAPSLIPKRPGDKVKTNRRDALSLAKLLRADELTAVWVPDGRHEAMRDLTRARETAMLDLRTKRQHVSAFLLRLGRPYPESRKTWTKAHMSWIASQTLEHPQQRLVLEEMMLAIRQAQERLQRLEQAVAAAVGEWSLAPVVTALMAMRGMDLISAATLLAEIGDLSRFQTPHELMAYLGLVPSEQSTGEDVRRGPITKAGNRRARRMLVECSWSYQHPPRVGRAKQPKVDAAPPAVREIAWKAQCRLYRRYRALIRNGKLKTVAIVAIARELAGFIWAVARAVTPARAAVA

SEQ ID NO: 317663 - protein, 394 aa, unidentified
MKLVGIDVGKNNHHFCVMDKETGEFNVTPSSFSNNKEGFDFLINSLKPYSKKSILLGMEDTGHYHVALLKFLLSNGYTVALINPKTTDLTRKMEGGITKNDKLDTITICDVLDTPERKKQYRITKVDRFDLYEQRQLTRHHHNLKEELNIYCNRLQKSIDLVFPEFNTLFSSKYGIVYMNLLKTFGSAEAIASTDIRTIRKCFEIKGRGGRISLTAEKLKECAKNSIGISSEVETIQIKHLVSQIMLIKEQIAEIDKKIEEFSIKNNSPILSIPGISHFSGTSILAELGDIGNYSKPSRIIKFAGVAPYHYESSQYNAQHTAITKKGSKYLRKTLYQVILPVINNNPVFKKYYRLKISQGKGHRCAQGHCIRKLLRVIYHLLETGQSFDPALLR

SEQ ID NO: 317664 - protein, 406 aa, unidentified
MLNAVGIDVSKGKSTVAILRPAGEVVRKPFSVSHSVKELSDLVSYVGSLDGETKVVMEATGHYHEPILKAFLDAGIFVSAVNPSLIKRHDSDENPLRKVKSDPADARKIGKYALDKWEHLRQHSAMDTTRAQLKTLNTQFHFLMQQKVALKNNLISLLDLTYPGVNDLFSSPARSDGSEKWIDYVHSFWHVDCVRKIGLKAFTERYRNFCRHHGYIFQPDKPEELFNAAKELVAVVPKDAIYKQLILGDIEQLNTVSKQIEAFRHTMNELAATLPEYDTVMSMHGVGTTFGPQLMAEIGDISRFDHRSAITAFAGVDPGVNQSGTMNQQSNRASKHGDPRLRKTLFQIMSTLLQLAPPDDPVYLFMMKKKSEGKPYQVYMTAGANKFLRIYYGKVKDCIAVQTAAE

SEQ ID NO: 317665 - protein, 370 aa, unidentified
MKPNFEPGKWFMQCVGIDIAKGTFTACLCMYEFDQGCSTAPVVFNNDKTGFNQFVKWSRKEALKGYPLRYVMEPTGVYYEQLAFHLNKLSLNVCVVLPNKAREFAKYEGILTKTDDMDAYTLGMLGCLDKRLKPWTPPSPIYRELRQMTRFVADINKVKTELRNHLEALAHSETAEKSIVKHYNKLIDEIDKQLVSNQKAIREKIKQEPGLSERIDRITTINGVGFMTVATVVAETNGFALITNRKQLTRYAGLDVPAHQSGPVDPKRHISKQGNVHIRTALYFPAIVSTQCNPQMKDFYGRLCARNTQSKMIGVTATMRKLLLLIYSLWKSGEKYDPTRDKPACNRQKKEAETTEGQPHGIDVGTLAEE

SEQ ID NO: 317666 - protein, 434 aa, unidentified
METDFAAYVAIDWADQRHAWMLQAPASATREAGNTDHTPEAVDVWAAELRLRFGGQPIAVALEQSRGPLVFMLAKYEHLVIFPVHPTTLANYRKSFRPSGAKDDPSDAGLLLDVLMLHRDKLRRLDPDTPETRTLQFLVEERRKLVHEKTRYSNRLTSHLKMYFPQVLDWFDEIGSNIVAEFLERWPDLDKLQRARPATIERFFIDHNSRNAESIAKRLDQIRKAVPATTDVAVLASCSAAVVAWAGLLKQLLVAIVVYDQNIDDLARQHPDYALMKSFPGAGPALAPRLIAALGSRRDRYRSAHEIQCYSGIAPVVASSGKQRWVHWRWSCPKFLRQTFHEWALHSIGYSQWAREYYDQQRAKGKRRNTAIRSLAFKWIRILFRCWKDGTPYDEIAYQQARARRRPNLPTEEAAVQLQWKTVAGFSKIVASGT

SEQ ID NO: 317667 - protein, 392 aa, unidentified
MNAQALGWDNHRKFSKVSVMEKMPDGDIRAVERARLEHCDKQAMRAWLSHLDPEMPVALEATFGWPWVADLLEELGHPVHLAHPPVIRALAKHEAKTDRCDSDRLGKFQLRGILPESYLAPPEVRQRRERTRYRMALSALRTAVKNRAQAVLHRHGILHDFSDLFGKAGRRFLEDLVLPDGSRQALKGCLKLLDNLTLLIDEVEQWMVENLEEDELVRLLMTIPGIGLILAHVIRAEIGEIQRFPTFRHLASYTGLAPISDDTAGREGPRHCSSACNHVLRWAFIEAVHGVQRTKGQHGFRLRQLYARLCGSGRPKGRKSSAKVAVAHELSKVVHVVWTKRVPYTDTPPPRPGSRPGRPEPKESPTAKTTLRSNQPRHPMVRRRVTVGQTRM

SEQ ID NO: 317668 - protein, 407 aa, unidentified
MPEQAVTTHVVGIDIGMESCTMSCLTKDKRQVIKSTPFANTLQGFDWLFERLEGLEVAPKQVLVGLEATSRYGENLLQALLKRGYQVCLLHPAQMHAFAQQRGLRAKTDRLDAVTIARALLSGEARFGYVPSEQVATYRELMRLQKQLSDDVVRYKNEIHALLVVLFPEFTQVFVDPTRPTALAVLKRYPSAQAIAQTGVETLGKFLHELAPRHYGRPTAQELVGLAKSSGSPGVAVAARSSSLRILCDQLDHTQKNLEQLQREIDQLLNQDPKATGMLGVPEFGPTTVAVLRAALGDLTRFTRIDQVVAYVGLDLQVKQSGKWKGQTKLSKHGSGRVRRILYLAALRSIHLEASPFGAYYQRLVARGMKKGMAVVAVMRKMLIVAVHLIQTEERYDPGKVARQAGS

SEQ ID NO: 317669 - protein, 315 aa, unidentified
MSSQVFVGIDVAKAQLDIALRPTGERWAVTNDDPGIAALVAQLQAVQPTLMVLEATGGYQRAVVAALAAAGLPVVVVNPRQARDFAKATGQLAKTDVLEARALAHVADAVRPAPRPRPDAQTEELRALLARRRPLIARRTAEQNRLSGASQRLRVDIQAHMTWLDTRLAALDDDLDTTLRASPVWREHEALLRSVPGIGPVCTRTLLLDLPELGTLSRQRIAALVGVAPLNRDSGTLRGTRTVWGGRAHVRATLYMSTLVAVRYNPVLKGFYERLRAAGKAAKVALTACMRKLLTMLNAMVKHQTPWQPHEGPSA

SEQ ID NO: 317670 - protein, 455 aa, unidentified
MSKGKGKARAAQLDEGLMQIRANAAGMDIGATEIWVDVGSKDAEPVRRFETFTADLNEMAEWLKRCGIASVAMESTGVYWIPAFQILDSHGIEVVLVNARHAKNVSGRKTDMLDCQWLRLLHSYGLLASSFRPAAEIAVLRSYLRHRHMLIQYGAGHIQHMQKALTQMNLQLHHVISDITGSTGMRIIRAIVEGERDRNRLAAMRDVRTKATKETIAKALEGDYRAEHVFALKQNLELFDSYQKQVQACDNQIADHLRRLESKANPAEAPAVRREKKKRRNQLPLNVREEAFRISGVDLTQIDGINESAALALIAEIGVDMSPWKTEKHFASWLALCPNNKISGGKILQRSTRKTANRARDILRLCGQSLMSSRSALGAFCRRMCGRLGKPKGIVATAHKLALLIYRMIKFGRAYVDIGQDRYEEQYKERTLKHLARKAKQFGMQLVPSPESQVP

SEQ ID NO: 317671 - protein, 353 aa, unidentified
MRRPKDKLIAGIDLHSNNVMIGVTNQDGKRVTHRKLDCDLEKIVQFLKPFKPQLQSMAVESTFNWYWLVDGLRAQGYSIDLANPAKIEQYSGLKHADDKDDAFHLADLQRLNILPQAHVYDPELRPVRDLLRRRTNLVHQRTALLLSFKSLYARTTGQTLALSEAKKLEPKEASQFYEHPANQLIAQVQTEHIRALDKSISRIEKAVLGCAREIPMYAKLLTIPGIGRILAMTITMEVGDIKRFKSDGDFASYCRMVDARHLSNGKCKAENNPKCGNKYLAWTFVEAANFSRRYDEQCRRWYDRKAAKTSKVIATKALGCKLAKAAWHIMAGACDYDAKRMFPELATQQMKTS

SEQ ID NO: 317672 - protein, 341 aa, unidentified
MDKELYFGVDVSKKTLDLAYYDGETIDWKNAHIKVSNDAAGFKKIGSWVAKVGKDFDTFLFCMEYTGLYNQNFRLWLESKEYIYGMVEPRKMHRFEPDLDDDQRSLDRIKTDELDAFRIAIYCEQNHKKILRNPSKLPSPVYFKLKRLLAERKQNTKQSTLYKQQLHDICAYDTDLSVERKKLLLKNMQENQKAIDKEIDSYMNEDASISKNYDLLISIPGIGRIIALETIVLTENFTAISNPRKYACYIGIAPFKKESGTSVRKKTGVSKKGFSEAKADLSIAVLSAIKNNPSIRDYWIHKRKDKCGGIVLNAIKFKLVLRMFAVIKRGTPYVETDAYKN

SEQ ID NO: 317673 - protein, 379 aa, unidentified
MDLSTVALPPVSEKPATLFVALELSKATWLVALHSPAADKVSLHSLAGGDTQELLTLIARKRDQAQAALARPVHVMSCYEAGYDGFWLHRLLCASGIDNRVLDAASILVDRRSRRAKTDRLDAAALLRTLMALDRGEPRVCRVVRVPSPEHEDERRRSRERARLVNERGQHASRIKGLLMTQGIRDFAPTRRNWRERLAELRTADGRALAACLTAEIERECRRLWQVIGMIAEVEAEQVHAAEKAATGAVQLSRLRGIGLTSASILADEVFFRSFQNRREIAGYLGLASSPWNSGAVSRDQGLQRSGNPRARRTAIELAWLWLRHQPESDLARWFQERVGAGKGRIRRTMIVALARKLMVALWRYVTQGLVPEGAVIKG

SEQ ID NO: 317674 - protein, 356 aa, unidentified
MLKVSTVNFCGQRIFCGIDVHKKSWRVNIRSEEFELEAYSQDPDEEQLLLHLRDRYPGGSYEVAYEAGFSGFSLQRRLKQRGVNCMVINPGDVPTSDKDKQRKSDRVDARKISRELSKGSLSGIYVPDEQMEYARSLVRQRRRLVEDQTRCKSRIWHLLMFSGLQLQQDMEHRHWSGRFVQGLQDMDCGNRHLRRTLDLMVEEYLQVRNLLLQATRQVRELSRELPYATRIELLQSIPGIGLVSAMVLLTELQDMRRFSTLDKLCGYAGIVPDLSGSGEQEVVKGITHRSNNYLRTTIVESSWVIIRKDPAMLMAYKKYCKRMHTNKAIIKIARHLLSRIRYVWLQNKPYETGITG

SEQ ID NO: 317675 - protein, 364 aa, unidentified
MNKCHLNTELSSHEGTRCQFNGGTGAIKLGIDVHRDFYVVVVQEGGSNPKPPQRFRKEAFLHWATKLKSRATEVHAVYEACGFGFSLQRQLNALSIHCYVVCPQKLDEHNKRVKTDGLDAKALVLKLDRFVQGNRAALAMVRVPSKEEEQKRAIHRQREQLVKTRMQLEAQGRTLMVNHGIEPVKNWWKGRTFAALQLPAWMKELLGNSQPILLALQKKISALTLQLQVAAASKQARGLGAMTSVIIDREIGDWNRFSNRRQIASYTGLCPGEYSSGNSRLQSCVTKHGNPRLRAALVELAWRLVRFQPSYKPILKWRRLLAKGALATGAARKKAVVAVARQLAVDLWRVRTGRCKPEALGLVI

SEQ ID NO: 317676 - protein, 346 aa, unidentified
MDISRVGVDLAKSVFQLHGVNKAGKRVWKRQLPRNKWLSVISETIEPGTEIGMEACAGSHHWSRELIARGYKVKMIPPQFVTPFVKGNKNDANDAEAITEAMARPNMHPVKVKSVEQQDMQAVHRIREEIKNHRVAKGNQIRGLVAEYGIVAPVQLTSLRQAIPVWLEDTSNGLTSLFKQLLQGLWVDLTTLDKRMKILDKQIMVIATQNPTAKRLQQLRGIGPLIATAMVATLGDGKQYRKGRDMAAALGLTPKQHSSGGKDKLLGISKRGDSYLRCLMIHGARSAVQTAKNKDDRLSRWIVSLQIRRHNNVVVVAMANKMARMAWVMMTKDVDYDPNFCSASVN

SEQ ID NO: 317677 - protein, 334 aa, unidentified
MEQITTVGIDLAKNVFSLHGVDAAGKTVLRRTVRRDRLVETVASLSPCLIGMEACSGAHEWGRRFQAHGHTVKLMAPKFVAPYRKSDKNDGNDAEAVCEAVGRPSMRFVPVKSIEQQALLTMHRVRQGFVVERTALINRLRGLLSEFGVVLALRSVTVRRQAADAAEVLPELVRRAIADLLEQLHLLDGRIGAYDKEIEAQARLSEPARRLMKIRGIGPTTALAIVATVGNAREFKNGRQFAAWIGLVPGQYSTGGKARLGHISKRGDAYLRNLLVQGARSVLQTAPAHQDHLSRWALELQERRGYYRTLVAIANKNARIAWALLAKNEPLHKN

SEQ ID NO: 317678 - protein, 374 aa, unidentified
MTMMQHRQIRYIGLDVHKVSITVAIAEQAGAPTSYGSIPNDPSAIRKLMTRLGGPEVELRVAYEAGPTGYALHRQLAKMAIDCIVVAPSLIPKQPGNKVKTDRRDALKLARLLRSGDLTPVWVPDEAHEALRSLVRARADAKADQLRAKHRLSKLLLRQGCRPPSGVRTWSQRHVQWLRQLEFEHLPDRIVFADYLAEVTAAGERIKRLEAALHQCAQSSSQVAVIRALEAFRGIGFLSAVTLVAEAGDLRRFRTAPQFMAYAGLVPSESSSGGKQQRGSITKTGNSLLRHVLGETAHHARHAPRVSSKLKQRQADLPREIVELAWRAQLRLHARYRHLSSRIGSLKALTAIARELAGFIWAAGQVLQEVPTAA

SEQ ID NO: 317679 - protein, 340 aa, unidentified
MFKNFIGIDVSKAKFDMALIKDCDKEHVIQAVFENTQKGIKAMTKFLEKECQVQLSDTIFCMEFTGIYCRPLTTFLTEKECNVWLEMPVNIIRSLGLQRGKNDRVDARRIALYAYKNKEDIKLWKPQRDIILKLRDLLSLRERLISSRKSLMAPIDELIAMGDKQGAARVRRGCKLTLSSIEKEIDQIDKDLDDTIKDDPQLKELYNLATSVPGVGKYTALFMICYTNEFSIYNNPKQLACYCGVAPFEHSSGSSVRGKTRVSHMANKVLKRMLHMGALSAISRDPELSEYYQRKVALGKNKMLVINAVRNKIIQRLCAVIKRGYEYQPENLFKEHLVLS

SEQ ID NO: 317680 - protein, 379 aa, unidentified
MESITQNEKVLYIGIDVHKDTYALCCFDFQRNELSDEMIVKATTKAVIKYLEALKKKHKEEILFVCGYEAGPTGYGLCRGLQKADFACVVMAPTTMANPEGKRRVKTDRIDARAIARILAYKSYSQVHLPSEEMEALKEYTRARDAKKRMLKKAKQELLSFLLRNGKTYPESGNYWTAKFFTWIKTVQFSEKWMQEAFNEYLAEVYSLKAKIEIMDAKICEIAELEIIKDKVDKLVCFAGIDVTTAVETVVEIEDFTRFATAAQFVSYLGLCPGEDSSGKTKIMLPLTKAGNRRVRALFCESAKAIKRTNPYGEKSKRMKVRQKNASAQIVAYADKATKRIRTKMKQLEGRGKNYNVASAAGARELACFVWGMMNDKIA

SEQ ID NO: 317681 - protein, 319 aa, unidentified
MSDPPEIFAGIDVAKSHLDLALCNSQRSWRFSNDPEGIRAITNLLLQHQPALIVLEATGGYEQAAFRTLSAGRLSVAIVNPRRVRAFARANGRLAKTDRIDAHNLAHFAQVVRPHAHPASTEAHQRLVGLIARRRQLHRMITAEKNRLRNAHPAVRLQLQHHIDWLRQALKELDSDVEELLQSDLELKAKADLLCSAPSVGVVTAASLLADCPELGTLDRKKIAALVGVAPMNSDSGRKSGKRRIMGGRAPLRATLYMAALSASRYNPAIKPFYARLVGNGKEKKVALTACMRKLLTMLNAMMRDNKRWSPCPSSHTLA

SEQ ID NO: 317682 - protein, 382 aa, unidentified
MEPNLTTGTLPKPIEPVLYLAFELSEKNWKLGFTVGFAQSARLRDIPVRDIKNLQKEIQLAKKRFHLPETTMVISCYEAGRDGFWLHRCLISQGIMNLVVDSSSIEVNRRSRRNKTDKLDARKLLNMLIRYHHGENKVWSVVKVPSVAVEDYRQLHRELSSLKKERTQHINRIKGLLASQGKTLSVTSSFEDHLVTLRLWDGRPLSPYMRARLDREYQRIQLIEKQVKQIDDLRYTLLRTSQDPAIEQVRHLMKLKGIGINSAWLFVMEFFAWRAFRNRREVGALAGLAPTHNQSGESSHDQGISKAGNRFVRGIVIEIAWGWLYHQPDAQNSQWYQERFAGKSKRIRRIGIVALARRLLIDLWRYLETGVIPDGAVLLNPS

SEQ ID NO: 317683 - protein, 399 aa, unidentified
MTLGIDIGKHRHNVTLLDPSGHKVFHNVYISNDCDGIAKLLQLLADAKLSPQGILVGMEATGHYWMNFYAHLIEQNFAGVEVLNPIVIHARKNDHVRGAKTDRVDALQIARYLREADHSKSALAEGVARQLRGLARLRFDLSNAATREKGRLLSLLDLVFPEYTDQFNNVFGHASLNVLAEYPSAEAVARVDVRRLSGLLKRASRGRWGRDKAEQLKAAARHSFSLLGDGLGLTLEVKFTVERLNQLINQIGELQRQIETLMEPQQEIMMSIPGIGAVWAPLILGEILPFFHPDEKDGANTLVACAGLDAVASMTGKEYDKPGKKTRMSKRGSKYLRTALMQAAHYAATGAKDPMFAQIYERQRAKGKHHLVAVSHVARKMIHVIFALLRNQREYQPVL

SEQ ID NO: 317684 - protein, 409 aa, unidentified
MDVLYRRCCGLDVHKKTVVACLLLLNDRGELSKEVRTFGTTTRELLALSDWLATAGCTHVAMESTGVYWKPVYNLLEDHFELLLVNAQHIKTVPGRKTDVLDSEWIAELLQHGLLKGSFVPESSQRELRDLTRLRSSLVAEHSRAVNRLQKVLEDANIKLASVATDVMGVSARAMLEAMVQGTTDPVLLADMAKRRLRDKIPQLEEALRGRVKSHHRFMIHELLTHIDDLDASVERLNQELEERFRPFERQLGLLDTIPGVNLRTAQELIAEIGTDMGRFPTPGNLASWAGICPGNNESAGKRKSGKTRKGSKWLRHTLVGAAHGAAHTKTTYLSAQFHRLAARRGKKKALVAAGHTILVIAHCILKKLEPYKDLGVNYFDERDREEVQRRLVRRLQRLGYNVTVTKAA

SEQ ID NO: 317685 - protein, 414 aa, unidentified
MAEAETIWWFAGVDWGSEKHQVCLLDAQGATAGEREFPHSGEGLAELGDWLLSIAGAASVVAVAIEVPHGPVVDALIDRGFVVYAINPKQLDRLRDRFSVAGAKDDRRDAYVQADGLRTDRRLFRRLQVVDPRLIELRAWSRLAEELREERVRLSNRVHHQLWRYYPQMQKLTNDLAAPWFLELWAIAPTPAKAGRLRESTVERLLKQYRIRRMDAQTVLRILREPAIKVAEGVAEAASIHMRSLVARLRIVNRELREAERKLDELCTAVSEIEQPSGESLQRRDVAILRSMPGIGRINLGTLLSEASGPISRRDYQGLRTLSGAAPVTKRSGKSLIVVRRYAAHVRLRNTVYHWARVATQRDPKCRARYTALRKRGHSHGRALRGVADRLLALACVLLQRQTLFDPYFGRPTT

SEQ ID NO: 317686 - protein, 414 aa, unidentified
MDVLVERCAGLDVHRDSVVATVRVPGKGKSRRRREQQTRTFGTTIARLEQLADWLASFEVTLVGMESTGVYWRPVFHVLERRFECWLINAQHLHNVPGRKSDVLDSVWCCELLEHGLVRPSFVPPPEIRRLRDLTRLRSTQTEERSRAIQRLEKVLQDAGIKLSSVASKTYSVSARAMLEALLAGVSDPRQLAELAKARLRTKIPELQEALQNRFELAHHGVLVAGLLAHIDALDHGIATLDASIELALAPHAELIDLLCTIPGVGRYTAEVLIAECGLDMSVFPTAGHFVSWAAICPGTNQSGRRRRSGKTRRGDSWLRSALTEAARGAARSKNTYLASHYWQIRGRRGDAKAIGATRHDILIAYYHIVRDRVPYRELGPDWLARRYSPEHRTRRLVKQLEALGHKVTLEAAA

SEQ ID NO: 317687 - protein, 326 aa, unidentified
MTLSHITDNIFVGIDVGGAGLDVAWHRGDSAHYANRPDAIATLVQRLRTGPEVTRIVLEPTGGYEKPLVKALRQAQLPVEVIHTTRFNAYRALVGVKAKSDTSDAKLLASYAAAPDEVRGRKAGYVELPEDAIREALSELASRRDQLKHMIHAETCRLGTVRMVELRQAITAHLEVLRAEDKQVHRMMLELVRQRIDLRRDQRLLKTIKGIGVKSALSLLASVPELGRIDNKAAAALVGVAPFVRRSGTMNAPARIHGGRAAVRSILYMAAVTASRHNPVLRPFYERLIAKGKPPKVALIAVLRRLVVFANAVLRSGQPWRGAVTP

SEQ ID NO: 317688 - protein, 438 aa, unidentified
MTVMHERVAGIGVHKKMIKVAIRSPGDKPWTRKAQVLTFRTFYGVLREMARELRRRGVTHVAMEASGIYTDPVYYALLEEDFTEVLVVSPAHAKALKGHKTDAKDCARLAELLGCGLLQGSYIPAPELKEVRDLTRYRIKKVQARTSEIQRLDKTLESAGIKLGSVASGITGKGPVAMIEALIDGERRGKVMADLARGRARAAGKLADLSMALEGRFTGHHALVCRLILDQIQGLDAAAGDLDQRIAGLAAAWQREIDLLKTIPGFGDVVAWTWIAEIGPAPHQWSGSQEKPASWVSLAPGNYISAGKRKHSRTGDAGTYIKPVLVQAAWAAIRARGRLQARCNRLVRRFGGPKNPAAKKKAIVAIAHTLLKIAYKVLKSGTPYQDLGEDFYTRRETPAQRQAWLERQIQKLHPGCTVTITIGPPPGHAPEAALTAGA

SEQ ID NO: 317689 - protein, 422 aa, unidentified
MLNVNKLFVGLDLSLKDYKVSIIDQNGVEVVKPFSVTNDQVGADILIDTILRCCKALAVDTLFIGLESTSVYGWHIQHLLADSPQLKPYHPHIICFNPKLIENFKKSLGNLPKNDWVDANTIAERLRFGRLPKSCPVDFRYLALQRLTRYRYHLVENLAREKSYYLSNLFLKFSAICQDKVFSNNFGASATELFHEFLTVEDIATRSLDELIDFIIEHGKKHFECPQATAKALKEAAAKSYRLNASVDNSLSFVLKSCLENIKALEKQIKAVDKAIEKELPLFKNEFLCLTSVKGIGPVLAAGLISEIGGISRFENDNALAKFAGLYWSEYQSGDFTADDTFIRKTGNHYLRYYFIQAAEQLRKYLPEFADYYSRKYNESKTHHHKRALVLTARKAVRLVFALLRDEKLYNPSARKGDVSLS

SEQ ID NO: 317690 - protein, 346 aa, unidentified
MPHVGIDLHKAQSQICVLLEDGQVLERRVLTRADRLRKVLQEHRGSPVLIEASTESHWVARCLEDDGHTVIVADPNFAPMYGMRQRRSKTDLRDAQALAEACRTGTYRRCHQASDESRAIRVELRVRAMLVRQRAAQISLVRALARGDGGRIPNATSRSFVSQVRRSGLSERLMVQLDPLLAMITALCDQIAELDVRLADRARDHATARLLCTAPAVGVITALAFVSALDDAGRFTDSEEVASFLGLVPREWSSAERHRFGHIHKAGPAQLRWLLVEAAWRILLLKDPASEPLRRWAQRIAVRRGRWIAIVALARRLGCVLYTMWRSGQPYSAARRTSRLAVGKVA

SEQ ID NO: 317691 - protein, 500 aa, unidentified
MKTKRNKGKIRADRKSISVPCSEPAQELRILRPDAAGIDCGAQEHYVAVPPDRVSAGQPTVRRFSAFTEGLDAVVDWLKDCRVTTVAMESTGVYWIPLHQKLETAGIEIYLVNARHVRHVPGRKTDVQDSQWLRQLHRFGLLNASFRPEDIICRLRSLHRHRDNLVSSSASEIQHMQKALQQMNLHLHHVVSDITGLTGLRIIDAILAGQRDPEQLVRLRDRRVYKSTPQEMQAALVGDYRGEHLFVLSQSLQAYRFYQARIEECDRETEPLLEKLAQQIEAASANLKLDALEQSGSKGESNRPEQLPEPKPTSGPKSKRKRKPRANEPKIQLAGLLERICGIDLTQVVGLNVLNVLLIVSEIGVDMSKWRSAKAFCSWLGLCPGNKISGGKLLDSRTRQVVNRVADALRLAAQSAGRTQTCLGIFYRRKQAHLGAPKATTATARKLACLIYHLLKNKQPYQEPDSATYQLRLQKSALSKLQRQAIALGYTLLPTAPVPA

SEQ ID NO: 317692 - protein, 359 aa, unidentified
MANNLETSRMNFNGKMVSIGIDMHKHSWRITALVDGDIVRAVTLGKPSYESFKKILAQFKGNYVRIVYEAGPGGFHLYDRLTADGIECIVTPPSLIPTQSGSRVKTDKKDSYKLAKLLESNMLKQVWVLSAEQRAQRQLVRTRRQIVNHCSDVMRQIKSFLLFHSIDIPFSSKQHWSRRFIKWLNELDLGDVYLQKSLEALLRLFDYLSAERKRLTHEVVELSRDNNYFERVKLLRTIPGIGCLSAMEILVELQDITRFNTADELAAYLGLTPSQYSSGEHIRMGHITHAGNDRVRTTLVESSWILIGKDPHMRWKYENIKQRRGGKRAIVAVARILSARIRRILLDQVPYEVGLPKAA

SEQ ID NO: 317693 - protein, 473 aa, unidentified
MAATGTSELTRKQRKELARRLQSSDPGLEVMHPNAAGIDVGNSAHYVAVRPDRDPHPVRRFECFTADLQQLADWLLQCGVTTVAMQSTGVYWIPVYEILEARGLEVYLVNARHTRNLPGRKSDVQESQWLLKLHTYGLLRNSFHPTADVRVVRTYWRQRGDHVRAISTCIQRMQKALTQMNIQLANVISDLSGWTGLRIVRAILAGERDPRALAALSHPGIHASRDTIAKSLEGTWQADLLFVLQQEVAMYDAYHQRIAECDQALARQLKGFADKITEATPLGDAPPPPTRTPRRAGPKRRRKAGSHAPQFDLAGELHRISGVDLTRIDGIDVGVAQTVISEVGLDMARWKDEHHFASWLGLCPDNRITGGKVIRRGTRRVINRAATALRLAATTLLRSQTYLGAQYRRFRSKLGAPKAITAMAHKLAVLVSRMLRWGQEYVDKGMQYYEDRHREQQIHLLKKRAAKLGLIVV

SEQ ID NO: 317694 - protein, 340 aa, unidentified
MQLYAGIDLHASNNYLAVVDENGKRIFKQKLPNESEVILLKLGRFQEEVAGVVVESTFNWYWIVDLLHEAGYRVHLANPAAIQKYSGLKHSDDSHDAFWLAEMLRLGILPEGYIYPKEERPIRDLLRKRGHLVRLRTSLILSLQNIIVRNLSVRLNANDIKNFRTTTFSSILEPNEDLATACIVSKESIDFLTQKIRAVEAIVEQRVKLKDQYRHLLTIPGIGKILALTIMLETGPVARFPRVGDYVSYCRKVNSKWTSNDKAKGKGNKKNGNKYLAWAFSEAAEMARRYNPQCRSWYNRKMQKTNFMVAHQALAHKLARAAYCIMKEGVTFMPEKLFAA

SEQ ID NO: 317695 - protein, 386 aa, unidentified
MKTVAGLDVHKDSVYLCILRENGEKIERVFGVLTPQLDSMRDFMAENEVSEVAMESTSVYWIPIWRVLVDSFELKLVNPYFIKQLPGRKSDVKDAQWIAECVMKELIRGSFIPPPLIQQLRLYDRRIFELNAELGRKYSKIDAILQRCNIRLSNYVSNTDCKSYKNVVKRISEGVTSPQELLMLVHKRIINKHGEDTILAALTGVVSEAETDMLAQYVAESALLEDNKNKCIEKMREICNREFEEQMKNLQTIPGVSKRSALTVLAEIGPDVNAFPSAKHLVSWCGFNPRNDESNKKIKSNKITHGNRFIRVASIQCAWAASRTKECYFSKFYAFHTQVRKKFKLKVVVAVARKVLVCIWHILKFNVSYKDFEPQKSVTKDCTQFA

SEQ ID NO: 317696 - protein, 348 aa, unidentified
MRFYNTTHQHYCGIDLHAKSMYVCIINHDGKTVLHCNMKTEPEHLATAIEPYRQDLVISVECLFTWYWLADWCAKENIPFVLGHALYMKAIHGGKAKNDRIDSEKIARLLKAGMVPQAYAYPAKMRATRDLLRRRIGFARQRADLIAHIQNTVSQYNLPPLGVRLGRKKDRLDIADHFPDPVVRQMVELDLNVIDHLDEQLRVLEQDLVLKAKAHDAGAYHLLRTVPGIGRILAMVILYEIEDIGRFPTLGQFVSYSRLVKCSRESAGKKSGYSGKKIGNAYLKWAFSEAAVLFLRGNPPAQNAIARLASKHGKGKALSILAHRLGRAVYVMLNKRQPFDEERFMKTL

SEQ ID NO: 317697 - protein, 329 aa, unidentified
MEQEYIGIDLHKAFFQVCVVNGRGERQWEHRWPTTDEGIAGLVARCGASSRVAVEASSPTWAFVDRIVDHVGAVHVVDSRKTRLKAGYAAKTDRLDAQRLADALRRDSVVGIYYPPPPIRDLRELCRYRCHLARTQASLKQRIHALLLRQGVREPRVSKLFGKRGTQWLDTLRVKGWAGASLTGLRQLLGDVRTQLVPVLATIGATAAADPIARAVDARPGFGPVFSVTLRAEVGIITRFPDGPHLASYAGLVPRVERSGGRQWSGRITKAGSPWLRWVLIEAAIHQLRRQDDFGRWARRLAVRKGILKARVAIARALCDELFDAWPRA

SEQ ID NO: 317698 - protein, 438 aa, unidentified
MQRVLISVQNFTLVSVPKDRASEYVRRFGCYTADLYALADWLAECKVETVAMESTGVYWIALFQILETRGFEVKLVNAHHVKTLPGRKTDILDCQWLQQLHSYGLLSGSFRPEDQICVLRSYIRHRDNLIKSACVHIQRMQKALTQMNVQLHKVVSDITGTTGMAIIRAIVAGERNPQALAAKRHHRTKRSEAEIAAALNGDYRSEHIFVLQQELQLYDVYQAQIAACDHQIQECLAKFSNKVNLDESPLPQPKHPRNKPQGNEPAFDLRTHLYRISGVDFTAIDGLGILTVQTIISEVGLDPTRFPTVKHFTSWLGLCPCNRITGGKVKSSQTRLVVNPAANAFRMAAQTAGKSHSALGAFYRRLRSRLGTPKAITATAHKLARIFYRLWTTGGNYQDIGMDYYEQRYQERVINNLQKKALALGFELIPQPEANTVS

SEQ ID NO: 317699 - protein, 400 aa, unidentified
MESLFGGIDIGSENHHVIILDGNGKVLYDQKVAHSFREFREVIGKFREIEEKEQGKITFAIEGKNGYGAPFDRLLLESGFKLYNVDNLKLRRFRDVFGAEWRNDRRDAKMLAKMLKLKDHIDVEEKAFLAVEKAPAVNEKLRILSRHQQSLIDEKTRMQNRLRKRLLEVCPDILEFGDTKSKKLLQLLKKYPDFRGYKKITLGALLKIDTIGKQTAVPLVEGLRNVQYVEELAGIYKPIIASCCRRILELLEEIEMLDKELEETGQKSVEVMKLRSIMGVGTKLSSRLMGELGDIKRFDRESQVAVYCGVACIDDDSGKSIKTKAVYKANRICKATMIDIAGCTIRYVQESKTYYEKKRAEGKDHNHALRCLARQLIKVIFRMLTEDREYIYKEELKKAA

SEQ ID NO: 317700 - protein, 347 aa, unidentified
MKVLIGVDPHKASVAVAAVDEATGELLGRASFQQDRAGLRALERWVRRFPERRWAMENARGLGRYLAGRLAASGESVVDVPPKLSARVRVLSSGNARKNDGLDALATALAASRNERLAPVNPEADSEVLRLLSERREDLVAERTRALNRLHGLLRDLVPGGVAGKLSADRAARILRGLRSRGGASAHLRRSLASEILRDVRTLDRKIADLNGRIEAEVEASGTTLTEIFGVGPILAATILGTVVDVARFPTKAHFASYAGTAPVEASSGKVVRHRLSLGGNRKLNYALHMVATSQARSDAPGGTYYRKKLAEGKSRKEALRCLKRRVSDAVYKSLVADLQTSSRSAA

SEQ ID NO: 317701 - protein, 414 aa, unidentified
MSNPLLVGVDVHRKTNAVCVMNGQGQELIPRFTMDNNRPGTEAFAQQMAQLMLDGDFDVLQVAAEATGWYWFHFFQTLSQDPFLNQWPLELYPLNPRLTANFKKTFVDLDHTDHIDSFVVGDRLRLGRDLPAPFHYEEIYLPLRFLTRYRYHVVHNLAREKAYCLAILYLKVSEYTHKDRKPFSNVFGAASRAVLQEFASIEEIAAIPFHELVEFIDLKGKRRFPNPAENARKLQQVARNSYTLPEALQHPINLVLDLSLKHITFLERQEKRLNTAIAEGMEPIPHTLDTIPGFGLVFSGGIISEIAGIERFDYNQAKVAKFAGLKWRKHQSADFEADETRLTRTGNRYLRYYFCEAAQSVRLRDTEYAAYYDRKYHEVRKHQHKRAIVLTARKLVRLVTRLLTTNQPYRPRRR

SEQ ID NO: 317702 - protein, 391 aa, unidentified
MILVGIDVSKDKHDCFISTSDGEVLFDVFTIANTMDGFSDLYEKISSVADDFSKVKVGLEATGHYSYNILGFVLNKGLTTYVINPLHTNLFRKGQSLRKTKTDRIDARSIALMLLTDSSIEPYSLTSYHNEELKSLTRYRFIKVQERAKYKTSVARLVNILFPELEDVVSSLHMKSVYTLLSEFPGASHIASAHLTHLTHLLYVESKGHYGRDKAIEIREAARSSIGSVMPAKSLELSHTINLINILSNEIDEIEAEIKCIMNEIDSPILSIPGISYRMGAMIIAEIGDFDRFSSPDQILAYAGMSPSTYQSGQLTSSHAHMEKRGSKYLRYALFNATIYVCNWDPTFSAYLAKKRAEGKHYYVAITHAAKKLVRLIYALESSGEQYRIAA

SEQ ID NO: 317703 - protein, 337 aa, unidentified
MLFCGIDLHSNNSFIVVSDDTDKVLYSRRLPNNLGEICTALSPYKAQLSGVVVESTYNWYWLVDGLMDAGYTMHLANTTAIKQYDGLKHRGDESDARHLAHILRLGLLPEGHIMPKAERAIRDLARKRMQLVQQRTTQIVSIETCMAQQTGARISGNSVKQLTETDIDAMPIGSVEALGMKANLAVMQALQIQIDCIEKTLAKHCRRQAGYRLLNSVSGIGPVLAAVILLETGNIERFDDVGNYASYCRCVGSVHLSNGKKKGEGNTKNGNRYLAWAYVEAANFAIRYSEEARRFYQRKKAKRNSIVAIKAVAHKLARACFHMLRTGEQFSVERCFT

SEQ ID NO: 317704 - protein, 358 aa, unidentified
MACGIDWAQDHHDVALVDADGRLVARRRPESVAGFAELTAMLADADDDPEDPIPVAIETPRGLLVAVLRASGRPIYPINPMSVARYRERTSMSGKKSDHGDAVTLANILRTDIDQHRRLPADTELAQSITVLARAHQDATWRRNRAGNELRSLLREYFPGFLHAFADRPGGITAPEARAVLAIAATPAKAARLSKPQITAALRRAGRQRGLTTLAATIHQQLRLPQLRHPAPVEDAFGIQAVALLATLDAECANVDRLGEATAATFAQHADHRIITSFVGVGDLTGARLLAEIGDDRTRFADARALKAFAGSAPVTKASGRSIRITHRHVKNNRLAAVGFVCRRSSRPAAKDPPALTT

SEQ ID NO: 317705 - protein, 388 aa, unidentified
MIYVGIDIAKLNHFASAISSDGEELIKPFKFTNDNDGFQLLISKLDPLDKDSLIIGLESTAHYGDNLVRYLVAKNYKVCVLNPIKTCQMRKNNVRKTKTDKVDTFVIAKTLMMQDDLRFITFFDLDMMDLKALGRFRQKTIKQRTRLKIQLTTYVDQVFPEIQYFFKSGLHQNAVYALLKEAPSPKEIASMHMTHLANLLKVNSHGHFTKEQAKELRILAQKSVGANDSAISIQITQTIQQIELLDSQLEKIEAEMTDIMKFNDSVIMTIPGIGYINGGMILGEIGDIHRFSNPNKLLAFAGLDPSVYQSGNFQAKTTRMSKRGSRVLRYALVNAAWNVVRNNATFKAYYDAKRAEGRSHYNALGHCAGKLVRVIWKMLTDEVEFNLE

SEQ ID NO: 317706 - protein, 413 aa, unidentified
MDAIVERCAGLDVHLDTVVACVLYGKLDIKPKKEVKTFSTTTKGLLELLDFINQKECTHVAMESTGIYWKPVWNILESGAFDLIVANAKKIKNVPGRKTDVKDAEWIASLLRCGLIEKSFVPPERIRDLRDLTRLRKELLGEVNRNKNRIHKVLQDANIKISSVLSDVFGETGKSILNQIIGNQCITEEFIYSLYEGRGKSKLKSTLMEMYEALNGKIRGHHVILLGMHNSNIVFLEKQINELEKEIDILLQKERDSLELLETIPGISKISASSIIAEIGTSMDVFKTEKHISSWAGLCPKNNESAGKKKRSGIKSGNNWLRSMLCECAWSATKKKDSRFKNKYWSMVPRMGRKKALIAIANMMLRLIYHLLKTKSTYKELEIQYFIDKDKRREDRIIKELKSKGYLVEKDSL

SEQ ID NO: 317707 - protein, 340 aa, unidentified
MNNGLKLLGIDIGKNSFHLIGHDAGGHQVLRKCFNRNRLLQFAAQIEPCTIAMESCGGSHWLARKLASLGHRVKLIAPQHVKPYVTGNKNDFIDAEAICEAASRPRTHYVAVKTAEQQVLSVQHRLRESLVCHRTEAINRVHGFLLEFGIALPATKAAIAKVPELIDNSRSDLPLQLKRIMEHLLEDIRRLDAEIKACDVQIKQQLAQDDAGTRLMTIPGIGPITASALVADLGDASNFKTSRDLSAFLGLVPRQFSTGGRPVLLGISKRGDRRMRTLLVQGSRALMIRIDRREDALGQRVRNLLARKHPNKVACALANKLARIVWAVLRRGGTYNASMI

SEQ ID NO: 317708 - protein, 335 aa, unidentified
MDLHKTQFTVCYLGKKGEHQLQVYKVTAKDVEAFKQTVSKSDEVAVESTGNTGYFVRQIQGSVKEVKIINPTQFKIISTSVKKTDDHDALVMAKYLSKGLIPEVRMRSKEELQIASLIGTRDKFVKLRSCLKNKIHNILNANGIVTKREVFGSDKGLERILSLDIEASYQFELKIIVEQIRSLNKSIDEIDEEITGRGKNLDGHKGLTSITGIGDISATILLNTIGNVTDFADDSKLAAYFGIVPRVAVSNETSQYGKITKMGNKIARTALVQSTLIAIRYNPYLRKFYLRLKAKKGTGKAIIATARKLLTIIYRTLKNNWVFEDFNQFKLAVSV

SEQ ID NO: 317709 - protein, 495 aa, unidentified
MNNCAAGETFAGGRPAPARSQSQSPNLRKVSGRLLAEPEALAPTSNRKTPPEGRYISKMDGRAKRRKNYKEQKQTMNDSQQWQQHRAFGALDWASEKHSVVLVNQTGKVIEDFEIEHSALGWKKFREKLQPYGSVPFAIETSQGVAVEQLLEAGMLVYPLNPKSAQAYRERKAPSGVKDDRLDAWSFADALRMDGQNWKALRPEEPLIKELRLLCRDEVTLIEQRTAFVNQLRHALAEYYPAALEAFEDWTSVSAWMFLQRFPTPEQLAQAGKRQWQKFLHSRRLWGSDQGPRRMEIFAHATEFTGTAPTVQAKSLLAQSLVQMLFAVEKQLAVYRQRIEELFARHPDHDLFGSLPGAGPKIAPRLLSEIGDDRERFGGDPQNLQCLAGSAPVTRRSGKQRKYWPVHQRWACDKHLRHAIHLFSEQSLSRCAWAEIYYQQHRQKNQSHANALRRLSHRWLKIIYKMWIDRTPYNAELHHRNQLQHGSWIFQLQQS

SEQ ID NO: 317710 - protein, 345 aa, unidentified
MSIVENTRLVTGGVDTHLDEHVAAALDASGGLLGVETFPATTVGYRQLHAWLAEFGEIGAVGVEGTGAYGVGLARFLHQVSVRVIEVDRPNRQVRRRQGKSDPLDAVEAARAALSGRATGLAKTADGPMEAIRVLLVAKRSARAARTKALTQIRHLGFCAPDALRDQLRDVPVAALGGRVATLRPRPDGDVVMHSTKVALQILGRRVLALDEELDRLDILLEGLVVKAAPQLLALHGVGPDTAAILLVAAGDNAARIRTEAAWASLCGVAPLQASSGRVTRHRLNRGGNRQANHALWRIVITRMSSDPRTRDYVARRLEEGLSKPEIIRVLKRYVARETWRHLPR

SEQ ID NO: 317711 - protein, 304 aa, unidentified
MNGIGIDVSKRRLDVGTTDGKTLQVSNSRSGFAELDLWLQGHPAVQIVLEATGGYEQPVLDFLHNAGHPVVRANALRARKLAQGLGHMAKTDRLDAYALAKMAALVKLRSYQPLEPWQREMRDFVRARRQAMHALTVARQQQEMVGNRELRRLLQANITCLQRTVERLGKRISEQVSKQPQLAVLKSMKGVGPGLQAVLASYLPELGKISGKAVASLVGVAPMSHDSGTMRGKRSIHGGRAEIRQVLYMASMSAMRHEPRLRDFYQSLRARGKEGKVAIVAVMRKMLVILNARMRDAQGGSIPA

SEQ ID NO: 317712 - protein, 416 aa, unidentified
MNKGQNTRGYQRYMALDIHREYILVGAQNEERDWVLTPRRVSTEKFPEWAKKNIRAGDIVVLETTTNVWTTYDIVAPLASRVLVANAAEVGEIANARVKTDKEDVKRLLKLLIGGIVPEVWVPPMPVRELRAFTSYRGRLVKTSTMIRNRLQSLLHKHNLNLSEAGLLDQAWWEAQKNISTLEKMQIRQELALLQEVEKLKVAVDEELQRQSTSSTWGKPALQIMQLPGVGFIVAMTVLAAIGDISRFENAKQLVGYAGLGAGVHDSGKTHKEKKITKKGRRELRWAMVEAAWRAIRMSPFWKAEYEKHLDRMRKPNQAIVVIARKLLVAIWHVLSKEETDIHASEEELAYKMLLLSWSLSEDVRMGLTYKQFAKYALMKLGVETDITRFVRRNIPRRLAPRDEVLTRMTELGLSA

SEQ ID NO: 317713 - protein, 355 aa, unidentified
MEDYDGRQVVGMDLHRRRSVLVRMTEDGRRLGTAKITNSPAALRKEIARAGKHPKVVLEATYGWYWAADVLEAAGAEVHLAHPLGVKAFTYRRVKNDERDSADLADLLRMGRLPEAWIAPAEVRELRELTRYRQKLVHLRTSCKDQVHGVLAKLGVEVTCTDIFGKAGAAWLDGLPLPQPYAGKVTSLRHLAGELSAEIAMLSEVIASLLAGDRGYQVIQQLPGIGPVLAAVITAEIGDITRFRNAGQLCSWAGLTPRHRESDAKVARGHVTKQGSRLLRWALIEAIQRIPRDSVIGGAKDAIIARRGKEAKNIAKVAAARKLLTLVFYGMRDGQIRCLAKSPGDLPVTPAGRAA

SEQ ID NO: 317714 - protein, 347 aa, unidentified
MDEHDVYVGLDAHKKFCYATSMDKSGNIIDRNRFPTTNGCLDKFMETIGSGAKVVVEASTSGLRVYDYLDANDADIIMAHPLKVKAIASAKVKTDKIDSEVLANLLRTDFIPEAYVPPREIRDLRGLVRHRTAVVKIKTSVKNRVQSILTLEGVDHNFSDLFGKGGRRLLETVELRKYNRAAVNNYLNVLDALSLKIKEISGLIDEEVDNDENSDAKTLSAEIKGLGTYTALLCTTEIGDINRFPYYKKLSSYAGLIPSTSSSGGVIRHGKITKQGNKLLRWALVQAAWRVIRYDDNLRNYYARMKNKKGSSKAITATARKLLKKIYYKLKDIQNNNINHDYESQGS

SEQ ID NO: 317715 - protein, 402 aa, unidentified
MEIFCGIDWSESHHDVALVDQAGTVVARRRISDDLTGFTDLTALLAEHVGAEFVSVDVAIETDRGLLVAALKAAGHRVFAINPKAVDRYRDRHSVSGAKSDPGDALVLAHLLRTDRDQHRPLAADSVLGQAVSVLARTHQDLVWARQRDTNRLRSLLREYFPAALTAFPDLTTKTAVTVLAAAPTPAAAAKLTRANLIDLLHTAGRGTRPADAARLVEVFARPQLRQPAMVEDAMGEAARATIRTIAATNESIKELEKALSASFEKHPDAEILDSLPGLGLVLGARVLGEFGDDPNRFPHAASRRAYAGTAPITRASGRHRAVLARHIRNKRLADACYLWAFSALTKSRGARAFYDQRRHAGDRHNAALRRLGSKLIGQLHHCLDTRQPYNEHLAWNQAPTS

SEQ ID NO: 317716 - protein, 351 aa, unidentified
MIIIGVDYHPSDQYIAFVDTETGEYVERQLNHSEGEAEKFYRELAARGVSVRVGMEATGYSRWFERLLAELGIEVWIGDAAEIKTKRVRKQKTDREDARLLLRLLRENNFPRIWVPSPENRDLRQLLWHRHRMVQMRTRIMNQLQALAMNEGQRRKKKLWSEAGRAQLEKLPLAAWAARRRKDLLELLDRMNPTIEELTAAIEREARKWPEVLRLMTHPGVGPITALAFVLIIGTPERFKCGKQIGSYVGLIPCEDSSAGQQRLGHITKQGSSLLRFLLGEAAQAAARWDADWRRRYMHLALRRQRNIAKVAMARRLAVRMYWMWRNGWEYAEWVKFGSHAGQLGIRHGVN

SEQ ID NO: 317717 - protein, 342 aa, unidentified
MKEVSTIGLDLAKNVFQVHGVDRSGKAVIRRQLRRGQVLPFFKRLPPCLVGIEACATSHYWAREIAALGHEVRLMPPRYVKAYVKRNKNDAADAEAVCEAVTRPSMRFVAVKSTDQQSILMEHRTRELLVRQRTMLVNAIRAHMAEFGVVARAGLPQVKDLLAVIVDGTDDRIPALARTCLKGLVRQLLSLEREIVAAERRLQAWHRASEASRRLETTPGIGPITASALAASITDPSLFKSGRGMAAWIGLTPREGSTGGKQRLGQISKQGDPYLRWLLVAGAMTVIRHAKRRGTADPWLAGIIAHKPTKVAAVALANKNARIAWALLRHGGRYRRPETLAA

SEQ ID NO: 317718 - protein, 368 aa, unidentified
MGRKSSKLFVGMDVHKESIDIALAEEGGEVRHYGGIGGEQSALIRTVRKLESLGKSLVFVYEAGPCGFWIYRLLQERGHPCWVVAPSNTPRRVRDRIKTDRRDSLKLAGLARAGELTPIYVPDAADEAMRDLVRAREDAVATQRQARHRLAALLLRNDIRYGGKTAWTEAHRRWIARLHLPGAAQRIAFEEYVLTVDEATASVQRLTRSMEQELGHWRWQPVVHALQACRGIQLIHAVRIVAEVGDLSRFTHPRQLMAYLGLIPSEDSSGERRRQGPITKAGNRSARRALVEAAWAYRHHAAVSPLIVRRQTGLAKPVLDIAWKAQLRLCARFRRLSARGINRNKIVVAVARELAGFVWAISQRVKLN

SEQ ID NO: 317719 - protein, 416 aa, unidentified
MEHTTRFAALIGLDWSDRKHDVCSVETASGSRALSVVAHTPEALNEWARDLRARFHGAPVALCLEQSRGSLIYALMKYDFLVLYPVNPQTLSRFREAFTPSRAKNDPTDAEFLVELLVHHRERLKAWTPDDEKTRTLQLLVEHRRRLVGDQTRISNRLTALLKGYFPHVLQWFPDIRTKMVCDFLLRWPNLDTLTGVRRATLERFFREHNSQRQETIEKRLAAIKEAVPLTTDKAVINSSVMMVKALAAQMKTTLAAVKEFNQQIEELCQSHEDFELFASLPGAGKVYASRLLTAMGANRERWASADELLCFSGVAPVVERSGKSSWTRWRYFCPKFIRQAFVEYAGESIRHSEWAQAFYVSQKAKGKSHQAAVRALAYKWIRIIFRCWQTRTKYDEARYVEVLRKKGSTLVSATA

SEQ ID NO: 317720 - protein, 409 aa, unidentified
MRIIGMDIHRVFAEAVVLEDGEIKRLGRIGMTRDHLEDFARTLLPTDHVVVEATGNATAVTEILAPHVARVAVANPLQVHLIAKAKIKTDAIDARVLAQLYGAGFLPEVWIPDAATLARRRQVTRRRQLVRQRVRLKSIVQSVLHANLIPPCPFADLFGGKGRAWLRAQYLPDDEREAVERHVEEYDRLSEALKGVERDIARAALADPNVTRLMTIPGVDMVVAVGLMAAIGRIDRFDRPDKLVAYIGLNPSVHQSGIGPAHHGRITKRGRSDARHLLVEAAWQTVRGPGPLHAFYERVRAKRGNHIAAVAVARKLVVIIWHLLTKAEDYSWVRPSLHAKKIRDLELRAGYPPRRGQKGASYDYNIPQRRRDERNRAQQAEGAYRRMTTGWRRSGPRSEPTGATNEERQ

SEQ ID NO: 317721 - protein, 358 aa, unidentified
MMKSFNKSLNFFGQIFYIGIDVHERKWVITIRCNKMELKTFSMNPYPELLHQYMQKNYPGGVYVSAYEAGYFGFWIHRKLKKYGFDNIVINAADIPTSDKEKQNKTDKIDSRKIARELENDSLRGIHIPDEFHQQLRSLCRLRHRYVQNQTRIKNRIKGHLSSYGISVPSTIELNHWSGNFIKWLEGVDFNHKSARDYLDFCIDDLLQQRRKLADVTNLLRQYIRENGKRELIHNLTSIPGIAFITAVTFYTEIMDINRFPSIDHFCSYVGLVPSVNSSGEKEREKGLTNRRNNFLRHVIVESAWVAIRKDPALLQCYNDYCRRMKKQEAIIRIAKKLLNRMRHVWKNDEAYVLSVVA

SEQ ID NO: 317722 - protein, 519 aa, unidentified
MNLIQEQGSVVGCSVAAFSFGAFWYSELPAGETGSVRRHAYYLVTPLVRCSRWGGLSFLMASGHPAADTFGPFLTIMKALPILDPKAAAIDVGSEKLYVSIAGDTPKVFGTFTGDLESLCAWLKLAEVHSVAMEATGVYWMYLYEVLEGAGLEVVVVNGRHVQNVPGRKTDMADCQWLATLHAHGLLRGGFVPTAEIRQLQDYQRLRGDHLIGAASQVQKMQQALERMNIKVHDVISDLVGVSGLKVVRAILRGERRPGELLGLCDVQIQKQKAAAVKESLRGCWKKEQLFTLQQALELWETYQQKIAACDREIEALLQQLAGPQTPGGGVGVGPIQLAPAKKPGKNAPVMERFQELLARVCGGRDATQIPGMSTYLVLQLISEVGTDMLRWPSEKHFVSWLGLAGGRKQSGKRKGSVKAHRNRAGRLICAAARALAQSVDKALGGFYRRLRGRIGGLAANVALARKLALLFYRLLRHGMEYVEKGLKNYEAKVLETETRLLRKLAKKQGFTLLPTAPN

SEQ ID NO: 317723 - protein, 356 aa, unidentified
MKYYTSTTQFNCGIDLHARQMYVCVMDRQGKKLVHTNVKDNDFEFFLQRIEPYKHDLTVCCECMFGWYWLADACHQAGLTFVLAHALYLRAIHGGKNKNDRIDSEKLTHLLRCNLIPPSYVYPADQRPMRALLRQRVYYVWRRTEILNRIQSHQLAYNRRPVKCTTRHNRDPWEQKILATESHPLRQLALQNDMAMVRHYDGQIWALETKLVNLAKEHSARAFTLLLSVPGIGENLGLTILHEIGHIDRFPTVKDFLSYCRLVKGTVASAGKIKGLRGARLGNPYLRWAFGEAAVIAKRDHAVIGPLSQSLEARMGGNKFKANTVVAIKLARAVYFMLKNKTVFDADRLVAALSKN

SEQ ID NO: 317724 - protein, 360 aa, unidentified
MSNSIVHDDPSVKVIVGVDTHKHEHVAVAINGLGARLATARVAANQAGYAELLAWARQLGTIEAFGIEGTGSYGVGLASFVRRQGCRVVEVNHCDRRKRRNNGKDDTLDAETAARSVLAGIATAIPKTADGAAEMVRQIKVARDTAVKARSAAIITLKTLIVNAPDALRETLEPLTDRQLIDRCAALRPGDIIDPTASVKHALRALATRWRTLSNEIATHDDVLDTITKAAAPTLHDAFGIGTDSVAEMMIVAGDNPTRIRSEAAFAKLCGACPVPASSGVTNRHRLFRGGHRQANAALYRIVIVRMRWHQPTIDYVRRRTAEGLSKKDIIRCLKRFVAREVYHALIDDYWVGAASAEAA

SEQ ID NO: 317725 - protein, 455 aa, unidentified
MGKRNGLSRGDARRNARLIRMRGIVRHDRAILAIDLADTKQVLALCDHDSRVLARRTVRGRAWQLEEALRWGRTAAVEHGFAGVVVGCEPTGHRWRIVAELCDRLELDLVCVQPLLVGRAREQEDLTRDKSDPKDAVLIGRLVAGLRCYLPERTDQVWARLRQLGGRRVQLIIQVGAARQQLRDLLECAWPAVLEAAAEPLDSRTWRAAVQVALARTAGDPATLSRLGEARFARAVTRELARWGAKRRCLRIVRAVWAAATTPQALATGVGSQRPGALERAGLTLDDWHHALGQLAEAEQRMTGVLDSLDLTSLVTTIPGLSAVGAAAILAETGELARFDSARALVKHAGLCPRANESGAFAGTTRISGRGRPALRLAAWRATWGALAHNPVLAARHAHLTGRDHNQLTTAQARTALAAALLRWLWVVVTTRTPWQAAIAAGQLDPRREVTAPAA

SEQ ID NO: 317726 - protein, 357 aa, unidentified
MPAQTKSAKSNAQIAVIGIDIGKNVFHLIGLDRGGAMVLKCKLARGQLGKFFANLSPCLIGMEACTGSHHLSRRLIAIGHDARLMPAKYVKPFLKGNKNDYRDAEAIAEAVQRPTMRFVATKTVEQLDLQALHRVRARLVSERTAAVNEIRAFLLDRGIAVAQGIQRLRKALPEILAQHTDLLSPRIIRIIEALIADWRRLDDRIEEIACEIGELAEKDAPCKRLMTIPGIGPLISSATVATIGGGDMFSKGRDFGAWLGIVPKQFSTGGRTILGKISKRGNTYLRTLFVQAARVVLIKRQSWERYGLKPWIEAAARRMHSNKLAIALANKLARIAWAVLRHGRDFEVRHADEPQHA

SEQ ID NO: 317727 - protein, 351 aa, unidentified
MLIIGCDFHPGFQQVAIFDNRTGAIQKRRLPHREEAEQFYRSLSGPVRVGMEACGHYPWFERLLEELGFELWWGDAAEVRASVVRKQKTDRRDAQHLLHLLLENRFPKIWVPSLEVRDVRQLLVHRHKQVQARTRTKNQLQAMALSQGVQKKWKLWTKLGRAELEQLPLLPYAAERRQRLLEALDGLEAELVELNRRVEEEVRKRPEAMRLRTHPGVGPVTALAMVLTLGPAERFASGKDVGSYFGLIPREDSSGGKQRLGKISKQGSSFLRFLLVEAGQTAARYDPQLKRFYRRLAMRKNRGVAKVAVARKLATRLYLMLREQWTYPQLCQAVMQVSPSHSVVEPEKPTA

SEQ ID NO: 317728 - protein, 403 aa, unidentified
MNSVGIDISKGRSTIAVMRPFGEVVISPFEVRHTVSELSELARQLKSLDGETRVVMEATGNYHTPVAKLLHDAGLYVSVVNAKLVHGYGNNDLRRVKTDRKDAVKLANYGLDRWLTLPRYVPEEDTRLLLKNCYRQYRQYSKVQTVLKNNLISLLDTVFPNVNRLFSSPIRGDGSEKWVDFVAEFWHCRCVSEKSQKAFTNKYQRWCRKHGYNFSEAKAHTIHAEACGHIDVIPKSETTKLLVEQAVAQLRATSAALAALKHEMQSLASMLPEYPVVMDLFGVGPTLGPQLIAEIGDVRRFYSKKALVAYAGLDAPPNDSGDVTGRHKSMSKIGASSLRRTLFLVMSVYLQTAPLDEPVYQFMDRKRAEGKPYRVYMMASANKFLRIYYATVKACLESLEHTA

SEQ ID NO: 317729 - protein, 355 aa, unidentified
METQTNLEKSFFENKELFVGTDVHKAKWVVTVRSYDLELKTFSMQPLAEMLEKFLLSTYPGAKYKIVYECCFSGFWIYDYFSEKGYSIIVTPTNRIYKDGNTIKTDKIDSRKLAFQLSRGLLREVIVPAKKIREYKYIFRIYDKQKMRKGQILRQVKAFLEQKNHPLKWEKWNKGLVEKLKLLTFEDKLFDLKFGNLLKEYEYVVSQIKDSEEIIGRIKEDELLGPRITRIEKINGIGIISAVRMSVYLFDRKDRFESSEKLNHHLGLTPSERSSGDKVSRGRSGMCGNRQLRSIIIQLAWKSVRKDGALLDKFERVYKKSGSKQKAIVAVARKLMTKLYAIITKEEAYRVNLAA

SEQ ID NO: 317730 - protein, 412 aa, unidentified
MEVMYECVCGLDIHKASISACVRRVRSGRVHAEVREFGTMTAALLSLLDWLVSERVTHVAMESTGVYWQPIYNLFEGHFEEVLVVNPRDVKQVPGRKTDVADCQWLAHLQQCGLLRGSLVPDRPRRELRELTRQRSQLVHTHTAVANRIHKTLDDANIKLDCVASDILGVSGRAMIRALIADDQTIPQMADLARQRLRKKIPELRQALQGNVTPHHRFLLAELMDQLLDLERRIERFTTRIEEVLGPFEQAVRQIAELPGFDVRSAQNVVAEIGTDMSRFPTAAHLASWAGLCPGHNESAGKHKSGKTRKGSRWLRAAMSQSAWAASNNKTSYFRAQFRRLAARRGRRRAIIAVAHSLLETIFHILKTGRPYKDLGGEYFDNLDKDRIVKAATRRLERLGLKVTVTPVDHAA

SEQ ID NO: 317731 - protein, 340 aa, unidentified
MKVVTTVGIDLAKNSFEIVGVDENQHVVWRKRLKRSQVAEFFENLPRCKVAMEACGGSHFWGRVFRGQGHEVRIIAAQFVKPFVKSQKNDRNDELEIVEASLRPSMNFVAVKEVWQQDLQCLHRVRERVQAQRVQITNQIRSLLLESGIAIGEGVTEFKRDLPLILETPDNGISEILRQLVHDLYMDLKSLDQRKLKLDAQLENLASQSEECKRLMSVPGVGPLISTAFVAAIGDPGTFKNGRQVGAWLGLVPRQHSSGDRQVLSGITKRGDIYLRALLTHGARAVVAHSKRKPTKKTLYEWVSQLEARRGTNRTTIALANRNARVMWALLKDKTMYKVA

SEQ ID NO: 317732 - protein, 367 aa, unidentified
MTAYIGLDLHSKQTVYLGQDEAGNVAGEGKVPTTAKGFCHLVETLQAPKGTKIGLETGPQAMWVARLLSGLGMQPVVIDAREVRQKARRIGQKCDRRDAFEICDGLRRGIYTSIVYVPGPEIQRLRQILSQRRYFVRVCTSQVNRAKSLLRSVGLGQEATTLTTLAAWRKLLRRPAVESVRKDLAMHMDVWRVAQEKVILLERELREALKPFKETVTRLQTTPGVGMITAATYLAVIATPQRFADSGRVVSYIGLVPSTYDTGPMQRHGRITKRGSSELRAMLCEAAQHAARRRHPLNPYWVRVCAKQGYKRAVVAVAQRLARILYAMWRKEEDFDATKLNVVEKQHTRTKTYYWQIKKPDEQFVIA

SEQ ID NO: 317733 - protein, 360 aa, unidentified
MMKYGLTIVTGPGTERETTMDQFIGLDVSLKDTFISVREGGQRIWRGKCPSDPKLIAEVIRKRAPSVGRVVFETGPLSVWFYHALVLEGLPAICIDARHAKAALDMARNKTDANDADGLAHLAEAGFYREVRVKSFESMLTRTLVAARNQMLKTTTQLSNQIRGLMKTLGLVVPKGAGRVFEGHVRSLLASNAGLEQIILPVLEAWRGLRTRAAELSKQLVASARMSEQCQLLSSIPGVGAVTASSFVAAIEDPENFKKSRSVGAWVGLTTRRYQSGEVDYDGHISRRGDNHLRGLLYEAATVILTRTMADSSLRTWGLKLREKVGFKRAAVAVARKLAVIMHTMLRTGELFEPSVIAVA

SEQ ID NO: 317734 - protein, 423 aa, unidentified
MGQWGARGVVSLTDRTSIDGNTKVDKAQTAWAGIDVGKTHHWVCVLDAEGNKLSSMKVANDQTEITATIATVGALADRIVWAVDIIGAPSAMLLALLIQAGQSVRYASGRVVAAMSAAYSGEGKTDAKDAYVIAETARIRRDLTVIDPGTDLVRNLELLTGHRADLIADRVRMINRLRDVMTSVFPSLEREFDCSSCKGALVLLTGYASPERLRRVGETRLAGWLQRRRVRNYAAVAARAIAAARAQSVTLPGQEIAAAMIAELATNTLALDQRLTELDAQIAATLDEHPQAEIIQSMPGFGPILGATLLVAAGDLAAFPSAGHLAAAAGLVPVPNDSGRRTGNLHKPRRYNRPLRHVFYLSAQTSMMRDGPNRDYYLKKRDRGRTHTQAVIALARRRIDVLWALLRDERIYTAIPPTLAQAA

SEQ ID NO: 317735 - protein, 347 aa, unidentified
MDYYAGIDVSLEASSVCVVDASGKIIREAKVLSEPENLIGFFRDLGLEMTRIGLEAGPLSQWLYAAMKEEGLAVELLETRHVHDAFKAMPVKSDRNDARGIAQLMRLGWFRPVHCKSMPAQEVRALLTARKLVQSKLFDIEMSLRGILRGFGLKIGRTTPNRFGLRVEELVAGHPTLEIIGKALLAAHEVLLRELNGFEKRVRQQARQDKRVRLVMSAPGVGPIVGLTYVAAIDDPARFKSSKQVGPHFGLTPKKYQSGETDYSGRISKIGDASVRTALYEAANAILTKPLKGAPALKSWGMKLAKRAGMAKAKVALARKLGVILHRMWVDGTKFADKGISPKPVTA

SEQ ID NO: 317736 - protein, 393 aa, unidentified
MSMYFIGIDISKYKHDCCIISAADQKVVSKVTIKNNKAGFNELLTIIHSLANPADIRIGFESTAHYALNLELFLENSLLTFMEVNPVLISEYKKSKTLRRTKTDSVDCESIARWLMTVEYKPHSKGFYHAYSLKSLTRLRDKLIRQRSFYLIKITNVLDHTFPEFKPFFNERLSKTALYLLENYGSAEKMARMNSASYEKLRSLSRGRFSPQQFLRLKELAANTVGVNNSIFDVELNSLLSLYKSLVKEINTIEKEINKLIEEVHPHYMSVPGIGPLSAAVIYSEYGDISNFTNPGQMLAFAGIEPGINESGTESHGGKMVKRGSSQLRYTLINCCLPLIRFDMTFATYYAKKRGEGKPHRVAITHVAKKLLESSMHWRGKISTLMHRNFVNL

SEQ ID NO: 317737 - protein, 382 aa, unidentified
MDIFRHCCAGLDVHKKTVVACVRRLGPDGTVSSQVRTFGTMTAQLLELSDWLEAQGVRHVAMESTGVYWKPIFNLLEGNFAVILVNAQRLKNVPGRKTDIKDAEWIAQLLQYGLLSPSFIPPPEIRQLRDLTRQRTQLIRDRATVANRIQKVLEDANIKLGDVASDVLGASGRAMIRAIIAGEDDPDHLAELAKRRLRGKIPALKQALHGRVTEHHRFLLRGLWDQIVFLEDLIARFDARIDQAMAPFAAAEERLRGIPGVGQQAAEVIVAELGTDMTQFPTAGHLASWAGLCPGNDESAGKRRSGKTTKGSQWLRTTLVQAAWAASHTKETIFSACYHLWAKRLGKKRALVAVAHKMLVVVYCLLKNHTDYRERWAPPKVA

SEQ ID NO: 317738 - protein, 407 aa, unidentified
MFVGIDVAKDSLVACAMDDQGEDVFHSYSVKNNRPGCLKLINLITDNANLLQPDIIKVGMEATNVFWEHCYRLIKNHEQLNSNFKLQIYTVNPKVVSNFKKSYTDLPKNDNVDAWVIADRIRFGRVENSSSPEALYRALRQITRHKFKLAQHIKAEKARALNLVFLKFSDLTQKSPFGTFTKASMALLENYTLREIVNTDVLELAEFLYQNSNNRLGGSTPIEKIITALKKAARNSYRLKPEIDQAITQTLSMTFDNIRFYQSQSKRLKRVLKRQLKAIPQTLITVDGIGPVLTAGIISEIGDINRFDKETNLASYAGLTWSQYQSGSFTAEETHLTKKGNKYLRYYLVEAANSLRVHNDSYKSYYYKKYNEVPKHKHKRALVLTARKFVRLVFALLSKGEIYQPRR

SEQ ID NO: 317739 - protein, 387 aa, unidentified
MQKPHDDSKMCPAAFQQDSTLVVVVEMSLSSWLVAGLIPGVSREPLKKIDPDPERLLRLLYRWRDEAVAAGSKINRIAVAYETGRDGFWLARWLRNRGIDAHVIHATSVAISREHRRAKTDRIDTAMLRRGFLGWLRGEPGHCSMAVVPSVAEEDAKRPHRERDTLIHERTSIVNRMKSILIQFGVRNFNPVLRKASEKLDAVRTPEGVPLPANAVAALRRLMDRFRVIKEQVKAIEQTRLQRMERDPTDKMNTMVFLLVRIIGMGVETAEQLVREMLFRNFRDRKAVARYAGLTGSPDESGSKRREKGLSRSGNRRVRNILIQLSWRMLQFQADSGLVIWYKKRTESARGSRKPMIVALARKLIIALWRYVNTGVVPDGFALRPAV

SEQ ID NO: 317740 - protein, 314 aa, unidentified
MPEAGRFVGIDVAKAELEVVERPSGARWTVPNDVAGWGQLREQLAAARPTLVVLEATAGYELGVVASLAAAGLPVVVLNPRQVRDFAKAIGRLAKTDALDAAVLAHFADVVRPPVRPLTEPVTEALEAWLTRRRQLVDMLTAEEQRRARAPQAIQRQIDAHVQWLRRQLEVVEKDLTDTLRASPVWREKDELLRSVPGVGPIMAVTLLAALPELGRLNRKQIAALVGVAPINRDSGTHRGRRAIWGGRAHVRATLYMATLTAIRCNPVIRTFFGRLVAAGKLKKVALTACMRKLLTILNAMMAARTAWKPGIVA

SEQ ID NO: 317741 - protein, 449 aa, unidentified
MSKKGKSVGLPIVNVRAAGIDIGSRIQVAAVPPELSDEPVQTFQSFTADIERMADWLISVGITTVAMESTGVYWIPVYEILEDRGLAVVLANARDCKAVPGRKSDVNDAQWLQRLHACGLLRASFRPARDIAALRMYMRIRDRHLDYAAAHMQHMQKAMTHMNLQLHHVLSDISGVTGLKIIRAIVDGERDPDALAAMRDVRCRENLQTIRAALVGNYQPEHVFALAQALALFDAYQERIADCDVQIERVLQMLNADKPKPREPLPAPRTKTKQANAPRFDVRSLLHQLTGTDLTLIHGIGSSVALSLIAECGTDLSRWPTEKHFTSWLCLSPGCKISGGKVLSSHTRKTNNRVASRLRMAAVTVGRTETALGAFYRRLAARIGKAKAVTATARKIAILFYRAIRFGLNYDDPGADQYEQRYRERVVKQLQRRAAHFGFSLQPTEAGVS

SEQ ID NO: 317742 - protein, 348 aa, unidentified
MTIVAEQYRHVIGVDTHAGTHTYAILDAGTGRTADSATFPTTAAGLSRAVAWLQRRTTGNMLVAIEGTGSYGANLTRTLQTEGIAVCDVRPPKRASRAGKGKSDEIDAVAAARTALASAAGTLAAPRADGIRSALRVLLVARRAIDTRRTADRNMLTALLRSFDLGIDARKPLTDAQVRSVAAWRARRGEDTALQTIREEARRLAGSVLELTGQMEANHAALAKHVGELGPGLTDAHGVGPVTAASVLVAYSHKGRVRSEAAFAALAGAAPLEASSGNTVRHRLNRGGDRQLNSALEVIARVRMSNHPETRAYVERRLAEGKSKREIRRCLKRYITRQLFRSLNRIMA

SEQ ID NO: 317743 - protein, 355 aa, unidentified
MDGDKYVAMDVHKASVVIGIRDASGKYIMESIVPTQATMLLDFVKGLSGKIHLTFEEGTHSVWLYDLLKPHVAELLVCNPRRNKLLEEGNKGDAIDVRKLSHLFQAGLLQPVYHGDHGTRTLKELAQNYESLVSDRVRVKNRLKAIYRGRGISCEGDEVYRKKTRAKWLAQLNESGVRWRAESLYQQLETLDPIVAGARKQLLAESRKQKAARLLRKMPTLGPIWTALIIAAVDTPHRFRTKRQFWAYCGLAVVTRSSADYWFDKKGELRKSRRPAATRGLNRNYNRRLKKIFKSAALVGIVRGPFQPYYQRLLAQGLRPELARLTLARKIAAITLAVWKKGERFDPEKLTTLTT

SEQ ID NO: 317744 - protein, 345 aa, unidentified
MEGEGTHYRVYVGVDIAAETFTAAWLVPGGQPTTPFTSEQTSAGFAALRHRLQGTGSPPAATLVVLEATGNYWVALAVALHEAGYRVAVVNPRQAHHFAKAQLRRAKTDALDARDLAQLAAALRPAPWTPPPAVYHEVRQRLVARDGLLAMRTQARNQRHALVQWPVVVAAVRQHLDELIADLDRRIAALEAEIGAVLKESAWAESLACLRSAPGVGLVTASWLLVGTLNFALCDGPESLTAYAGLAPVPRESGRSVRSRPRIGHDGNGRLRTAFYMATLSAARYNPAIKAFYQRLRAAGKPPKVARCAAARKLLHQAWALGSKLQRFDPDHQQQQHEVLPELAA

SEQ ID NO: 317745 - protein, 316 aa, unidentified
MSISETFIGIDVSKERLDCASRPNGTTSSFKNSVTGIDALIKQLQEQRPRLVVLEATGGLERALVAALVVAQMPVVIVNPRQVRDFARAVGQLAKTDRIDAAVIAHFGEAVKPEVRTLPDQLTQEMDALMKRRGQLVSMLGVERNHLVSATSLVSNHVKEHISHLEELITRLDQEIDQMIGKSPIWKAKDELFQSVKGVGPVLSRTLLAELPEIGQLSRQKLSKLVGVAPLNNDSGKRKGKRSCWGGRSGVRAILYMSALSATRFNPVIKEFYQRLLAKGKTKKVALVACMRKLLTILNSMVKNNTPWDPSFAQRG

SEQ ID NO: 317746 - protein, 321 aa, unidentified
MTDLTLFVGLDLHKKTISVALVEGAAGAAVRFYGTIANTPETVRTLCRKLSKDGQQLHFCYEAGPCGYGVHRHLTRLGHRCDVVAPALIPRKVGDRVKTDRRDAMMLAQTLRAGQLTAVWVPDEAHEAMRDLVRLRSQAMRDLRKARQQLLSFLLRHGRNSPYGHWTKMHRRWLGELVFAHPAQHLALEEMLQRIERAEALCERLKEAILELVPQWSLAPVVQAIQALRGVSLIVAAAIVAEVGCFSRFESPRALMAYLGLNPSEHSSGATIRRGAITKTAQGRGGDRARAGRLYLGDCADGRTQVRLIGSRQATAMHSAR

SEQ ID NO: 317747 - protein, 372 aa, unidentified
MSKSNTLFIGLDVHKETTDVAYVSDKLDDRVQYHGTINTNLRAFNKLLRYFKAKANKLCVTYQAGPCGYWLYRHLNSHGIECWVVAPSLTPKAPGDRVKTDKRDAMTLARLARTGDINSIYIPDSCDEAIRDLIRCREDAMLDYRQAKMRLKSFLLRHGHPCTGRQNWTEAYRRHLGAIHFLEPAQKIAYQHYINIVTEQFERLQHLNIELETLAQSWRWYPLVQRLCVLRGIRFLSAVTLVAELGDLRRFNHPRSLMNFVGLTPSEYSSGTRQRLGAITKTGNTHARRILVEAAWSYRFSPKVSEEMQKRLQGHSAKLQNLSWEIQQRLCKRDAKLRARGKEKNKIVVAIARELVGYIWTLHCRLTHKVRQ

SEQ ID NO: 317748 - protein, 333 aa, unidentified
MQHFIGIDVSKANLDLALLDEAGNLLATERIINERRAIRALFKRWCKELGVEPGDALACLEPTGHYGYLLLEELLEMSMPTWLAHPLDIKHSIGATRGKNDQVDARRIADYARRYQDKARFVGPGSLKINKLKQLLTCRRRLVADKRRHQVLLKDLNRHMDKSLRALFDRFSRERIVQIDKQLGQLEKQILEHIRSDRQLEHQYQLLLSVEGVGPVLAAYLLATTEGFTRFANARRLACQAGVAPYEHSSGSSVHGRTRVSPQADRVLKTLLHMSALGVIHRPGELRDYYQRKLAEGKPPMAVINAVRCKIIHRLFAVIKRGTPYIKTPLQMS

SEQ ID NO: 317749 - protein, 314 aa, unidentified
MILALRYVGIDVSKHMLDIFDDAVGDAQSIANAPQPIAEQVARWQCGNVFVVFEATGIYDRELTSQLHEAGIRFARVNPARARDFARASGRLAKTDAIDARMLAAFARTMAPAADPAADPARNSLALLAKRRDQLVHMRAQEKNRRSESADHTTIESITRLLDFLTEEIKAIELKIKILISKTPQIAEQARLMRSAPGIGPVACMQLIAQMPELGRLAPKQLAALAGLAPFNVDSGKHRGKRLIGGGRKRVRDALYMAALNAVRRNGILKTFYQRLRTAGKPAKLALIAVARKLLTILNAMLRDRKIYLPAPHS

SEQ ID NO: 317750 - protein, 414 aa, unidentified
MKKTKRNTRERNKKTMIVALDEGKRTHYGYVRIPGLEEQPSIPFTANREGFEKFCAIIEKHKEENNVDVIQFGYESTGSYTLPLAYYMKERGGVDLVQVNPKLVKRFKEARDNSPGKTDKKDPKVIADIMSNDWTLSVILPEGNAADLRRLTHDRETFIENRNKSFSQIEGLLAFVFPELSQTVNIRTKSVCRLLSEHTLPWDIVEQGKDSITELLHTSSRGQFKKPKIEAIFKAAEQTVGIRQGSERTAEQIRRLLDGCERYNNHIKEIEQEIGQTLKKFGYAKHMLSINGVGEVTCAILIGETGGFENFSTAKKVLKLAGLNLYEISSGEKKGNRRISKRGRSLLRKALYYAALNTTRKGGVFREKYEDYTSRGKKKPALIMIARKLLVLIFALVRDGKDYDPGQNKTREAA

SEQ ID NO: 317751 - protein, 317 aa, unidentified
MIVLGIDIAKRKFDCALLNEGRFRTKVFENNAVGIAACMSWIARHAGQTVHACLEATGPYAEALAEGLHDAGHTVSLINPARSRAFAQSLGLRHKTDAVDARTLARFCEAMKPGAWVPAPQSERALQQFVRRLDALIEMRTQETNRLAVAHIAVRDSIEQMLLSLDQQIEAMKREITKHINRHPDLKAQRDLLASIPGVGPTTCAWLIAELNTKRFDCARSAAAFVGLPPAHRTSGTSIHGKPRMSKRGNGRLRKVLYWPAITALRCNPIVQALGQRLQARGKHKMAIIVAAMRKLVHIAFGVLRSGKPFDPNIAGA

SEQ ID NO: 317752 - protein, 399 aa, unidentified
MLEQAWAGVDVGKEHHHCVVIDAEGRRLLSRRVANDEAVLLALISDVTGLAGQVRWAVDISTGEAALLLALLAAHDQQVCYLSGHQVNRAAGGYRGSGKTDAKDAAIIADQARMRRDLAPIRVPDEVIVELRMLVARRRDLQSDRVRAVNRLHETLLTISPALEKALDLTNQGPLILLTGYQTPAAIGQLGVTELTEWLRARKVRSAGELATRAVAAANAQQIGLPGEVLAAHLAAQLAEGVIALDEQIKHTDKLIEDRFHRHHAAPVILSMPGIGTLLGAEFLAATGGDTAAFATPDRLAGYAGLAPAPRDSGRISGNLYRPKRYNRQLQRVFYTSALISIRCCPESRTFYDRKRAEGKRHNQAVLALARRRVNVLWALLRDHRPYQASPPVSTAAAA

SEQ ID NO: 317753 - protein, 339 aa, unidentified
MKYTPVGVDIAKHLMQVHFIDEHTGEVIDKQIKRAALLEYFSNREPCLIGMEACGGSQHWARELEKLGHKVRLLQGKFVKAFVMGNKNDVMDARAIWMAVQQPAKAVAVKTEEQQAVLSLHKMRRQLVKFRTAQINALHGLLLEFGETVRKGRASLDKAMPQVLERLKEKLPPFLIYQIEDQYRRLSDLDMQIDGIEKQLAAWAKQNEACLRIMDIPGVGPLVATTVVAIMGEAGTFRSGREFAAYIGLVPKQTGTGGKVRLLGISKRGDAYMRTLFIHGARAAALQAKEPNPWVTELLKRRPTSVAVVGMANKIARTVWALVAHNRTYDKKHVSVRPF

SEQ ID NO: 317754 - protein, 342 aa, unidentified
MEHYVGLDVSLEETSVCVLDSAGKIVWRGRCSSDPDAIARIVRDRAPFAVRIGLETGQLSTWLVHGLRRLGLPVVCLDARHAKAALSLQLNKTDDNDALGLAQIVRTGWYREVAVKGMNSQAVRVLLMARAQLISQRQATANQVRGLLKTFGLLVGQAGGSRFAVRVRELVADRPVLVAIVEPLLTVWQTLREQVAELDRQVRMRAREDATVRRLMTAPGVGAVVALAYTAVIDDPARFAKSSSVGAYLGLTPRRYQSGEVDYDGHISRCGDGLLRSYLFEAANVVLSRLTKPSWLKEWGEALARRIGARKARVAVARKLAVVLHRMWMDEQEFRWSPTAAA

SEQ ID NO: 317755 - protein, 438 aa, unidentified
MSNKVIFNLDELFISVGIDVGADFSWMSIALPNQQFVGKPYKILHNSIDSLTTAVSKIKEAEELYSLESRIFLESTGIYHYPLFCYLRDKGFNCSVINPIITKNSTNINIRKVHNDRFDSKKAALVGLKPDLKVSLMPSDLALNCRNLCREYCDLMDNRSAYVNKLQGELRMAFPQYLGIFSKVTINTSLTLLETYTSPSAFLKADKQEIIYIIKSTARFGLTYAQNKYNAIIQAATDANQFGYIIDSNIKRIRLYISFIRKYDEEINSILESLHELVDANEDSDFVKQIHLIETFKGAGFLSAVSIMGEIGDFSAFSKPKQLFAYFGLDPAVKQSGKFEGTKVQMSKRGSAIARRVIHTLTLQSISISRNREAKNPVLREYYLKKCDSKPKLVAMGAVSHKVCNMIFAILRDNKPFKIIAPQEHIKQYNAAKCDIAA

SEQ ID NO: 317756 - protein, 343 aa, unidentified
MVVVGVDAHKQVHVAVAVDDRGRPIETWEGSNSESSWQEILTWAGQWPDRQWGIEGTGNYGHGLAKHLVSAGEQVYEVNPRLTAQARRRARKRDKSDRLDAMAVARVVLRDGSELPIVVVEDEAAILDVMVRERDRLKSQIDRLCNQLHASVFKADPQYGKTFTSLSKLETVERLEQYTAESDTPLARVRADAVRRIASMLRLVLEQERELTRQIETFSEKHYSALTEIQGVARLTAGVLAGILGTRRFDREDQFATYGGASPLETSSAGHVRHRLNRGGNRRLNRVLYMIALTQWTQRGDGRRYIERRMEQGKSWLEAVRALKRYIARAIWRLWQRHYATPA

SEQ ID NO: 317757 - protein, 320 aa, unidentified
MEKEQVYAGIDVAKASLDVAVHLSEKRWNFSNDDRGIKDAVACLRGLSPALVVLEATGDIELPLTAALVVAELPVVVVNPRQIRNFARAMGKLSKTDTLDAQVMAHFAATIRPELRPIPDAQTQELSDILTRRRQIVEMIVAERNRLLTARGVVNEGIQAHIVWLEQELSNINRDMGGKIRESSVWREKEVLLRSVPGVGPVLSATLLAELPELGDLGRRQIAALVGVAPLNRDSGTFRGKRSVWGGRAKIRAVLYMSTLVATRHNAVIRAFYQRLCAAGKEKKVALTACMRKLLTILNAMIRHRTPWRYPTTQIIGPCP

SEQ ID NO: 317758 - protein, 340 aa, unidentified
METTIKFYLGIDVSKSWFDVSVLKVVNYEKQPMLTEQFLNTKEGISSFQKWLEQLGVPFDDNTLIVIENTGIYHRPLWEFCSKHNLPLHIGNAAHIKWSLGITRGKNDQIDSKRLCNYCCKQADELKATAVLNPVFMNLKDLMTSRTRLIAQLQSTKSYVKELLCTNDKALLKTLEKAHKAAINGIEKSIAQIEKAINDLIVADEKIYRNYELIKSIPGIGSITAIYIICCTNNFANKPSGKQLASYAGVVPFEHSSGSSVRGRNKVHKMANKELKRLIHMCAVSSIRYSSEMKAYYERKKAEGKPGLSVVNAIKNKLLLRVVAVVNKQERYVENYQNVA

SEQ ID NO: 317759 - protein, 352 aa, unidentified
MDATTIAVDLAKDVFECIAATAVGRIVERRRLNRQQFQRFLAQLPAGSEVVMEACSSSHYWGRHCHALGLVPVLLPTQYVRPYVRRNKTDRTDAEALLEARRCAGIFPVPVKTAEQQALQSLHRVRAQWQTARTARMNVIRGLLREYGLPRRAGAVTIRRVVPGLLEESNEMVPRLVRQLLRELLDEVRDLEGRIKVIDRQLRDLADTDPVARRLQTVPGVGVMVATGLLGSVAHIHAFRRGRHFASWLGLTPREASSGLRHWRGGISKRGDVYLRALLTHGARSVLFNAQRRARAHADRLTALQRWVIGLAIRRGYNKAVSALANKLARIVWAVWRRDVDFSAAIQSRAAA

SEQ ID NO: 317760 - protein, 317 aa, unidentified
MAMQVGKLIVGADVAKAELVIHHDDRDEIIRLKNSKLEIRRWLKQQPLNTAIAVEATNVYHLDLVELAHSLGFEVYVIDGFQLSNYRKSVGGRVKTDPSDARLLSRFLKNEGEDLRPWSPPPAVYGKLQSLLRRRAALVTARTAMTQSWANESLLKAAFETFVKSIDRLDQLIQKKIKEVLRDAGLQEQVARCQAVEGIGFLTAAALVMAFTRGEFKSSDSYIAFLGMDLRVSDSGQKNGRRRLTKRGCSEIRRLLHNAAMAASRSAAWKGLYEQHRSSGKATTQALVILARKLARVAFALMKNQDEYVTKGAKLAC

SEQ ID NO: 317761 - protein, 337 aa, unidentified
MKFCGIDLHSNNSVVVVTNETDGVLVHRRCPNDLPSILAELEPHRTELAGVVVESTYNWYWLVDGLQAAGYRVKLANTVAMRPYDGLKHSDDADDAAHLAHLLRLGIVPTGYIHPPEERALRDLGRKRIQLVRGRTQQVLAVENIVARQRGSRLSSNTIKRLTPEGVAQLGLGADVTLALQSNVAMIAEFNVQIARLEERLHEGVKPRQEHALLRTAPGIGETLATIILLEVGDIARFPGVGHFASYARCVDSARYSNGKKKGTGNTKNGNAYLVWAFVEAANFARRFNAEARRFFDRKKAKTNAVVATKALAHKLARACYHILKEKQPFDVNRCFH

SEQ ID NO: 317762 - protein, 355 aa, unidentified
MTALADKVDGVIGVDTHRDTLSAAAVTAVGGLLGQLVVAADAVGYRRLLAFARIHVPGRRCFAIEGAGSYGAGLARMLVDGGEWVVEVDRPTRPARRSGKTDALDAVRAAREVLVQERPAVPRRRGDREALRVLLATRHGALVARTCAINQLKALIVGAPEELRAELRSRSTSGQVAYCAALRDRPARSLEHRMTARALRATAQRTRALATEAAELHDDIGRLVQAVAPWLLELPGLGPISAARVLVSWSHAGRLRSEAAFAALAGVSPIPASSGQVTRHRLNRGGDRRLNRALHTVALVRLRDDPTTRAYAARRRAEGKSPREIRRCVKRAVARHLFKLLCRYDRPEVEIVRTC

SEQ ID NO: 317763 - protein, 317 aa, unidentified
MSESYEGKQVVGIDLHRRRSGLVRKTEMGETLETVRISNDPEYLRQVMARAGEAPEVVLEAAYGWYWAADTLAELGAHVHLAHPLGVKMFCYRRVKNDERDAGDLADLLRMGRLPEAWIAPPATRELRGWVRHRAKLVALRSSLKSQVHAVLAEAGVQVPMSDLFSPGGQHLLGAARLSVESRARVDSALRLIINVDFEVELFAKLVTNRLREHPGYRAIQQIPGVGPTLAAVFVAEIGDVTRFPGPAQLASWAGLTPRHHESDTTVHRGRITKQGSRLVRWAAVEAVQRVGEHTRTGAVRERVAARRGRERVRWSV

SEQ ID NO: 317764 - protein, 347 aa, unidentified
MRFYNNQHKYYCGIDLHTRKMYVCILDEKGEIREHRNMKTDRDAFLKVIAPFREDIVVAVECIFTWYWVADLCHNEGIPFVLGHALYMKAIHGGKAKNDKIDSHKIAALLRGGMIPMSYVYPEKMRATRDLMRRRNHLMRKRSELYAHIQNTNSQYNLPDSFGCLARLKNRNGIIEQFEHPSVQESITADMEIIRRYDVILSQLEKSIINMAIHHDPVSYALLQTIPGVGKIIALIILYEVENIRRFASVQDFVSYSRLVKCAKESNGKKCGSGGSKIGNAHLKWAFSEAASFFAKNNDPAKKYLDRLTKKHGKSKALSILAHKLGRAVYFMLKNKEAFNQNKLLNL

SEQ ID NO: 317765 - protein, 417 aa, unidentified
MLGIGIDWAEDSNQVALGRPGDGVIECSSIPHHPEAVARLIERIGAMEPDPAEVRVAIETKHGHLVEALVEAGYAVVPVNPDLVARRRGPARKKDDPEDARILCLLAMDRHSVLRPLIPHGEEAAELRAIARDDERACRDERRLLNRLRADLIAAFPEAMAYAGEDLGAPTLLQVLARYPTAEAVREASDAELQALFRAAKHGWPARAVAKLRQALASSQFIPKPYLVRAKADAIRLGATQLLAIGAQRRAWERRMGELLAHLPATGGTEPGQAVPDGEIYLSFPGLGARLAARVAGEIGDHPEQFSTPSSLQCYGGKAPVTRRSGKSEFVVASRLACNRHLANAVQQWAFCSLQRSGWAREFYDAQRGRGKSHHAALRALGNRWLGVLWHCLRKGVMYDETIHVANRERALKPLAA

SEQ ID NO: 317766 - protein, 438 aa, unidentified
MRARVGNFYKKSIPLSKPTKQRSVKVQVMNECCCGIDVHKKMIVACLLKGKAGEEPKKTIRRFPTMTCDLLRFRDWLLSEACTHVAMESTSVYWKPVFNIIEDCVEVILGNAREIKNVPGRKTDIKDCQWIAALLRHGLIKASFIPPKPIRELRDLTRYRHKLIQCRSSEINRIQKNLEDANIKLSSVVTDITGKSAQEMILHLIKKDMAPKQMADLAKGRLRKKVTELEKALQGNVKDHQRLILQISIQMISYYDLSIEKLNREIDKRMEPYQKEVELLRTIPGVQKKTSEVIIAEIGTDMSRFPSERHLSSWAGLSPGNNESAGKRKSGKTTKGNIYLKSILTESSWAVSRAKDTYLQARYKRLSFKRGKKRAAIAIGHSILVSTYYIIKDHRCYVERGANFFDRSNELKLLKNLTKRIQKLCYRVETKKDMRKSA

SEQ ID NO: 317767 - protein, 343 aa, unidentified
MDHFAGLDVSVKETSICIVDDTGRIVRELKVASEPESLLEVLGDPIYRFKRIGLEAGPLSQWLFSALAEAGLPVICVETRHMRAVLQAQINKTDRNDARGMAQMMRAGLYRPVHVKTLRSQKLRMLLTHRKLLQSKAIAIDNDLRGTLRNFGLKVGVVGTVKFEARIKELVENLPDLAVLVEPLLMVRRVLREQFAILHRHLLAIVRDDEVCRRLMSTPGVGPVVALTYRATVDVPARFRNSKAVGAVFGLTPSKYQSGQINRTGAISKCGDEMMRVMLYEAAQIMLVRSAKWSWLKAWAMKIARHRGMKKAIVALARRLAVIMHRIWVDGTEFRWTREVAAA

SEQ ID NO: 317768 - protein, 400 aa, unidentified
MDDKERFGWFLGIDVSKETFDACCITRQGERVFSMPTSMDRRGFEELIHQLSTVSVAQKSVLEGMESTACYHLNLYSFLISLGYPAIVINPLLISNFVKLQPRKTKTDEKDAWVIAQFLLLNRDSLYRTVGTSDLSDIRDFSRQRESPVNQMTSIKSDMKRLLTITFPELEHLAGIFSKSMLRLLCQYPSAASVRRAKRSKIAGILIPGSYGKQSNTSVQRIIKADEASIGTASPRKEIILKQKVSLLIQLEEHLQEPTTILLEHCQEKMRRDMDILTSMKGIGEKTAMTFLIDMGGDIKQFESHKKLIAMAGLDPALYQSGKIDRRGKISKRGNRHLRRVIWLMTTKLIQFNERFKQYHLKRLREGLPYKMAVLATAHKLIRVIFAMQTNQTLFNIKAN

SEQ ID NO: 317769 - protein, 497 aa, unidentified
MSTKANIYPDCNPQVRKLFEQAGHPAKVLCVALDYAKAQHSVLICNGLGDRLKGAFAVDNTAAGAAQLVRQVRQCAKQRKIRLEQVFFGGEDYPSFAENFLRQLRQEKFLVVRVNAWEAKQQRSNFAASSDSLDLLGIARCCLNRRGEPVRDLPAAYANLRIATRDRDQLVRDSTAITNRIHSYVDRLFPGFLTAGKSGIAPLSEASLDLMIERFSPAELSRRPRKARAQWLGRRGLEEPQKVAAQLKELAKTMLGPAPEQTVLWQRTLRQRVGLYRHLQASVARLDRELAYGLARTPGALLTSIGGIGVTLAAGWTAELGPPQQWRAVRRICSYAGVIPKSKQTGGPDKEPLTGHVQQRCNKRLKNVVLQAVEKVRQYGPEDLRHSAQELEARGAHTQFAMAKRLVRLAKHLVTTGTIYRPKALLDPDTPKAALAAYYQALWDKLLLKWKGKGDLKDVFAPSQPLGQWRDMAKELYALEMRLPQQRATRGPGALTP

SEQ ID NO: 317770 - protein, 390 aa, unidentified
MEARTVNNLPSAAAHDGAVRCFLAIELSKKSWVVAVNTPLSDKISLYKLKPCNWEQLLELIERIRKRVAQELKKPVEIISCYEAGYDGFWLHRLLEAQGVRNHVIDAASLQVDRRARRAKTDGIDVEKLLRSLMAYLRGEPKVWSVVRVPTVIEEDDRRLHRERSRLINERIQHVNRIKGLLAIHGIYDYEPMRPESIQRLERLHTAAGHSLPPHLKAEILRELQRLELVLRMIETIEAERDAIALAKSKSRHTSAKKIQHLVKLKSIGPEFATVLVGEVFYRTFDNRKQIGSYVGLTPSPFQSGSTSRDQGISRAGNAKARTTMIELAWLWLRHQPVSSLSVWFRERVGERKGRIKRIAIVAMARKLLIALWRYLETGLVPEGAALKSK

SEQ ID NO: 317771 - protein, 341 aa, unidentified
MEHCGIDLHNKSSEVCVLDAGGAVSERARIPTTEKALRRWFGGRERARICVEASGISPWVARLLTELGHEVVVANAQRVRLIAESTLKNDTVDAETLARLVRMDPALLCPIRHRKEETQRLRGMLRVRRSLVNNRTACLNTARGLLRSFGYRMPGQRPERLARALAVGKVPEVLCALVAPLVATALELDERIQALDEEVIEAGHAFPEVERFQQVPGVGPLVALAFVLCIEDPGRFHSSRDIPSFLGLRPRMRESAEHSHFGSITRQGDTEMPKLLVQVAHGCLRSRQDSDLKRWAERLAGRIGKKKAVVAMARKLAVVLHHLWVTGEDYQAARQEVAAAA

SEQ ID NO: 317772 - protein, 395 aa, unidentified
MFIVGIDIAKRSHEAIIITEDGQVVRKAFSFRNNCTGYNLLLEQVRRLTLVKSQIVFAMESTAHYWLALYARLLKDGYTVMVLNPIQSHSLRELYIRKAKTDARDSLIIADLVRFGRCKASNVPQDKILALRELCRSRAYLVDMAADLKRKLIALLDRIFPEYESLFDSVFSKASIAVLRKYSTPQKVKNANLRKLTDILMESSNGHFGEWKAHQLKEAACSSFGIDDSDGVYSTLLGMFLEQILSLTAQADSLEKQISVFFQEFNNPLTSIPGVGTVLAATILSEIGDITRFSSADKLLAYAGLDPSVKQSGEFKSNQNRMSKRGSPYLRRAIWLASTVAVHRDPMFQTYYEKKISEGLHYMNVIGHVSRKMTAVIFAVLRDGQPYQPILHSAG

SEQ ID NO: 317773 - protein, 390 aa, unidentified
MHPNTNPNTAVANTTIVAIDLGKYQSVACLYSGDPTQARFVTVTTDRNHLRQLFAKHRPGAVVIEACLLAGWVHDLCHELGLACHVANTASEAWKFQHTKRKTDKDDALRLAQLFALGQLPTVTVPPPATRQWRALIAARQALVGRRLAVQNRIRAILVGQDLAAPRGAKAWTELGLEGIAQHAKPLAEGGPDELWRGLLELALTELRQVRQLADQAEARLDQLARQSADVQLLETVPGVGPRTAEAIVAYLHEPGRFDSGKQVSAYVGLVPQQYQSGELDRRGRITRRGPALLRKLLVECAWCMIRYNAWARGIYQRLTGGGRRRKKQAIVALARKILVRCWAMLRDRKPWHDPQTGPKATLSPSKQRRQAEARRRRQEKPTVLMATTQ

SEQ ID NO: 317774 - protein, 406 aa, unidentified
MHVGWDWGNTTHAVAVIDDQGHTIDRWPCPHTEDGLEATLTRLASHAAPADLPVAIETTRGLVVDRLLVAGHPVVPVHPNAFNAVRPRWGAARAKDDPGDAFKLADYLRTDGHRLRTLRPAEQATLELQALVRAREDQVTARVRATNQLDALLAEHWPGAGVVFADLDSDIALAFCDRYPTPSTARRLAPAKMRDWLARQHYCGRTDPAVLVGKLRSAPAPASRLDEEIITALVRTQVTVIGALKTAIKDLEDQIDTALAAHPWAILIENLPRVGTVNLAQIIGELGPLLEHAASADQLAAEAGVVPVTRASGKSRAVVFRYATNRRARQALVRWADNSRHGSPWARNIYETAREQGKRHPHAVRILARSWLRIIYACWRDGACYDPLTHERRRTDKNARSTPLAA

SEQ ID NO: 317775 - protein, 340 aa, unidentified
MRKLNIIGLDLAKNSFQAHGSGLDGNVIFRKKLSRGKVLAFFTAQPICTVAMEACASAHYWGREISKLGHEVKLLPPIYVKPFVKRQKNDVADAEAIAEAASRPTMRFVAVKSEEQQALSLSFRARDLLVRQKTQTINALRGHLAEFGIVAPCGTAHLERLKEAVDDGKGVLPEEVILVSNMLLAQIERLQGDINDLEIRIRTRARQDNQAKRLMTIPGIGPVCAAAIEAFTPPMEGFGCGRDFAAWTGLTPRQHSTGGRDVMGRTSKMGQRDIRRLLIIGAMAVVRWAARRGTKDPWLARMLTRKPRMLVAVALANKMARIIWALVIKGGTYRLSGAIS

SEQ ID NO: 317776 - protein, 386 aa, unidentified
MQASKASTPIAEHNSTIFVAIELSQKSWLVTMHCPDKDKISRHKLEGGDHAGLLALFDRMRERGARALGAVPAIVSCYEAGYDGYWLHRLLTAAGVTNYVFDPSSIAVDQRARSVKTDRIDGEKMLRTLMAYLRGEPRVVRIVQVPTPEQEDVRRQTRERHRLVKEQTAHTNRIKALLRLLGMAIGNPRRKDWLTWLGSQRDWQGQAVPPQLLTEIGHEHARLMLVRDQLAELTKTSAAADQTPAAVEMTRRSELLHRLKGLGPAFATTLTHEVFYKNFRNRREVASYFGLTPSPWQSGGTDREQGISKAGNPRARCAAIEMAWLWLRHQPDSSLAQEFRRRTLNASKRIKRIAIVALARKLIVALWRYLTTGLVPVGAKLKPVEA

SEQ ID NO: 317777 - protein, 432 aa, unidentified
MIDHDVRVLARKTVRVKAFRLGGALAWAVGQAQAKGFAAVAVACEPTGARWLQVQRLCAERGLPLVCVQPLVSHIARRQQDYTTHKTDEADCVMIARLAIELHCYIPEELDEAWAQLRHLGRRRAQLITAATASVQRVRDFLSVAWPVAPEACAHPFESVTWLAAMQVVTSRCGGQPEKLAAIGLAEFTALVRQAVAGWGGQRPAGPVCRAVFAALASTEGVVVSHRRGLLRRCADELGDLQRTRAQLRAVEADMAAVLGELGLSRLADIPGLTAVGAAAILAETGDPRRYDSSSSLVKHAGLSPSGNASGAFGGQAHISRRGRPGLRLTVWRAIWPLLIHNSVMAAKYAAMIAAADAAAAQAAQAQSGTGSRQASAAAVAQARRAKARVACAASLLRWIYSMVVHGTGWDPDVASGAASCQHAPRCQAEAA

SEQ ID NO: 317778 - protein, 317 aa, unidentified
MSMTDRAVFVGIDVSKAQLDVAVRPEDRFAAPNDETGIARIVDRLRSAGPTLIVLEATGGLELPLAGALAAAGLPVVVVNPRQIRDFAKATGRLAKTDALDAAVLAHFAEAIRPTPRALPDEQTQALSALLTRRRQLLEMLAAEKNRLSQASSPVRKSVRAHLAWLQRALTQVDRDLAHAIQQSPVWQEKEALLRTVPGVGPVLATTVLAELPELGTLTHKQIAALVGVAPLNRDSGTLRGKRTVWGGRAPVRTALYMAALVATRFNPVIEVFYHRLRQAGKAKMVALVACMHKLLTILNAMLKHRTPWHPTPGASR

SEQ ID NO: 317779 - protein, 422 aa, unidentified
MMGKERRWFVGVDWGSQEHVVSLYDDEGEKISQRRFAHGGTGLTDMIAWLLKASGGKPGDIHVAIETPHGPIVEAVLERGFNAYSINPKQLDRFRDRFTVSGAKDDSRDADVLADSLRTDMRAFRKLSIADPIVVELREWSRIDEELKVEHVRLTNRLKHQLWRYYPQMLELADDVGANWFLDLFEVVPTPEKAANVREKTIARILKNHRIRRFDATHVLSELRKPALSVAPGTIEAATARIRGLIERIRIINNQIKDAGRQLDRLCKNLSEPVADKDEETSPGQKTEQRDAAILDSLPGVARTVLATLLAEASDTLQRRDYHALRALCGSAPVTRRSGKSCVVVRRYACNQRLRNATYYWAQNAVRFDATSRAKYDALRAKGHGHARALRSVIDRLLKVACAMLNSGTLFDPEFASKRSIV

SEQ ID NO: 317780 - protein, 411 aa, unidentified
MDKIYDKCCGIDVHKKLIVACFQCGRKQEVREFGATTRELLTLADWLKEGGCEMVAMESTASYWKPLYNILESSDLNAMVVNARHMKAVPGRKTDVKDAEWIADLLQHGLLQPSYIPGKDQRELRELVRYRKSLVGERTRELNRLQKMLEGANIKLSGTVSDINGKSARSILEYLLTGESFDEAKYNEMYEQKVIAHNLKAPKEQIIDDLNGVMSPLQHRMMKELLAHLDELNEHIKNLDDEIDNFMKPEEKQASQAIQDVTGIGNTSAQAIISVIGTDMERFPTDKHISSWAGLCPGDNESAKKRKSGKTRKGNVLLRTTLITCAHAAVKNKKSYFYAQYMRIRTHRGPKRAYVAVAHSMLIAIYHILKDGVIFKDLGAEYYNQFNKERKINAYLKKLKALGWEAPVVAA

SEQ ID NO: 317781 - protein, 399 aa, unidentified
MRYCLGVDVAAVDSMYCLAAETGEIIFMPVKSSHTKTGFQWILEKLDGIEQQDIAIIMESTSTYHLKVERFFRENTDCEIIILNPMISKNHKRNLRKTKTDKEDCLNLIDIFFKGEYNCQVRHDEIYAEMQFLSRQIQHLQEGATRTRNRLRQLLSMLNPAYFDAFRNDFMYSETGLRFIAAWPHCDLLNAATAEDIATSLASTHQRSPGYYRRKAERLKIFAANCYPAVSKESVMTDCLAETALRLLAQQQEIEVLKSRLVALGRSTELYDLFISVPGIGPYLASSLIAELKDIRRFENHKKLIAYCGFNPTVIQSGKTIHYNGPISKRGNSTARKILFYTVSIILVVARKTNRQMPLLLYYEKKRGEGKHHHACLVACCTKLLRILLAISKQNTPYS

SEQ ID NO: 317782 - protein, 391 aa, unidentified
MIYVGIDVAKDKHDCFIVSSDGEVLFDVFTIQNNMDGFEDLLFKIKSAEKDSGNVKVGLEATGHYSCNILGFLKNKGLTTIVINPLYTSLSRKSTSLRKTKTDKVDARTIASMIMSDVSLKPYSDKLYHNEDLKSLTRYRFDKVMQRAKLKQSVSRLVNILFPELETLVSTLHGKAVYELLLEFPSAQHIASANLKHLTHLLNTSSKGRFKRVTADEIREAARKSISSYLPAKSLELKHTIKLIRELTSEIAEIEAEIKKIMDAIDSPILSIPGIGQNLGAMIIAEIGDFSRFDNPDKILAFAGCSPTTYQSGQLYSSHAKMEKRGSRYLRWALLNAAAYVCNWEPTFAAYLQKKRAEGKHYYVALSHAAKKLVRLLYHLEITGEVYQATA

SEQ ID NO: 317783 - protein, 466 aa, unidentified
MENNYILYVGMDVSKGKADAAILKVSDRRSVKPKFLRKKLSFKFVKSEVASFLETVRSYSDVNCTSICFALEVTGIYSTNVYDYIKANLYENESIKFLNTDFVNQWRIAHNIAKSDPLDAQTISTIIGTDSDVQYVNDNVFENKNGYQDLKALVHRHYQIKKIYSQEINRLIAQCDCLFPELQYVFEPKSAAFIAVLSSYPTTHDIINASRLEVFNVVYEATKHRCSMDKIDKLFDLCHDTLVPDNISSYGRSIILDLVENIKNIKGQLKMIERYIRDVASLNPAYKLLLTITGCGPLTAATVIAETGDIKRFKNADCYVSYSGTSPRNKRSGTSVETMGKISKKGSRYLRHAIYMIAEFARRHNPVLKHQFERIKNGNKKRHKLANIAIANKIARYIYSIMKNKSSFVILHDHIMRLPEETRDTFFNSISLDFPKNTRKQIYQYSDINGELHRFVYIKTDEMIPA

SEQ ID NO: 317784 - protein, 343 aa, unidentified
MQMITTIGLDIAKSVFQVHGVDAGGQVIVRRQLKRRSVLAFFQKLPPCLVGIEACASSHHWSRELQALGHTVRLIPPAYVKPYVKRQKNDAADAEAICEAVTRANMRFVPTKTPEQQSGLVLHRARHLFIRQQTAVINAIRAHLAEFGIVAPVGRHGVEELLNVVADPNDNRVPEIARACVAALGAQLRRMKEQILEFDRLIRAWHRSNEMSMRLEEAPGVGPVLATALVAAVADPKSFRSGRNFSAWIGLVPKQHSSGGKNRLGNISKQGDRYLRGLFVAGALSVIRYAKIHGTKHRPWLTALLARRPTKVAAIALANKIARMVWAMMARGERYKEPVALAR

SEQ ID NO: 317785 - protein, 347 aa, unidentified
MVVLGIDAHKRTHTVVAVDANGRQLAVRTFGTATADHLALLRWADQFDAGQDRRWAVEDCRHLSRRLERDLLAAGEQITRVPPKLMANVRDSARTFGKSDPIDALAVARAALREPNLPTARLDGPDREIRLLADHREALVCQRTRVINRLRWHLHELDPQWDPTPRSLDRHSAYLAIEQRLAGIDELVARLAERLLLQAHQLTTEIDELTAELTTRVQVLAPTLLAVPGCGVLTAAKILGETAGIDRFTSKDAFAHHNGTAPLPVWSSNRARHRLSRTGNRQLNAALHRMALTQAHWHPDAKTLIARRKAAGDGGMEALRVLKRRLSDVVYRALLADARETITTAAA

SEQ ID NO: 317786 - protein, 449 aa, unidentified
MKILALDLGKFNTMCCFFDTKTRKHSFLNAPTERNYLNTLFKNHKIDLVVMEACGPSGWINDLASSHGLKTLVCSTNEDAWKWSNVKRKTDKDDALKLSRMAAMNELKAVHMPSETHREFRSLVKYRKTLDCRINKMKCTIRAWFVNHGIEIDTGEKAWHSGRERINSFRKPLVDCEPHELWKGELDLELTQFDALTVQLESVVKKLEALGKADPRIQRIRTIPGVGPRTAEILVACIDDPHRFNNGREVSAYFGLVPRQYQSGETDRNGRITKRGNPLARTILVECAWASLRYNEWAKGVYDRICGKQKTRKKKAAVALARKIAVLAWAMLRDEKDWAPTHMIQVTESFGKMKRELKQSLQSMKPKENSDQRKSRLRREAREAKAVADRPKKSVRTATAKRSRSKTTVVPNAAPPSNPTKRTTPKSTARTNLKPKPKPRRAGKLVSAV

SEQ ID NO: 317787 - protein, 421 aa, unidentified
MKTTPIAWEHRQHFGALDWARDHHDIAVVDAKGTIVLQLRFEQTPEGWASLRAALAPFGPGLAVAVETNQGLAVEQLVDAGCTVYPVNPKSASHYRTRKAPAGAKDDQRDAWSLADALRVDGHGWRALVPDDPLVAELRLLTRDEVALISQRTALINELRSALAAYYPAALTAFDTWTCEGCWSFVETFPTPAALAKAGRKKWEKFLRAHQLWKEASAERRLAIFASAASLSGCAATVAAKSFMAVSLVRVLRVLQTQLDAYRTRIQERFSQHPDAGLFGSLPGVGVKLAPRLLAEIGDNRARFATAEGLQAYGGTAPVTFQSGQIEKHLVRRACQPFLRSALHLWADRSRLTCAWADEYYRAHRKKGQSHACALRCLGQRWVKILCKMWQTSTPYDESRHLANQRKHGSPFAPPLTTKTA

SEQ ID NO: 317788 - protein, 343 aa, unidentified
MYYIGLDVHKKTISYCVKDAAGQVHREGKIGSTRRELDAWISTLPQPRTIAMEATIFTGWIYDHLLPHAEKVKVAHRLMLRAIAAAKKKNDKIDARKIADCLRCDFLPECHMASTEIRDRRRVLRYRGLVIKQMVQMKNRVSGLLMETGVDYNKRRLHKVGYFEDLLSTNREVNQSIRPLLKLSRETIDRSQRLDYALVSSLERDPLLAERLRRLRTVPGVGPITALTWALEIGDFTRFPSVKEAISYCGLCRDESSSADKVLRMPLSKQRNKYIQRTLIEAAKLAIRYNHELAEVYEKERERGNANRATLAVARKLVAYLLAVDRRKQDFVPAEQFRATAAA

SEQ ID NO: 317789 - protein, 407 aa, unidentified
MLIKLSGSKQLPNIFKGCGFMIYVGIDIAKQKHFAAAMTADGEVLIPPFGFTNDAEGLKLLLSKIKSFKKENTLIGLESTAHYAENLICHLFELGYNISVINPIQTSTLRKTNIRKTKTDKVDCLLIIKSMIVNKPRIYSKTDIDSLRLKSLCRFREKIKKTKAKLKIQLVTYVDILFPELQYFFKSGIHTNTCYQLLKEHSSPDDIAALHLTYLANLLQKASHGRFGKEEAIALKGLAKSSVGTGNTAVSIQITQSIAQIELLEQQLADLDRAIESIMLEMDSVILTIPGIGFLNGAMILGEIGNISRFSNPSKLLAYAGLDPTVNQSGKFNAKSTKMSKRGSKLLRYALINAAWNVSLNNKTFNDYFNLKRSQGNNHYAALGHVAHKLVRIIFKMLKDNVAFNLD

SEQ ID NO: 317790 - protein, 460 aa, unidentified
MSRTRRKHARKRTGKIIKVAARASALRRVNLHAAGIDVGATSHFVAVPPESSESPVREFGVMTEDLLALADWLKQCGVTSVAMESTGVYWIPLFEVLEAQGLEVKLVDARKVKNVSGRKTDVLDCQWLQELHTFGLLAAAFRPAEEIAVLRAYLRQREMLVKSSASHKQHIQKALQQMNLRLDNVVSDITGETGMAILKAILGGERNVTKLARHRNYRCHASEEEIRASLEGNYRAEHVFALEQAVELYEVYRGKIAECEEKIEQYLQTLAARTNEPLPEPPDGKKSTLSFEVREHLYRQLGTDVLRIKGINAEVALVIYSETGRDLEQQFGNEKRFSSWLGLCPGTKKSGGKVLSSRSKQNASRAAAAFRQAAVSVGKTDTALGAFYRRMSAKLGRAAAVTATAHKLARLWYAMVTQGTQYDEAGAEAYEAKYRTRVIRGMEKKAKALGYELRPLAATA

SEQ ID NO: 317791 - protein, 320 aa, unidentified
MQKIALGLDISKLTIDAYFNGQKDFIRVMNNKSGIEKLIERIKNYQQQSREIHACCEYTGVYYLPLASALHDSGVKISVINPLSIKLYAEYRLRRTKTDKQDAKLIADYCEKENPPLWKPLSEKRNTLKVLNRRVEQLNVLLNMESNRKDVSDTVIKSGIERIIDAIKEEIENCKTAIQNLIDSDEELSHNQKLLQTISGVGKSTAAWLLSVLVDIDKFENSKKLISYLGLSPVIKDSGTSVRQAKISKMGDKKVRKALYYPARVACLRSKLWRPWFEQKIKQGKHPKQIYILMMCKIVKYAYAVIKTGQPFDENRHKPA

SEQ ID NO: 317792 - protein, 340 aa, unidentified
MRELYAGSDLHGNNNLVGIIDGEGNKVFKKRLPNDPQLVREVFEPYKEEIVGIVVESTYNWYWMVDALMDEGYRVHLANPAAIQQYSGLKHADDKHDAFWLAEMLRLGILPEGYIYPKEERPLRDLLRKRGQLVRLRTSLILSLQNMLSRNLGVRVRVNDVKGIREDRVSGLLGGNEDLALAGRVSKETIDFLTHQIHQIEGVVEKRVRLKEAYRYLLTLPGVGKILSLTIMLETGPISRFATVGEYASYCRKVPSQWTSNGKKKGCGNSKNGNKYLAWAYSEASDFARRDYPEPRAYYQRKMQKTNAAVAHSALSHKLARAAYYVMRDQVPFRPEKLFR

SEQ ID NO: 317793 - protein, 340 aa, unidentified
MEKASMIGLDIAKTVFEVHGRSAAGEVVLRRSLKRGQVEKFFAKLPKATIGLEACGSAHYWARVLCQLGHEVRLMPPAYVKPYVKRNKSDAIDAEACWEAMSRPSMRFVQIKTVEQQAALSLHRSRDLLVRQRTQLGNALRSLLSEFGIVAAKGRAGLASLVDDLRAGTLELPQEAACAALTLADQRAALELSIKQLERRITAQAKADDRAALLQTAPGVGPLGAHAALATVPDPTVFKSGRAFAAWLGLTPRLDGTGGRIRTGHITRQGDQTLRRLLVLGATAWLRQVRAHPEKASPWLRGMLARRPFKVVATAQAARTARILWAMLTHNQPYRAPAIG

SEQ ID NO: 317794 - protein, 321 aa, unidentified
MNKDSKIHGVDISKDVFDVMCPNGDHHQFINAPKGFKQYLKLLGEEDLVVMEATGYYHYLLAEFLYDSGIKVSVVNPLSVKRFRQMQLAKIKTDKSDARAIRDYGRVNEVPLYDGKGALQAESLQLLALMDIYLKQRTQIKNKLHGEKVLGIPSNAVHRSLQRTLKDLDRELGLLNQRLLSLVKAAQQEQLTNLKSIPGLGDKTVALLIVLTEGFTKFENAGQLCNYAGITPTIRRSGSSVRGKSRISKVGNRKLRNLLFLCAFSACKHNKGCRDIYERITAKGKSKKLALIAVSNKLLKQAFAIAKSGLPYDENYVSKLN

SEQ ID NO: 317795 - protein, 424 aa, unidentified
MTENVEFNQIPVSCGLDVHKKTITACIIAANKDGKVEKFHRTFSTMTHDLEKLRDWIIYYGCLRVAMESTGPYWKPVYNILEEENIEVLLANARHVKNLPGRKTDMSDAEWLANLNRNGLIRGSFIPPRVIRELRDLCRLRSKTVEDRTRIKNRISQQLEDANIKIGSVASDLFGVSGKEMLKRIASGSYEPEEVAKLARRRLKNKHKELCQAAYGRVLNHHRTIISHLLKQLSSLDELIKELETIIDKKARPYKKQIELLDTIPGVDFNAAVAILAEVGADMSVFPTHKHISSWAGVCPGNNESAGKNYSGRVTKGNLNLKRVLCQSAWAASRTKKTYLARKYWSLKSKRGAKKAITAIAHKILIAVFHILKKMEPYRELSSEYLDKIKGKRTVSIMAQRLKILGYEVVPINSEPAACSLDSP

SEQ ID NO: 317796 - protein, 449 aa, unidentified
MHGAHIGGQRAGAFFKLVADLDPRRVLLVGIDVAKATWFVVVSDLTGAVVADGVRLVADRAGLAELERVIAELRWQLAAELVVVGIEAAGHQHQSLTAHLADRDGLHVRLLNPGAVAAIRKQQGNRRRKTDWLDAAAVCELLARGEGTLVHLDASMAASLRPLWSGRKDLVDTRSRLRQQAGALVDCLWPGFSAADKQAGVSPVLCDLFKTKAGRVIAGLLAEGWTPARFTTAPTTRLQAIFAARGCRLTRPLASHLRARAAGALPAHPAATAGKAAALAGMLGVLDGIDTEVERLEARMVPLLAATEGAKLTQIRGVGVVTASGFVAFVGRTDRWAEWSKVWRAAGLDPARSQSGAKDARLGISREGSAWGRRALLDLAAAVCRQPGRWGDGFRARTTQGRKPAKVALVATGNSIGRTCFALMRSGADFDPAWEAKRTRTPKVGDQAA

SEQ ID NO: 317797 - protein, 404 aa, unidentified
MEKAQVIGYGVFVGIDVGKSSNYVVALARDKEKPLVSREVPQDEAAIREVLDEASSHGRMLVTVDQCGAFGRLTVAVAKDMGFDVAHIPPRKFKQAADTYGEDKDDLLDAYIIADTACSAPRLVELVGDRPEVLAQIKVLSSARDDCVTERTRCYNRLHDLIHQVCPPLEAVFAKDKLHNDLEMRLLKQYGGPQGFRKAGKARCAKWAGNLKYHCTRGPERVEEVFEALSRQTVALPAAEVIEQQIKKLAKRVIELNEEEDSYNAQIEALSASVPEVGILRTMPGVGRVYGATIAAEIGDIARFKDSAHLATYAGLSPVRKKSGSSLDQKKKRKGGNRRLKNALIQSVDRARSCEDWAEEYYQRKRREGKKHKQALFALARRRVDAIYAMLSNGTFYEPRTKEA

SEQ ID NO: 317798 - protein, 385 aa, unidentified
MAPTRMPEAVIGLDVGKSSHWACVATRDGEVLLSAPVANREDDLDSLFGRFPDALVVVDQSRNIGALALARARAAGMSAAYLPGLAAHGAARLFAGDAKTDERDAMVIAKTALGIPDALLPVGDPGPTIAAARALAAQRNFLTCENTRNKNRLRSILLESCPAFEALVDLSDGCQLRLMASLGGAWSVADAGPRRAAALTRGAARGKIEALVRSTASSTRPDASVVAAEDRAVKLLARRISENSAEIEAITAEISALLEGDDTYRCLLTVPGIGPKTASELAISIDIEDFPSHDRLASYCGLAPRNRQSGTSISSVTASRQGNKRLKNLLIFSCNCLTRTEGRWGDYYTRCRERGMSHGKALKALARKRLKVIYAVMRDRVPYAA

SEQ ID NO: 317799 - protein, 391 aa, unidentified
MIYVGIDVSKDKHDCCILSSDGQVLLKPFSILNNLDGFNCLYSAICSYEENSDKIKVGLEATGHYSFNILGYLLDKNLNCFLFNPLHSNLFRKSLTLRKTKTDKVDSVIIAKMLLSEVDSKPYSKALYHNEQLKSLSRYRFSKVRERVILKQQLSRLVNILFPELEKLVPSIHLSSVYVLLEEFPSASLIASAHLTRITNLLSNSSKGHYKKNKAIEIRKAAVSSVGCVMPAKSLELKHTIHLIRILSEEINEIELHIQEILGKIQSPITSIPGLGFRMASVILSEIGDFSRFDSPDKILAFAGVSPSTYQSGKLDNAYAHMEKRGSRYLRYALYNAAIYVCNWDKTFANYLHKKRSEGKHYYVAISHVIKKLVRVIYHLQLTGDVYKTVV

SEQ ID NO: 317800 - protein, 321 aa, unidentified
MDILGIDISKDDFHVALLCEAGRSAKRSFPNAAKGFKQLEAWLKNRNVDLVHACMEATGPYWEALALHLHEGSHRVSVVNPSRTKAYGRSELLRTKNDTVDAALIARFCRAQSPSEWVPPTPEMRILQGLSRHLEHLKTTSAQEAARLKLPGLPDAVRTSIEGVVAALEAEIAHIEDEIRGHINRHPDLRRKQELLTSIPGIGDTTAFSILAEAPDLESFASAKAVAAYAGLSPAERQSGTSLRSRSHLCKTGNARLRKALFYPAMTAMRCNPALHAFAERLRAKGKAKMVVLAAVMRKLLVLAYGILKSRQAFDFTRQPT

SEQ ID NO: 317801 - protein, 344 aa, unidentified
MNYKLISIDLAKTVFQVAAFNPDNTIAFNRKINRPALLDTLRQCEPTLVVMEACYSANYWGLAIEKLGHTVKLIPARMVKAMLVGNKNDANDAVAIGETASRPKVSLLRPKTVEQQDIQSLLRIRERLVENRTANCNQLRGFLAEYGLIVAKTRRQLMLAIPLILEDADNELSTVARGFIQRLYEFQLYLNEQIDQVAQDILALAQAMPQYPLLLTIPGVGPIVASTLLASINEVNDFKNGRQLAAWLGLTPSQYSSGTTNRLGKITKRGNQTLRRLLIHGARTVMNWCDKKDDSLSQWLQRLKQRQHVCKVTVALANKMARMVFVVMSRGQVFDMNKACKVAA

SEQ ID NO: 317802 - protein, 469 aa, unidentified
MSSAGLQGILHKICPPKDQYVRKKTYWFFCDTVKVEGKHCCKKPAFSKAHGELQLAFYLCQYEQIDYCHLCNIRNGLNTDLSLAKKTKVKGKQLKIIIKYMETKESNPINFLYVGVDVHKDQHTAVATNCFGQALLEKEINNSKEEFEKLVKGVKTLAEAKNLKVIFGLEDTSAYGQRLARHLCQENFPVKVVSPVLVDRERRKLTHPEKSDSQDALGVAKALISKIGTLPNFSISKTNEITKELKDLVIDREFLVKEQTRIKNQLHRLFHKAYNSEYRLKFKNPFAVRALRYWLKNPVPAELKESLVLKNQIKRKVRRLKDIRKEVMEIEEEMNILLNQMNQKLETLNGCGLVSASSVLAEIKNIDRFQSSSSLAKYGGLCPKEKSSGKSIKHIKTKSGNRRLNKAIHRIALAQIGRQGNVYGKEYFKKKIAEGKNKAQALCCLKRRIINIIFAMLKHKTAYDYAARC

SEQ ID NO: 317803 - protein, 322 aa, unidentified
MGNITIGLDVGDRFSQICAVDQDGAVVREERVPTTRGALRERFPATAACRVIVEAGTHAGWISRELAALGHEVLVANSRKLRWLYQNEHKTDRVDATYLARVGRWDPTLLAPIRVRRAEADTALRLLRARVTLVRARTRFINHVRGAVKSLGCQLPRCDATSFARRAAASLPPDLHDALHPLLAQIAGLTQTIAQYDRQIEELATHGYPETARLRQVTGVGALTALAFVLTVDDPHRFVNGRAVGAYFGLCPRRADSGGQRPQLGITKCGDGLVRQLLVQAAHYILGPFGPDCRLRRWGQTGPRCSARLAPRAGAPGRRHTS

SEQ ID NO: 317804 - protein, 320 aa, unidentified
MSQNTTAIMNDQPTPVYAGLDIAKANLQLHLQSKCFDLPNTPAGHAQLSKRLAAIPGIHVICEATGGYERAVVAVLHAAALSVSVINPARVRQFARASGELAKTDPIDAAKLTAFGQAFAPAPTPARTATELKMAALVLRRGQLLELRVAEAQRADTCADADLRKLFTPWLAQMEKQIAKVEALIEDLLKAQASLADQVQRLDDIMGVGRLTAILVLATLPELGTLNRRQAAALAGLCPYNRDSGQWAGKRCISGGRAEVRRALYMAALSASRSNHLLKPFYDRLIAAGKPAKVALTAVMRKLIVLMNHLLKNPNFSLAH

SEQ ID NO: 317805 - protein, 386 aa, unidentified
MTHSTNILPRSVDYDQTLVLAIELSNKSWVLAAQVPGLSQTKAKRTIEPDKNDLLAAIDAYRIRAAAAGRSVKRVITSYEAGWCGFWLARWLMAHGIEVHVVQPSSVPVDRRMRRGKSDGIDAELLLRTLLAWLRGEPRVCSMVPIPDEADEDARRCVRERSELVSERVGLVNRIGAVLATLGTDDYNPLLQSRRRRLTELRTGLGDPIPPNALAKIERLLTRLELVLTQIAELELERDAVARTDAPDQAGKMIQQLISLRGIGVQSATVLVREAFVRRFANGKALGSYAGLTSTPYSSGGIDREQGIGKAGNRRLRTVMVELAWLWQRYQPGTAQVVWFRERVGSTGRRLRKVMVVALARKLLIALWRFVIDGLMPEGAVTKPSI

SEQ ID NO: 317806 - protein, 338 aa, unidentified
MTIVMGLDQHREQITFDALDVATGEVSRGRIRPADRAGVRRWLARWDGQEIEAALEATTGWRFLVEELRAVGAEVHLAEPAETRARRGPKRRAKTDRQDARHLRELLLAGRLPESWIPPEHLLELRSKVRLRHTLVDQRGEWQQRIQAQLFHHGVPRRRDLLVAERRAWLEGLELPDAARTQVAVALAIIDALDAQLAPLTAELRAFARRQPGCRALMAHYGIGPLTAVAIVAELGDCRRFGSSTRAVRYSGLDITVSETDDRRAPGHLSRQGPPTLRWALFEAAQTARRTGSPDRDYYQQAAERLGGNRACLAVARKLLRRSYHTLRELGEEALAPA

SEQ ID NO: 317807 - protein, 395 aa, unidentified
MSAEGEAIRSNDYRKDTTVKAPSTRPAAVLGLDVGKSSHWACLIDRGGEVLASAPVRNREGALDALFSSAPAGTLVVVDQFRNIGSLAVRRARAAGLAVAYLPGLAASRAAGLFAGEAKTDERDAEVIARTALGVPDSLSGVPGRGEALEAARALSSQRDHVVACATRDKNRLRAVLLESCPALEAAVDLSDRRWLELLAGFGGAWGIARSGAEGPQAEAAGEAAATSTAPPPALVEAENRQVRFLAARISEALDEAGALEAETAGLLEGDETYACLLTVPGIGPRTAAQLAVSVDIARFPDHDHLASYCGIAPRVRSSGTSVRSVRASRRGDARLKSLLIFSCNSLVRSSGRYGEYYRACRARGMGHGRALKAVARKRLRAIYAVMRDRVPYRE

SEQ ID NO: 317808 - protein, 337 aa, unidentified
MKVTLIGIDLAKTIFQVCGVNQAGKRVFNRQVRRARLMEFLLQYPDATMAMEACSGSNYWGRMLRQHGFKVMLIPPQHVKPFVKGNKNDRNDAFAITEAARRPDLKCVVPRTLAQTDMIQVHRVLDRMVRQRTALINQIRGFLNEYGLVVAHGKEKLLAAMPDLLEDAENGLTPPSRALYQEMYEQWRQANETISRIEKRLASQANTSEPAQRLMKLRGVAEKISTATIAHAGNGHGYQSGRHFSANLGLVPKEHSSGGQQKLGGITKRGNQYLRRLLIQGAWSVVRNADKNDDRLSRWARQLVERRGKHKAVVAVANKMARIMWSMLYHGTEYRAA

SEQ ID NO: 317809 - protein, 411 aa, unidentified
MQVVYKRCCGLDVHKETVVACVMIREGSQTQKEIRTFRTMTSALLALHDWLSAHRVTHVAMESTGVYWKPVFNLLEGSFEVLLVNAAHIKAVPGRKTDVKDSEWIADLLSHGLLKGSFIPPEPVRDLRDLTRYRKSLIDERTREINRLQKLLESANIKLSSVASDVLGVSGKAMLEALVSGSSDPQVLADLARGKLRKKLPLLREALYGRFRPHHQFLLGQILSHLGFLDEAIEQMSKEVENRIAPFSKPIDLLKTIPGVDQKTAELIVAEIGIDMSRFPTHRHLASWAGLCPGNNESAGKRKSGKIRKGDRWLKRGLTESSWAVGRTHNTYLSALYHRMARRRGKKKAVVAVAHTMLVIIYHMLKHELPYHELGADYFDRLNVTYIKNHFTKRLEGLGYKVTLEPIPAAA

SEQ ID NO: 317810 - protein, 342 aa, unidentified
MNATTIGLDIAKMVFQVHGVNRAGKTVLRKRLNRPQVLVFFANLPPAVIGLEACAGAHYWARELQKQGHDARLIAPQFVKPYVKGNKNDANDAEAICEAVGRPSMRFVPLKSPEQQDIQMLHRVRQNLVKQRTAAANQTRGLLGEYGLVVAQGLSQLRRRLPEILEDAENGLSPLARRVFADSYDRLVDLDRQIKAYQNQIETLCQQSPACQKLLAIPGIGPITATALVAALGDGQAFENGRQVAAWMGIVPRQDSSGGKPRLLGISKRGDTYLRTLLIHGARAVVRTAGRKDDAQSRWINALVQRRNANIAAVAVANKTARTIWAMLTRGEDYRAPLTQVA

SEQ ID NO: 317811 - protein, 315 aa, unidentified
MSDVPCFIGIDVAKAQLDIALRPSGERWAVPNDVSGVTMLVDQLQALHPVLIVLEATGGLERLVTSALATAGLPVVVVNPRQARDFARATGQLAKTDALDARALAHFADVIRPTPRPLPDAQTQELRGLLGRRQQLIVMRTAEQNRLAGTSGRLQTDIAAHITWLNERLATLDDALETVLRGSPLWRENDDLLQSAPGIGPVCARTLLLELPELGTLTRQQIAALVGVAPLNCDSGTLRGRRIIWGGRAHVRTVLYMGTLVATRYNPRIKAFYERLLAAGKVKKVALTACMHKFLTILNAMLKHRTPWQPQEVQS

SEQ ID NO: 317812 - protein, 339 aa, unidentified
MQAVAYVGIDLSKSVFQLHGVDRHGHALLRRRLRRGALAAFMAGLPGCVVGLEACGGARYWARVFGRQGHMVRLIAPQFVKPYVKGNKNDLNDAEAICEAVSRPPMRFVPSKSIEQQDVQALHRVRSRLIGARTALVNQIRGLLAEYGVVLAKCIGQVRRGLPGVIEDAQAELSVAGRQLFRSLYEHLADLDRRVTELDDAVQRLYRSNPVCQRVAAVEGVGPLVATAIVSAIGDGRAFKNGRQLSAWLGLVPKQDSSGGKTRLLGISKRGDPYLRTLLVHGARSVVYRSKAKTDSRSQWIADKQRRLGTNRACVALANKNARIIWSLVANDCTYRRAA

SEQ ID NO: 317813 - protein, 409 aa, unidentified
MKRYYIGVDWGDRLHQVYVGDEEGRKVRDIKVPESVEGLAEMGRWLDEQRAEGAELWAAIEKPAGRIVNFLLDHGVEVYPVNPKAVDRVRDRYRMSGSKSDAFDAYVLAEFLRTDQAHLKALQPSSEKAQELKMLCRDQRRVGRHKARLLNQLTITLKEYYARPLDAFGDLDTELALDFLTRYPTPAHLSALKRKEFNRFATQEHHLSKQRCEELWEKLSPAQLKVPEHVVRAKAQLVEVLIDQLRAAIKAVKSYNHKVESFFASSPAAPIAKTLPGGNSGTLVAAIWAELGDGAGRWESFRHLQAEAGVVPVTKASGKSRVVHFRFACNKHLRYLLYWFSFVSLNHSEWAKIYYRQQRAQGHNHPQALRALGAKWLKIIFVMWRDHKAYDEKLHLANIALQKMRQAAA

SEQ ID NO: 317814 - protein, 340 aa, unidentified
MGDITTIGLDLAKNVFQVHAVDEAGNVVVRKRLRRGQVLGFFAGIPSCLVGLEACATAHHWARELIALGHEARLMPPNYVKAYVKRNKHDVADAEAICDAVRRPSMRFVPLKTAEQQSALMMHRARDLLIRQRTMLVNALRGHLAEFGLIEAQGLHKVARLITIVMDETDGRVPDIARQVLKVIVNQIKDIQTGIAELETQILAWHKNNPVSQRLATIPGIGPIIATAIAATVADPNTFRSGREFAAWLGLVPRQSSTGGKARLGGISKRGDSYLRRLLVNSAHTVLLCSKAAKTDPWLTSLLSRKPRLVAAVALANKTSRMAWAIMSRQDTYRHAATPA

SEQ ID NO: 317815 - protein, 407 aa, unidentified
MKLTCGVDWAEAHHDLALVDEDGALVARSRIDPGATGFNNLLALIAQHGGSVEDTPIALETDKNLLVVALVEAGFTVYPINPRAVARYRERYGQAGGKSDPGDAAVLAHILRTDRHMHRPLPAVSEQGRAVKALARQHQEAIWALHQTVSRLRSVLLEFYPQALQAFPNLTHKAALSVLAAAPTPAAGQQLTRRRVVTLLQRSGRGNHPALVEQILTDLHTPALGQPPRVEQSLGHTVAGLLGIVIAMQRAVDDLETELAREFDQHPQAAILRSAPGLGPILAARVLAEIGDDPTRFTDPNSLRAFSGTAPVTIASGRSHYVKARKVRNKRLADACHWWAFATLTKSAGAREHYDKRRAAGDQHNAALRNLANKLLGRLWWCLANNQPWDDNAAWPHRTEHPNPVAA

SEQ ID NO: 317816 - protein, 400 aa, unidentified
MKLKELSGGIDIGSEFHHAVVIDEGGKILYDKRVLHRFSEFHKAVTELKETERLTGGRIAFGLEGKNGYGAPFDRILGENGFSLYNIDNLKLKQFRNTFGAEWKTDRRDAKMLAKLMSLKAQLNGERDKVFIPIKKTPLLHEKLKILSRHQQTLIDEKKRVCNRLRKKLLEICPGILDIFGEVEAKTLLRILIRYPNFSRYRKLTKEKLIRIKGIGKVSAGKIINQLQGLKYVRELVEVYATIIQSQSKRILELKEETELLDKRLDKLGERSKEVQRLRSIPGVATKLSSRLVGEIGDIRRFKDSNKLAIYFGVGCINNDSGKRKMAKAVFKANKICKSTMIELAGCTIRCVSESRKYYSKKRSEGKKHNHALRCLARQMTKVIFKLLIEDRDYYVKDES

SEQ ID NO: 317817 - protein, 407 aa, unidentified
MDVIYPRCAGLDVHKQTVVACVRIAGSGPLVQEVRTFETTTSGLLELCDWLQSFGVQHVAMEATGVYWKPVWHVLEEQFELVLANAAHVKNVPGRKTDVNDAMWLADLLAHGLIRASFVPPAAVQDLRSLTRTRKQFVGERSSHVLRIDKLLEDANLKLGVVLTDIMGKSGRAVLQAIIDGESDPQRLAAHVSVRVKASRAEVLEALRGRLRAHHRFMLKLHLDHIDALDKAITEIEAEVGRGLQPFRQAAKLLSTMPGLSDTSANVIVSEIGVDMSRFATPGHLLSWACMCPRNDESAGKRRSTRLRRGGKWLKTTLVQAAWAAIKVKGGYLQAQFHRLRARRGAKKAIIGVAASMLTAAWHMLRDGTEWHDLGAAHFDRAAAHMTAQRLIRRLQQIGYTVEATPP

SEQ ID NO: 317818 - protein, 360 aa, unidentified
MEVGQTVADHGVVGGVDTHKDLHVAAVVDELDRVLESRCFATTRHGYQQMLTWMRSFGQLRRIGVEATGTYGAGLLRYMQNAGVEVLEVTTPDTHDRRKRGKNDDLDAQNAAHAAFAGRRTVTPKSRDGMVESLRVLKACRKTAVAARRVALQMIHNPIVCAPDELRETLRRMTRMQLIRTLAAWRPDLTDYRSVVSAYRITLKSLGRRYLELHDEIADLDTMIVAIVDELAPALVARNSIGHGSAAQLLVTAGDNAERLQSEASFAALCGASPVPASSGKTTRHRLNRGGDRAANSALHIIAIGRLRTDPRTKAYIAKRVAEGHSKLEAIRCLKRYIAREVFSLIRQRKREINQGRNAA

SEQ ID NO: 317819 - protein, 464 aa, unidentified
MGSHKPRSKQQGSGGKKVNWEKLEIVHPEAAGIDVGGSEHWVAINPERDPEPVRRFGCFTSDLYAMGQWLMEKGVRSVAMQSTGVYWMPLFEVLQQQGLEVYLVNAQHTKNVPGRKSDIAECQWLLKLHAFGLLRNSFQPDDAMRTARTLWRHRNHLVGEASSCIQRMQKVLTEMNIQLSQVLSDLSGVSGMTILGAILQGERDGWKLAALAQPEVKASQQEIAKSLQGNWREELLFVLGQHVELYRLYKEKISVCDLQLRRQLDSMESKIDLQRQPLSPRPKGKKKSRNAPAFDLRSELYRLTGIDWTRIDGIDVLTAQTVIAEAGVDLNAFLSERHFTSWLGLCPTNEQSGGKILNRRTRKVVNRATVAFRTAASTLLRSQSYLGAQYRRLRTRLGAPKAITAMARKLACLFYRLIKHGQQYVDKGIEFYEAKYRQQQIQSLAKRAHKLGIQILIPETVSMG

SEQ ID NO: 317820 - protein, 340 aa, unidentified
MSEITTIGLDLAKNIFQVHGVDETGIAVVVKRLRRSQVIGFFAGLPPCLIGMEACATAHHWARELTGLGHAVRLMPPQYVKAYVKRNKNDAADAAAICEAVKRPSMRFVPVKTIEQQSALLMHRARDLLIRQRTMLVNALRGHMAEFGLVEAQGLHKVAGLIAIVMDERDGRIPDMARQALKIITGQISDLQVRISALEAQVLAWHKNNPVSQRLATIPGIGPIIATAIAATVADAGVFRSGREFAAWLGLVPRQSSTGGKARLGGISKRGDSYLRRLLVNSAHTVLLCSKAAKVDPWIVSLRGRKPRLVVAVALANKMARVTWAIMSRHDTYRRTVVAA

SEQ ID NO: 317821 - protein, 349 aa, unidentified
MEAYDGPQFVGMDLHRRRSVLVRMTADGQKLETTRITNSPAELRRVIARAGRRPRVVLEATYGWYWAADTLAAAGAQVHLAHPLGVKAFTYRRVKNDERDAADLADLLRMGRLPEAWIAPAEIRELRELTRYRLKLVQRRASYKDQVHAVLAKLGIPVTCTDIFGVWGNTWLDGLALPQPYAGKVASLRMLISQLGAEIALLDAVIADLLACHDGCHAIQALPGIGPVLAAVIVAEIGDISRFSGPGKLCCWAGLTPRHRESDAKVARGHITKQGSPILRWAVVEAIQHQPATSPVRAVKDRIIARRGKEAKNIAKTAAARHLLTAVFYTMRDGQARSLAARTAAQHAA

SEQ ID NO: 317822 - protein, 451 aa, unidentified
MEENKIAMDVVNTNAAGIDIGSRSHWVAIGQGKNDYREYGVFNEDLYKIVAWLRESGVRTVAMESTGTYWQSLYAVLMSEGFHVILCNGKFTKNIKGKKTDIQDCQWIQKLHSLGLLSGSFLPDEKTEQLRTFCRHRSNLLNSAASASKKMQKYLRLLNFRLDVVVNDICGLTGLSIIKAICNGETNPERLASLRHGNCHKSEAEIAKALQTNGRKDYLFALKQELEMYEVFQSKITQCDIEIEKMLSSIIDSDDNKKQHYLDSKPHKKINKNTPKNIDLNLKSYQYFEGIDLLEIEGMSYSTVLAIMSEVGLNGIKRFPTAKHFASWLRIAPNNKVSGGKVLSSKVPRGSNRLKIALRNAANAIGNLKESTPLRDFFQRINFRKGRVSAISATARKLAVIIWNMINKNIPYHNPHEYLYLDQKRKLGLVKRIQKQITKFDLKPEELGFCN

SEQ ID NO: 317823 - protein, 342 aa, unidentified
MNKVNTIGVDLAKNVIQVSILSPSNKELTNKELPRTKFAEFLAKQPVSLVAFEACSTAHHWARLARSYGHRVKILPAKVVSTFRQGHKTDKNDALAVAEAANRPNVKEAPLKELEQQGMQSIQRSRELLVQNKTCLSNHIRGLLMEFGVFIPKGFASLFKNIPDILEDGENDVPDMFRATLNLMYQRLLDLRDDVALLDEQVKQLVKNNETCSNLTNMEGVGPISAILLFSTLGTGEAFKNGREFSAYIGLTPKQHSSGGKASLMGISKFVANKRLRSVLIQGARSYVHRMKSVTTKKDEWLVKLIERAGYGKAAVALANKNVRTAWALLTQGTKYRKELIA

SEQ ID NO: 317824 - protein, 349 aa, unidentified
MRFYTKQHRHYCGIDLHARTMYVCILDSAGQVLVHQNLPAGPEAFLETIAPYREDLVVAAECIFTWYWLADLCAAEGIDFVLGHALYMKAIHGGKAKNDRIDALKIATLLRGGMLPQAYVYPAGMRATRDLLRRRLHIVRKRGQLLAHIQMTSHQYNLPALGKRIAYPSNREGVAEHFEDRVVRKSIAIDLALLERYDTLVTDLESYLVRQAKQHDPQAFQLLRSIPGIGKVLALTILYEIHDVRRFDRVQEFASYARLVKCAKESAGKKHGTSGAKMGNVHLKWAFSEAAVLFVRHSEPGKKLLARLEKRFGKGKALSILAHKLGRAAYYILLRGKAFEIERFAATAS

SEQ ID NO: 317825 - protein, 312 aa, unidentified
MEKLSCGGIDVSKDRLDVVVLPEGWFFSVSNDTAGWAELVARLRPLAVSAIGLEPSGGYERGIIRALLAAGLSVRRINPNKLRQFARARGVLAKNDRLDARLIAEYVAIMPTRVVQRDAAVERLAEIVTMRRQLCDEHIAAENQAAHLEDAMLRRLSKRRQTRLEADIRLLDKRLAEMVAANVALAQRYELLTSMPGVGPVLAFTLIALLPELGKMTRKQIAALVGLAPYDFDSGKLKGHRSIYGGRMPVRNVLYMAALSASRYSPALKAFHNRLADADKKSKVIIVAVMRKMITTLNAMLRDNTAWQLKST

SEQ ID NO: 317826 - protein, 359 aa, unidentified
MMLYLAIDQHRKQLTVCVRNEEGDVILRRQVSTEWGRVRAFFAGMSEEAGGNGFVAILEVCGFNDWLVKLLAEYDCRELIVVQPEKRSKKKTDRRDAGALCEILWLNRQRLLAGKRVQGVRRVQLPSQEDGDARQVTELRQRLGQLRTRTINRVKHLLRKHNLEQGYPTKGLDTIRGRKWLAELELGPIDRLEMDLLLKQWSLWEEQIKQLQAEIGRRQAEHKTAAVLATIPGCAAYSSLALASRIGDIKRFARPGSLANYCGLTPGCRNSGEATDRLGSITKQGSAMARFILGQLVLHVLRRDQAMKAWYQRIKKRRGSKIARVAVMRRLATIIWHMVKYHEPYVIGGPPPRKLRPAT

SEQ ID NO: 317827 - protein, 345 aa, unidentified
MQPMYYIGLDVHKRTISYCVKDGGGVIHAQGTIPATRFDLDRWMKTLPQPWTAAMEATIFTGWIYDHLKPHAAALKVAHPLMLRAIAAAKKKNDRIDAHKIADCLRCDFLPECYMASTEIRERRRTLRYRNLLVHQAVQLKNKISGLLMEAGVSYNKQKLHKVGYFKELLATNPDIHEGLRPLLRLCRETLVRLQKTESALVRSLQRDSLLAERVQRLMTIPAVGPITALTWVLEVGDVKRFSSIKKAISYCGLCGAEKSSAATIKRTPISKQRNKHLQSVLVEAAKMAPRLSPELALIYDREKQKGNANRATLAVARKLVAYLVAIDRSQRDFLVVEKENCAAA

SEQ ID NO: 317828 - protein, 341 aa, unidentified
MEEYIGLDVSMKETAVAIRRAGERIWRGKCASDPSIIAELIRKRAPSVKRVVFETGPLSVWFYHSLRTEGLPAICIDARHAKAALDMATNKTDANDADGLAQLAEVGFFREVRVKGFDSMLTRTLVAARTRLVRITTELSNQIRGVMKTFGLLVPAGKGSTFEKNVRILLADQDRLASIVLPMLEAWRGIRVRAAELGRQLMRDARQSRACRILMSIPGIGAITATSFTTAIEEPDNFRKSRSVGAWIGLTTRRYQSGEVDYDGHISRRGDRPLRGLLYEAAAVILTRSSTHSTLRTWGLQLRERIGFKRAAVAVARKLAVIMHTMLKTGELFNPNAGAAA

SEQ ID NO: 317829 - protein, 397 aa, unidentified
MFVGVDWGEYHHQLCVVDGEGRVLEQRKVTHDVGGLRELTDRLGRHDHVVGIAIERSEGLLIETLQANGHRLFCVSPKLSARARERYRLAPTKSDTFDAFVLADSLRHQHEQWRPLAVPSPLLAELRALTRDRERLVWNQRDVENQLRAIVLAYHPAVLHLFSSLDRDITLAFLRDYPTPEHAGRVGPARMAAFCARHGYSGRTAPDVLVERLRPHLLAAASGTTAGKAFTALLFVDQLELLNNQVRAISKRIRQRLAAHPDAQIFLSFPGMGDVTAATMLAEMGEDRARFPTPDVLLAETGTAPVTRSSGRTRAVRFRYAANKRMRHAIDWWAFVAVREDAWAKAAYDQARARGQMHNRALRGVGARWTRILWRCWTDHTPYDPARHTGRTPTEAA

SEQ ID NO: 317830 - protein, 326 aa, unidentified
MHYIGIDVSKAKLDCCWLRDVEKNKFKTKVFKNSATDCNALNTWLKAQTKAEPDEITVLMEATGIYHENLAYYLFEHGYQVCVVNPARTKEFASSLGNTHKTDTKDSQILALYCHRMHPELWQPERPEIRELKALLARLEALETDLNRETNRLEKAEFNCSSERVIESLNLMIEQLKAEKKRLEDDIDNHIGRYPQLRKDRQLMESIPGVGPIISRLMLSILHSRSFRTAGQVAAFLGLVPRIQQSGQWKGRSRLSKQGPANVRAKLYMAAVVCLRYNPDIQAQCQRLMENGKSKMQALGAGMRKLVQICFGVVKHQSEYRPQVVS

SEQ ID NO: 317831 - protein, 342 aa, unidentified
MSTIQTIGVDLAKNVFSIHGVDAYGKCVLRKTVKRNKLLDTFAKLPPCLIGMEACSGAHHWARELLKLGHNPKIMASKFVIPYRQNEKNDANDAEAICEAVSRPKTRFVSIKSEEQQAVLCLHRIRQGLIKTRTATINQLRGLLSEFGIVMPQGRYSAQNTIGSVLEDTENGLPILARELLQDLSNKIQHLNLEVLHYDRRVSALVREMASAKALMDIPGVGEHSASAIVATVNDAKQFGSSRQFAAWIGLVPRQYSTGGHVYLGRISKRGEKHIRTLLIHGARAVIARCKEKTDRNSIWLNQLVERRGYKRAAVALAAKNARIIWALLTTGKEYKINYVNG

SEQ ID NO: 317832 - protein, 487 aa, unidentified
MNSIFRKRNPDVQKLFDSAGRPEKVMCIPFDYAKKTHTAMVCNGRGDCLRGAFNVENNRKGIDYLLGIVKGLCRKHTINITHVFFGGEDGGAYSFNFIHALVSRGFLVLGINSQQAKKERESTTASSDLIDTVGVAGMMLKMRGRTIGEATAQVHSIKRLRRQRGALLKAHSACAHRVYRVVDELFPGFLDVELSGVMPFGKASLWLMDENFSAASILARQRPALVRHLRERQLRDPEGAADKLKELAQIALPPPECMIPALQRSLHEEMAVYGLLDSSMNSLDTDIAKLLAHTPGAMLTTIPGIGLSWAPGLYAELGDPLRRRNVHSMAALGGIVPRSKQTGGPEKPAVTGHRGKNCSAFLKHILMSGAVSISQYGHPEMRQAYQTDKDMGRDARARLAQRLLRASLYLIDNQSFFLPPSLHRGATRDQLREYYAQAWPKVLIKWRDSGAIKDAVAEGSPLRRWRDMAQELYGLELDLTSPQTGRK

SEQ ID NO: 317833 - protein, 349 aa, unidentified
MSEVTRVGVDLAKQVIQVHAVDAGGAVVCRRALKRGSFLDWCAKLPSGCLVAMEACSGAHHWARQLAKLALKVRLIAPHLVAPYRMQGRTGKNDANDAAAVCESASRPQMHFVPVKTVEQQGMLAVHVTRDGWEKDRTACINRIRALVGEFGMVIAQGPHKLRLELAELIEDASNEIPGVARLAIQRLMQQWRELDEDIGWCDQQIARHARDDPRARRAMTLLGIGPLGASATVATVSDFRQFRSGAQFACWLGITPSQHSSGGKSRLGGITKHGDPYLRMLLVQGAKAAILCSKPRDERVWLWAKQLSERAGWQKAAVALAAKNARILWAMFTRDEDFKPNHLSLKPA

SEQ ID NO: 317834 - protein, 341 aa, unidentified
MEKATIIGVDLAKHVFQVHGAGADGSVAFRKKISRVKLLPFLSSQPRCVVAMEACAGAHGWARDIQAQGHEVRLIAPANVKPFVKRQKNDTADAEAITEAAGRPTMRFVAVKSADKQASGMVFKTRDLLVRQRTQTINALRGHLTEHGIIAPQGVFHIGRLAAEVENVNSHLPVIVTELCTLLLRHIATLDEQIASLDRRIRDRAREDETARRLMSIPGVGPVCATALEALAPPPETFARGRDFAAWLGLTPRQNSSGGKVRLGRISRMGQRDLRRLLIIGATAVVRWAARRGAPAGSWLAGMMARKPRMLVAVALANKIARIAWALMAKGGIYRSLAAAA

SEQ ID NO: 317835 - protein, 371 aa, unidentified
MANHTPESHPAPEPGGVVAGVDTHRDFHWAAARDALGRVLGTRRFPATRAGYQALLAWLRGFGPIAAIGVEGTGSYGAGLTRYLLAENVHVVEVTRPNRQKRRQKGKTDPLDALNAAAAVQSGDATAAPKVRTGPIESVRVLRNTRDTLVKARTAAWNTLRATLVTAPDDLRERLQDLAPAALLPACQDLETAPAATGADLARALLDSALGTRIALHALAAAIHRHNQALAALDTQLAALTALIAPRTLARHGLGPDTTGQLLVTAGDNPDRLRSEPAFAMLAGTAPQQASSGLTDRHRLNRGGDRHANAALYRIVLTRMKSHPPTRDYVATHRTPNRSNGKHVMSFPPFGGHLRCGVSGLGLTGCAGLRR

SEQ ID NO: 317836 - protein, 447 aa, unidentified
MLSLEDWSISTVECLRVEKFRQEVCLLAIGIDWAEDFHLVALGRPHEGIFEVLRVEHRPDAIERLVARVSELEPDPEEVRVVVETRHGLLVETLLDAGYAVVPVNPDLIARRRGPARKKDDTEDARIACLLALDRFTPLNPLIPHGELANELRAIARDDLRASRDQRRLLNRLRMDLLSTFPAALTLAGEDLGAPTMLRLLERWPTLEQLASATRDEIVTFARAGRHGWPERFADEVAAALAASHFVARPSLARAKEDSIRLTVAQLLLIHTQRKAWERRMGELLLGAPRQGRAKQPNPEEAGERLPGGEIYLSFPGLGDRLAARVAGEIGDHPQQFSSPNSLQCYAGKAPVTRRSGKSEFVVAHRLACNRYLADAVQQWAFCSLRRSGWARDFYQAKTALGKTHHAALRALGNRWLEVLWHCLMKNVPYSETIHVANRNRALGRAA

SEQ ID NO: 317837 - protein, 343 aa, unidentified
MDHFAGLDVSVKETSVCIVDDTGRIAREVKVASEPDSLLQVLTNPAYHFKRIGLEAGRLSQWLFSTLAEAGLPVICVETRHMRAALKAQVNKTDRNDARGIAQMMRAGLYRPVHVKTLRSQKLRMLLTHRKLLQSKAIAIENDLRATLRNFGLKVGMVGTVKFETRIKELVDNLPELAVLVEPLLIVRRVLREQIGILHRRLLAVVRDDDVCRRLMTVPGVGPVVALTYRATVDVPARFRNSKAVGAVFGLTPSRYQSGESDRTGGISRCGDEMMRAMLYEAAQILLVRSAKWSWLKAWAMKIARHRGLKKAIVALARRLAVIMHRIGVDGTEFRWTREVAAT

SEQ ID NO: 317838 - protein, 390 aa, unidentified
MIYVGVDIAKLNHFASAISSDGEVLIEPFKFTNDADGFQMLVSKLISLNAEPDSIIIGLESTAHYGDNLVRYLVAENFQVCVLNPIKTSTMRKNNIRKTKTDKVDTYIIAKTLMMQGSYRFYTFYDLNLMDLKAMGRFYQKTIKQRTRLKIQLTAYVYEVFPELQYFFKSGLHQTSVYALLKEAPTPETIASMHMTHLASLLMKNSHGHFTRDQAKELRVLARKSVGTSDSALSIQITHSIAQIELLDSQLNRIEEEMTDIMKFNDSVIMTIPGIGYINGGMILGEIGNIHRFSSPCKLLAFAGLDPSVYQSGNFQARRTKMSKRGSKVLRYALINAAHNVVKNNATFKAYYDVKMAEGRTHYNALGHCAGKLVRVIWKMMTNDLEFNLH

SEQ ID NO: 317839 - protein, 353 aa, unidentified
MELDKYIGIDAHSSTLVVNARDAFGKVILQSTVATNAEAIVQCIGGLRGRLHVTFEEGTHAQWLYDILRRRVDDVLVCDARESRLLQDGNHADRIDASKMSHLLRLGALKPVYHERQGTAALKELVRSYDGLVEDSIRAMNRIKAIYRSRAIPTPGQSVYRPNQRESFMEQLKEAGALKRVGLLYEELDTLNLLRHQAEKFMVTEARRHPAYGLLRSIPQLGPVRVARLISIVDTPHRFPNKAAFWNYCGFAVVLHSSGEHRFIGDQLVRSPKAVTTRGLNKDHNPAMKEIFKGAAMKARERGAFTAYYQDLVNRGLKSELATITLARKISAITLAVWKKGERFDPKKLTQTT

SEQ ID NO: 317840 - protein, 342 aa, unidentified
MDHYAGIDVSLECSSVCVVDASGKIARESKVASEPEALIAYFGSLRLSVVRIGLEAGPLSQWLYAAMRQAGLAVELLETRHVRTALETMPVKSDRNDARGIAQLIRLGWFRPVHCKSIGAQETRAVLTARKLVQSKLLDVENSVRGILRGFGLKVGHTTNRSFAGRVEDLVVNHASLHMIAAALLSVHAVLLRELKAFDKRVRSMARVDVKAKLLMSAPAVGPIVALTYASAIDDPGRFTSSRRVGAHFGLTPKKYQSGETDYTGRISKIGDATVRTALYEAAHIMLTKPIKGCAPLKSWAMRIARRSGMKKAKVALARKLAVILHRMLANATPFNAAKAAA

SEQ ID NO: 317841 - protein, 400 aa, unidentified
MELVERAWAGIDAGKGHHHVVVIDGEGRRMLSRRVANDEPDLETLIAAIVDCATEVHWTIDLADGPAALVLALLLGRGQRVWYLPGVAVNRASDGYRGEGKTDAKDAAVIADQGRMRQDLRELRLDDPLIAELRMLTGHRADIAADRTRAINRLRIQLLGVSPALERALDFTNRGPLVLISHFQTPRQLAAAGQSGVYRCLRNQKVRHADRLAATAIRAAATQHTSVVSEATAAELIARLAQAVLDLDRQLAELDKQIFLRFEAHRQANVIASMVGIGALLGAEFLAATGGSLDGFASADHLAGYAGLAPAPRDSGRRSGNLHRPKRYNRQLQRVFYTSALISIQTSTASRAFYDRKRAEGKRHSQAVLALARRRVNVLWAMIRDHSLYDDRRSPSTLAA

SEQ ID NO: 317842 - protein, 343 aa, unidentified
MKLTRVGVDLAKNVFQLHGVDRAERSVWCKRLKRNRWINEIEQNVEPGVEIGMEACGGAHHWARLLQSKGYRVRLIAPQFVRPYVKSNKTDANDAQAVCEAMSRPSMRYVAVKSIEQQDIQAVHRVRAGLIRDRGAKANQLRGLAYEYGLVAPRQIAALRLAVLAWLEDASNGLTVRLRALLCGLYADLRALDERVRELDKEIRAIGRENEAVGRVQQLRGIGPLIASALVAMIGDARQFKNGRHVAVALGLTPRQHSSGSKERVLGISKRGDSYVRTLLIHGARSALRTAAGKNDRLSRWALALAKRSHVNVATTALANKMARVAWAMLKHGTVYEPNGLVA

SEQ ID NO: 317843 - protein, 452 aa, unidentified
MEVIYERCAGLDVHKKTVVACRVVSQGSGRKEQETRTFGTVTAELLEMVDWLTEWECTHVAMESTGEYWKPVYNLLEGQVEILLVNAGHIKAVPGRKTDVGDAEWIADLLRHGLLRASFVPPRPQRELRDLTRQRSNLVRERASVMNRLQKVLEAANIKLASVTKTGSVSAREMLEAMVAGESDPVALAGMARGRLRAKRSQLEQALTGRVSAHHRFLLESHLQHIDFLGKQIERYSAEIAARMEQNDLASVRPLNGPGGTAPGPDKVPHQPEAPEGRENTLSAVQAVALLDTIPGIDRWQAEVILAEIGLDMGRFPTAAHLASWAGVAPGNNESAGKRRSGKPRPGNPTLSKTLVLAANAAARGKNTYLAAQYSRLAARRGKKKAIVAVAHSILVIVYHLLSRQEPYQDLGGNYFDERKRESVTNRLVRRLEKLGYHVALASKPASGTIAA

SEQ ID NO: 317844 - protein, 361 aa, unidentified
MAKVRSWAGLDVHARSVLAVTLDAASGEIRRQRLAAETGKVVEFLAALPGPTRVAYEAGPTGYGLARALEAAGIECVVAAPGKIERPAQDKVKTDQRDAERVLRLLMINALCPVRVPTVEEEAIRDLVRAREDVRGDLMRARQRLSKLLLRHGIVYEDTSSTWTARHRAWLRSQDLGGGAQATLLDYLGAVDTLEHRRGQLESTIAELVPASPYAHTVARLRCLRGIDTLSAVGLAAELGDLRRFDRPGKLMSYVGLVPSECSSGESRRQGKITKTGSKHARRLLVEAAWHYRKTPARGVTLARRQDGQPATVITISWQAQQRLHRVWRRLAEQRGKRSTIVAVAVARELAGFCWALARAD

SEQ ID NO: 317845 - protein, 407 aa, unidentified
MIKSSLAQEQIIVGVDTHKDIHVAVAIDDHGQLLGQCQVATTQRGCRTLHEWALGLAPQARYGVEGTGSCGAGLARFLAAEGASVTEIRGPNRKLRRDQGKSDIIDAEAAARAVLAGTSKVVPKAGNDWVEQLRMLRLARRSAVQARTQAINQMHAVVVGASPGLHDALVQLSRVELIRCARRFRIGRLDTTASTTRWTLRLLALRHEALTAEINAIDQVIVPLLANHATTLLELRGVGPEVAGALLVVAGDNPQRLRSEASFAALCGVTPLPASSGKTTRHRLNRGGDRRGNTALWRIAMTRLNCDPRTRDYVQRRTTEGLSKREILRCLKRYIAREVFRTPTRPEAIPCGADLHDARIAAGFNLNEVAAVLRVDPTRVSRLERALDFDRDLANRYEAWLTAQNAA

SEQ ID NO: 317846 - protein, 312 aa, unidentified
MNKNVSYFGVDISKGRLDIASSREGNEWSLPNGPVGWRKLIKLLEQGRREVVVVCEASGGYERGVIEVLQEAGIGVALCNARQVRDYARACGLLAKTDRIDARVLARYGMHFNPALLPVVKPEQKHLRELLLRHRQLTLARVSEVNQAQHLQAPVLRRLSRAHLRLLERQLAQIDALIAKQLLTHHRAATAALTAVAGIGQHSAALLLAELPELGRATRGQIAALVGVAPFNHDSGAWRGTRHIRGGRTHLRRGLWMTTLAAVRHHPPLRQFYQRLRNNGKPAKVALIAAMRKLLLILNAILRPLQQQTSVT

SEQ ID NO: 317847 - protein, 316 aa, unidentified
MEPRQTYVGIDVAKAKLDVASYPPGVPATQRNTEDGIAAVVRAVHALAPALIVLEATGGYELPLVRALVEAALPVIVVNPRQVRDFAKATGQLAKTDTIDAQVLAVFAARVQPTLRPQPSPATHELAALLARRRQLVEMVTAEKHRLGHAPPAIRAGIQAHLEWLTQQLTTLDEELTQRIRQSPLWKEQEDVLQSVPGVGPVMSRTMLADLPELGTLTRRQIAALVGVAPLNRDSGTWRGARTCWGGRAPVRTALYMATLVATRCNPVIRHTYQQLCARGKKRKVASVACMRKLLTILNAMLKHRTSWQPHVHQTS

SEQ ID NO: 317848 - protein, 377 aa, unidentified
MGTQTIIPRDYDVFAGLDVDKKSISVTFTDHQGLLKSLTMPHNVEYLVNHVRKHYGDKKVAFGYEAGPTGYGLYDGLEGHAYKCVIASPSMIPKAPGQRVKTNRLDSVGISENLRGGQLKAIHVPTPLYRELRHLTQLRDTLVSEMVGMKQRIKSLLLLEGLGFPPAPAGSQWSFLVKAKLRKLPCSSVVRFKLDQLLDSLEFDEKQVLKATREIRRFCQTDPELSQCINYLQSLPGIGWIVSSQLMARIGDWRQIENIRQLPAFLGLVPTESSTGERTQRGSITHTGDGRLRSKLIQASWSAIRQDDELREFFRSVAKRHPRHCAARVAIVAVAHKLCVRAAVVLMKQRPYEVRQQVQSAPLTQEETVPQGTTRRR

SEQ ID NO: 317849 - protein, 357 aa, unidentified
MTQTTVAPAGRIVTVGVDTHSDIHVAVALDQLGRRLGSITVPTTPAGYQELETWARQFGATNAFGIEGTGSWGAGLARVLRDHDHRLIEVNRPDRSARHRQGKSDPLDAEAAARAVLAGTATAQPKAGEGTVEMIRSLQVARRSAQKARAQAANQIRALLVTAPTGLREQLRSASLQEMVRIASRWRTGSTPDTHLLVAKHALRSLARRHQDLTEEIRDLDTHLTRLVQQTAPQLLAVRGLGPLTCAALLVALGDNPGRMRSESAFAHLCGVAPVPASSGKTSRHRLNRGGDRQANYALYILAITRMAWDPRTRAYVTKRQADGKSTKEIIRCLKRHIAREIYRLLTTPAALPLAAT

SEQ ID NO: 317850 - protein, 417 aa, unidentified
MKCFVGLDISSTKLDVCIMLSDTSTPVTASLSNDLSGATEIKNHILDLNHTYHFERIVIGMEATSLYSFHPAMFFHEDRQLKELHVEIMVEQPNKIKKYRDAFEENKNDTIDAFYIADYFRIERFSPSFFKEEKYMALQHLTRTRLQIIEQLTRTKQHFIENIYYKCNTLAYQFKKEELSTNLWSSTMMTLMTDEMTLDELANMPLQELDDWLQKLGKGHFKDSEKLAQTIQAAIRGSYRLSKLQQDSVNVILGLLAREIRNLEKMIKEIDKAIEDMVETIPEYQCLTSIPGVGKVYAAGIIAEIGQIERFKDHPQVAKFAGLNWREKQSGNSNSQHTSLVNRGNRYLRYYLVEAANSVRRYDDEYKDFYKKKYHEVPKHQHKRAILLTARKFVRLVDVLLRNHQLYTPPRRIMEDN

SEQ ID NO: 317851 - protein, 360 aa, unidentified
MRKHIFVGIDLGDKKSVARIAEDREKSESFKFVNTRRGRQRLLAEVKRRGEGADVVMAYEASACGFVLRDEAVGQTLRCEVLAPTKMEKSAEQKKNKNDDRDAEDVLERIRAHVLAGNRLPVVWIPSMQIRDDRELTRSRTDLREKATQIKAQIQMLLKRFGMEKPSDLGKSWTLGFRAWLKALTESGHLGPGGRQTLASLLRQLQFHEEEIQRIEKPIRQLADEPRYKPIVEALSAEKGVGLLGAMTYATEIGYAGRFRRGRQTGKFIGLTPTSHESGQQSDRKGHISRQGPPRLRKMLCQATWVQVRHDPRARQLYHRLVERNPKKKKIAIVAVMRHLAVRLWHRMRQAEIEMANKEA

SEQ ID NO: 317852 - protein, 409 aa, unidentified
MSKGCIRSSFLLFFLINKIFFMIKYSLGIDISMKMFHVCLSVIDNQQQIKVKACRKFTNNVAGFKELCDWIKKHYKQQDIPLHIIMEATGVYYEQCAMYLYKKGFTVIVVLPNKAKKYLQATGLKSKNDKIDAKGLAQMGAEKKLNPWQPMDDFYYTLRSLTRHHESLQNIKTNINNQLHADNAGMYANKQVGKQLKNLIETIDKQIAEIEKSIEDHIASDSAVQQKVDGIIKIKGVGLMTVATLLAETNGFLLFENIPQIVSYSGYDVVEDQSGKHIGKTKISKKGNSHIRRILHMPAFNVVRYKVSPFLQLFNRTLQKHNIKMKSYVAVQKKILIIIYSLWKRDHAFNEEYYKGTTTRDEELVQPSRLSFTEAVQVAQKNSPETNQGYTRCTTVEVSSFAPSRLLQK

SEQ ID NO: 317853 - protein, 295 aa, unidentified
MRPGTRFSASNDEPGIVTVVEELRALAPTLIVLEATGSLEVPLTSALAAARLPVVVVNPRHVRDFAKAAGQLAKTDALDAQILAQFAQVMRPAPRPLPDEQTQALAALLTRRRQLVEMLTAEKNRLSLAPRPVRNSVRAHITWLERELLHTDTDLAQTIRQSPVWRAKEDLLRSVPGVGPVLTTTRLANLPELGTLTGKQIAALVGVAPLNRASGTLRGKRTVWGGRAQVRAVLYMGAIVAARFNPVIRVFYHRLRAAGKAKKVALTACMRKLLTILNAMLKHRTPWCAEVAQHA

SEQ ID NO: 317854 - protein, 448 aa, unidentified
MSKIKTKNGTLKRISQLTVINPTVAGVDVSDKEMMVAFPISSEQLEVRSFGCYTRDLHDIAKTMRQYSITSIAMESTGVYWIPLFLLLQEYGFEVYLVNAKHVKNVTGRKDDESDAEWIQKLHSCGLLTASFQPDSMTRTLRSIVRHRQNLERTCSAYINRIQKALELMNIKLHTIISDIDGKTGLQIIEAILAGERNPEILADLRDKRIKASREDIIKSLEGYYTTEHLFELKQCHQLYCMHRKLIGECDREIEKQLIEQIASKNGGVITDIPEMERKASKKHKLPFNATAYLKAVFGVDVTAIFGISELCALTILSEVGTDMSKWKNERHFKSWLGLAPNTKISGGKVISSKIKKKKHYAGQAFRMGANGLHNSKSSMGDYCRRLKAKAGPGKAIVATAGKLATTFYKMVDTQQAFNPKALEDYQQIYKQKKINQLKRKLELLEAA

SEQ ID NO: 317855 - protein, 335 aa, unidentified
MHYLYYVGLDVSKETFDASLVAFEDANEMAHRKFANSRKGICSCLHWVEKRHGILLDDVIFCAEDMGSYISEMAVCASDRTLNFNFSLISPLVIKYSMGIARGKTDRVDARRIAEYAITHYRKIALYLPAEKELCQLRTWLILRAHLAKQRVAKLVLLEKLDYKEKFADVSIQRSMLQEEIVYAETHMKTIEREMKELIAADSNICRNYKLLTSIKGVGPITAIVMLCLTLNFTKITDHRKFACYCGLAPFEHSSGTSVRGGCHTSSMANRDIKVQLNRSALIAIRCDPQLKAYYERKVAEGKHKFSVLNAVRAKIAARCFAVVRRGTPYVALQI

SEQ ID NO: 317856 - protein, 384 aa, unidentified
MYIGIDVDKNFLTIKEIDEEGNPIGKDKISNSIQALERFSQKHEKHSKIALEASSYSMFGYRYLAKQGFEVHMAHPGALHKIIQSNNKTDEHDALDLAQLLRTGYLPESWVPDEELESLRSLINRRVELGKRSTQVKNRIHGLLALNGVKEPRATDLFGKAGIHFLEHLQLPAEFKQVLESLLRELAYLKEEIGLLESKLAKQGKEGRFKKEVKRLMEIRGVDFYSALADMAVIGTVERFPDDRKISSWVGIVPRVRQSGSKEYHGHITKAGSGLLRWILISNANVAVKYPGKLRRYYLRLKARVGHGRAIVATAHKLLKIIYHMLKEDKHYEERANDLFYRKLSRMNQKANCKKTPRLDSLERKGREIFIKEGRIMNTDKSFS

SEQ ID NO: 317857 - protein, 433 aa, unidentified
MPTEFAALVAIDWADQKHVWALQKAGSSERETGTIDHTPEAVEDWASGLRLRFGGQPIAVALEQSRGPLVFALTKYDHLVIFPVHPTTLANYRKSFRPSGAKDDPSDARLLLDILTLHRDQLRRLNPDTPGTRTLQFLVEERRKLVHEKTRYSNRITAHLKMYFPQVLHWFDVGTIISADFLERWPSLEQLQRAKPAAIERFFLDHNSRDRERIAQRMEQIRKAVPATLDAAVLTACSAAIGAWAALLKQVLTAIALYDEKIDELARVHPDYALMNSFPGAGSALAPRLIAAMGSQRERYQTAQEIQCYSGIAPVVVSSGQQRWVHWRWACPKFLRQTFHEWALHSIAYCPWAREYYEQQRAKGKLHNTAIRAVAFKWIRILFRCWKERKPYDEAIYQRALDARRPKTQLAAPAEELQWKNVAGFLKIAIKEA

SEQ ID NO: 317858 - protein, 429 aa, unidentified
MNYNTQNAKIASITEKTLIIGIDVGSETHYARAFSWRNYEYSKKPFAFSNDEDGFASFKAWMDDIAEKHEMEKVIPGMEPTGHYWLNLGAYLQGQGMRPVHVNPHHVKKSKELDDNNPNKNDRKDPKTIAGLVNEGRFSYPYIPTGIYAEIRNLSNLRIQTQEEITRIKNRIARWFSIYFPEIKDVYRNPDAVSGLMVIKQAPLPCDIKGLGVDGVNKIWRDARLKGAGIKRAKTLVTAAERSIGNTEAPRSARKEIRNLLNDYEIYKSRMDELMEEIEELLSEIPYIDKLMGICGIGIKTVSCFIAEVGDIERFDNPKQVQKLAGYAIVADSSGKHNGESRISHRGRKRLRYALYEAAISVIGKNKEFKEIHHYYRTREKNPLKKMQSVIAVSCKLIRIFYTILTKGIDYDGQKMLRDIVRPGMQSAA

SEQ ID NO: 317859 - protein, 351 aa, unidentified
MVVVGVDVHKRTHTFVAVDAVGKQVGQRTVEATTKGHLRALAWARKEFGVEVTWAIEDCRHLSARLERDLLSAGQKVVRVPPKMMAEQRRVARTRGKSDPIDALAVARAFLREPSLPVASHDEVSREAKLLVDRRETLVNTRTRTINSLLWRVHELDPQRAPKPRSLDLVKHQNALKAWLETLTGVVAEMALDELEDIIALTARIKEFDKRLSVLTRREVPALLALVGCGELTAAKLLGESAGITRFHSEAAFARHAGIAPIPVWSGNTAGRVRMTRSGNRQLNCAIHRIAVTQARIPGTLGHAYYEKKLAEGKSKAEALRCLKRRLVRVVFRLLTTDHNNRQTPAPPAAA

SEQ ID NO: 317860 - protein, 332 aa, unidentified
MKNIIIGADVSKRTLDCVLHNADKQKMLGANHLKITNDKDGRDELLKWLKQKKISKKDVFFCMEHTGDYSYGFAELLAEKDVSFCQIHPMEIKKTTATLRGKNDKVDAVRIANYAYRYRDELEPSTLKDKDILRIRDLLNDRKLVVKCRKAFKTVMTEHKNRPESSRYQRAKRNVEMYNGQIDEIEAELLEIVNGDESLAKTYMLLTSIPGISLVNALNFIVVTCNFTSFKTARQLAAYCGIAPYEYTSGTSVNKGTHVSKMGDKEIKADLTMAAQAAIVWDSDLRLYYERKRAEGKSFGCVLNAVKFKLVCRMFAVVKRGTVYVDTKKYAS

SEQ ID NO: 317861 - protein, 339 aa, unidentified
MKIMRIGMDLAKQVFQLHGVDERERVVLRKQLKRHQVLAFFAQLPPCVIGMEGCGGSHYWARELSKLGHDARLMAPQFVRPYRRNDKNDGNDAEAICEAVGRPNMRFVPVKDEAQQAVLTLHRARALLVSERTAVANQTRGLLAEFGIVVAQGVARLRKALPDILEDADNALPAMAREVFADLYARLQALERQIATYDRRIAQLAQALPAAQRLMQVPGVGPLTATAVVATAGDGRLFRNGRQFAAWLGLVPRQYSSGGKARHGRITKRGDRYLRTLLVHGARAVMRHLARRDDSQSRWLAALQVRRGFNKAAVALAAKNARILWALLAREADYQLPTQ

SEQ ID NO: 317862 - protein, 364 aa, unidentified
MSNCITWVGIDDSVKKLNIAVFYGEEENPRFESVYATDGGGLGRLVKKLKTFPGEVRCVYEAGINGYYVHRFLTKHGIFCDIAAPSLTPRQAGKRVKTDRLDAKKLARFYRAGMLTSIVIPETEQESLRDMIRAREDALEDLQRARHRLLRYLTRRGLRFTEGENWSLGHLKWIKGIAFEKSLDQMVLDEYRLTLNEETERLKKFEKMIEELGSQEPYKKRVSYLMALKGIKVLTAMTIIAEALDLRRFTDASAFMAAIGVVPSENSSGDQESKGSITKTGNRHLRRVLVESAWNYQRSAVVGKTIRKRREGLPADVLEIAQRCDRRLNYKFKHLVNKGKDRRKTAVAVARELAGFIWAIGQVA

SEQ ID NO: 317863 - protein, 382 aa, unidentified
MVQYTKFVGLDVHKNSIAVAACDSKTEEVRFYGNIPNTEAAILAVAKKLTGDRAHLSFVYEAGPCGYGLHRKLLEAGYECRVVAPSLIPKKSGDRVKTDRRDALMLARLHRAGELTAVVVPGSEQEAMRDLSRLREDLKAQERHLKQRLSAFLLRHGKTPPPKTTKWKPRFWSWVAELAFPQPTLRIVLQEYADAVKEIGRRIAGIEAQIGRELESWSLAPVVRALMTLRGVDTITAFTVVAELGDLSRFESAPRFMAYLGLVPSEASSGRTVRRGGITKTGNGHVRRVLVEAAWSYRFPARKSGRIRVRNEGQPPEICAVAWEAQKRLSFRYRHLAKAGKKQTVITAAVARELAGFVWAIGCQARGRSVALPVAEESAVME

SEQ ID NO: 317864 - protein, 358 aa, unidentified
MQIIGIDVSKDTLYVALAESKDARNDKVIASHKFANNETGFKLFVDWMKKKKADAGTVCLMEATGVYHEHLADWLHRHGVTVVIELPNKIKHYAKCLNVKTKNDKVDAGVIARYGLHNAWTPWHPMTESLYQMRALLRQVQSMTKERTRCKNQLHALMHSAHAPGTVVGNLMDIIANYDRLIESYHDEVVRLAKEDEAFYARVEMVCTIKGVRAITVLTVLCETDGFQLCQSARQAVSYAGLDVSEYQSGTILKDKRISKKGNARIRHALYLPAVVAGTTGGPMSLMNLYKRVKQKHPTAKKVAIVAVERKLLMLIYTLWKKQEPFDPEKDGKPPIHNAYKSTQAVGSQNSEGSIPRK

SEQ ID NO: 317865 - protein, 458 aa, unidentified
MPETEQRPVGLAAAESPVGSLRPERQYRGRRWLRQAKVQLSGGSMSAAGTRRFFVGIDWGSETHHVCILNLDGQSVEKRKVQHTADAIAEFLDYLSSLAPDSSAAISIAIEVPHGTLVEALLERRFCVFSINPKQLDRFRDRYFPTGAKDDSRDAFVLADSLRTDHHCFRAVRSSDPTVIRLRELTRLDEDLNLCFQRHCCQLRQQLHRYYPQVLQISKTADEPWIWALIELAPTPAKAAKLTSNRIEKLLHKWRIRRVDADEVAAAFCGRSFSLAPGTIEAASEHVLLLIPQLRLLHQQRQAVATSIEQMLDQLSTSEDQQAVPDAKVLLSIPGVGRIVTATILAEAPQLLADRDYYGLRAYAGVAPVTRQSGKKSTVLMRYGCNLRLRNALYHWSRVSMQHDIRSREQYHRLRGKGHSHGRALRGLADRLLALLCAMLKSGTAYDPTRRQSVSPSA

SEQ ID NO: 317866 - protein, 464 aa, unidentified
MTTLRIIGIDLAVTAAHRAIVLDSASNQFVSSVISFYANPAEMDRLIEVARKGAPQDTRLIAVLEATQMAWFTVGSYLQRRGVEVYRVNGRQTADLRKVYNRHAKSDRIDARVLPRLYLNAPDRICLLSIPSPTTMELMRACRELVRLSQQISASKNRLKATDSFAWLSWNDILQPYDPPARWLRENWYDPWQVQQAGSTGLKHAWQAASIDSDEDPEWIPALVDKANQVIDFYGLPSPIDYQLLQDFLIREQSRLKEMEIQKHSLQLKVIHPLYRQLHPQRYLETIPGIGQDSAAAYIACVGDSKRFPSLNHFLGWSGMIPFSSQSGEGQATGLSLTQAGPNLIKRTAFVDAQVARLYDPQIAAIYYDQMVKKGKHYLQAICTCATHLLTRVYVVLRDNRPLELRDIDGTPLSKQRGREICVQRYTVPDEIRRQNNHRVRTKRAEQRIEQRTQRRELNQKSKG

SEQ ID NO: 317867 - protein, 340 aa, unidentified
MDFKFFIGIDVSKDTLDIAVLNVDSSETVKHHQVSNDDAGIAIMLDWLKQQKEFSLENSLFCLEHTGMYNYPLLQFFSRQSASVWVENPVQIKKSLGLQRGKNDQIDAVRIAQYAYRLKNQIKLWQPARAVVDRLKHLSALRERLVETRKRLMTPVEELFKSGNETMAKVLERSMGKTMKGLEKDLKAIELQMKDVIDKDDHLKNLYSLITSVVGIGFVTAVNLIIYTNEFRLFNDYRKFACYSGVAPFEYRSGSSIRGRTRVSHMANKKMKSYLHMASLTGIKMDEGLKAYYNRKVSEGKNKMSVLNAIRNKLLARVFAVVTRGTEYEKTYYQNNLVLS

SEQ ID NO: 317868 - protein, 335 aa, unidentified
MKSKSFIGIDVSKLSLDICLITEEGEIKNFKANNTVGHLKKLFKLIAQDVDVEETLVCAEYTGHYSNILKSYCLDNKVALWLESDTEIKLRAGVQKCKSDKIDAQRIAEYAMRHSDKALLQTLEDEVISESKLLLSERKLYVGERAKYRTQLKDLGGFVEKSIFKERSKRLKRHVALLTKSIEEIDRTIKELFSTEILLAHQSKILTSIPGVGDQVAIHTIVATNGFTKFKNGRKFACHVGVAPFSFHSGTSQRSRNKVSHRANKELKTLFHMAALSAIKMKGEFHDYFKRKVAEGKNKMTVINAVRAKIINRIFTLIKENRKYEKNYNLPLVNP

SEQ ID NO: 317869 - protein, 385 aa, unidentified
MSQFSGSSQAAVDYNSTIIGAVELSEKKWVLAVQLPGVGRHSRHALDACGDGLVSFVERLKAKCAAAGRKIARAILTHEAGRDGFWLARFLARRGIEVRVMQPSSLPVDRRARRAKTDMIDVEMLLRTLMAWLRGEPRVCSMVPIPSEADEEARRAHREREDLTRERRSIVNKIDGILATLGVKGYKALRRDRREQLNCARQPGGEPIPQKARARIERLLDRLDLVLKLIDQVESARDAILRKDAPADEAERMIRSLTTLRSIGPDIATLLVREAFVRQFRNRRALAGYVGLGGTPFSSGGSEREQGIGKDGNRRVRAAMVELAWMWLRWQPDSALSVWFRTRVGAMGGRIRKIMIVALARKLLVALWRYVNDGVVPSGAKLKAA

SEQ ID NO: 317870 - protein, 362 aa, unidentified
MRKLVLKEVRDQCPPEPGTTVIIGVDLSRTKWVYACRWGGQEHRRFASAGDLKHLQALVQEYQARGGEVHVIYEACGFGYAIAWWLEEQQAHVIVVPPSTVERAPGAQVKTDGLDAGSLALKYEKGLLKGIYIPSREQHQLRQLSRTYAQVLQDRCRQQVRLRLLLQEHGYTLPERGTGWTALEHWLRTQALPAPVAVCIEQLVSLRTAASTSARHLAKELRAVARSPEYAPLVTALAQQPGVGPFTAVRFVLELGDVHRFVTADSLPHYLGLTPREYSSGPMVHRGPVRKSGPGALRAWLVQCAWAAVRHGHDQGLSGCFERLEPRAGRKKAIVAVARKLALRLRARWLEFEVAVTTTAAA

SEQ ID NO: 317871 - protein, 432 aa, unidentified
MERIRENAAGIDIGARKVFVSVEGKEVKCFFTFTEDFEKLRDYLLENAIETVAMEATGVYWNILYEILEEAGLDVWLVDGGQTKQVPGRKTDVKDCQWIQQLHSYGLLNRCFVADSDIKELRIYQRLREDHIRSASMHINHMQKALTEMNIRLTEVLNQIHGASGLAIIEAILKGERDKEKLLKLCHIKIIKNKKDEVLKSLNGRYTKSGLFALKQAFDSYYFYQNQIKQCDAMLEEVLKRISKGKPNQTISACRKPIRHNKPDIDNLGTVMLKIFDGKDATALSGITDYTWMQLLSETGTDLSRWESEKHYTSWLGLAPGQHTSGKMKKNKRKLGRPKAGQIFRQIAQSLLTSKRIALGAFGRRLSSRKGSPVAIKAVARKLAALYWRIMVKGMDFVEKGIQKYEDQLMVQKQRSIIRLAKELNMQITYNV

SEQ ID NO: 317872 - protein, 311 aa, unidentified
MESFVGIDVAKSHLDLYDSATNRHLRFENNRSGIKKCVGFLVSLKPRLIALENTGGYESELAIALDEASLPAAVVNPRRVRDFGRSEGQLAKTDKIDAALLARYAAAIKPRRQKAMDHRSRQMKALVARRGQLVRMRTAEINRKEHIHDKAIARSINAVIRTIERELTKVEQQLADLIAQSPESQQKMEIAVSVCGIGVTTATMLLTEVPELGQINRREVAALIGVAPINRDSGKFRGKRMTGGGRRDVRTRLYMPTVVACNHNPVIREFYQRLLKNGKSKMTALVAAMRKLLVILNTIIAKGELFNPKIA

SEQ ID NO: 317873 - protein, 438 aa, unidentified
MNDSSISKINPHSAGIDIGTEYIFIGIEDKEVVSFPTFTHSYIKAIDYIKQNNITSVAMEATGVYWFALYDMIEQAGIDVCLVNGREVKNVPGRKSDVEDCQWIQQLHSFGLLRPCFIPDDITRQLRTYTRLRQDHLSLSTQHIQHMQKSLDLMNVKLHNVISQITGVSGMRVLKAIIAGNHNPIKLIGLCEKSILKKKKDLVMSSLYGNFRNDYIFSLKQAVDAYEFYQQKVAECDKEIQALLDFVTKDIPTPPDLKPPKRIRHNVPQVDNLHEKLMKLTGGKDPSQITGLTDKTLMELIGEVGTDLSRWKTEKHFTSWLCLAPGKHQSGKKNKKKNKKGHTKAGQIFRNAAYSLTKSNYTAIGQFYHRMRAKKGSVVAIKATARKIAILFYNIMTKGIEFVEKGVLAYQQKVKEQQLKRLQKQARQLGLKLMPMNP

SEQ ID NO: 317874 - protein, 357 aa, unidentified
MKILGCDLHAKQQTIAMVDRETGEFTEKTLSHEGNEVREFYAALEGPVVVGIEATGAMQWFLELLEELGIVCRVGHPAKIRAAETRKQKHDRRDARLMLELLIEDRFPEIWMPSIEERDLRTLLRDRHQWVKIRTRVQNTLQAMALNHALRRGRGLWTATGQKALQALSLPSYTSQRRDELLRLYGQLQRRIQELDGQVEKQVQQRPQALRLLTHPGVGPVTALATEVFLGDPSRFANGKNVASYIGMIPCEHTSGKRQRLGKLTKEGNSLLRYLWTEATIHAVRKDPELKRFYRRKLIQKGMGKARIAAAHKLGIRLWIMLRDQIDYKEFCRRGQQRQCGEAHAGMPNYNSGPALQ

SEQ ID NO: 317875 - protein, 348 aa, unidentified
MLHAGLDLSRRRLDYCLLDERGDRVETGAAPPDGDGLCAFARGVEARHGPVLVRAALESMNGARFVHDTLERSGWEVEVADAQKVKGLAPLACKTDRIDAWVLAELSRRDLVPAIWLPSFELRQERERARWRLFLVRKRSSLKHRIHAQLLAFGHRCPVSDLFGVAGRELLAQLDFPEPWRGGVLAAVEMIDDLDREITQIDRELKALGADHRYIPLLRTAPGIAWVLGYTIASEIGDIHRFASPAKLTGYTGLCPRVYQSGSTDRRGPLTHAGPKYLRWALMEAATHACKHSVYRDRYQRNKRRLGKQRGAKVAQVDISRRLAEAIWHMLTRNEPFAPAGATPPLAA

SEQ ID NO: 317876 - protein, 343 aa, unidentified
MQAVTTIGLDIAKSVFQVHGIDAEDNVIIRRQLKRCYVLTFFQKVPPCLVGIEACASSHYWSRELKALGHTVRLMPPAYVKPYVKRQKNDAADAEAICEAVTRANMRFVETKTPEQQSCLMLHRTRHLFIRQQTSVINAIRAHLAEFGIVASVGRNGVEQLLDVVADSSDKRLPEVARACLAALGAQLRMLKTRILEFDRRIMAWHRSNEASKRLDEIPGVGPALATALVASVADPKAFRSGRDFSAWIGLVPKQHSSGGKDKLGSISKQGDRYLRSLFTAGALAVIRYAKIHGTKHRPWLTALLARRPTKVAAIALANKIARMARAMMVKGERYKEPVALAA

SEQ ID NO: 317877 - protein, 338 aa, unidentified
MALYCGIDLHSRDSWLAILDDGLEVIGETKVGNDLETILRVLEPHREALEGVAVESTFNWYWLVDGLMDAGHRVHLTNTWAVKQYEGLKYTDDRHDARWLAHLLALGILPEGYIYPKEERSARDLMRRRAFLVRKRTSFILAMRGAFECRTGMRVNSNDLKKWKAEDVKVYVKDPVEAFGITCLLEPMHALSAQIKKIEKAALSRGRLRPEFAPLETVWGVGKILALTIMYEVGDVARFRKVGNFASYCRLVNTARLSAGKRKGSGNRKNGNPYLSWAYSEAAHHAVRHHPEAQKYFQRKRAKTNGIIAIRALAHKLARASYHVMRDHVDFDPEKTFA

SEQ ID NO: 317878 - protein, 403 aa, unidentified
MSPEHSIDIFLGVDVGKSEHHACALDRDGNKVFDKPLPQLESELAGVFHQLQKLGTVLVIVDQPNTIGALPIAVARDCGCEVGYLPGLAMRKAADLYPGRAKTDKRDAFIIADTARTMPHTLRAVDRNDEVLSALKMLSGFDDDIARDCTRTVNRLRSVLTQIYPSLERVFAGSTLTRTPILELLIHYKGPQGLKRAGYQRVLNWMIKRTRKDPTPLVDDIFTALKAQTVTVPGSDAAELVIPQLAANIQALKEQRNTIAEQVEEMLADFPLCEVLMSMPGVGIKTAAQILLAIGDGSDFASAGHLAAYAGIAPVTRRSGSSIRGEFPARSGNKRLKNALFYSAFAVIRSHEPSRRYYERKRAEGKRHNAAVICLARRRCNVIYAMLKNKEFFREIPPRPVAA

SEQ ID NO: 317879 - protein, 323 aa, unidentified
MHNRQNYLYVGVDLHKEHHTAVIINCWQEKLGEIQFENKPSAFSKFLLEVETYVCDGITVVFGLEDVGGYGRALAKYLVDHEQVVKEVNPALSFLERKSEVMIKKNDSWDAECVARILVNKFNQLPDAKPNDLFWSIQQLVSRRNALVKAQSALKNQLHIQLNHHYPSYKKFFSELDGKTALAFWQQYPSLSCLEGTNIKRLTAFLLDVSNNTCSVKKASDILKLVKEDGHTMKEYQETRDFLVRSIVRDIEFKKKEMKYIERELKQLVNLLDYQLETMPGIELVTASALIAEIGDVRRFPNANKLARFAGIAPVYFGSGGKR

SEQ ID NO: 317880 - protein, 406 aa, unidentified
MQSAIERPEELVAQIWAGTDIGKTHHHCVVLNAEGERLLSRRVLNDEPELLALFADVMALDENVVWAVDVADGMAALWISVLLNHGQHLVYIPGLAVNRASAGYRGTGKTDAKDATVIADQARMRRDLTVLRPDDEHAIELRVLTNRRTDLNADRTRRITLRGQLTSVFPALERALDVGNVGPLVLLTGYQTPAALRRVGRSRLETWLRNRKVRSPEALAEAALEAAERQHTAVPGEKITAQVIHTLAKEVMSLNEQITEIDKLIAARFREHELAEVISSMPGIGPLLGAEFLAATAGDMSRYGTADRLASLAGVAPVPRDSGNISGNLHRPRRYHRGLQRVFYTSALISIRSCDHSRRFYERKRAEGKRHTQAVLALARRRVNVLWALIRDGQCYQNNLPVTAAT

SEQ ID NO: 317881 - protein, 360 aa, unidentified
MEQTNVKPQFCIGIDLGDRFSHFAVLDRTTGEILEEGRIPSTPQAFERRFCGQGRARIALEVGSHSRWASELLERAGHEVIVANAYKVSLITRNDKKSDRVDAMYLARLAGADPELLHPLKHRSRKAQVDRCILIARDRLVGCRTKLINSVRGMVKATGARLPRSSSSTFHTKVRDQIAPELKPAIDPLLKTLAWLNQQINKYDKLLERKIEREHPAAKHLMQVDAVGPITSLNFVLTVDDPGRFKNSRTVGSYVGLRPKERSSGKGDPELRISKAGDSMLRRHLVQSAQRMLGPFGKDSDLRRWGLQLASRGGKTAKKRAVVAVARKLAVLLHRLWVTGAQYEPLRKNASKDTALVRPT

SEQ ID NO: 317882 - protein, 368 aa, unidentified
MSKITKYVGLDVHKDSISIAVAEEGRSEARFLKRIPNSGARLLRALRTLGDLGELHCAYEAGPTGYGLYRLLIASGVRCDVVAPSAIPVKPGKRVKTDRIDSIALAHHLRAGNLVEIRVPDEEVEAMRDLVRAREDVKHAEKAAKHRLSKFLLRQGRRYAGKTNWTNMHLDWVRNQKFEHDAQEHVLREYLVAVEHARDQIGRLGDVLARLVETSELAPLVKALQAMKGIQLLTAASIAFELIDLKRFPTAPKLMGYLGLVPSEHSSGDSRHQGGITKAGNKRIRRLLTEAAWNSRFKPKQSARLRKRQEGVSQEVIDIAWKAQERLHHRYRALTARGKKHQCVITAMARELAGFIWAVGQQEQLLAA

SEQ ID NO: 317883 - protein, 408 aa, unidentified
MPVVYPVCCGIEVHQAQLTACLRRVSPEGQITTERRDFRTTYAELLALSDGLMASHCPVVAMESTGVSWRPVYHVLAGTVEVLVGHAREMRPRPGKKPDPADATWIAELLAHGLIRPSFVPPPMISAWRDLTRTRGALVQRRTQAKNRVHKVWEDTQVKLSSVVSDLFGVSGRRMLAAFIAGERDANPLAALALGKLRRKLPQLELALAGQCTAHHARLIQGALDLIDLLDRQSAEWDQQIGELVHPLRPQITQLDRIPGVDETAARDIVAEIGTDRSRCGAASRLASWASLCPGNNESAGKRRHGRTRKGNRYLRRVLVQCAWAARKPPTFLGRTFRRLEARLGGKKAAIAVAHKIVVLAYHRLAEGTVYDEQRYAHVQPRQEEQWRRRAVKALERLGYQVVLEKVA

SEQ ID NO: 317884 - protein, 342 aa, unidentified
MPQYAALDVSNEETAIHVLDETGATVWRGKRASDPEVLTTALRRHAPDLVRVGLETGPLTPWLYHTCKALGLPIVCLDARHARAATALQRNKTDARDAETLAQLVRMGWYREARVKSYAAHAVRHLVGARAQLMGVAVDLSNQIRSTLKTFGLMAGKGAGRAFEIRVRDLIAARPTVAAIVEPLLAAWRAVRGQIGVLDRRLIALARGDATCRLLMTCPGVGVIVATSFAAAIEAPEHFRHSRSVGAYLGLTPARHQSGEIDRTGGISRRGDQLMRTYLFEAAASLLVRVRQDSALKAWGRALAERMGFKHAAVAVARKLAVVLHAMWRAGTPFQPWPVVAA

SEQ ID NO: 317885 - protein, 467 aa, unidentified
MKLKRRRSLGKPRVSPTLLAHLNPHVAGIDCGAAEHYVAVPPDRDPTPVRAFSTCTTSLHQLADWLTACRVTSVAMEATGVYWIPIYEILEARGVSVLLVNARHFKNVPGRKSDVSDCEWLRELHSVGLLRGSFRPTAAIVALRTYLRHRQTLVETASTCVQRMQKALIAMNLQLPLVVSDITGKTGLRILRDIVAGHRDPAHLAQHRDPRCHATEAEIVAALTGHYQPDHLFVLQQHLEAFDTYQGQIAQCDTRIDDHLRTVTAPLPAPVALLPAARHRRKTPKNNDLPFDVRPPLFHLTGGVDLTQIEGIASLTALKLIAEIGTDMTCWPTEKHFTAWLTLAPRNKITGGRVISSRTHPSANRAAATLRMAAMSLGRTPTALGAFYRRLAARLDKPQAITATARKLAILVYRVLKGELTYQHLGAAHYDAEQRSRTLRRLRHRASTLGFELVHRDTGEVLAAGVS

SEQ ID NO: 317886 - protein, 336 aa, unidentified
MKRQYVGIDLHRRSSTVYRMSEDGKTLGCVRVPSQPLELAEALAEAGEAPEVVIESSYGWYWAADVLEELGASVHLAHPLGNDWGNRRVKSDERDAKDLAAMLRLGRLAESWIAPPEVREIRELVRYRAKLVQLRSGLKAQVHSVMAKHGVLPKRADMFGPGGQAQLDSLALPGPYMSRIGSLRELIELYDREVMVLERQIHKVLKDDPGYRALQQIPGIGRVYAAIFVAEIGDVSRFSSAEKLCSWAGLTPKHRQSDTKLVRGRITKQGSTLLRWAAIEATAKCRTGTKLQADYHRIAERRGKAKAHVAVARRLLTLVYYGLRDGEIRALAPKAA

SEQ ID NO: 317887 - protein, 331 aa, unidentified
MSLELLAIDLGKRSFHCHGIDSDGVILSRKVSRAKLLETIKELAPKAVAMEACASAHFWGRRLLADGRRVLLINPWFVKPFVKGSKNDAADAEGIYEAALRPTMRFVPVKSTEQQDLQSLHRARERVVCARTALINHMRGLLGEYGVILPQGAWRFLKQAQDAIAAAELSELTRDLFGDLLVELRALDLQLDKLDQQLVRICRTNEACRRLSKLPGVGPVIATALVAAVDDGRHFRSGRELAAWIGLVPRQYTTGGKPRLGGIGRRANHYLRRQMIHGARAVMFRLTKHEDRRSQWLKGSRRGEALIGRLSRSPIRRQGSPGPCSPVRRTI

SEQ ID NO: 317888 - protein, 347 aa, unidentified
MRFYTQSHRYYCGIDLHARWMYLCILDPQGEVLLHRNLRACPEAFLKAVEPYRQDLVVAVECIFSWYWLADLCAQEGIEFILGHALYMKAIHGGKAKNDKIDSQKIAVLLRGGMIPVAYVYPPEMRSTRDLLRRRTYLMRKRAELLVHVQNTNSQYNLPEIGKKIAYRANRSGVAERFSDPAVQTSIAADLSLIDFYDTLLNQLELFITSQAKQQDHHSFYLLRSVPGIGKILALTLLYEIHDIARFPRVQEFVSYCRLVKCSRQSAGKNYGFSGKKIGNVHLKWAFSEAAVLFLRNNPEGQKLLARLERKHGKAKALTILAHKLARAVYFILRREKAFDLTQFLAA

SEQ ID NO: 317889 - protein, 400 aa, unidentified
MRAVFGIDVSKTSSEVAILVNGEKVHGYTILNDAIGFNRLLGDLKTVHNPEIIFEATGVYSRRLQAFLEEYSYAYTRLNPLEAKKQLDSLRVRKTDKIDAEKLAKSQLVHNRKPTYVQEEVYQHLRDLSRFYQNMTEDLVRTKNRLHKVLQVTFPELETLLSTPTGEQYWNLVMAFPCKEFVLSLSQSNLCEIVRQSTSKRISEKRITYLTDKLIKLAKQSFCAVKNTSPMLEEVRYYAQELLRLSERRQVVLNDMVALAQPLPEYDILRSIPGIAETTATSIIGELGDIRRFQSSNQINAFIGIDLRHYESGNFLAKEHITKRGNPYARKILFKCIHNIASASHTNPCHIADFYEKRKRQSTIASTKPHTISSIHRLIRTMYYLITHNKLYDYSLTQYR

SEQ ID NO: 317890 - protein, 416 aa, unidentified
MNEVKCWFVGVDWASESHRVRIADCCGKRLGERDFAHGGAGLAEMAAWLTSVAGAEPSAIHVAIEIPYGPIVETLLERGFNVYAINPKQLDRFRDRFSPAGAKDDSRDAEVLCDALRTDMRAFRRLALAEPLVIELREWSRMTDDLNGERNRLCNRLREQLWRYFPAMLELEQDLGAEWFLDLWELVPTPDKAMRIRETSIARILKSRRIRRVSAPEVLTVLRKPPVTVAPGTIEAASAHIRVLSERLRVVNRQLKDAHRQLDRLCGLLAEPTESEPGQANEQRDAAILASLPGNGRIVLATLLAEGWEALRRRDYHALRTLCGAAPVTKRSGKSCIVTRRLACNPRLQNALYHWARVAVQHDPRSRAKYAALRLRGHGHARALRSVGDRLLNVACAMLRNGTQFNPSLESQKSAC

SEQ ID NO: 317891 - protein, 387 aa, unidentified
MAQVNDLSRSLTAFDLISTLVVVVEMSKASWLVSGAVPGVERQPLKKLEPDATALLRLIERWRNEALRAGRPISRIALAYEAGRDGFWLARWLIARGIEAHVIHSASVAVSRERKRAKTDRLDAAMLMRVFLGWLRGERGHCGMVAIPTMEEEDARRPSRERESLINERSRITNRMKSALARLGVRGFKPHLRKAPERLAGLRTAEGTGLPANIIEEFRRDMARLALVREQINSIEKTRAERLKQAPDTGPHAMVRLLARVIGIGIETADMLVREILSRKLRDRRAVARYAGLTGSPDESGLKRREKGLPKAGNARVRRGLIQLAWRFLTFQKDSALARWYRTRTEGPSGARKTTMIVALARKLLIALWRLVTTGEVPDGVELRPAG

SEQ ID NO: 317892 - protein, 379 aa, unidentified
MQKHNNSGKKSEPTSKRPKTRGPVQRDTKEVLAELVETLRKKLDLKVEAGSTREEDRRGKFRPNLDRLTVGVDLGDQWSHYCILGLEGETLAEGQLRTTQQHIAEFFQALNAARVVFEVGTHSAWVQEVICGCGHEVLVANPRLMEGSKRRKRKNDRIDANKLARLGRVDPQSLHPMQHRSKEVRQDLVVLRARDALVAARTELINATRGLVKSMGSRLPKCSSPSFAQKVEEAVPVEIREAVLPLVRMAAALSDCIQRYDEKIEKLGREKYGHTALLRQVKGVGPITALAYVLTLENPQRFVKSRDVGPYLGLVPKQEDSGESQPQLGISKTGDTMVRKLLVGSAQYILGRSDRTRTYADMGCGSASAAGRMRRRERR

SEQ ID NO: 317893 - protein, 453 aa, unidentified
MRWYHEQLLRWRTGPEGRVLGLGRCVVPHELVTSINAQAVPGGTLIYCGIDWAEKTHDVALVDHTGTLIAKRHITDDAAGYRVLLDMLAEHGDTEDDPIPVAIETSRGLLVAVLRTGRRKVYAINPMAAARYRDRHSVSRKKSDPGDALVLANILRTDMHAHRPLPDDTDLARAIAVLARAQQDATWNRQTIANQLRSLVREYYPAALAAVEPWKNGLCRPEAHALLKAAPTPTRATRLTRTQLQATLKRAGRQRGIEAEADRLQEVLRAEWAHQPPLVEDALGEQMLALLIQLEAACTAADQLAKPVEEEFPQHPDADIYLSFPGLGVQLGARVLAEIGDDRTRFTDARGLKAYAGSSPMTRASGKKSSITRRWVKNDRLNAAGYLWAFSAPNASPGAKAHYRHRRDDCGDWHAGAQSHLFNRMIGQLYHCLQRNELFDEHTAFPVELAEAA

SEQ ID NO: 317894 - protein, 426 aa, unidentified
MFKNQDEKLRLIQPGMIIIGVDVAKRSHWMQAMHYNGILIGKAFNIKNSREGFESLAAKIERIKQETGCHQVLVGMEPTGHYWKALAWFLMQNDITVVLVNPYHVKKSKELDDNAPSKNDPKDAKTIARLVKEGRFMTTYMPQGVYGELRALSNLRGQLGSKLNSLKNIVTAILDEYFPEFETVFKGFYGKTALHILYQGLFPEELKKLGIAGINAEFKKAVKSSVGKKRAEALYQAACNTIGLPVTNGIKLKLQLCLDNFKSLTVRMKTIEQEMAKQLTATGICDYLLSIKGIGIVLAASLLGEIGDPSRFDNWKQIRKMAGFNLVEESSGEKKGQHKISKRGRRLLRCYLYQAVLVMVAKNKEFSELYRYFLHRKQNPLKKKQALVVIATKLIRVILTLINRKVNYDPAKVLGPVREIQMKEAA

SEQ ID NO: 317895 - protein, 681 aa, unidentified
MAKAKARRKQMSAVLEPDAAGIDIGAEEIFVAVPPERDAESVRRFGTFTCELKELADWLQACGIRTVAMESTGVYWIPVFQTLEDRGFEVYLVNAHYLKSVPGRKSDASDCQWIQYLHSVGLLRASFRPPNEICAIRTLWRHRGSLLQMASEHTLHMQKALSQMNVQIHHVLSDITGFSGQAILDAILGGERDPVVLAKLCHKRVKSPREKVAKALEGDYRAEHLFTLKQSLEGYRFYQGLIAKLDLEIEKLMEDLPGACATETPLPPRTKHTAFQRQGNDPAFDLRQQLYRIAGVDLTDIPGISAATAQVILTEIGPDLSRFRNASAFASWLGLCPEKRVSGGKTLSCRTRKVKNRAAIALRMGANSLCRAKGYFGDFFRRMRAKLGTASAITATAHKIARVLYHVLLTKNPFTETLFHHLDEPLADLERHIPGKTVADDHIGDPGVDIARFHVADELQRRGLEQTMGVSRQLIALRLFLANRQQPDARRLDVECHTRVNRTHDRKLQQVLRPAFDARADVEQHRRTALGRDGGGERRPIDSRHQTECGIRRHDRRAGMTGAEQRRGLAVRDKIRRDLDRRVRLSPQRRRRCLPHVNHVGSVNDADARRIEPLMRVQPRLDRSRGTDEHHAEIEMARRRDGPVDNSPRRGVAAHRVNCNPDHKNETGWFCVLGSVCWVGF

SEQ ID NO: 317896 - protein, 344 aa, unidentified
MSAAYDGPQIVGIDLHRRRSVIVRMDEAGNRLDTVRIDNDPMALAAQIAKAGEAPQVVLEATYGWYWAADVLRDAGAQVHLAHPLGVKGFAYRRVKNDVRDATDLADLLRMGRLPEGWIAPPAVRALREMVRHRAKLVAWRSALKASVHGVLAKQGLHPPVTDLFGVAGRQWLSVAPLDAAYRLRINALLRLVDAIDFEITAVAGPLRAVLADDPGFRAVQQVPGVGPVLAAIFVAEIGDVTRFASPAHLSSWAGLTPKHRESDIVVRRGPITKQGSTLVRWAAVEAAQGARNADWLTESRTRIAERRGRNIATVAVARKLLTYVFYGLRDGYIRALEQTAKAA

SEQ ID NO: 317897 - protein, 438 aa, unidentified
MKKRTYRSTAIQDVTLSELSRLLGAALEAIVAIDIAKQKMVFALATMAGETLKLVRFEHPRQTRLFLELLEGLGAAGVKLQIVMESTGSYGDALRYQLTSRSLPVFQVDPKRCHDASMVFDGVPSQHDAKACTVMAQLHARGISRRYEPRVAEEKRARALIDRHRLLMRPLTQLAGTLEALVATYWPELMPYLGQRARWHLELLAELPGPLAVARDQDGARALLRRVTRGAMRPERIEEIVGASVGSLGVPMGDDDVRLVHATVRPMLRLREEIALLEKEADSFVSTQASSGVKNIAQTIGTMTALALLGDVGDPKRYASGATLQKALGLNLRERSSGEHQGRLRITKRGPARTRQYLYLAALRHIQYDSVVRAWFAKRCGEGSKVRAIVAVMRKLVLALPHLARGEPFDSRKLFDVRRLDLSASTAASTAALPAAAG

SEQ ID NO: 317898 - protein, 309 aa, unidentified
MEIVVGIDVSKERLDVAILPQEEVFAVGNDHAGIDELVERLKGIGVDAIALEATGGFEMLAVAGLSAAGLTVLVVNPAQVRAYAHAIGRRAKTDPIDAAVIAAFVLATKPEIRPLRDAETQALSELVARRRQIVQMVVAEENRLRMALAKQAQESIKRLLKALRRELESLDADLDSHIRKSPVWRVREALLTSVPGVGATTARTLLAELPELGSLDRRQIASLAGLAPWTRQSGKWKGKSFIGGGRGKVRAVLFMAALVASRYNPDLKAFRDRLVAAGKPKIVATVATMRKLLTILNAIIRDGRPWQNA

SEQ ID NO: 317899 - protein, 405 aa, unidentified
MQDSIAGIDVHKRVLMVVVSRDGDECLVRGRFGTTSQELECLAAWLKELGVREAVMESTAQYWKPVWLALEDRFQLHLAQAWSNRAPRGKKSDFKDAERLVRRYRADELTLSFVPDAAQRLMRTLTRRRTQLVRDRARIQNQVESLLEETRIKLSSVVTDLFGASGLRILTALARGENDPAKLAALVDARVQCPASQMVQALTGSASPAHRFLLQQHLDHLELIQRHMEQLSAQTADLLRPYSDAVTRLAQIPGIRTLSAQQIVAEAGPNASAFDSAGQFSSWIGVSPGQQESAEENHSSRCAKGNHYLRLTLCQAAQAAVRTKNSIFERKFRRWLPRLGYAKAIWAIAHHLSVVIWKVLHQGASYIEFGLETTPQAAKRRLQRLKKELRALGYRDVLVPLSDEQ

SEQ ID NO: 317900 - protein, 444 aa, unidentified
MDVVFPRCAGLDVHKKRITACRIVPDPTGQKAEGITELQPFGTMTRDLLALADWLTEASITHVAMESTGEYWKPVYNLLEDTFTVFLVNAAHVKNVPGRKTDKADARWLAKLMRFGLLQASFIPPKGQRDLRDLTRYRTKLVQERVREVNRVQGVLERANIKLASVIADIMGVSGRAMLEALIAGRADPATMAALAKRRMRSKIPVLEQALTGIVHDHHRQLLAMQLAHIDFLDEQIEALNAAIETSLKALSTAEPSREAQPLPLTFSRAVELLDTIPGIDQRGAEVIVAEIGIDMSRFETAPRLAAWAGVAPGNDESAGKQRSGKTRKGNRPLRAILTQLAHAAVRTKDTYLSALYQRLAVRRGKKRAIIAVAHSIMCSVFHMLSRNEVYRELGANYFDERRRQFTVDRLTRRIERLGYRVHLEPVAASAAGEIFKATAKTGE

SEQ ID NO: 317901 - protein, 351 aa, unidentified
MNISHYIGFDVHKKSISYCVKAADGKIVEEGKVRATHDSLRAWAGKRSEAWHGAMEATLFSGWIYDALKPFAAALQMGNPSMMKAIGAAKKKSDKLDARTIADLLRCNLLPACYVAPPEMRDLRRLLRYRNLVVGQAVQMKNRMSGMLMEVGAEYNKRRLHGKQYFNELLDRLEEVPESVKDLLRLSRGALETFAATQRQILDRLQKEPLLAKRVKLLRSISGVGEVTALTWALEICDPRRFPSIADAVSYCGLCAALASSADKAKRGPLSKQRNAHLQTVLIEASKLAPRWNRQLAEVHQRELQRGDRNQATLAVARKLVAYLLAVDKSGQRFEVRTTLPATPTEVAKVA

SEQ ID NO: 317902 - protein, 455 aa, unidentified
MTGAKSPGSDALSMVNPGAAAIDIGSTMHLAAINPQADDNPVRAFGTFTGELHDMARWFKASGVTSVAMESTGVYWIPAYEVLEEHGFHVILVNARYAKNVPGRKTDVSDAAWLQRLHSYGLLRGSFRPEAGVATMRSYLRQRERLIEYAASHIQHMQKALMEMNVQLHHVVSDITGVTGMRIIRAIVAGERTPITLAEMRDVRCHASVETICAALSGNWRDEHIFALCQSLALYDFYQTKILECDRKLEAALKALQIGKGHDVRDLPKVRTKKRQVNTPDFEVRSTLYRVLGVDLTQIHGIGPSLALKLVGECGTDLAAWPSSKHFTSWLCLAPGNKISGGKLLSSKTRRSSSRAAALLRLAATTLGRSDTALGALYRRLSARAGKAKAVTATARKIAVLFYNSLRYGMAYHDPGATQYEERYRSRVIGNLQRRAKTFGFSLQELPPEPDMAVS

SEQ ID NO: 317903 - protein, 455 aa, unidentified
MAKNKTRHGKLDRSLPELKVNAAGIDIGSREIFVAVPADRDKDSVQSFPTFTEDLHRLADWLKQCRIDTVAMESTGVYWIPLFQILEARGFEVCLVNAQHVHHVPGRKSDVLDCQWLQYLHSVGLLKASFRPEQDVCAVRSLLRHREGLVQMSCTHVQHMHKALDQMNIQIHHVISEITGVTGLAIVDAIVAGKRNPKELAKLRDHRIKATPEAITKSLVGDYRPEHIFTLKQSLTAYRYYQQLIADCEEEVQLRLHAFDNKEDDHKEQTGPSSTAASDGNAATPKTPFHLPDHLERIFGVDLTRIPGFQGLRIQTIFSEIGADLSKFSSDAHFVSWLNLCSKDGFSAGRRIRSRNPKTNNRATTAFRLAAQSLHNHKSYLGDYYRSQRARHGAPKAIKNVAHKLARIFYHLVTTRQAYDETVFARQEAHHQKRRLLKLQSLATQMGYSLTELHA

SEQ ID NO: 317904 - protein, 342 aa, unidentified
MLEIAIVGLDLAKNVFQVHGADTEGAPVLRKKLRRTEVLPFFAKLPPCLVGMEACGGAHHWAREVSALGHQVRLIPPAYVKPFVKRGKTDAADAEAICEAVSRKTMRFVPVKSAEQQADAMVLKARELLVRQQTQAINALRAHLHELGIIAGAGVAKVSQLIDIARDPDDPRIPATARVALAAIVGQIDALGQELRRLERTIVAMGKRDPDTQRLTTIPGVGAITAASIKALVPDIGGFRSARHFAAWLGLTPKPHSSGGKERLGHISKMGNPTLRKLLVLGALAVLRRAKNAEPGLEWVARLPARRPGKVVAVALANKTARIVFALLSKGEVYRKPALATA

SEQ ID NO: 317905 - protein, 317 aa, unidentified
MATSTASFVGIDVSKHQLDVAVRPRGETWTAAHDEAGLSALVARLRALAPTLIVLEATGGWEVALAGALAAATLPVAVVNPRQVRDFARSTGTLAKTDRLDAQMLAQFAEAVRPEPRPLPDAQAQELTALLQRRRQLVEMLTAEKNRLPLASRRIRPQLQTHIEWLHKQIAQFDEDLRQLIRSSPLWREKDDLLRSAPGVGPVLATTLLAALPELGQLTRQQIAALVGVAPLNRDSGTLRGRRTVWGGRAQVRAVLYMSTVVAVRHNPVLIAFYQRLRAAGKAPKLALTACMRKLLTILNAMLKHHSRWAPLCAQPA

SEQ ID NO: 317906 - protein, 361 aa, unidentified
MRIIGCDLHARQQALAMLDTTTGEMVAMILKHEGNNVREFYSKLPRPVRVGIEATGSMQWFVNLMEELGIECQVGHPANIRAAEPRKQKHDRRDADLILKLLVENRFPKIWLPSKEQQDLRALLRHRHQWVRIRTRIQNALQAIALANGLRRGPGLWSQDGQRTIASLPLAPHAAYRRSELQAMYAKFAKEIEKLNQRVEEQACERPGARLLMTHPGVGPITALATEVFLGDAARFADSKALASYVGIIPSEYSSGERQRFGGLSKQGNPLLRFLWGEAAMHAVRRDPELQRFYRRKLVQKGLGKTRVAVARKLGIRLWIMLRDEIDYNEFCRRGQKQQKSSEACAGMPDTGHGAKQSPAD

SEQ ID NO: 317907 - protein, 353 aa, unidentified
MKHDKYMGMDVHQAMTVVVVLDADGKVILETMVPTEAAAIIRLVQSLSGPLRVTFEESTQAAWLYEVIRAYVTEVIVCDPRRNKLLEDGSKADKVDARKLAELLRAGLLRSVYHGHEATRNLKELVRAYETLSIDTQRTMARIKAIYRARGIRTPGRGVYQPKQRERWLELLTGAGIRQRVEWLYEQLDQLKPLRRKAKQAMLAESRRHRAVSLLRTIPQMGPIRCAFIVATVDTPHRFRTKRQFWSYVGLAVVTHMSSEYEMTAGRVVRRRKPVATRGLNHNCNRRLKEVFISAAIGGSLHEPYKPFLEKLKQNGMRAEMARLTLARKIAAVALIVWKKGVAFDPKKLNCTT

SEQ ID NO: 317908 - protein, 352 aa, unidentified
MKNLFIGVDFSKEKVDVAIIFADGLTETAARVFNEFKTTVSGYKQLVKWVEQNSYGIDSSLWLFCGENTGDYSKGLCNFLYGKGYDMWLENAKSIKDASGLRRLKSDRADASMIAEYAMRNYDKAVMYEPLSESLAQLRELFLYRQMVVRHRCSFQVRRGEKRLTMEKSPIKTMISQSGRHIVSELNKEVEKIDKRIAELIKSDEELTEVFTIVTSVPGIGTQNAVCLMVYTDNFRRFNYDSRKIACYYGIAPFGKDSGTSVHSDPRVHYMANRQIKSMLTQAALAAVNFNPIMARYYMRLVERGKKKQVALNNVKNKLVHLITAMVRNRQLFSPEYKINSSLKFEYMATRP

SEQ ID NO: 317909 - protein, 342 aa, unidentified
MKDTMIGVDLAKSVFVLHGASMLGEVKFRKKLSRSQFLTFIAEQSPAVVVMEACGSAHYWARQVVEFGHEVKLIAPQYVRPFVKRQKNDAADAEAIVIAAQRPEMRFVEPRSQWQQARAVLFRARERLVRQRTELVNALRSVLYEYGHTIPQGIVHLKRIEVLLDEPGSDLPGLVREECRDLLAQICEKTVRIQAKTRRIKEVAAETDTTRRLQTMPGVGPIVALAVEAFAPAMASFKRGRDFAAWLGLVPRQHSSGGKERLGRVSKAGQADIRQLLIIGAMSRLSWLGRRSITEGSWLDRMLARKPKMLVAIALANKMARAIWAMLTKGEDYSDPALIAAA

SEQ ID NO: 317910 - protein, 445 aa, unidentified
MTLSQLDEKRIQIKNKIIIGIDPANEKHQGYIIDEYGISIGKTFSFGNNHNGITTKLWYQLKKRLDPEQICPDKLIFAIEASLDFWQILAAYLENKGYKVALVSPLTTKKTRALPGNDFSRTDPKDARLVAENTKEGFFHWYRKDTAREKAMKTLSLTYNKIRKDLQSNQARLRSQIKRIFPEFLEIVTLNTETGIHLLSKYLYPEEYITMDIETTFNEISKISWRYTQTKLLELQTSATNSIGIPKSIEEKIADKITVTTLITLIKTLKQQQKIIKKELVKMAKESSYFEIITSLHGISDLTASLFLAEVVNPDKYDHFKQMQKLAGLNLRLNTSGNSRSYYKINKIGNSRLRWVVFQMTTETSKYIPEIRIKYLKRQLKQSSYTKNITACSAKLLQLLFCLMKNKQPYEYRAETQVLLVDLEEQYYRKTKKYKTKKQTKANYA

SEQ ID NO: 317911 - protein, 389 aa, unidentified
MFYVGIDISKFKHDCFIVTEAGEVVCDSFSINNDYDGFTELLSVLDSLDPKEDVRIGFESTGHYALNLKLFLEKAHYSFMEFNPVLLSKFNKSQSLRRTKTDAIDSISIARWLMTVDYKPYPIGFYHTYALKSLTRLRDSLVKQRSFYMVKITNVLDHVFPEFKPFFNNRFSKTAIYLLENYGSAKRIAKMNTRSYDPLRSISRGKFSMQKFLKLKELAKNTVGCDHELFTCQLNSLLSLYKQLANEIASIEDQIESLIAEIDPKTLSIPGIGPLSAAVIYAEYGDLSKFNSPAQMLSFAGLEPGYYQSGTSEHGGGMVKRGSSHLRYTLMNLCIPLIQYNMTFAEYYHKKRNEGKSHRVASSHLVKKLIRVIFTLEKNGIDFDPTKLR

SEQ ID NO: 317912 - protein, 353 aa, unidentified
MKCDKYMGMDVHQAMTVVVVLDADGKVVMETMVPTEAAAIIRLVRSLSGPLRVTFEETTQAAWLHEVIRAYVTEVIVCDPRRNKLLEDGSKADKVDARKLAELLRAGLLRSVYHGHEATRNLKELVRAYETLSIDTQRTMARIKAIYRARGIRTSGRGVYQPKQRQRWLELLTETGIRQRVTWLYEQLDQLQPLRREAKQAMLAESRRHRAVSLLRTIPQMGPIRCAFIVATVDTPHRFRTKRQFWSYVGLAVVTHMSSEYEMTAGRVVRRRKPVATRGLNHNCNRRLKEVFISAATGGSLHEPYKAFLESLTQTGMRAEMARLTLARKIAAVVLTVWKKGVAFDPKKLNCIT

SEQ ID NO: 317913 - protein, 342 aa, unidentified
MKDMMIGVDLAKNVFQIHGTLRTGEVQFRKKLTRMQFSAFMAQQKPCLVIFEACGSAHYWAHEMRAVGHEVKLIAPQYVTPFVKRQKNDAADAEAIVIAARQPEMRFVEPKTVEQQSRAAVFRGRERLVHQRTADVNALRALLYEHGHVFPQGIRSLNHMTALVEDETADLQSLIREECLDLLAQIAEKTARIIERTTKLKTLAAESDKARRLQTMPGVGPLTAVAVEAFGPDMSQFKTGRDFAAWLGLVPKQYSSGGKERLGRMTKAGQADIRRLLIIGAMSRLTWLGQRTIVEGSWLSRMLTRKPKMLVAIALANKMARQIWAMLIRNEDYKDPALAVAA

SEQ ID NO: 317914 - protein, 343 aa, unidentified
MNVYIGLDVSLASTAICVLGPQGKIVEELQADSEPEALVHAVGSLPYSIDAIGLEAGPLSQWLSKGIEEAGFEVVLMETRLVKAALKAMPIKTDRRDAQGIARLLQMGWYRSVHRKSVSSQEIRALLTARKSVQQAIINLELSMRGVLRNFGLKLGHVTRIKYEARVRELVDQNDILSASALSLLRAREQLRAELASLDTKITGLARHDDVCRLMMTMPGVGPIVALTVRSAIDDPNRFARSKDVGPWAGLTPRRTQSGEMDIVGQITKAGDRGLRTALYQAAMILMHRGAPNWLQSWALKVAHRRGAKRAIVALARRIGVILHRMWRDGTPFRFTQSSSATA

SEQ ID NO: 317915 - protein, 356 aa, unidentified
MLYSGVDLHRRSIVICTVNESGTVLARKSMKTQSELITNYFRQWPDQHRAVVECTTGWYWFCDLMRSLGVDVVLAHAKYLKAISYAKVKTDAVDALTLAQLLRMGYIPEAHQLPPEYRAMRDLLRQRMVMEHKRTNIIQRVTSILAQFNITDLPLSPYQSGFADFLNQCPIPEEYRMTLMMYHQQCLQTTEHREQLEKYFKAQLRPTPAVQLLMSIPGIGDITGSIVAMETGDIHRFADDKHYCSYCRLVPGAKDSGGKRSHRSGSKDGNQYLKYAFTESAIKAMRFYPQIKHFAARLERRATKAIARTVVAKELAKISYYVLSRQQEFKTFKGIEINKLRDWPRTRKPVRLTGGE

SEQ ID NO: 317916 - protein, 456 aa, unidentified
MYTIGIDLAITAAHKAIVAGAGGKFITPLLSFQTRWCDIQQLVARIRKDVPPDVPMRAVMEPTGMVWFPVSIALHSLGVTPYLVSGQRTYDLRRYFKRHSSSDRVSARVLAKMPFVDEESLYPLEIPSSTQFACQRACKELDRVQTDIAAIKNRLRDTDRFSWPGLEEVFSNIFSPVARLFRETWYDPFRVVSAGVERVQETFLPPSEHENDLSWVENLVDLASEVTKLYGPDALDYAYLQEEVCREQEHLDYLEKRKAALWRDTIRPLYRQLHPSRNLETLYGVGELSGAVHASYIGNVERFPTSRHFRGWHGMIPDSRQSGEFESKGLHISQAGPDLIKKFSYIGADVARRYDPQIAAIYYDQIVNKGKHHKQAVCACATHFLDRVYLVLKEDRPYELRDVDGTAVTPEEARAIIAQRYTVPGEVRTRNNQRVRKERKERRVERRYKKRGKRSS

SEQ ID NO: 317917 - protein, 353 aa, unidentified
MLAELVDHVIGVDPDRDWITAAVVDAKTTGVIATAKFAADNDGYDEAIEWADTHTEAGDRSWVVEGSGSYGRGLTATLSRAGEWVIEFDRPHQRSTKDGAKTDELDAVRAAREALGRHRLHTPRTHDGHREALRVHTVTRSGVVRARTAAINELKALVLTSPDELRSELRGLTTTVLIKRCAAFRTATKRPVAEQCVRNTMRVVARRIQHFNDEIDVHDAAMKQLVDESAPQLVAEPGIGYVTAAMFIIAWSHPGRCRSEAAYARLAGVAPLPANSGQSQDRHRLNRYGDRKLNQACHMVALVRWQHHEPTNAYIARRRAEGRTDREIRRCLKRYIARNVWRLLEHQSPRVTA

SEQ ID NO: 317918 - protein, 388 aa, unidentified
MQVIGDRPEAASAIRTNLGAIFVSLELSQSTWLITSLLPGSSEKMSKHVVHGGDIAGLLERFARLQEKARARTGRNFPIIVIHEAGLDGFWIDRALKNEGIESHVVDPASVATSRRRRRAKTDKIDGEALVRTLLAYKRGEPRVCAMVKAPTPEEEDRRRLCRERKVLITERVKHVNRLKGLLFSQGVCGYEPLRRNRRRRLDELRTGDGRPLPKHLKAQISRELDRLELLLEQIKVVETERDALLAAQQIAAPTSAAMLLAIKGIGPDFAAILWSEGLFRHFDNRRQIASYAGLAPTPWKSGSIDREQGVSKAGNPRLRTTLIQLAWLWLRHQPQSALALWFKERVVRNGGRLKKVTIVALARKLLVALWKYVTAGVVIEGAVMKVA

SEQ ID NO: 317919 - protein, 412 aa, unidentified
MTSISFGWYVGIDWATQAHQVTVLDAERRVLGERSVAHTGSALAELASWLTEICGGEVDRGAVAIEIPRGTVVETLLERGFAVFALNPKQLDRFRDRYTVAGATDDRRDAFVLAASLATDQPAFRRVRLDEPLGIRLRELSRLEAELHQEEGRLTNRLRDLLHRIYPQVLRLAPAADEPWVWELLELAPTPAAAQRLTRPALSKLLRAHRIRRLAADAVLAHLHAPPVSVAPGTVEAVSEHIELLLPRVRLVHAQRVRCLGRIERVLQAMAGAPPGQGEHRDVEILRSLPGVGRLVAATMLAEASQLLAQRDYHALRAQGGIAPVTRQSGTRARVDMRYHCNHRLRNALYHWGRVSAQCDLLSRQHYEALRRRGHSHGRAVRGLIDRLLVILMAMLRSQTVYDPTRRRAYAA

SEQ ID NO: 317920 - protein, 400 aa, unidentified
MTAVGIDVSKGKSTVALLSDTGKVLKKPYDAPHTRCALSELAKLIKECKDDVCVVMEATGNYHKPIANFLCEQGLSVSVVNPKLIRDFGDNTLRKPKTDKKDAIKICRYALTYRVQLPNYSPENDERSALKILNRQYSLAEKTLTMHKNLLISYLELVFPEINKMFTSHIRNSDGHEKWIDFLVRFPHADMVAKVSLNEFRLKYKNWCKTAKYRFCESKAEELHQFARECVCAVQNDEKMRFLVKEQAKMVNQLLEHMQNIRTKMTAIAQTLPEYDTVIEMYGLGSTLAVQMMAEVGDVRRFQNRRAVTAYFGYDSESDQSGTHESKSNPMTKKGSAYLRRTLFLVMVAHMQNQPDNAVYQFLDKKRSEGKNYYSYMAAGSAKFLRIYYAKVKKVMEQIT

SEQ ID NO: 317921 - protein, 349 aa, unidentified
MSMVGGLDLHRRQITYDVLDVESGEIWRGRLWQPDRARFRYWLEHEVTVRAHSRSVALAVEGCTGWRYVTEEISKAGFTPFLAEPADTQAARGKKHRAKTDRSDARLLRELLQSGELPESWIPPEAVLEWRERVRLYKSLVDQRTLWCQRIHATLYQHGVTIPEGAIRTEKTRSMLQSNDLFVSKAGRERIDAGYKMIDAADAEALPLRRVLQRFGERQPACRTLVDAQYGIGGLLAVVVWSELGDCRRFSRSEQVVRHSGLDVSVDSSDRRRANGHLSRQGPETLRWALYEAAKNSSHARSPDHGYYAKVKDRHDGKIATISVARQLARRSYHVLRAVDPELVYAIPA

SEQ ID NO: 317922 - protein, 340 aa, unidentified
MSLVLQSILPYPDSCLGTSPHQQGWDTKMAELSFGGIDVSKDRLDVLLLPEGLCFSVCNDAPGWAELIVRLRPLAVCAIGLEPSGGYERGIIRALLAAGLSVRRINPNKLRQFARARGVLAKNDRLDARLIAEYVAIMPTRVLQRDDAIERLAEIVTMRRQLCDEHVAAMNQATHLEDAMLRRISKRRLLRIEADILLLDKRLAELVAADPRLAHRYQLLISMPGVGPTLAYTLLATLPELGQIDRKQIAALVGLAPYDFDSGKLKGHRCIYGGRMPVRNVLYMAALSASRYNPALKAFSNRLAAAGKKSKVIIVAVMRKMIITLNAMLRDNTEWHPTAA

SEQ ID NO: 317923 - protein, 337 aa, unidentified
MRIIRVGLDTSKQVFQVHGVDKADQPVLRRQVRRGEMEKVFAKLPATRIGLEACGASHHWARVLRGLGHEVVLMPPQYVKPYVKRSKNDAIDAEAICEAMSRPGMRFVAVKSAEDQAGLMLLSVRDLLVKQRTMLINAMRGHAAEFGVIAAKGPVKIAELLQRAHAPEAGVPALVLELLNLLSNQLDALEARLKTIEAQLLVRHRSNPVSQCLATQPGIGPIGAISLTLRVPDPKAFRSGRHFAAWLGLVPKESSSGGRRRLGAISRQGDAALRKLLVLGATAVIRFAKPGKASPWLVNLLARKPKKLAAVALANKMARTLWAMMVSGEVYRRPRPA

SEQ ID NO: 317924 - protein, 341 aa, unidentified
MADVRVIGLDIAKSVFQLHGLDDAGATVLQKRLTRSRMVPYFEKLPPCLIGIEACATSHYWARELTRLGHEVKLMPAQYVKPYVKRQKNDMADAEAIAEAVTRPSMRFVSAKAPGEQSAMMLHKVRLMLNRQLVMLTNAIRAHMAEFGIIAPVGRGGGDRLLAVIDDDTDERIPAGARQCLQMLTAQLKFLKRQILENDRQVLSLARSNELGRRLMEVPGIGPLVASALIACVPNPSIFSCGRNMAAWMGLVPRQNSSGGKERLGSVTKAGNRYLRQMLFVGAMAVIRRAMQGTRRTWLARLLERRKPKVAAMALANKNARTVWAMMMSGDRYREPMVIAA

SEQ ID NO: 317925 - protein, 337 aa, unidentified
MEQYVGLDVSQETTSIAVRQDGRRVWRGKCPTDPKALSEVIRGQAPHAVRVVFETGPLATWLYHALQAENLPVVCIDARHAKAALDMAPNKTDANDADGLAQIAEIGFYREVRVKGYGPMLTRTLVGARSQLLRISVQLSNQIRGIMKTFGLIVPKGAGRIFERNARALLETNEAVARVVLPLLETWQVVRARAAELDRQLIAAARTGSSYRLLMTIPGVGAITAVSFVAAIGVPENFKRSRAVGAWLGLTTRRYQSGETDYDGHISRRGDRHLRALVYEAAVAVLTRARTDCALRSWGLKLKAKVGFKRAAIAVARKLSVIMHTMLKTGAAFAAAA

SEQ ID NO: 317926 - protein, 366 aa, unidentified
MMWTALRDLSAKVLFSVGTIRTRNHVMAFEKISVIGLDLAKNVFQLHAVDEAGDVIIRRQLRRNQLLQFFEHLPRCLVGMEACSTSHYWARELVRLGFEVKLMPPAYVKPYVKRGKNDAADAEAICEAVTRPTMRFVPVKSCERQALLMQHKTRDLLVRQRTALINALRGHLAEFGIVTSQGRLGLRAAIEALSAAQEFLPEPSWQPFEHIRKQLEELTHKIAELDRIILRWCRNEAAARRLMTIPGVGFLTAAAIAASVGDATEFKSGRQFAAWLGLTPRQNSSGGKERLGRISKQGDRTIRRLLVVGATAVVRRARLDAASFPWIARLLDRKPAKLVSVAIANKTARIAWAILRRRENYRFATA

SEQ ID NO: 317927 - protein, 407 aa, unidentified
MRLFVGDDWAEDHHDVEVMDGSGRRLAKARLPEGVTGMGRLHAIVGELAGEDADEVEVLVGIETDRGPWVAALVAAGYTVLAVNPLQAARFRDRLGVSGAKSDSGDAHVLADMVRTHSHELRPVAGDSAEVEAIKVVARTHKTLIWERTRHTQRLRHALRDYFPAALAAFDDLDAADTLELLAKAPTPAQAARLTLAQISAVLKRARRRNVAEKATAIQAALRAEHLGQPEVVAAAYAASIQALIAVLTTLNTQVKTLQGQVEAHFGQHPDAEIITSQPGLGPVLGARVLAEFGDDPTRYATAKARKNYAGTSPITRASGKKKVALARFVHNDRLIDALTTQAFNALLRSPGARAYYDRQKARGTGHNAALRQLANRLVGILHGCLKTGTLYDETTAWSHHINSAAA

SEQ ID NO: 317928 - protein, 333 aa, unidentified
MQTAKKIVGIDVGKDWLDVCLPDGRKEHIRNTRSCRTKLIKKAAKLGAIVCFEATGPYEEPLADECLARSVKAVRLDAWGTRKFAESQGRLEKTDAIDCEMIRDYAASLKDEKLHFIKPRSEAQKRLKKSVRTRKNLLKARAIIANQFEDDLDPETARHLRSALKSLDKNIAKVEAECDAAIASDGRLSELDRRFREVKGVGPCLSRTVLAQCPDIGDFNSKSIAKMCGNAPLDHESCTIKYTAKPRRGRSDLKKALYMAAVSASRNNHILREFYQRLVANGKPRKVALTAVARRIAILLNTIAKHPDFKPAQDPKATAKKAGAKHGRPRKSK

SEQ ID NO: 317929 - protein, 338 aa, unidentified
MTIYAGLDVSDKTTHICVVDDAGAIVRRDVVASDPEVLAKWLAKHCADLTRVVLETGPLSTFLYHGLTERAVPVVCICARHAKKALSARVNKSDVNDAESLAQLCRTGWYKRVHMKAGATHIDRAALKIRAQLIGSRGSFANQLRGMLKLFGLRMGRVTTPGKRGERLDALFTQRPDLRPVFMPLIESIEALDAQLALSSKLLDARAASDLVATRLMSVPGVGPITALTFKSAIEDPGRFRRSADAGAYAGLAPRRSQSGERDYNGRISKAGDPMLRSALYEAANNLLVRVKRPFALQTWGKKLAETKGHKRARVAVARKLAALLHTLWQSETDFCWN

SEQ ID NO: 317930 - protein, 398 aa, unidentified
MTESSDYESVQVFIGVDVGKDTHHAVAINRSGKRLFDKALPNDENKLRSLISDLKQHGQILLVVDQPATIGALPVAVARSEGVLVGYLPGLAMRRIADLHAGEAKTDARDAAIIAEAARTLPHALRTLKLADEQIAELSMLCGFDDDLAAQTTQASNRIRGLLTQIHPALERVLGPRLEHPAVLDLLQRYPSPEKLASLGEKKLAAQLCKLAPRLGKRLAADIAQALAEQTVVVPGTNAAAVVLPRLALQLITLRKQRDEVALEVEQRVLAHPLYPVLTSMPGVGVRTAARLLTEVACRAFASAAHLAAYAGLAPVTRRSGSSIRGEHPSRRGNKALKRALFLSAFAALRDPLSRAYYTRKMSQGKRHNQVLIALARRRCDVLFAMMRDGTFYTPQGS

SEQ ID NO: 317931 - protein, 329 aa, unidentified
MKVTSIMGMDVSKNTLDCHLFNEQKSLSPVSNDVKGFKSIKRWLLKEMKTTKGLLVVMEYTGIYTYSIERFLDQQGIKFVKRPALDIKRSLGIVRGKCDKIDARFISKYGWMRKEELKPMSPLTDAQLDLQQLMSHRDKLVADKASYQAKLKELVTQMKDKVNERMATSMKYVMEVLTQEIKQTETSIKELIASEQSLQTNYDLSSSVTGIGFATAVHLLIATENFTRFDNVRKLICYCGVAPFEHSSGSSIRAKVRVSHLANKKLKSLLTMAAISAIQHDPQLKVKYEQKLKEGKAKMCVLNIIRAKLIERVFAVIKKQKAYELRTAA

SEQ ID NO: 317932 - protein, 369 aa, unidentified
MEQGIRAYVGLDVHKDSIAIAVAEAGRSAGRMVGQIAHDVPKLLKALARLGEPGELYVVYEAGPTGYGLQRALFAKGYRCEVIAPSLIPRRAGDRVKTDRRDCLRLAELSRAGELRTVWIPDRGDEAIRDLSRAREDAVNSRTQARHQLKAFLLRHEIRYSGKTAWTKSFYRWLGELNFGDASSQVAFTEYHLAVQAADQRLERLTKALAVSVTGWRFEPVVQALQALRGIDVVSAIGLVAEIGDIARFDHPRKLMAYLGLVPSEHSSGDRVRKGSITKTGNAHARRLLTEAAWNYRFTARIGRAAQARQEKLTEAVKSIAWKAQLRLTARYARLNGRGVHHNKVCVAVARELAGFVWAIAQTRSAQAH

SEQ ID NO: 317933 - protein, 359 aa, unidentified
MPQLAGQVDGVVGVDTPVDTHRDTLTAAVVNPIGAVLADAQVSADADGYQRLLELARQQVPGRRCWALEGTGSYGAGLADFLDAVGEHVVEVCRPKRPAQRGGRKTDALDAVRAAREALVSEHLIHPRRRGEREALRVLLATRGGAVLARTAAVNQLKALIVSAPEALRAELRGRTSKQQIASCLARTTRPGDDVELRATMRALGCTAERIQTLTTEARELEQEIDLLVQAMAPELLALVGVGPISAAQILVSWSHRGRFRSDAAFAAFAGAAPIPASSGLTTRHRLNRAGDRQLNRALHTVVLVRARVDPATRASASMPSASARPRWHSYGCPRPTAGTSTTCSTGWRTAASPTCSPR

SEQ ID NO: 317934 - protein, 423 aa, unidentified
MNQPTLCIGADVHLDEIVLCVVDKADGHEVSEHFRVTNNRPGAQAAATAIAETAARLDFTRIEIGWEATGMLWIPFHRYLSSCPQLQPFEPRLVCFNPQLVTKFKDGLVLRRPKNDRLSASAISARLRFGELPLSYVPGDLWQGLRRLTRYRFHLSCNLSREKMRFQSYAFLKCSDWKRVKSFSDVFGATSIALLTEFTVAELAEMTHDQLVGLISRRGRGHFEDPTGTARKVREALRSSYPIDPHMDEMVTATLSTIWEHIRFIKRQMKRLDKHIARIIDPVPNPIITIKGLGAVITAGILAEIVDVTRFAEHKHLAQYAGLTWEKRSSGNFVSQNTRLTKAGSKYLRYYLIMGANTLRQFNLEYKAYYWRKHGEVAKYQHKRALVLTARKLVRLVHALLTKNVPYVRPQALANVQEDSTLQ

SEQ ID NO: 317935 - protein, 402 aa, unidentified
MNAVGIDVSKGKSMVAIMRPFGEIVSAPFEIKHTASDINSLVELINSVEGESRIVMEHTGRYYEVLAHQLSEANLFVSAINPKLIKDFDNDSLRKVKSDKADAVKIARYALDKWQNLKQYSVMDELRNQLKTMNRQFSFYMKHKTAMKNNLIGILDQTYPGVNTYFDSPARSDGSQKWVDFASTYWHVDCVRKMSLNSFIDHYQNWCKRKKYNFSQSKAEEIYGKAKELVPVLPKDDITKLIIKQAVDQLNSASITVESLRTLMNETASKLPEYPVVMAMKGVGTSLGPQLMAEIGDVSRFTHKGAITAFAGVDPGVNESGSYEQKSVPTSKRGSSDLRKTLFQVMDVLIKTHPQDDPVYQFLDKKRAQKKPYYVYMTAGANKFLRIYYGRVKEYLASLPES

SEQ ID NO: 317936 - protein, 408 aa, unidentified
MQVLYTRCAGLDVHKDTIVACVRCVSPPLHQEVRSFGSTTTGLLALADWLAEHGCTHVAMEATGVYWKPVWHVLEDEFELVLANAAHIKNVPGRKTDVNDAMWIADLLAHGLIRSSFVPPQAIQQLRDLTRTRKQLVREVSQHSLRIQKVLEDANLKLGSVLSDVLGKSGRAMLDAIVAGQTDPEQLAALAQGTARHKTAELREALRGRISEHHRTMLKLHLQVVDALQRTLAELDTAVGKALAPIRQRARLLTTMPGVSDLTASVVVAEIGVDMSRFPSAGHLISWAGLCPRSDESAGKRRSTRVRKSGTWIKTTLVTAAWAAVRVKTSYLRAQFLRIKARRGAKKAILAVAASMLTAAFHMLRDGTEYNDLGSEHFDRQDKSKTIRRLLKRLQDLGCDVPTSAHST

SEQ ID NO: 317937 - protein, 343 aa, unidentified
MENLGIDLGASKSRVCVLDETGEVLIEREIGTRRLASFLAARPASRVLMETCAESSRVAEQAKAAGHEVVVVPGKLLRQLGIGDRGIKTDIRDARTLAVASRRLPELRGIHLRSASARELGRVCDARDHLIGTRTRTVNAVRGYMRGRLLGLRTRFSVKFCDAVRQVLTSEPEGMPLDIALMLETIEYVSAQLERLTTELEKTVDSSTVCKLLMTMPGVGPITAARFVAAVDTPDRFESGAKLASYLALVPGEATTGGKIKRTALIRAGSKRLRATFVQAAWSMQRVKAADPLVTWTKSVAERRGKKIATVALARKMTTVLLAMWRSGMNYDPTRARPTPPAA

SEQ ID NO: 317938 - protein, 370 aa, unidentified
MAKCSEVFVGIDTAKTRHAVAVAEAGRDGEVRYLGEIDSAPAAVERMIKKLGSRYEKVHVCYEAGPTGYGLYRQVRALGHECTVVAPSLIPKKPGERVKTNRRDAVSLARLFRAGELTAVWVPDAVHEAVRDLVRARASAAADVRKKRQQLLSFLLRHGRVYSGGKHWTQAHARWLAKQAFEHPAQQIVFQDAIDAIEDCTGRLQRLGEQLQAIVPTWSMAPVVAAYQAMRGVSFEVAVTFVAEIGDVRRFDSPRQVMAFLGLVPAERSTGDNVRRAGLTLSGNQRARRALVEGAWTYRYPARVSARLQRRSEKLPKAIRDIAWKAQVRLCARFRRLAASGKKTPVIIAAIAREMAACLWAIGQHVAPVS

SEQ ID NO: 317939 - protein, 344 aa, unidentified
MSEVTTIGLDIAKNVFHAHGADASGQVTFSRRITRGKLLEFFGRQPRCMVALEACGGAHHWARELQAMGHEVRLIPPAYVKPFVKRHKNDAIDAEAICDAAQRPTMRFVAVKSEQQQAAALLFRTRDLLVKQRTQLGNAIRGHLMEYGWVAPKGPSHLAMLADLLDDGEMAATLPEAARPMFAMMVDMLAELDKRVAALDKEIARRAREDEVARRLMTIPGIGPITATAIAAIAPPAETFAKGRDFAAWLGLVPKQASTGGKQKLGAISRMGDRTLRRLLIIGSSAVVLQASKRGAPKGSWLEGMLARKPRMLVTVALANKTARIVWAVLIKQEDYRAPVAVAA

SEQ ID NO: 317940 - protein, 456 aa, unidentified
MAARNARVSRVRRKPGQSRAALTITHPNAAGIDIGSASHFVAVPPDRDDEPVREFPSFTVDLNALADWLRACGVDTIAMESTGVYWIPLFELLESRGFTVLLVNARHVKNVSGRKSDVLDCQWLQQLMTYGLLSGAFRPTEQVCVLRALWRQRGMLLKSQARHVQHMQKALTQMNIQLTNVISDVVGETGQKILRAIVAGERDGQVLGAMKNARIQASLEEIAKSLQGNWRAEHLFALKQALDAFDFIGTQLAECDQEIEAQLQRLQVHDGEPAKGKKRGRARNAPKFDLRTQLFKMCGVDLTRIDGIDVTTALAVISETGADMSRFPTVGHFASWMGLCPGTKITGGKVMSGKTKRCANRAAQALRLAAAALRTSRSALGAYFRRMCSRMDKPKAVTAAAHKLARLIYTMLTKGEEYTDQGQDYYEERYRERVLRQLSQRAQKLGMQLVATEQPA

SEQ ID NO: 317941 - protein, 325 aa, unidentified
MNQSGRVLKKKKLKRYQVLSYFSQLEPSIVVMEACGSCHYWCRELTKAGHEVKAIAPQYVVAYRKSNKHDYNDAEAIAEASQREGMRFVPFKSQEQQDIQLMHRIRERMIAQQTALSNQIRGSLAEYDIVYARGVATVVKELPFTLEEADNGLSMLARQLFQGLFNDLLVLRERIKEMDKELKAFAQNHPVCERLMSMTGIGPLIATALYAGIGQGQAFNSGRHLAAWLGIVPKQHTTGDNPRLLGISKRGNTYLRTQMINGARAALRHIGDKTDKVSQWCRACLARMSFNKACVALANKMARMAWAMLHHQQDYLPGQINKAAV

SEQ ID NO: 317942 - protein, 330 aa, unidentified
MKNLFCGIDISKDFLDYAICNGENKTIIAVEKIENDKKGIKSLIKHLKKESDGGSIWVCFEHTGNYGLMLASVLSEFNIDYSMVPSLEIIKSSGMVRGKTDAVDAKRIAMYLAVNNYKLKPTKLPSDEIMKIKTLLTLRQQYVKIRTQFKNSVKSLKISAKIIPLRDEIKQQEKEISRYKSLIKKIEAQIKDIIKGNEHLDKNYNKITDILGIGLITASQFLVSTNNFTAFENPRKFNCYCGLAPFEYSSGTSVKGRTKTSHYRNKELKAALFKAANTAITHDMQMKTYYNRKIGEGKHKMTVINAVACKLVYRVFAVVKREKPFVRMAF

SEQ ID NO: 317943 - protein, 369 aa, unidentified
MQNTMFVGLDVHKATISVAIAHGARDGEVRHWGTLPNRADHVRRLAEKFGSDGRQLYFCYEAGPCGYGLHRQLTELGHDCMVVAPSLIPVKAGDRVKTDRRDALMLAKLHRAGELTAVWVPDRAHEAMRDLIRARATAVSVAGKARQHLQGFLLRHGRIHPGKKGWTKAYRRWLSTVRFEHSAQQIVLQDYVHAITDAEARIERLTKQIADLLPSWSLATLVEALQAMRGVAFIVAVTVVAEVGDFSRFDNPRQLMAYLGLTPSEHSTGKTIRRGGITKAGSGLARRVLIEGAWSYRMQARVGRKLVDRIEALPATVRDIAWKGQLRLCQRYRHMMAAGKPKVVATTAIAREMVGFIWAIARAVTPVSA

SEQ ID NO: 317944 - protein, 402 aa, unidentified
MNCVGIDVSKGKSMIAVMRPFGEVVVSPFEVRHTANELSELAGLLKSLDGETRVVMESTGNYHAPVAWLLHDAGLYVSVVNAMLVHDYGNNSLRRAKTDKKDAVKLANYGLDHWLTLPRYIPEEDTRLMLKICYRQYQQYSKVQTMLKNNLISLLDTTFPDANRLFTSPPRADGSEKWVDFVATFWHCECVCGRSEKAFTTQYQKWCRKHGYNFSEDKALDIYASACRHFGVIPKTDTAKLLVEQAISQLQTTSSALAALKQEMQSLAASLPEYPVVMEMFGVGPALGPQLMAEIGDVRRFHSKKALVAFAGIDAPPYQSGQMDIRSRSISKRGSASLRRTLFLVMGVLLQCAPMDEPVYQFMNKKRSEGKPYRVYMMASANKFLRIYYASVKAYLDSLEHD

SEQ ID NO: 317945 - protein, 341 aa, unidentified
MGIVGGFDIHRRQITFDYVDTDTGEVSRGKIAPADRQHVRSWLARFAGRSDVAFALEGCTGWRFVVEELKRVGAEAHLAEPADTAKERGRKQRAKTDRSDARLQRELLATGRLPESWIPPEHVLEVRARVRLYKDLADERRGWMQRIRATVFHQGVPALACHLLDADGQAHLEKAELSPAGRESVEVALRQIDRLDTELSALRHELVAFGQHQLGCRALQSHYGVGALLSVAIWEELGDCRRFGSSSDAVRHSGLDVTVWASDSKRAQGHLARQGPAILRWALYEAALSAAKPTSPDHGYYLRVRERLGPSRAALSVGRKLSRRCYHTLRELGDDALAPVA

SEQ ID NO: 317946 - protein, 343 aa, unidentified
MDHFAGLDVSVKETSVCIVDDTGRIVREVKVASEPEALLQELAKSAYRFRRIGLEAGPLSQWLFSGLVEAGLPVICVETRHMRAALKAQINKTDRNDARGMAQMMRAGLYRPVHVKTLRSQKLRMLLTHRKLLQSKAIAIENDLRGTLRNFGLKVGVAGAVKFEARIKELVENLPDLAVLVEPLLIVRRVLREQLGILHRRLLAIVRDDEVCRRLMTVPGVGPVVALTYRATVDVPARFRTSKAVGAVFGLTPSQHQSGESERTGAISRCGDEMMRVMLYEAAHIMLVRSAKWSWLKAWAMKIARHRGMKKAIVALTRRLAVIMHRIWVDGTEFRWTREVAVA

SEQ ID NO: 317947 - protein, 390 aa, unidentified
MLMKGNRTIGVDMHPDVFAAAALAGANAVEATVEWVYDRQETGRLETWAQKHLRADDVVVLEASGNSFEVARRLHACGVTAVVMESAQASHIRHNFCNDDRQSAVKLARVYLSGLAKMVWQPDQLTRERRDVFFAHRNAVKDTTRCRSRIRSFLNQYCVRLARGTSLVEKTGLQVALNKRAWTPLQQQLIAQLFQQLWDGEKRRKELERIMVRELAGHPQWARLWRLMGVRHRVAFGLMALIGDIHRFPSAKNLVGYLGLSPCKDQSGNDAKGQEKGLSSKGRSDVRALLIQSAQNAMKQKASPLHRWGWKLAVKKRYNEAVAAVARKLAVAIWHLLQGHCTPLLEASEHLTAKLYKLATVLGRETLISLGFKNREAWVNQQIKLIQLST

SEQ ID NO: 317948 - protein, 339 aa, unidentified
MKKTFQNILGIDVSKLTFDVALIVSASSINNTVSSSFSNNKKGVSQLIKFLKKQGIKNLNDELLICMEHTGMYSRILVNNLSKFTTNIWVENAYSIKHSTGIKRGKTDAADSIDIAKYACRFMDNAEQYDEKTNTVQTLQDVLSNRSRLMNALTNLQKPIKEMESIGLNDAANLLKKHCKAAIDGLTKSLKLIEKDIAEIVKKDEEAKQKISLLQTVPGVGLLTALSFYCTTNGFKNFTNKKQLACYCGIAPFPYQSGTSIRGRNQVHFMGNKTLKSSLFLCSMRVIQLKGEMQDYYKRKVEEGKSKMSVLNAISNKIVARMCSVIENNEPYKNYLLLS

SEQ ID NO: 317949 - protein, 388 aa, unidentified
MPAAETPVAYLGIDVGKSSHSACALDAGGGVAFRAELANRPDDIDRLLERAGSGALVVVDQKRNIGALVLARAHAHGNPCAYLPGYAEKQARGMFPGTAKTDAIDAEVIARTALGVPRALRPAPEEPEGAASLRILSSQREFASSARTRAKNRLRATLLEADPALEGAVDPSSRWQVSMLAEFGGAAGCSAAGWRRFSNAARRAGAPAAGARRLWEALLASSRSGRRLPAGEDVAVRMLAREIASLDADIEELDSLVADSLAGDEVYECLLTVPGIGPKTAAALVTSIDISAFRGHDELASYCGVAPSDRRSGSSIRSTSPQHGGNRQLKNLLIFSCNSLIGTDNRFGRYYGECRARGMRHSKALKAVARKRLKVIYAIMRDAVPYAS

SEQ ID NO: 317950 - protein, 374 aa, unidentified
MADCSEVFVGLDTSKLRNAVAIAEGGRNGEVRYLGEIENTEAATCKLAKKLAAQHQRLTFCYEAGPTGYGLYRQIKALGHECMVVAPSLIPKKPGDRVKTNRRDALNLAKLLRAAELTAVWVPDARHEAMRDLVRAREAVVDDLKSKRQQVLSLLLRLGRHFTGKRTWTRAHMTWLVSQKLAHREQRIAFEEMLLAVRQADERVIRLERAIAAAVPDWSLAKMVTALMAVRGLNLISATIFLAEIGDLSRFASPRQLMAYLGLVPGEESTGDRVWRGGITKAGNHRARRILVECSWSYRHPPRVGKKKLAKVDAAPPAVQEIAWKAQARLTARYRALARRGKRPTLVVTAIARELSGFIWAVSRAVGAPATAAM

SEQ ID NO: 317951 - protein, 322 aa, unidentified
MSVSVLGIDISKQKFDAALLIDGKTKHKTCKNSTEGFETLMIWLEKQGIQKVHACLEATGNYGEDLAISLHDAGHIVSIVNPARIKGFAQSELIRTKTDKIDAALIARFCLAMKPGAWIPPSSESRSLRALVRRVDSLIDMRSQEKNRISTAHESVIVLIKEHNVYLDQEIEKIRRQIADLIGHNPHLTRRKELLDSIPGIGKAIIPHILAELDDREKFTRVREMVAFIGLAPKETLSGSSMKRKPRLYKIGHARLRKALYMPALVSIQCNPVMIAFYNRLKDKGKNGKGIVCAIMRKLVHVIFGVLKSGKKYDPNFKPILA

SEQ ID NO: 317952 - protein, 388 aa, unidentified
MPDVTPCLHPGQVRRWIAIDQHKFSIVAGILPPDGGKPEVCRIETTEKAIRRFIEKQGGPAGLSVCYEGGPGGFALWRLLTKIGVGCDVVAPSLMPVRAGDRVKTDRRDAKKLVSLYRAGMLRFVHPPTPELEGLRDLLRARDDVRLARMAARNRVLKQLLRHGRIFREGKTAWTKVHRAWLARQRLDDPLAHEALEQLLIHLDGIERQLDTLDARLAEIAGGERWAGQVQVLTRFRGISTLTALGLIAEIGDFARFSHPRELASWLGITPSEYSSGPQQHRGHITLSGNRHARRLLIEAAWHYRHAPRRPASGPPPDERAWQAQVRLHHRHRHRHLAEHGKRTTVANVAVARELVGFLWAAMTDQPLRATHDPSLSPANHDQQEAAA

SEQ ID NO: 317953 - protein, 339 aa, unidentified
MFIIGIDPHKRSHTAVAVDRSETVLDTIRVDADRHQRSRLLEWATRFEPRTWAVEGATGMGAMLAQQLVGAGEHVLDVPPKLSARVRLLERGRIDKTDPNDARSAAIVAWRTPALNVVTVNDEHRVVLRLLADRDHQITAQRTRSICRLHALLCVLIEGGTAKSLTVARAEKLLASVHADGPIILERLTMARQLIEEVRTLDAARAEIRRRHVTALEASKTTVTNVFGIGPLTAAIIVGRVGDVRRFPTAGHFARHNGTAPIEASSGPKTRHRLNPRGDRQLNHAIHMAAVTQVRNDTPGRAYYLRKQAEGKSRKEAMRALKRRISDAVYQRLITDAHR

SEQ ID NO: 317954 - protein, 393 aa, unidentified
MVPAWEFSHEPEKKSSPCPLFIAFESEQHLSACDALIVEPAFISLDLAMTAPDRSSSSDSVPPAAHHVGIDVSKASLEIALIRSEEDDFASKTVSNTEDGFDELLNWIETQADVRLEENPEQVHVCLEASGDYQRPAARFLQKRGLTVSIVNPLRTSAYAESQLSRSKTDKVDARLLARFCRREEPSPWEPAPSEQKSLKEMTRGLEQLKKERDRLKNQIRQSENPTVTSSLGSVLESINEQIDQLEDQVDKHVESTDTLARNRDLLETIPGIGSTTAALVLAELGDHERFECARQAAAYAGLTPSHHESGSSVHRKPRLSKVGNSRLRRALYFPAIAALRCNAAVEALGDRLAERGKEKMVIIGAAMRKLLHICYGVLKNQSSFDPSLHPGT

SEQ ID NO: 317955 - protein, 425 aa, unidentified
MNSISNKKINQVTDQTLVVGMDIAKKKHYACFVDERGRVLKKPFPVLQSREGLEWLYQCIVEAMKEFGKTEVIVGIEPTGHYWLNLAYFLDEKGIPLVMTNPMHVKRSKELDDNLPTKHDAKDALVIARLVKDGRFSYPRILKGMEADLRVGATFRSKLVEEQGAIRNQMIRWLDRYFPEFSQVFPSFGKMALAVLEYTPFPGDLAGKELEEVLALYRQSEGLQSPQKPKAKKLMELAQHSIGVTEGQQMARIEIATLVRRYRQLEKEIEALTEQLIELVQTSVEYEWLKTVPGLGDATIVELLSEIGSFSHYQDPRQLIKLAGLTLREHSSGQHKGQKRISKRGRRRLRALLFRVMMPMIRHNEAFRQLHDYYTTRPDNPLRKKQSIVVLCGKLLKVLHAVCTKRQAFDVKRMMQDIFGLETAA

SEQ ID NO: 317956 - protein, 332 aa, unidentified
MAYDFVIGVDVGKYFHHACVLDPQGRQVLSKRINQHEGSLRKLFGQFLADNASVLVIVDQPNNIGRLTVAVAQDMGADVRYLPGLAMRQLSRIHVGNSKTDVRDAYVIAHAGLNLPDALRSVDRVEEVFTQLKVLNGIDEDLARAYTRLINQMRSALVGTYPAFEHVLRGQMIHRKWILHLRAKYGGPTKIRRIGRTRLAAFARSHKARNPEPVINAMLAAIHGQTMSIAGAEYAELGVAMSAKDALAKLEHRKEIEAQVLKLIQDIPQTEILLSMPGIGPRSAAQILMTVGDMSDLPDAAHLASYAGLSPRTNQSGTSIMSNSPNRAGNKN

SEQ ID NO: 317957 - protein, 429 aa, unidentified
MNGATNEPKQVRWETIRLYGGLDWAKDHHDVVAVDAKGQVVVEVTIKDTADGWAGLRDRLVGQVGPELSAVAVAVETNNGPAVERLLALGCRVYPMNPKAAGRYRDRKAPSGGRNDRLDAYSFADALRTDGHGWRALKPDDPATQELRILCRDEMHLIAQRTALVNQLRAALREYYPAALEAFEDWTSPAAWSFVQRFPTPAILVTAGKRQWEKFLHVQRLYRPETYPRRLEVFARADRFAGPPAVTAAKSRLAVALAGQLQVLEKQLAEYRTVIEALFAGHPDHDIFDSLPGAGKKLAPRLLGELGADRDRFGDDAEALQCYGGTAPVTIQSGKNRWVKLRRACNKWLRSTVHLWANLSRAKCVWAAAYYDRKRAEGHSHARALRCLGQRWLKILLRMWRDRRPYDEALHLANMVKRGSWKLALESDK

SEQ ID NO: 317958 - protein, 344 aa, unidentified
MSKFNLICIDLAKNVFQVGQFFHQKLQSNKAVSRKELLSILTTSPRCKVVMESCGGAHYWARKARSVGHEVVILDPRFVKAFRIGQKTDANDVIAIAAASFSPNVRPCKSLTQAQQSLQSIERMRALAEKQKRQLANQIRGLLLEFGIVIKQSECAFRQAIPEILEDSDNGLTAGLRQCIAQCYELFKAQSTLKETLNELLTGLVKQDEQCERLLALEGVGPITAVGLLISLSDTTHFTSGRNAAANIGVTPRQHSSGGKVRIGHIAKYRGEMILRSHLFLGARAVINQLKHREPKTKKEQWLKALVERRGVKCAAIALANKTVRTAYAMLKKGTRYEPSLLAN

SEQ ID NO: 317959 - protein, 408 aa, unidentified
MSPQIIAPTRFIGLDIHKHYLVAVGVDADLNQVLGPQRVELSRLEQWMARSLCQDDTVVIEMTTNTWQLYDELLPHVGSVTVVHPPHVALITRSQVMNDKIAASILARLLAKGLLVGIWVPPQDVRELRALIAQRNKMTRLSTQSKNRLHAILHRHHILPPAGDIFHPERRDWWLGLELDPAEKTNLLCNLEALAFSHLQIVRIETTLKVLVSQDERATRLIHLPGIAMINALAIMAAIGTIERFPTAKKLVGYAGLGGRVHDSGMTSRQGRITKAGRRDLRTAMVEAAQTAANTHPHWKAELARLSPRLGRNKAVVAIARKLLVAVWHVLSDDEPDRFADAGIVARKMMQHAYLLGKANRPEGLSTGQFVRQQLDALGIGADITEIPWGVTRPPLPLPPSKLLAGIE

SEQ ID NO: 317960 - protein, 337 aa, unidentified
MDNYIGIDVAKVTLQVFIPKKNLNVEIENSFDGLKKLYGKLKKQYRKSIDDIVFIYESTGSYSTILEQYCQTKEIKCFKVGAYQSASFSKVIKNRNKTDVVDARMLSQMHILAKSGDIKIPSRDEKAHQIRSFIKYYQSLVKEHIRQKNYLEAATYNLEDKYILKQVSKKITFLEKEQDTIIVKVMDIIKANPAYLEAYENITSIKGIGEKSGIILLYLFLRYPNASRQHVTALCGLDPIQRSSGTSIQHKERISKQGLSLVRAILFMPTMAAIQHNEEMKLMYDRLVERGKPRMSALIAVMRKIILLAHSLYKNNQQYDPARYLNFTQIKEVITIK

SEQ ID NO: 317961 - protein, 353 aa, unidentified
MNSLTDLREVVDVVIGVDTHVHTHSAAAVNAATGGVLGEITVEATAEGYAQLVEFAGEHATLRAWAIEGTGGHGAGLSRHLLDREEIVVELDRPKRAKRRNGAKSDPLDAIRAAREALARTRLGTPRSGGDRQALSVLLAARRSAVQAATEAQLQVFSLVIAAPEPIRARFRGQKLPGMLATAASLRVHSSWDVETTTTVMALRSLARRTRALTIEAAEHEKAIRTIVRTWRPDLLEQLGVGPIVAATVLCAWSHPGRIHSEAAFAMLAGVAPIPANSGQVTNRYRLNRYGDRQLNRALHTVAQSRIRYHGPTRDYVARRTSEGKTGREIKRCLTRYIARDLYRLLESGPMPA

SEQ ID NO: 317962 - protein, 441 aa, unidentified
MAMRTQDEEVVFPNAAGIDVGGSSHWVAVPPRSTDDPIREFGAMTDDLNAMADWLLACGVDTVALESTGVYWIPVYEVLEQRGLKVWLVDARQMRYVPGRKSDVQDCQWLQKLMSLGFLRAAWRPNGEVCTLRAVARQRDILLADQASWVLRMQKALVQMNIQLTEVLTDVMGMTGQAIIRDIVAGECDPKVLARHRNGRVKASEAEIVKALTGNWRDEHLFVLGQALAMYDDIGRHLVECDAKLQGLMTDLGRTQVDLGKAPRPGSKLRQEFDIRQILANWAGVDLTRINGLGLAAAMKILTETGPDLSRFETVKQFCSWLGLSPGTKISGGKVLSAKTKRSANRVRQALKMAAMSLWHSDSALGAFYRRLCSRMDKPRANTAVAHKLARMVYFILTRGEDFVDKGQQRYEEQQHQRSVAALKRRAAALGFKISPAVALA

SEQ ID NO: 317963 - protein, 349 aa, unidentified
MTKTITIGMDLGDKFHLAVVFDENGNELEVSKVKNTKAGVNNFFSHYTAGTVAIEAGTHSPWITRVLEQMGYNVYVGNPRKLRFIWDSNDKSDERDARMLAMVCRIEPRLLSPIKHRGSQAHADLALIKSRDILVKSRTKLINHVRGIVKTTGERLPSCSTDSFAKRCESCIPAELRPALEAVFNIIRQLTQQIHDLDSKIEQMCRQKYPETESLRQIPGVGPVTALSFILTIEDPQRFTKSRQLGPFLGLTQRRDQSGETDKQLPITKAGNKYLRRLLISTAHYILGPFGPDSHLRRHGLAIAARGGKNAKKRAAVAVARKLAVLLHRLWSSGDRYEPFFEIKEKKVA

SEQ ID NO: 317964 - protein, 346 aa, unidentified
MMLIGCDFHPSWQQISWFDEATGEIGEQKLVHASGDAEKFYRQLPAAVLIGMESTGNCQWFVEMVTAAGHQVWIGDAAKIRACDVRQQKHDKRDAELLLKLLMEKRFPRIWTPSSQQRDLRQLLIHRYKLVRLRAQAKNGLQHLAMNQGVQKKRRLWSKAGQKLLLELPLKPWASRRREDLLSVITMLDQQIQSLDLAVTEAAEKDPNARLLMTQPGVGPVTSLAFVLTIGDVSRFPRGKEVASYLGLIPREYSSGGHRRYGSISKQGNRFLRMLLVEAAQCAVRCDPQMRSEYLHRCHQKPKGVAKVAAARKLAVRLYWMLRTQKAYPAIVSIESSSRVALVGAS

SEQ ID NO: 317965 - protein, 286 aa, unidentified
MDIKYIGMDVHKEAIAIAVMNGDGKLVMESILETKAITILEFIQGVRGDLHVTFEEGTWAAWLYDLLKPHVRELVVCDPRKNALMKEGNKSDKIDARKLADLLRGGYLRSVYHGENGLRTLKELARSYLTISKDLTRVMNRVKALYRSWGILCGGQQVYAPRHRAEWLNKIGEAGVRRRAEFFYQQLDALRELRQAVRKDLLAESRKQSATKLLRQVPSIGPIRTALLIALMQTPHRFRTKRQLWTYSGLAIETRDSAQYRYVPDSCNVPRNHSNFVGSIKITIMI

SEQ ID NO: 317966 - protein, 404 aa, unidentified
MVYLGIDWAEAHHDVCLMDEGGTRLAGTRVPDGLEGLRRIHELVAGHTDSAENVVVGIETDRGLLVRGLVAAGYQVYAVNPFAVSRYRDRHATSEAKSDPGDAKVLADLVRTDRHNHRPVAGDSELAEAVKVLARAHQTLVWSRQRHVNQLRSSLREFYPAALTALGTDLASRDALAVLGRAPTPAEGRRLSLSQIQAALRQGGRERNLATRSTDIQQALRAAQLEPPPRLAKAYGSSVRATVRVVAQLNAEISELEAALAQAFDEHPDAEILRSLPGLGVVLGARVLGEFGDDRTRYQHARARRCYAGTAPITRASGTRLVVLARMARNRRLADALYLWAFSALTCSPGARRFYDAHRARGNTHHQALRALGNRLVGILHGCLEHRMAYSEAIAWPLSAVIAA

SEQ ID NO: 317967 - protein, 320 aa, unidentified
MQEPTPSKLCIGVDVAKAELVISMEPERRPRSVVNDEANIAAWLRAVPAGALIAMESTGRYHSLLAHLASQAGFTVYVLNARDVYFYARALGTRGKTDGVDAAVIARYLTEHHTRLHPWEAASAVQHQLQDLLTRRAQVVVQRSALRQIFTGVDTQDLAMETLQKGFDALLQSMDHKVQVLIASDTQMAQGCQRLCSITGIGPQTSALLATLLSRFDFANADALVAYCGLDPRPNDSGTKRGRRRLSKKGPPLLRRQMYLAGFAASHSKALKPLYQAIRAKGFASTEAFLILGRKLLRVAFAVWKGTETFDSARLSPKTT

SEQ ID NO: 317968 - protein, 346 aa, unidentified
MEHYAGLDVSLKEISICVVDHDGKAIARGTCPADPEGVAGWFRNRSLTPHRIVHESGMLSIWLQRGMMRLGLPATCIDARKAHKALSARLNKSDAADAEGLAQLARTNWFTPVHIRSEEADRLRSLIGARERLIRLRKDLEGHIRGVLKTFGIRMISIGQGRQRQAFRDQLAAAGETDPVLRAIADGFITAHATLCQAADDLDKVVKTKAKAHPVARRLMTIPGVGPVNALSFIALVDDPTRFNRTSDVGAFLGLTPKRHQSGEMDWSGRVSKCGDGTMRGLLFEAASCLIRQVKRFSPLKSWAVRLAGRRGFRKAAVATARKIAVLMLTIWKSGADYHWTKEATA

SEQ ID NO: 317969 - protein, 352 aa, unidentified
MARYVGIDAHKESCTLAVMGPSGRRLKELRIETSAIAIKTALKSIDDERHVCLEEGELSAWLYELCEPLSEETVVVQPARRTGNKNDSIDAWSLADQMRRGELKQPVYKAPSAFRPLREAVRCYEGVLGDSVRIKNRLRAVFRARGIQAPPEEIYSGRSRTSWLAKLPPAVRRRATILGDELDAMQDLRNDATVWLREEAAKVPAVKLLSTAPGIGRVRGAQIAATVVTPHRFRTSRQFWNFCGLGIVTHSSSDWAKDARAGWVRKETAQTRGLNRNRNPMMKQVFKGAALTVIQKQGDHPLARRYAQLLETTKPNLARLTIARKIAATVLAMWKNKEVYDPTRGERPPERG

SEQ ID NO: 317970 - protein, 642 aa, unidentified
MQVMIEGQSHFQPFGLSYWGFEHLNKGVGSMTAPYDYHIGVDYHKSYSHLVVQDSSGKALRSGRVKNDRQSLGGFLERYRDNSHAVVEATRNWMVIYDWLDDICDDVVLAHPLKVKAIADAKIKTDKIDATVLAHLLRADLVPEAWAPNDKARKLRVALRERMFYVRLRTMTKNRIVTVFDRYPEQTAQLKTLGDLFGKAGRVQLAQVKVSEIDRIQIDRGLEFIDDINARIKQSEATIRTMTKANGNVKLLKTIPGIGEFFARLIDAEIDDIARFRNPKKLAAYAGLVPSTYSSGGKTFHGKIIKQGNKWLRWAFVEAVTPAITSDAQLRAQLRRDKLLAFFAGQPACIVAMEACSSAHYWAREIGKFGHTVRLIAPAYVKPFVKRQKNDAADAEAICEAAQRPTMRFVSVKSEEEQASAAVFRARDLLVRQRTQTINALRGHLAEYGLIVAQGPTHVTRLVLHVEDSRSKLPEATRMALAILVDTLKSLDQRIQKLDVEIARRAREDEDARRLATIPGVGPITATALIALAPGAAGFKRGRDFAAWLGLTPLQRSTGGKQKLGETSKMGERTLRRLLIIGASAVVLQARRRGTPEGSWLGRMLARKPPMLVTVALANKMARIVWALMAKGGVYKAPAVAA

SEQ ID NO: 317971 - protein, 409 aa, unidentified
MDQQYRLFVGIDGAKAEHTICILNHEQKVMDRRAIEHSGDGLNRLGDLLTALSEGLPSTVAVAIETPRGAVVEYLIERGFAVSSLNPKQRDRFRDRHTVAGAKDDRRDAFVRADALRTDLPLFHRVRLDDPLIIRIRELSRADEDLQHEQVRAGHPLRELLNRYDPEMLPLCPGVDEPWFWDAIELFPLPGSKLPQPKMERLLRSYRIRRLDADAVRQALGVPALKLAPGAAEAASEHALLILPMLRLLLRQRKERERRLEALLAAMSTEGQFAEYRDVTILRSLPGMGRVITATMLAEASQALADRDYHALRSAGGTAPITHQSGKRRSVVRRQGCNQRLRNAIYHWSRVSTQCDPRSREHDTELRAKGHSHGRALRGVADRLLGVLMAMLSSGTTYDPLRRVATIMA

SEQ ID NO: 317972 - protein, 426 aa, unidentified
MKVMHDRVAAIDVHKDMVKVAVRVPGERRGTRKTDVLEFRTFYGVLEEMGRELRRRGVTHVVMEASGVYTEPVYYALAGLDFTEVMVINPAHAKALKGHKTDARDAIRLLDLYECGLLSGSCIPAPDLKEVRDLARYRMKTVQARASEIQRLQKTLETAGIKLSSVVSDVTGVSATAMIEALTGGERRGAVLADLAQGRLRNAGKMADLSMALTGRFTDHHALMCRLHLDRIQSLGEAVAGLDATIAPLAARHAREAALLKTLPGFGDVIVAGWLGAIGPAPHRHFATAQRLASWATVCPGNYMSAKKSKGGRTGDGGNYIKPLLVQAAWAAVRVPGRLQARFHRLVRRFGGARNKGAVKRAIMAIAHTLLKIAYQVLKTGTPYTDLGAGFYASRETPQARQDYLIRQLQKLNPGCVITVTPAEAA

SEQ ID NO: 317973 - protein, 328 aa, unidentified
MDSKKYIGMDVHKESISIAVMNAAGKIVMECVIETKASMILQFIDGLRGDVHVTFEEGTWAAWLYDLLKPHVRKVVVCDPRRNALLQEGNQNDRVDARKLAELMHNDQLRSVYHGDHGLRTLKELVRSYLTITQDLSRVMTRVKAIYRSWAIPCTGKQVYAPRHRAEWLAKINEPGVRRRAEFYYQQLDALRCLRQEVRRDLLTESKKHQAWKQLCGIPSIGPIRAAELLGILQTPHRFRTKRQLWTYGGVGIETSSSADHHVVKGQLERKKKHVEIRGLNRNYNHDLKNLFKGAAIVAATKPGPFAEFYAELLAKGMTWPGRLPPLC

SEQ ID NO: 317974 - protein, 363 aa, unidentified
MIKHRSFVGLDVHARTVEGCVLDADSGVITHRKLPAATPGIVGWVAALPAPQIATYEAGPTGFGLARQLKAAGITCLVAAPSKLQRPSGDRVKTDARDAEHLTKLLQLDQIVAVHVPTIEQETARDLVRAREDTREVLMSARHRLSKLLLRHGLVYDGGSAWSRPHDRWLREHRTSGTAAFTTAFDAYYESTVQAVARRDGLDKAIEEMAANSEFTPLVTRLGCLRGIAPLTGFSLAVEIPQWDRFTGNTIGAFLGLVPSEHSSGQSRFQGSITKTGNLHVRRLLVEAAWHHRRDYRPTTRSVMQPRWDRAPVAARLRGQAGNVRLHRQWVAFTARKKKPVVANVAIARELAGWCWSLAVMDD

SEQ ID NO: 317975 - protein, 346 aa, unidentified
MKILALDLGKYKTVGCDYESASGAHQFKRGFTTPTGLAKMVQEVKPDRVVIEVCSIAGWVCDLLWGLGIEVQVANTSDDAWRWRKVKQKDDRRDALKAARLSAVNQLREVYIPAHEVRQWRALITYRQHVIRRRTKIKNHIRDLLLREGQLLGRGSSCWSQVGIAALAAQARPFSECGPAELWRGELQLELEQLKEIQRQVATVTAQLDKIGAGDARVQLLRTVPGVGARLAEAIVALLDQPQRFRKASQVSGYIGMVPKAMDSGETERRGHITRQGSRLVRSLLVEVAWAGLRHNAWVRQTYQRLSGGKKARKKIAIVAVGRKLLVKCWAMLRDNRAWDWQPQIT

SEQ ID NO: 317976 - protein, 388 aa, unidentified
MQVAADRTDASTAIQTDLPAIFASLELSRSTWLITSLSPGAGEKMSKHSIRAGDVAGLLVRLAQLKEKARGRTGRDFPIIAIQEAGLDGFWIHRVLQSEGIESHVVDAASILTSRRRRRAKTDGIDGETLVRTLLAYKRGEPRVCAMVKAPTPEEEDRRRICRERKTLVGERVEHVNRIKGLLFAQGVSDYEPLKRNRRARLEGLKTGDGRPLPAHLKAQISRELDRLELVLPQLKAVEAERDALLKPVSEGCPAPAAMLAQLKGMGPEFTAILWSEGLFRSFSNRRQLAAYAGLAPTPWQSGSVAHEQGVSKAGNPRLRTTMIQFAWLWLRHQPTSALSVWFQERVQSNGGKMRKTTIVALARKLLVALWKYSTSGVVIEGAVMKTI

SEQ ID NO: 317977 - protein, 388 aa, unidentified
MPKPVDLSKSLAVLDPDSTLIVVIEMSQSSWLVAARAPGLARDPLKKLPPDPEQLFKLIDRWREESRRAGRVVRRVCVAFEAGRDGFWLARLLRQHDIEAHVIHPTSIPVKRDHRRAKTDRLDTELLMRAFLGWLRGEADHCSMAAIQTLAEEDAKRPTRERESRVNARSRLVNRMKGALARLGIRGFNPKLRKAAEKLEELRTGAGEPLPPNTLAELRRDMAQLRFVADQIKQIEKAREARLEKAPREGAHPMVLMLASIKGVGLETAEMLVAEVLSRKLRDRRAVARYGGLTGSPDESGSRSREKGLARSGNARVRRGMIQLAWRFLMFQKESALAKWFEARTANGPRGVRKTMIVALARKLLIDLWRFVEDGTVLVGVELFDSRA

SEQ ID NO: 317978 - protein, 313 aa, unidentified
MSQTNINTLFAGLDVAKYSLQLDLANQLHRLPNDPKGHRQLIKLLRTQPAVQIVCEASGGYERALVQALQAANLPLSLIEAGRVRHFAKAKGLRAKTDPIDATVLTHYGQAFRPKPTAPLSARQKTLNQLSTRRRQLVRLKVMENNHAEHYSDPLSQKQSRQLIALLEKQIAQCDQQMARLIEQDEVLQHKARRLDLIPGVAATTAAVILAHMPELGQLSSHAAAALAGLAPYNRDSGQQSSSRHIYGGRKTVRCALYMATLSAVRHDRILKAFYQRLCAAGKKPILALTACMRKLIVLMNRLLKNPNFQLAH

SEQ ID NO: 317979 - protein, 341 aa, unidentified
MQHELRTVAIDLAKKVFHLVGTDTTGKILWRKRLTRHAFMPFIAQLPPVLIGIEACGGAHYWARRFREHGHEVKLMAPQFVKPFVKSNKNDMRDTEAIAEAVTRPTMHFVPPKEVDQQDMQCLHRVRERLIGARTALINEVHGLMHEYGIVLPKGVSKFRQAVVDKLESEKEKLTALSQEMFGKLVEEFGALEKRLAYYQEKLEALATTHPECQRLMTIPGIGPITATALAAAVGDMGVFKNGRQFAAWLGLVPRQHSTGGQTRLLGISKRGNSYLRKLLIHGARATLRWVKLKTDDRSRWMRGLLARCGWNRTAVAVANKNARIVWALLSRGGVYGDNAS

SEQ ID NO: 317980 - protein, 346 aa, unidentified
MRILALDLGKFKSVACDYEVESGRHQFATIATNPKALHDLMVDREPERVVIEICSLAGWVSDLVRALGIELQVANANDERWQWRKVKTKNDRHDALKLAQLSAVNQLRLVHVPQAEMRQWRALIAYRQHLVQRRTKIKNHIRDLLLREGQLLPRYRSAWTQTGIAALEAMSKPFSEVTLAELWRGELAVEVAQFKAVQAQLAEVVVKLDELGAANRGVNLLRTIGGVGPRLAEAVVTMFDDPHRFHTAGQVSSYIGMVPKQFDSGETERSGRITRHGNRLVRSLLVEVSWCALRHNPWARETFKRISGGKRSRKKIAVVAIGRKLLVRCWAMLRKQTEWRSELSAT

SEQ ID NO: 317981 - protein, 340 aa, unidentified
MQHEPHAGAEPVTRVPADGQVQAGPRLPVAGVDVAKAQLELFVDTLDLRLSVANDDAGVARLLATLLGHRVRLVVVEATGRHHRRLAAALLQAGVDVAVANPQRVRAFAQAGGKLEKTDRIDAAVLAHFARAMGPRAAGKTPETQTVLSDLVSRRRGLVQTRVAETNRAHDQLPKLAREQSRKLLRLIEQQVEDLDREIARLIEADDDRGGKAKLIDSVPGIGPDTANQLVVELPELGRLNRQEIAKLAGLAPLNCDSGRYRGQRRIGGGRRDVRTCLYMAAFNARRNCDRFRRYFDGLIARGKRYQVAMTACMRKLLVTLNQMVKNNAHWDPNLVGAPS

SEQ ID NO: 317982 - protein, 426 aa, unidentified
MKLNNPPEFTALIGLDWGDKSHAIALEPAGGSTETSTLEHSAETLHQWLDQLEQRFGARPVAIAIETDQGAVVYALLERPWITLFPIHPATSTRHRTMFRPSGAADDLPDALVLLSLLQHHRQRLRPLQPDDETTRTLARLVEARRKAVDRRTLLLNQLVSTLKNYFPQALELVGEDLCTDMALDFLAKWPRLIDVQAAKPATLKSFYHRHNVRRPQLIQKRLDRVRSARLLTRDSAVIEVSVRVVRLLVAELRVLVEHITAFESAIAQDFARHPEKAFFSELPGAGPTLAPRLLAAFGTIREQYPEAASMQRYFGVAPVTEKSGSRAWIHWRWNAPTFTRQTLVEWAGQTIVFCPWAKAYYERQRAKGSAHHAILRALAFKWLRVLWRCWQKRQPYNEEQFLRQLEKRRSPIAARARQLALEMAA

SEQ ID NO: 317983 - protein, 363 aa, unidentified
MNYVGIDIHKRYSVLAAQDEEGRKVKEARIEGNSAEEYARFFQSLEGPSRAVLEACWNWGLTHDVLEEIEEVEEVVLAHPLKTRLIADAQIKTDRLDAFALGTLLRGNLVARAHIPRRETRARKNLLRQRLYWARLRTMLRNRIHALLDRQHNLELPQCSDIFGVRGLGFLGRLELAEPDHTLLREALALHDLIAEQMRAQEKRIAREFKSESMYEQLQSVPGIGPTLAAVIGCEIDRIERFGSADKLCGYAGVVPTTHSSGGKVHHGRLLPSCNKWLRWALVEASWVAIGCSPYFGALYRLQRARGKKANTAITIVARRMCRILFRLLREKRSFEKRPSGRTLITVPGCSAQRLTAISAMRS

SEQ ID NO: 317984 - protein, 455 aa, unidentified
MDGSYAGVDWASEKHDVLVADAAGEKLLAATFAHDEPGLRSLCRQLVRLKVRLVAVERPDGLLVERLLDAGLRVLALHPNQVAAARDRFRVSGGKSDHFDAFVLCELARTDHHRFRVLEPDSDATKAIRALTRGREDLVGARTALVNQLRAELERFWPGPLGLFSDLHSRISLAFLERYPSPADARGHGEARLRAFLARERYSGRRTAAQLLAKLRAAPAGRVGERELATRRGLVRGLVAMITTLNEQIAELEREIAAAIREHPDGRIFTSMFKGSVLTAAELLAEMGDCRGRYPTRDTLAGDAGQAAVAIESGKRKAACFRWGCNKRLRNAFHTLADSSRHHNPWAQDLYAQALARGHDHPRALRTLGRAWSRIVWQCWQERVPYDPARHRALQRHVTVTIPTSSGPVPDIAATQRMAGATVTRRAARRAEREALDGKPTSATPAARPAKPRGS

SEQ ID NO: 317985 - protein, 311 aa, unidentified
MDNIIGIDVSKDTLDVHRLTDGRHNNFTNDKTGHTQLLKWISLQPDTLTVFEATGAYHRRLEQFLSAKTIAFVKVNPKQARRFAQACGKLAKADRVNCEMLAKMGAALQLTPKPISAENLYDLRELLSARRALIKDRTAAKARSATATHSLVKQQLARRLRQIESDIAKIDAAMLQSSQQDQQMSERLDILSSIPGVGTTTALMILVDMPEIGTLDSKQVASLAGLAPMPQSSGKWQGKARIQGGRPNLRHAIFMPALVAIRHNADFKVKYEQLVAAGKEKKVAITAVMRKMLVLANALLRDHRKWVEKAA

SEQ ID NO: 317986 - protein, 415 aa, unidentified
MDVLFRVRIQGKECVERTTAANHLERNQKLMFYVGIDIAKTKHDLACMDETGETVITNFRFANSYQGFHQLKIKLEQLSPITQDVQIALESTGHYNYNIVAFLREIGYNVFAYNPFIIKQFAKSQSLRKTKTDTKYTLLIARKLRSDVTPDFYQTDKVMDELKELTRYQNRLIQSRSKCKNLYIRLLDIIFPEINSYVSNLHSHFVYELLTKYPSAQKIARARVSSLLKIKRLTADKAHQIQEIAKQTIGNTSTVLSLELVQLIESIKHYDKQINQVQEEINLLMIELNSPITSIPGIGSRLGAIILAEMKTIHNFRNPNQLQAFAGLDPAIYQSGQMDNTGQMVKRGSSYLRYALIQVAKLISIYSPHFKAYLKLKISQGKHYNVAVTLVAKKLIRVIYHLLKTNQTFDEAKLR

SEQ ID NO: 317987 - protein, 324 aa, unidentified
MLPTLGIDISKDSFHVELSINNKLRHRRFANRKEGFVELCVWLSKHKARPVHACLEATGPYSEALALYLHEQGDTVSVVNPAQIKAFGQSELLRNKDDRPDAGLIRRFCEKQQPAAWAPAPAHLRELQALTRHRENLLETRQQQINRLEVTNTKEVVKSLRKLVTHLDAEIQRTERQINDHVDRHPDLKQQCQLLESIPGIGKRTATRLLAEIEAIRQYKSARQVAAYAGLTPRNNRSGTRRGQTRLSKTGNARVRKALFLPAMVAKRHNPVVRSFCQRLARRGKSKMQLVGAAMRKLIHIAFGVLKSGKVFDPNHELLFNSGS

SEQ ID NO: 317988 - protein, 350 aa, unidentified
MIIIGCDYHPGFQQIAYVNTDTGDLSEERLGHKEQAEQFYRGLRTRGLTVRVGMEASGHARWFERLLNELQIELWIGDAAAVRTKRVRKQKTDRQDAQLLLRLLVENRFPRIWMPDAENRDLRQLLWHRHRLVQMRTRVMNQLHVVALNEGLRRKKALWRPAGRAQLESLALASWASRRRQDLLDLLDQFTPKILELTRRLEEVVEKRPVARRLQTHPGVGPLTALAFELVIGTPERFQCAKQIASYVGLVPSEESSGDRRRLGHISKQGNALLRFLLVEAAQVTVRSDPQWRSQFFHLAMRRGRKIAKVAMARKLAVELYWMWRRGWDDNEMQQFGSHAGEPGNRHGVH

SEQ ID NO: 317989 - protein, 350 aa, unidentified
MKKNIKVAERHPAETIGIDLGDKMSRYMILNEEGLAVEQGSFRNQAESIAKHFGKRGRARVAMEVGTQSAWIAREFTKLGHEVIVANARELKWITSSDDKNDRNDARKLARLARADRNLLAPVEHRTAEQQAELAVIRARDALVRSRTLLVNTARSLAKGFGLRLPASITNTFGARALAGLAEHLRVAMRGLLEQIDALGVEIGDYDQRVKEVAARHPEVERLASVPGVGTLTAATFVLTLGRRERFAHSRDVGSFLGLRPRQRQSGERDPQLGISKSGDKYLRKLLVQCAHHILGHWGKDSALRQWGLSKSGGSGSKKRAVVAVARKLACVLHRMWMTGENFQSFPKMV

SEQ ID NO: 317990 - protein, 345 aa, unidentified
MNIASIGIDLGKTTFHLVALGERNKILLRKKFSRSQLLAYTANLPASLIGLEACAGAHFVGTALREQGHQVRLIPAQFVKPYRKSNKNDFLDAEAIAEAVTKQNMRFVQLKTQEQLDWQAMHRVRDRLVRRRTALINEIRGFLLERGITFAAQPVHLRKNLPAVIEDAEQNLSPRLRWLLDRMWQEWKQTETEIEAITEEIERISNEDARCRQLRQIPGFGPLVSTATVAAIGNGAAFRRGRDFAAWVGVVPRQYSTGGKQKLYGISKRGNVYLRRMLIYGACAVLFRVKYDTGGFGQWVRRLAQRAPHNKVVVAIANKLARIAWAVLSSGQDYRHQPLQQRAAA

SEQ ID NO: 317991 - protein, 346 aa, unidentified
MMVIGCDYHPSWQQICWLDTATGETEERKLEHASGEAEKFYRGLSGHALIGMESTGNCQWFVEMATTAGHDVWIGDAAQIRANEVRQQKHDRRDAALILKLLLEGRFPRIWTPSGPEKDLRQLLIHRYKLVRVRAQVKTELQHLAMNQGITRKRKLWSKAGEKVLRELPLKPWASRRREDLFKVREMLNGQIDLLDQAVVEAAEKNEKARLLMTQPGVGPITSMAFVLTMGDVNRFQRGKQVASYLGLIPREYSSGGKQRLGSISKQGNRFMRMLLVEAAQGAVRYDPGFRNKYLHHCHKKAKGVAKVAVARKLAVRLYWMLRTNTAYPEIVRVEGSSRVALVGAS

SEQ ID NO: 317992 - protein, 370 aa, unidentified
MAISEGGAHVRAIIGVDGPNGAEEVVLGVDTHLDLNVAVALDSLGRRLGELEVPTTRRGHQRLLRWAETETFGPVGCAGIEGTGSYGAGLVRHLKAAGISVTEVERPKRRHLRHLRRRGKSDPLDAEAAARSVLASEALGEPKSGDGKVEMIRVLRSARRSAVKARSQAANQLQALLVTAPQDLRQHLRRLPTKELVVTCARFRLGGDPEDVRTASRFALRSVARRHEALSEEIAELDAQLGRLVVEVAPGLICRPGIGTHHAATLLVLAGDNPERLNTEASFASLCGVSPIEASSGKVVRHRLNRGGNRDANRALHMICVVRMGSDERTRRYVARRTAEGKSKWEIMRCLKRYIAREVYRVLAPPTTAS

SEQ ID NO: 317993 - protein, 412 aa, unidentified
MLKIVYPICCGMDVHKSFVVACIATTNDHGVTTYKSKRFSTFTGDLRRCAAWLSENNCKDICMESTGKYWIPIYNILEATCNIVLAHPKYVKAIRGKKTDKRDAKWIADIFKHDLVSGSFIPPADIRQLRDLVRYHWKLTNFNVGEKNRAQNCLTVSNIKLDDVFSDVFGKAATAITTRLLESNEPFDVKPYLTKNIKKPIEQIQAAVDGKMCAEQAEKFRIIRSHMDSLELCRLNLESLILTTAEKYLPQLNLVMTAPGINSFSAIGIISEIGVDMSVFPSSKHLCSWAGLTPQNNESAGKKKTTRISRAGAYIKPLLVQCALASLKSRRYPEVQARYISLKKRRGHKKAIIAIARMLLTSIYNMLKRNEAYNPDLYRKADRPPTHREVSVEEAVFILQRQGYLVTAPTVT

SEQ ID NO: 317994 - protein, 282 aa, unidentified
MYSIGLDVSKLTINCYIPNGEIDLVIDNNKKSLDQFFSKLKKIYKKDIDKIIYIFEPTGSYSTLLKFFCTQKNIKAFIVNPKQSHNFAKAIAQRNKSDKIDAQVLSKMISIASIKDIKVPVYDECTQSIQDYMSYYKFLSKQLVQTKNHLEARKHNQTNNQILKSIEKKILNFEKELSEIILKVKTIISKNKTLLESFNNIKTIKGVGDISAIVLIHLFIKYPDANQRQIISLSGLDPTTKSSGTSVNLKPKISKQGSRILRSILFMSALSAIRFNPKILEF

SEQ ID NO: 317995 - protein, 355 aa, unidentified
MKIIGCDYHPGFQQIAFVDTETGELQERRLEHAEEAERFYRDLGVQGACVRVGMEASGHARWFERLLSELRFEMWIGDAAKIRTKRVRKQKTDRQDAELILKLMLKDDFPQIWVPGGENRDLRQLLWHRHRMVQARTRIMNQLQAVALNEGLLCKKRLWRETGRKQLESFPLAPWASRRRQDLLELLDRLTPTIAELTQAIEREVEKSPAAQQLQTHPGVGPLTALAFVLVIGKVDRFQCGKQVASYLGLVPLEDSSGKRRRLGHITKQGNSLLRFLLVEAAQVTVRSDPEWRSKYFHLALRRGRKIAKAAMARRLAVRMYWMLRKGWNYEQLNKFGSHAGQPGHRHGVPLTPSN

SEQ ID NO: 317996 - protein, 337 aa, unidentified
MIIIGCDFHPSYQQIAMLDTETGVTTDHKLTHAGGEAERFYQGLASATLVGIEAVGNDQWFVRLLQRLDHEVWVGDAAQIRASYVRKQKTDRRDARHILQLLVEGRFPRIWIPGAEMRDHRQLLIHRHKLVQIRTRVKNELQHLMLNQGVQKKQKLWSAEGRAALASLRLEPWTDRRRHDLLNLLSMLDRQLEDLTVAVAQVAKQYPEVNLLMSQPGVGAVTALAFALTIGDVRRFQRSKQVASYLGLIPREYSSGGKQRMGGISKQGNRLLRFLLVESANIAVRFDPVFRKEYLHRCHQKHFTVAKVAAARKLAIRMYWILRTQTPYPQVLSSRAA

SEQ ID NO: 317997 - protein, 400 aa, unidentified
MLSIGIDVSKGKSTVCGMKPGGEIVYTPFEVQHTRKGMSELVSLLRSSGEEVRAVLESTGSYHCPVVAALLENGIFVSVVNSLRMKRFCSQSIRKVKTDRIDAMQIALYGLAYWQELQPTKLPEDTYRELQLLARQYYQMTSILIKAKVDFNALCDQALPGMQELMSDHAGRHKLSDFVLRYRHTTHILEMGETRFRKDYCKWAEKKGYRNCERMAVLIFATAQNGIPVLPNAPSTKIVITEAIRVLHTVEASRDAILTQMQALAKTLPEYSLVREMPCIGDTLAPRLIAEIGDVRRFHSKRALIAYAGIDAPPYQSGKFCANNRHISKRGNRYLRKTGYEVMQSYVMHKPANDPIFTFIEKKRGEGKSGKLAMVAGLNKFLRVYYGKVTELYRSLSAIE

SEQ ID NO: 317998 - protein, 418 aa, unidentified
MEGGLMERVLERCAALDVHKAQVTVWVRVPDGQGGREDLRERYSTMTDELLALRDWLRELGVTHVAMESSGVYWKPVYYVLEDEFELLLVNAQHVKNLPGRKTDMKDAEWLCQLLECGLLRSSYVPPREFRELRNLTRYRKSLISERQRQANRLHKVLEDAGVKLACVATDVLGVSGRAMLEALIAGTRDPEVLADLARGKLRHKIPELQRALTGRFSGHHALMVGHILAHLDFLEEQIASLTDEIDERLRPFVEKVERLDGIPGVGALTAQVIIAELGMDMTRFVSHRHAASWVKICPGNHESAGKRRSGRTGKGNQHLRAALVEAAQAATRTRNTYLRAQYEQIKRRHGHNKAVVAVAHSILIAAYYMLRDDVAYHDLGGDYYARRSDPERQTRRLVAQLERLGHKVNLEPMPQAA

SEQ ID NO: 317999 - protein, 443 aa, unidentified
MSKKKQTHLRGERGQAFSDKIRGIPLEQLLCVSLDISKYFHVVMIHNGLGEIVTSTFEIDIFQSGFEQLGQAVDQAINQTQAQVVLVGMEPTGHYFENLARHLHQRPRPVTLINSYAVKQNREQHMMRRQKTDPIDVAAIGDLLRRGEGSLFQPVSGVYLQLQHLDRVRLGKVKMQTMLKNQIIGHLDRLFPGLVLVGKEAKGRYQPLFATDFWECQTMQHLIRVCPDPRQLAAMSPQELRTAFHDHQFKLGPKTAPKIIAYAQKVLWPDEELITIRSELLQHDLLLLEAVESRLADLETRLTALLPQTPYPIWTKLKGLSDIQVASLAAAIGDPAHYTHARQVFRRSGLVSGRADSGVRQNQGKGQPIVKTGDVYLRRALMNALDTFLLHQPVLYRYYSQLKLTKPEWVARVATARRALGILWATLRDQHSTTLIFKTEADM

SEQ ID NO: 318000 - protein, 312 aa, unidentified
MTKIICGVDVSKRRLDAYVVPSGAFESFDNDATGIAALATFCHRHRVALAAMEATGGYERVPFLLLWEAGIACGLTNPRSVRCYAEAMGILEKTDRLDASVIARFAVAKELRPTSPPTQSQQRLTALVARLRQVTDDLVVQKQRRSSAMNAEMTTSIDEVIALLKRQARTLEGEIASLIDDDPLWSQLDAALRTVKGVANRTVARLLAELPEIGIYFNKAVVKLAGLAPIAHDSGAKTGQRHIRGGRAGIRSILFLVADIARRFDASLAEFHQKLTKAGKPKMVVRIALARKLLVRLNAKARDARELYALAT

SEQ ID NO: 318001 - protein, 464 aa, unidentified
MSRKVQNQQERRPARPKVDWKTLEVMHPDAAGIDIGGSEHWVAISPDRDEQPVRCFDCFTADLEQMADWLKARGVRSVAMQSTGVYWIPVFEILQQRGMEVYLVNARHTKNLPGRKSDIAECQWLLKLHTFGLLQNSFQPSDEIRAVRTLWRYRSGLIAQASSTIQRMQKALIEMNIQLTNVLSDLSGVSGMAIVQAILDGKRNPQKLAALADPQVKASKEVIAKSLCGNWRPELLFVLGQEMDSYRAYRKRIVDCDTEVQQHLQRMESKVDLSTQPIGPRPKGKRARGNAPQTFDLRSELYRLTGVDWSQVDGIDVQVAQTVMAEVGTDLKAFPSEKHFANWLGLCPTNETSGGRVLKRRTPKVVNRAKAAFRQAASTLIRSNSYLGAQYRRLRTRLGAPKAITAMARKLSCLFYRLLTKGQKYVDRGAQYYESRYREQQIRSVIKRAHRLGLQVLSPEVKPA

SEQ ID NO: 318002 - protein, 360 aa, unidentified
MRTEITKDSFKDQSFYVGIDYHKKSWQVTILGEQYEHKTMSQNPDPELLASYLKRNFPGGNYHAVYEAGFSGFESCRKLNQLGVNCLVIHAADVPTSQKEKLQKTDKADSRKLARSLRSNEFEAIHVPAPELEADRALVRQRFRLVKDVGRTKNRVKSLLFQFGISIPDRFTASQTRHWSKVYINWLKGLVIDRVSLKQVIDNYIAIGESQRKDLLLLNKQVRYLSLTEVYKYNYKLLLSVPGIGLMTAMTFLVQIGDVGRFKRLDDLCNYIGLVPKMYGSGEKMQVGKMIKRGRKELKIMLIEASWEAIRKDPALMLKFNELSKRMHKNKAIVRIARKMLGRIRFVLQNQQPYQLSVVK

SEQ ID NO: 318003 - protein, 467 aa, unidentified
MKHNRRRSPGKPRMSRTLLDHINPNVAGIDCGAAEHFVAVPPDRDPTPVQAFSTFTTDLIRLADWLTTCRVTSVAMEATGVYWIPIYEILEARGFKVLLVNARHFKNVPGRKSDVSDCEWLRELHSVGLLRGSFRPSEGIVALRTYQRHRQTLVETASTFIQRMQKALVQMNLQLPLVVSDITGATGLRILRDIVAGQRDPAHLAQHRDPRCRATRAEIVAALTGHYRPDHLFVLQQNLEGFDACQAQIAHCDTTIEGHLRTLTAAIPAPVAPLPASRSRRTTPKNNDLPFDLRAPLFHLTGGVDLTQIDGIASLTALKLISEIGTDMMRWPTEKHFTSWLTLAPNNKITGGRVISSRTQPSANRAAATLRMAAMTLGRTQTALGAFYRRMAARLDKPQAITATARKLAILVYRALKGELVYQDPGAATYDAAQRSRILRRLRQRASTLGFELVHRATGEVFAAGVS

SEQ ID NO: 318004 - protein, 399 aa, unidentified
MRKVAGIDVHKAFLEVAYRLNENEISVSRISYTMDGLTRLIKLAKRHMITDVYIESTGNYYYPMYYALKGAGINVHVLNAYKTRRLDPNKTDKRDAIWLLKLGESNLFSGSYIPDDEMLALRFLVREHFRLADRVGDFKRKLHSLLWRLGLYARDIVKNLRSKRKRRLLLAILRGQVDTSKLEDSDIKAIYNVLKRPTMRTYIAVVRIHLESIEFLEKQLENLDALIDCYAKKFEEQIRILMSVPGISKILAVGILAEIGDVSRFPDKNKLASYAGLVPTSRDSGGKRRRGKISKKSNKYLRRYMFLAAMAAMRSKSRRIRLIVERLRGRRKHFKVMVVAVARKLLTIIWFLLTRKDVWREVGYSKRIRSKRYRGKFRIPIRVAIDVLRQVGYGVRKIA

SEQ ID NO: 318005 - protein, 346 aa, unidentified
MNNSLSTFDPCGIEVSAQTLVVALGPLERPASLREFPNTPAGHQGVLRFLERADRPVRVAMESTGLYGLDLALCLHHAGVAVMVANPRAVRHFAQAMMQRSKTDLLDAEVLRQFAVRMPFVVWRPPSPTALKLMAVARRLEALTEILAAEKNRRHAASLSQALPAIVRRDVERSIQTQQRAIERLSRAAQEFVLADLELARRYELLLSIPGFATTSALHVLAELTLLPADLNVRQWVAQAGLDPRQHSSGSSVEKKPRISKAGNKHLRRALYMPALVAVRHDPHLRGFYEHLLARGKTKMQALVASMRKLLHAIFGMFKHDQLFDGAKVYATPPLQLPVPQEVACA

SEQ ID NO: 318006 - protein, 410 aa, unidentified
MGYETLIRRAHVMTRKNTLKSLPTDTEFRVVGLDLAKSDVSVAAIPVDDNTPSLVDRMTYADLLDWAGKISPTLFAMEPCNGYSLLCLQLENLGHEIKVISGWTVSMWINTHLSGQKTDLNDAIALARLAVSDAELTPIRHKSITEIRIQTVQAVRQQLMSQRSKSIVSFKALAQQWGIPCAAGHRNLKKLRESIEAKVDLITRPVANAMLFLLDAVKSLDRQIGQLNQTLQELVMSDERGRLLQSVLGVGTQISARVITVVGNIERFNSPRSLVAYVGVAPRNFITGHKNLTKRKHGNCPDLSHKGQGKISRRGDKLLRSLFIQGAACLYMQFCKDQLPECQLKRWILKQLASQKPYGKLIVSLAAKLIRIVWAVLTYGEKFNIQKAGMTRSMWSEMALETPLNKEVPA

SEQ ID NO: 318007 - protein, 422 aa, unidentified
MGNGVRLEDEELRGKVVAGVDTHVDTHWLCVLDESGRVALSEEFPATAEGYAALADAIGDPAGCAAVGIEGTCSYGAGLAEELARRGFRVLEVLNKKKERRRGRGEGKDDAMDAERAARDVLAADGTSVPKLRGGWVDDLRSLLVARDRCVSARVEAHAAALSLARCAPDAERRRWEGMSQQAMMTAMAGIEGEGATALGRSMLALARAWRACSDEAEALEAELRRVLERSCPSLLAVYCCGPVSAARLAVAAGENPSRLRSEASFAMLCGAAPIPASSGKTSGRMRLNRGGDRRANSALHTIVVRRMRYDPETRAYVERRRSGARPLGRAEIMRCLKRYVAREVYRALMHPHNVGEMVDRSSLRQARLSAGLTQAQAAKALGVSPASVSGVETGRNQCRRLAERYSRWVMDGLPVDVESPQ

SEQ ID NO: 318008 - protein, 341 aa, unidentified
MENYAGIDVSLELSSVCVVDAHGKILKEAKVASEPDAFVEFFEKLGFAVKRIGLEAGPLSQWLHARLKRAGFETVLLETRHVKAALSAMTVKTDRKDARGIAQLIRMGWFRPVHAKSIGAQEIRALLVARKQLLGRLIDVELSIRLILRGFGLKVGPVTRKNFEARIRELVAGQATLERIATSMLSARSALKAEYGRLHKAVLAIVRDDAVCRRLMTVPGVGPLVAITYKSAIDDPHRIVKSKAAGALFGLTPKKYQSGEKDVTGGITLAGDEIVRTALYEAANVLLSRIARFSKLKRWGMDVAKRRGSKRAKVALARKLAVILHRIWVDGTTLRWLKRGR

SEQ ID NO: 318009 - protein, 349 aa, unidentified
MDVYAGLDVSLEATNICVVDGEGKVIREVKLETNPDAIELFLAEWGIHLKRVGLEAFSYSAWLFTALSEKGLPVICIETRHAKAALNAMLNKTDRNDAKGIAQMMRTGWFRAVHVKSEGAQTLRALLVGRKALLGKVLDMENMIRGLLRPFGLKVGEISVGRFDARVREIMAGKKELDAIVTPLLDARSAMRLQLAKLQRLALAAARGDSAVRRMMTVPGVGALVALTFRATVDDPARFRKSTNVGAHFGLTPRRYQSGQTDRIGGISKCGDELTRAMLYEAAIAILTRIPKNFKLRLWGLRLARKKGLKRAATAVARALAVLLHKIWIDGTTFRFGAGGKRGRVAAAM

SEQ ID NO: 318010 - protein, 291 aa, unidentified
MNIIGCDYHPGFQQIAFVDTETGDCGEQRLEHSEGAEKFYRDLAAQGKKVRVGMEASGHARWFERLLAELNFELWIGDATEIARKRERKQKTDRQDAQHILQLLMENRFPKIWVPSGENRDLRQLLWHRHRMVQMRTRIMNQPQAVALNEGLRCKKRLWRQHGREQLESFRLAPWASRRREDLLQLLGRLNPTISDLTQAIEQEVEKCPEARRLRTHPGVGALTSLAFVLIIGRPERFQCGKQIAAYLGLVRLSLSIGCGARDGITSSQESSVRTRASSEQAMVCSRTSSN

SEQ ID NO: 318011 - protein, 348 aa, unidentified
MAKRPVSAGIDVSKSTLNIAVFEGNEGVFDNDAVGHKKLHRWLKKQARRAPIKAVLESTGNYGLDVALMLHAQKKVEVFYVNPMAAKGYATAGMVRAKTDRVDARVLAEMAENSRKAEPWTPPPAHCRELRALTRRVRGLVENRTREKNRLKAVQTTKTTPALVIEDIEGNIVDLTKRIRKLRKAAVRLILQHEDLSDAFKLLTSVKGVGKASGAEILGELSCMPTDLTVKQLVAQAGLDPRARQSGTKDGKRHISKMGSRYLRAALHMAAVTAVRDCPEVTRFYDILRNGRNKPYKVAMVAVSRKLLHCIFGMLKHRQKWDATKFYNPCMETPKPIGQGATVYQLST

SEQ ID NO: 318012 - protein, 414 aa, unidentified
MLYIGIDWATDSHTVTLLAASGEVLETLAIENRLAGFLTLLETIRKHLRELEPAATPDSVSFAIEDRNQRLTDFLLAQDFQGYLIEPSRMKGYRLRYRSSGNKTDPDDSFVLADVLYRDHDQLPRIAPDSDVVRSLKTLLRDRESFVRDSTRLSNRLTACLRQYYPEALGFFEDVAGKTSLDFIAAYPDFAAASLLSRREVKQFLAKHHCYHETQLERILGVLTLDPTPIPAVIVRTKRRQALVIIQQLRMVQAAVAEYDVEIERLGKESDDVKRFRSMPGGGPIIGAGLHTLFGDDRTRFTSAMAVQSLVGTAPKTIQSGQFRTACFRFGCNRFYRTLLQQMALGALRRSAWAKQFYRGKRREGKTHQHALRCLANLLLKIAYAIWRDRTEYNEDRHMAQIMRHRLRTASNFV

SEQ ID NO: 318013 - protein, 358 aa, unidentified
MTDGSKEQSNMTAGLDIGDKYSYLCLIDTVSGEVMEEGRLRTTPEAFRRRFASERPLRIAIEAGTHSPWASRVLEECGHEVLVANARKIRLIYANKRKTDEIDAENLARLARLDPKLLYPLKHRGEGSQAHMALIRSREALVSTRTQLVNHVRGAVKSFGACLPKCPARSFHKRASEHIPEALLPALGPILEQIGSLTERIRDYDRKLETISKESYPETDLLRQVEGIGPLTALTFVLTLEDPYRFEKSRSVGAYLGLVPAADQSGDRDPQKRISKEGDEMLRKLLVGSAHYILGPFGSDSDLRRHGEKIAPRGGKNAKKRAAVAVARKLSVLLHSLWVSGEIYEPLRNAHRSRVGAA

SEQ ID NO: 318014 - protein, 316 aa, unidentified
MNSKEIFVGIDVSKKQLDVAILPESKHKVYSNNEEGIGQLTRFLKSLSPTLIVLEATGGYEMPCVAALAAERLPAVVVNPRQIRDFAKATGRLAKTDAIDAQSIARFAEAVHPQVRDIKSPEMQELAALNVRRSQIIQMITAEKNRLATATKWTRDDIKKHIAWLKESLEEVNDEINKSIRNSPIWREKDDLLQGVPGIGPASSATLLSRLPELGTLNRKQIAALVGVAPLNRDSGLMRGKRCVWGGRSEIRTALYMATLVATRFNPVISEFYHRLCNAGKAHKVALTACMRKLLTILNAMMKNRSHWSPVCPANS

SEQ ID NO: 318015 - protein, 395 aa, unidentified
MFIVGIDIAKRSHVARIIDSEGRTVIKPFSIRNSCSGYNTLLVRMNKITNHKSEYILAMESTSHYWLALYTRLCREGYRVVLLNPIQTHAMRELLNQNDTKTDEIDTLAIAETIRFGRYKPSRVPQDKLLALRELCRNRYYLIDMASDLKRKITALLDQVFPEFEAQFSTIFGKSALAVLKQYPTAEKMSRAQLGKLTQLLQTASNGRFGEWKARQLREAAKGSFGIPDCEGVYSTLILLQLQQLQSLLDGAAALEQQMSDIFSQFDTTLTSIPGIGPLLGAVILSEIRDISSFPSTDKLVSYAGLNPRVKQSGETKFEGVHMSKRGSPYLRRAIWMACTNAVQCDPMFRAYYEKKAAEGMRYMCIIGHVTRKMTSVIFAVLRDNKVYQPVLPAA

SEQ ID NO: 318016 - protein, 335 aa, unidentified
MLYVGVDAHKSTSQITVMNEAGVILRRKRVHSTSEGFKEALAGYEEPLKAVLEASYSWGPMYDWLDDMSEEVLLAHPLKVRAIASARIKNDRIDSEVLAHLLRANLIPTAHAPSREIRALRRVLRQRMFFVQLRTMLRNRIRALLAQHSIKLPENESLYTKQGRVWLDKVILPNSDAHLLHADCKLHDNIEVQVGSTDTLINKLAAQDPSVKWLISLPGIGRFLSVLIRWEADDIHRFPDGKHFVSYTGLAPSTYASSSRLVHGPLTKQGNKWLRWAFIEAVTPAVRSSAFIRDHYMKVKSRRGTNDARCSTARKLAEITYTVWSEGRCWEETRS

SEQ ID NO: 318017 - protein, 348 aa, unidentified
MMVVLGTDAHKSSHTVVAADEAGAEVGSIMVAATPEGHLKALRWAARWAQRRWAIEDCRHLSRRLEADLLAAGELVVRVPPKMMAGVRRSARTRGKSDPIDALAVARAALREPDLPVARLDGPCREVRLLVDYRGRLIRERTAAQNSLRWRLHELEPGFDPPTGSLDRYKTLDQIDRLLDAHQGVVVDLARREVTRIRDITREANQLQTDIGARVTKIAPSLLNLVGCGVLTAAKLVGEAADVTRFNGRDAYAAWNGTAPIPVWSSNNQRFRLSRGGNRQTNAALHRIAVTQIRVHPDAKTFMTRRLSTGDTKREALRALKRRLSDVAYRTMLQDALNPPQAAPARAA

SEQ ID NO: 318018 - protein, 382 aa, unidentified
MEATRIGIDLAKSFFHLVAMDSRGKVLWRKALTRRRVPEFLAQLKPSMIGMEACATAHYWAREIQKLGHAAKLMHPGFVAAYRKNSKNDFNDAEAICEAMSRPTMRFVEVKSVAQQDMHSLHRIRRLMIKQRTQVAHQLRGRLAEYGITVRPSIAALRREAAALAGDVERSTAALRRVVANNLEQLTLLERQLRELDREVAHTCATDERCRRLAEVAGVGPLTATALVAKVGNARQFANGRALSAYLGLVPGQNSSGGKTVLLSITKKGDRYLRSLLIHGARAALQVAGRYDDPRSQWAIRLKRKSGPNVATVALANKNARVLWKLLTSGQHFRVQPPVPEAERAQAAHRLASPKPAGRRAAVRLEHDARPQDFSTSPPEDN

SEQ ID NO: 318019 - protein, 366 aa, unidentified
MRMSVGVDLHKGQFTAHWRSEDGIGGGTRRYATSDSGYRAFEKQLCAARDAGAELKVAVESTGNTRYFKNRLESVGIPVTVVNSMKFKVVTESVNKSDKRDAATLAQFLEKDMLPEARLCSQESEELRRLLKVRANLVKTIVSVKNQVHGLLLSMGIESKRAQLQSAKERRRVKCELAAHNVAGATVDPLFETIERLSAEVKKIEKILQEKTAKDEVVQRIRTIPGVGLITATTIRAFTDDISRFATPAKYASYAGLAPWVQNSNETVRHGRITKRGPSELRTAMVQVLLGMVRSRRTRGYRLMQRYQEMKRHKGSGRSIIAGARSLSEIIWHMLTNEQPFDEAKMTSPEIRRKATEMQAAASEAA

SEQ ID NO: 318020 - protein, 317 aa, unidentified
MTRIICGVDVASKKLDARIGREGPFETFNNDAEGVIALAAFCRRHGALLVVMEATGGYEKQAFAQLWGLGLEAAIVNPRNVRDFAKAMGWLEKTDKIDAGAIAWYGEVRKVKPTPLASPTQQRLTALVTRLGQLTSLRTAQNQQRRGVTDASVLSTITAVLAVVAREMRVLELEIAQEIAADPLWKTLDAAFRAQKGVANRTVARLMARLPEIGLIAGKSISKLVGVAPIARDSGNSKGKRPIRGGREDVRALLFVVAGLVAKFDPDFAKFRDRLLAAGKPKMVVRIALAHKLLVRLNAKAREAREEYARSTVAPAA

SEQ ID NO: 318021 - protein, 410 aa, unidentified
MGYETLIRRAHVMTRKNTLKSLPIDTEFRVVGLDLAKSDVSVAAIPVDDNTPSLVDRMTYADLLDWAGKISPTLFAMEPCNGYSLLFLQLENLGHEIKLISGWTVSMWINTHLSGQKTDLNDAIALARLAVSDAELTPIRHKSITEIRIQTVQAVRQQLMSQRSKSIVSFKALAQQWGIPCAAGHRNLKKLRESIEAKVDLITRPVANAMLFLLDAVKSLDRQIGQLNQTLQELVMSDERGRLLQSVLGVGTQISARVITVVGNIERFNSPRSLVAYVGVAPRNFITGHKNLTKKKHGNCPDLSHKGQGKISRRGDKLLRSLFIQGAACLYMQFCKDQLPECQLKRWILKQLASQKPYGKLIVSLAAKLIRIVWAVLTYGEKFNIQKAGMTRSMWSEMALETPLNKEVPA

SEQ ID NO: 318022 - protein, 339 aa, unidentified
MKLYVGDDLHGNNNFLAMVDRKGKRMEQKKLPNDLSVILEYLKPHQKEIVGIVVESTFNWYWLVDGLMDAGYKVHLANPSAIQQYSGLKHVDDKHDAFWLAQMLRLEILPEGYIYPKEERPIRDLLRKRRHLVKLRTSLIISLQNIISRNCGVQFQANEMKRLKEDRVSPLLEGNEDLALAGKTSKETIDHLTRQIHKIEGAIVHRVELKESYRYLLTLPGVGKILALTIMLETGPIARFAQVGDYASYCRKVPSRWTSNEKTKGRGNKKNGNKYLAWAFSEAAEFARRYDAQARAYYTRKMRKTNFMVAHSALAHKLARAAYYLMKDQVPFMPEKLFC

SEQ ID NO: 318023 - protein, 446 aa, unidentified
MRKKKIALDVINYCAAGIDVGSRSHYVAVGQDPVKDVREFGVYALNHEQMIAWLNERKVKTIAMESTGSYWQTLFAVLQCAGFEVILVNGQQIKNVKGKTDVKDCMWIQKLHSLGLLKGSFLPAEHTNQIRTYYHHRQSLIEESSKMINKMQKAMRLMNVRLDIAVSDIKGKSGIAIIEAILRGERNGEKLAELADWRVKKTKQEIAQALHGNWRKELLYELKDCYELYQIFQVKMTKCDKEIETLLQSITSHLEKTIVPKLPQKRQAKNQMNFDLTTFSYVYTGVNLFAIEGVSYNTVMSFIAEVGDGIKKFATAKRFASWLRLAPNNKISGNKRISSRTPKGKHRFALALLQAANTVGQMKKGALPSFFKRIAYKKGRQAAIIATARKTAVIIWNMINRQTLYKPLDERQYSQRVKNAILRNIKNKMQRLNLDINDLAQLSKSS

SEQ ID NO: 318024 - protein, 340 aa, unidentified
MSKLHILGVDLAKRTFAACGTCNKGCVIFRKKLTRSQFQKMLSDLPPCIVAMEACSSAHHWGRMARAAGHDVRLIPPLYVKPFVKRHKNDAIDAEAIAEAASRPSIRTVAVKDEDQQAQAVLFRTRELFVRQRTQLINAVRAHLAEYGIILPQQRRNGHAFASRCRTELDAAPSEVINIVHAYLRQIESVDTEVAAFDVKIKKGALRNGKARRMQTMPGIGPMTARAVQAFCPPTENFRKGQDFAAWLGLVPRQHSTGGKDRLGRITKMGQRDVRKLLIIGAMSVISASERKGHCDDPWLARMLMRRPRMLVAVALANRMARRLWAMLAEGCDYDIRAAA

SEQ ID NO: 318025 - protein, 404 aa, unidentified
MTVTIGIDPHKGSHTAVALDEHETVLGQLRVRSGPDQLALLTEWARAWPGRTWAVENASGLGYLLSQQLVGAGEKVLDVPPKLAARARLLDNGDLNKNDPNDARSVAAAALRAKRLSEVTKEDHAAVMRLWARRRKDLTGSRTRVANRLHAVILELVPGGYTGEICASKVTRLLEAFEPAGAIAAARKELAEELLGDLARLDTQLAELKERLAAVVAASGTTTTKIFGVGPVVAAITVGLTRDVRRFADKDHFAAYNGSAPIEVSSGSKKIYRLSMRGNRQLNHALHMTAVTQVRHRHSEGRAYYDRKVAAGKSGKEALRSLKRRISDALYAAMVADARREDQASGGPGGQTGNGSIACAAGSHPAKPALRPSHSRAGTKARPSRQAARSLDRRSNQKKIRKAS

SEQ ID NO: 318026 - protein, 410 aa, unidentified
MQTLVERGCGLDVHQATVVACLLTVLRSGRVRKQMRTFGTTTHELLHLRQWLLSAGCTHLAMESTGVYWKPVYAILEGALEIVVANAQHVKKVPGRKTDVKDAEWLADLLCHGLLRSSFVPPKPIRELRDLTRYRRKLVESQSAERNRLLKLLETANIKLASVACDVFGVSGQLMLQALLAGNASPKQMAQLAKGRLRNRIADLEPALEGKVEPHHRFLLKLQLDRLQAAEKDLAVLEQHIQEKLQPYAEQLALLQEIPGVEWTLAAVIIAELGIDMSVFQSVSQLASWAGVCPGTNESAGKRKSSRIPKGNVYLKTALVEAANAAARAKGTYLRDKFYRLKARRGYKRATIAVAHKILVAIYHMLSQQISYNDLGDLYLDRLSKDHLARNLIHRLQRLGYAVTLQQQVA

SEQ ID NO: 318027 - protein, 302 aa, unidentified
MNGIGIDVCKAMLDVAVHHGPFARFHNTPAGHRKLVSWLAAQQAGQIVLEASGGYEQRLLDTLFEAGHRVVRANAHRCHAFAAAIGLSAKTDRLDATNLACMAAKLELRAYQPMEPWRRRLREFVRARQQLMGLAISAQNQLEQVTNAALRRTLQANIAQLKKTCARLDAQIAEQVGQQPQLEAMRAFKGVGATLQAVMASYLPELGTLSGKAIPKLVGVAPIARDSGTLRGIRRICGGRVEVRNVLYMACLSAIQHEPRIREFYRALRARGKPGKVAVVAAMRKMLVILNARARDAQAATT

SEQ ID NO: 318028 - protein, 476 aa, unidentified
MKLNAKKGKNQVAKSTETQSREEITERIASVEAALQAHTWCDLEIHGKFGKEEKISFISDDMLIVGCDIGSESHFIRAIDTRGRELSRDAYEFSNSSEGFGLAKEWMLKLAAINGKNQIVLGLEPTGHYWFCVATWMVENGISVVQVNPYAVKQTKELEDNSQDKNDRKDPKLIANLVKDGNYGMPYLPSDVYAEMRTLNRLRDQLMEDRNRAVNRLHRLMTIYFPEYKDAFGKFDGIFTLLVLMEAPFPEDILKKGAEGLKELWQKEHLRGGGYQRAGKIVEYARKSVGLKEGLAGGKLAVRVLANQVMMLDRELAETERMLEEQCRKIPHAEKVLKINGIGGTILTGIISEMGDISRFDDVKEIQKLSGLGLVACSSGKHKGETRISHRGRKRLRYWLFQAARSAVAHAAEFKELHEYYTTRVENPLKKLQSLIVIACKILRVIYAILKNGRTYNPKKLLMDIRRPEQRTAIAA

SEQ ID NO: 318029 - protein, 370 aa, unidentified
MVRGSGRPTNSRYKIPFLSKVAGSKHIHARTVAGTLSPNLASVGNLIVAYGELKMNNDSEIIVGIDISKRTLDIQVQEDDQYFTCGNDIISIDKLVEKLSSIHPALVVLEATGGYEKGLVTALVDAKLPVAMVTPSWVRYFARSSGTLAKTDKIDARMLVRYGRANHPPIIKVRTELQERLSEIMKRRSQVSTALISEKNHLSTSSYPDVKVLIEASIENLEQQIMQLEEMIAEVIDQCPELKNNEKIICSVPGAGKITAAILLADLPELGTLNHKKIAALVGVAPYNRDSGYYRGKRRIKGGRQSIRKVLYMAAMTAMRWNPVIKEFYERLLARGKAKNVAIVACMHKLLTIMNAMVKAQTMWRPISTT

SEQ ID NO: 318030 - protein, 349 aa, unidentified
MRYVGVDLHKHNFVVCFLDTSDTSKLRTYTLSSAGLDTFCRDLHPDDHMAVETAQNAYYFYDHVRSAVNDIVLVDPYRFAMIAKSKKKTDRHDAVTLARFLKLGWLPTVPIPSEKIRQLRQLCQARENLVQMATQLKNMGHAALLRNGIALKHAALNTLGGRRRVARTTVLVPLDNQILGVAVRQLEALDREIAVLETSILHLGKDLPGLPKLLQIRGLSTLTAIILLAEIGDIGWFETSKQLAAYAGLATSVRQSGGTDRHGKITKHGRRRLRTIAIRTVLAMINGKQTPLMEFYARKKHEKGAGKALCATARKLLTIIFVMLKRDLDYWYLEDRLYQRKLQMLRATA

SEQ ID NO: 318031 - protein, 344 aa, unidentified
MENYAGIDVSLELSSVCIVDAQGKIVKEAKVASEPEVLIGFFETLGFAVDRIGLEAGPLSQWLHAGLKRAGFDAVLLETRHVKAALSAMTVKTDRKDARGIAQLIRMGWFRPVHAKSIGAQEIRALLVARKQLLGRLIDVELSIRGILRGFGLKVGPVTRKNFEVRIRELVAGQAMLERIVAAMLSARAALKAEYAKLHKAVLTIVRDDTVCRRLMTVPSVGPLVAITYKSAIDDPHRIAKSKAAGALFGLTPKKYQSGETNVTGGITLAGDEMVRTALYEAANVLLSRITRFSKLKRWGMDVAKRRGSKRAKVALARKLAVILHRMWVDGTTYRWAEAEPIAA

SEQ ID NO: 318032 - protein, 414 aa, unidentified
MIGIVNKSCGLDIHKRFLIATILSKSGEKQQQRFDRNDEGILALKNWVVSEECDVVACESTSDFWVPIHDSLIKHLPVIIGNARDMKAFTHKKTDKIDSEVIARLALNNMIQPSRVFPKDQREFRSYIRLRLALVRKRTDIKNEAHAILTSEMFNLHDVLADIFGKNGVAILSGISSGKTVDQIIESLSPNVRKKSSQIRETLDREISQSAAIRLQICLKLIKHFDDEIEVLEKEIFIYSYGKHKREMDILMSIPGIGEIGAATLISEIGNLRDFPSGDKLASWLGIVPNVYQSADKYYKGRITKRGSKVARWILTQIAQAAARKKNSRLKEFFNRKMKSIGYAKAIIALARKIVTIIWHLIINDEMYQDETGYQKGEVHKRKIVETEIFSVDERIKIISGIIAIMEKKEEEST

SEQ ID NO: 318033 - protein, 343 aa, unidentified
MQIRSVGIDLGKTTFHLVALGDNGKVLLKKKFTQKQLITFCANMQTSLIGMEACGGAHFLGRALRAQGHEVKLIPAQFVKPFVKSNKNDFIDAEAIAEAVDRDNMRFVPIKTDDQLDLQALHRVRDRLITRRTSVINQLRAFLLERGLVFAKSPARLRERMPEILENADEDLTPRMRNLLALLWNEWKELELQIEQMNDEVEQIASSDAACTRLRQIPGIGPLVATAIVAAIGNGAAFHKGREFAAWLGLVPKQYSTGGRAKLAGISKRGNIYLRKIFIHGARAVVLRCKRERIAMGAWLTALEARAPRNVLIVAAANKLARIAWAVLSSGQDYRPVQEAVAA

SEQ ID NO: 318034 - protein, 373 aa, unidentified
MPKYSTAFGMDVHLRSTTVCALDADTGEAVTRRFPGNPWGEIAAWMDGFPGPSLAAYESGYLGFAPQRELAGLGVECVVAAVSKIPRSAADSASKNDRNDAARMAKAILAHDISPVWVPSPEVEGIRDLAGAYDGATARLATAKQRLLAFLAKRGFAYGGTTPAGNPRKYWTYDFLRWLDKVRPEDDGGVRTLAALRNEVEAAAEARADLLSEYRAAVDASPIAAEAAALQSIKGCAFALAAAFSAEVGDFARFRSGRQVTAYFGLAPSQRSSGDSVRLGGISGAGNALVRKLAVEGSWCYAAARHQPKLMPRDTGVPLEIRMHGRKGSERLLRRREEMLARGMPAAKANAATAAELVRWLWALGTMCREGAE

SEQ ID NO: 318035 - protein, 423 aa, unidentified
MSNRTLSKKLASVKPGTVFVGVDLALDQNVAVVLTEQAKQLTRFRFPNERDGYDYFYGRVEAILEQRQAPGVLVGMEPTNYFWKLLAADMEDQRPDYSYRLVNPYTVKKNREGDQLDRSKDDNRDAFVIGELLRTGKYTETRLLHGEYAELRQYVTVYTRLRRDVRRQKTLIRNVAGQLFPELPRAFKGLTGQTALAMLRHHAAAVVVRKMTQEAFIAGVRADLPGQRMQVAKLRRAHVLAKRSVGLSDGIDALQLALRLHVETLEALERQLEEVYTALVDTFLALPESTYLLSMHGLGLITAATILAEIGDPSHYTSARQLIKLAGTQPVPNTSGRKSRSQTPMSRKGRPRLRTALFFAVMRLVQLDEAFAHEYQHLQGREKNPLTKMQALGVLMNKLLRILWALMRNRTFYIPDFQTATEG

SEQ ID NO: 318036 - protein, 415 aa, unidentified
MNTTDYAALVALDWGDKTHAFALQIDGADGIESGTIEATPEALLDWLDKLHERCHGKPVALAIEAGRNALLRVLVTHTWLTVYPVHPATSARFRRAFTPSGAKDDIPDAMVILTLLRQHRDQLSALVLDSPEVRELAALVADRRGAVDARTRLVNQLTGLLKHYFPQALTLAGDDLAAPLALAFLRRFPELADVQKAGAQRLRAFYTKQNVRSEQRIDERLALLGRARPLSEERAVIAPSRLALARLLDLLDVEARHIAAYDKRIATVFAAHPNAEVFASLPGAGAALAPRLLVAFGDVAARYPNAQALQKYAGLAPVREKSQGRVWVHWRWAAPKFVRQSFVEWAGQTVPRCAWAHVFYQRQKTAGKGHHAILRALAFKWLRILWRCWTDGRPYDEIRYQASLAKRGSPLANAA

SEQ ID NO: 318037 - protein, 408 aa, unidentified
MEVLHERCCGLDVHKKTVVACLLTPGAGGQPAKETRTFSTMTGDLLALADWLAAAACTHVAMESTGSYWKPIYNLLEDRFQLLLVNAQHLKAVPGRKTDVKDAEWIAQLLRHGLVRGSFVPTRADRELRELLRYRTSLTQERTAEINRVQKTLEGANIKLAVVASNVVAVSGRAMLNAMIEGVEDPQALSALARGRMRKKQPALEAALAGGMSGHQRFLLSEQLRHVDDLDAAIARLSTEIEERLRPFDEPASRLRTIPGVGPRTAELLLAEIGPDMSIFPTAGHLASWAGLCPGHNESAGKRKSGRTRKGNPWLRGALVEAAQTAGRTKTYLGQQYHRIAARRGKRRAAIAVAHTILVAVYHILARGTAYEDLGPQYFDARDRQRATQRLVRRLSSLGYIITLEPAV

SEQ ID NO: 318038 - protein, 419 aa, unidentified
MCKKIGNMIDQITVGIDVGCHQHRVAIADPGGHIIEEFDLPHEHLGFVHFFYQLLIHEQNYGLPIVIAMEGVNGYARPLDQMILKKGYKLLNVNNLKLCRFKEMFPSPAKTDTLDAREIIKLVISAPQFGWGKKVLQEVEATPPEHKVLKRLTRRRRQLVEEKVRLLNRMECDIQSVCPELLELVENKDSQCFLNLLTFKGSLTDIARIRRPTILKIYGIGKVFADKVQDWQKDAHFSEEIDIVGPMIMSDAGRIRELKTIISGLEKKIARLIGTSRLGQLIESIPGFGVTCTGELVAEIGNISRFTSENSLAYYVGMAPLDNSSGKRKSTKTPRNVNTRAKMAMMTAIAHHIRSVPESKIYYNRKRREGKKYNQAVRSLGRHMVRVIWSMIKHDQFYRIKDLENLKDVKKEGNIAMVA

SEQ ID NO: 318039 - protein, 340 aa, unidentified
MRSKTVLSKKFKTVGQPNIDELFKVLETYCQDKPHMAVVESTYNWYWLADEFEKRNWNLRLADPSTVSKAGFKYSDDYTDASYLAECVRNGSIRSTAIMPKDDRAVRDLARYRMTRVEDRGRLKTILVNMTANHLSIKLNADKLLKEIDEAVEKATSASAEGATDEVLSHYYDNRQVRTKMRSLLRRIRFLTHEVEALDEELTELIKPNVYATSLQSIKGCGYVTSMLIGLEIGDIGRFRTHKDFVSYCRLAPTSKLSNGKSKGLGNAKNGNAYLSWALTELATFVVRYNPEAKRVYDRYFNRSRLRVKAIRSVAAKIARGIFMMLKNGEVFDMKRCFGG

SEQ ID NO: 318040 - protein, 412 aa, unidentified
MQDILTCAMGLDVHRDIIVACLVKGAVDAEPEAETRTFSTLIPEMQKLRDWVIESECRNIAMESTGIYWQPIYEMLESCFDGEISILVVNARHMKNVPGRKTDMKDAQWIATLLRAGLLKGSFIPDKAFRELRHLTRYRKSVVHDITAQKNRIDKFLQSSGFRFTAFLSDTFGASGRNIIRHLIEHGSIDREALDKCLKTKTRNRIDEILVALNGSLSEHQRRFLNMVFRHLEDLEVHKHTVEDEITEEVLKHTDALNLLCSIPGIDVTAAAAIIAEIGTDMSSFPDSQHICSWAGLSPGNNESAGKRKSVHINKGNPYLKSMLCEVAWIMASHRKLYLSGWYWKVKQRKGAKRATIALARKILSIIYTMLKTGTPYNEECFEQRRLRCERKRANRLVNELQKLGYVVVAPD

SEQ ID NO: 318041 - protein, 337 aa, unidentified
MKYCGIDLHSNNSVIVVIDDEDRVVARKRLPNELARIVEFVASWRDELAGVVVESTYNWYWLVDGLQAAGFEAPLANTAAIKQYDGLKHSGDEADARHLAHLLRLGILPTGTILPRDERAVRDLARKRMQLVRGRTTHILAIENIMARQFGGRMTSNQIKRLSADDIDRMPIAADVGLAMNANLAVIGALDAQIEVLERRLRERVKPRPEYAFLTSVPGIGQALSTTILLETGPIDRFASVGNYASYARCVDSVHTSNRKKKGEGDVKNGNKYLAWAFVEAANFARRCCPEAKRFHERKKAKTNNIVATKALAHKLARACYHILREGRPFDVTRCFA

SEQ ID NO: 318042 - protein, 380 aa, unidentified
MTTVHPARLPVTGTDDIAAAPRIVVGGIDTHKDLHVAAVLDQTETVLGTQSFSTTRAGYRALVRWMRSFGELTKVGIEGTGSYGAGITRHLVDVDVEVLEVDRPDRSDRRRKGKDDDLDAISAARAALRGHRTSIPKSKDGKVESLRVLRVVRSTAVKSRRVALQMLRAQIVSAPEELRDQVRNLTRMQLIRTCAAWRPDLTDAADPVSATRIALKSLARRILELADEVAMLDELIKPLVGALAPKLLERNGIGVEVAGQLLVTAGDNPERLRSEAAFAMLCGVAPLPASSGKTQRHRLNRGGDRQANSALHLAVITRMRTDPKTQAYVAKRTALGHSKLETIRCLKRYLAREVYYLLSPGKPQQQPGHPSAPKPAKQAA

SEQ ID NO: 318043 - protein, 387 aa, unidentified
MSQTVAALIPAAVNYERTLVLAIEVSNKSWVLAAQVPGLPHTKAKRTIDPEAEALLAAISGYRARATATGRSIERVIAVYEAGWSGFWLARWLMRHGVEVYVVQPSSVPVDRRMRRAKSDGIDAELLLRTLLAWLRGEPRVCSMVPVPDEADEDARRCVRERTELISERVGLTNRIGAVLATLGVSDYNPLLRNRSRRLAELRTALGEPLPANAHAKIKRLLARLELVLAQVAELERERDAVVETEASDKASKMIQQLTGLRGIGVQSATVLVREAFVRRFANGKALGSYAGLASSPYSSGGINREQGIGKAGNRRVRTVMVELAWLWTRYQPGAAQVCWFRERVGSTGRRVRKIMVVALARKLLIALWRFVTDGVVPEGAVLKPAA

SEQ ID NO: 318044 - protein, 415 aa, unidentified
MALKIVFKICCGIDVHKTFVVACIASTDSKGVTTYESHRFSTYTSGLKNLLQWLLDWNCKDVCMESTGKYWIPVYNILEKECSIVLAHPKYVKAIRGKKTDKKDAKWIADLFKHDLVAGSFMPPADIRQLRDLMRYRFKLTCFKSSEKNRLQNCLTVSNIQLGNVVSDTFGRSAQAILDKILENPADTSFDLEPLVYKSLKKKLPELRDAIDGFITPEQAGKFKVIKAHFENPEARKAELEELILALAAPYQQELTILQTAPGISSPFTAIGIISEIGTNMKAFPSAKHLCSGAGLTPTNNESAGKKKSVRVSKAGCYIKPLLVQCANAVVTSKKHPEIRNRYLRLKKRRGHKKAIIAIARMLLTALYHMLKNVENYNAELYKKSDLPPADREITVEQAIIIARNQGYKVKSATV

SEQ ID NO: 318045 - protein, 394 aa, unidentified
MLYLGIDIGKNNHVASMMNNIGKTVFKAFSFPNTTDGGNSLLELIKKHSESPNDVEIGLEATGHYWLALYSFLAEQGYIIHVINPIQTDGWRKGIEIRKRKTDIIDSVLIADLIRYGSFVETSLSDEDLMSLRQLCRFRNYLVDSISDLKRKVICVLDQVFPEYQSVFSDVFGATSKELLLQYSSPAELENLSVEMLAKTLAELSRKKIGTEKAEQLSSLAAHSFGVTFCKDSFSFQLKMLLEQMKFIEKQVKDTEKEIKELLKKLNSPITTIPGIGPILGAVILSEIGNISRFDNPAKLVAYAGIDASVSQSGEFESTRNSMSKRGSPYLRKALFQASLVAYNNDPILNAFYNKKRAEGKHHLTCIGAVSRKLCYIIYAVLKENRAYIKRPVT

SEQ ID NO: 318046 - protein, 378 aa, unidentified
MPSENTLHVAIELSASSWLVAVRPPGAEKSRLHRIEGGETTALLALIAELRSRASTKLGRGVDVACCFEAGRDGFWLHRLLTAHGIAAYVLEPTSILVNRRARRAKTDRLDAEGILRVLAAWLAGDRQVCSMVRVPTPEEEDAKRPHREREHLVQEKLRIENRIEALLFTQGIRRRPSLRSWERDVAELRTGDGRALPPLLEAELDRLWRRLVLILELIREVEAERAAALAAAADDRIVQKITALQRIRGIGTNFSTVLVREVLYRSFANRRQLASYVGIAPMPYQSGGMDRDRSISRAGNPRARTTLIQLAWLWLRYQPGSALATWFRERVGRVQGRTRRIAIVAMARRLLIALWRYVETGVLPEGVEIRAEADATA

SEQ ID NO: 318047 - protein, 310 aa, unidentified
MTAYVGIDVAKATLVLCLQPEGRTWKRPNTPAGQAQVVAELQAVQPERIALEATGGYERAIWQQLQAAGLTVVRLQPRRVKALARALGWQAKTDPLDAALLAEAARILVVPVTVAPDAATEALRALVDLRRQLVSQRDDNQRRLKQSSAVVAQRVLNRINASLQREIHQLDRKIKAQLAVTAAPDLATAPGVGPVLQATLAARLPELGRLGRRQIAALVGIAPYNADSGAHQGKRHIRGGRADLRRVLYMATLASIRANSIIATTYRQLLARGKLKKVAIVACMRKLLIMLNAMARDHTTWAPPTLSGVA

SEQ ID NO: 318048 - protein, 315 aa, unidentified
MTQQQEVFVGIDVSKDGLDFAVSNENRIDQVGNDRKGIARLVAQMRQNPPSLIVVEATGGYEQVVISSLFHAGLPVARVSPQRVHQYARARGILAKTDKIDAGNLAEYGEHIRPRLYVAKNKDVEHLSVLLTRRKQLIEMVMAEKNRLRTACEHLRTSFQKIIACIGEALKRLDQEVCSFLEEHPELKEREQLLRSARSIGPVTAATLLAELPELGELDRKQIAALVGVAPMNQDSGRRRGYRKTKGGRPDVRRTLYMATLTGIRYNPVIKANYERLVGRGKEKKVAITACMRKFLIILNAMMRDQKPFRSPAAV

SEQ ID NO: 318049 - protein, 314 aa, unidentified
MKAPVFVGIDVSKAQLDIAVHLGDRFSVPNDESGMVTVVERLRSCAPEVIVLEATGGLEIPVTSALASAALPVVVVNPRQVRDFAKAAGQLAKTDALDAQILARFAEALRPAPRLLPDEQTQALAALLTRRRQLVEMLTAEKNRLSTAPKPIRKSVRAHITWLERELMHTDTDLAQTIRESPVWREKDELLRSVPGVGPVLTTTSLANLPELGTLTSKQIAALVGVAPLNRDSGTLRGKRTVWGGRAHVRATLYMATIVAARFNPVIRTFYQRLRTAGKAKKVALTACMRKLVIILNAMLKHRTPWCAKGAQYT

SEQ ID NO: 318050 - protein, 408 aa, unidentified
MKTSIRQNPKKRYNRFCGIDVAKRKHVACIMDRDGEFVVRSQSFNNDAAGYQHILNRLTDAGGPRRVIVAMEATGHYWYALQDFLDRHRYEVAVLNPIQTAQQGKKGIRKRKTDKIDAHHIAQLLKNGEHKPALVPSDFAMTSRQLTRLRYRLIHQGAQLKQLLWSRLYPVWPEYETLFADPFGKTGRKLLRAAPTPQDLLAMAPKELTELVCKTSRGKHGPRKVHEIRQSATDSVGMRRGLDGARISIRSLLTQIESRMPIRQQLEADITALADQLPGYILTLPGADPIKAVSLFGETDPIETFRSPKQLVAFAGLDPTVYQTGEYDAPKRRISKRGSPFLRRTLWAMAMRSLQQEGDLHDYWLRRRRDGTHHLVAVTAVAAKLCHITWRILTDRRDYLPQRPDPES

SEQ ID NO: 318051 - protein, 452 aa, unidentified
MERSKSGALSMVNPRAAAIDIGSTMHMAAINPNADDNPVRAFGTFTGDLHDMARWFKTYGVTTVAMESTGVYWIPAYEVLEGHGFEVILVNARYAKNVPGRKTDVSDAAWLQRLHSYGLLRGSFRPEAGVATMRAYLRQRERLIEYAASHIQHMQKALMEMNVQLHHVVSDITGVTGMRIIRAIVSGERTPSTLAQMRDVRCHATIETICAALSGNWRDEHIFALGQSLALFDFYQTKVLECDRKLEIALKALEINEGHDVRQLPKVRTKRRQVNTPDFEVRSALYRVLGVDLTQIHGIGPSLALKLVGECGTDLAAWPSSKHFTSWLCLAPGNKISGGKLLSSKTRRSSSRAAALLRLAATTIGRSDTALGAFYRRLSARAGKAKAVTATARKIAVLFYNSLRYGMAYHDPGASQYEERYRSRVIGNLQRRAKAFGFILHEMPGEPDMAVS

SEQ ID NO: 318052 - protein, 433 aa, unidentified
MTTDSAAVRATKGKIMKPWTQITHYAGFDWARDHHDVVIVDRQGQIVADFRFQHCLEGWKQFREHVKNYPALAVAIETSQGAAVDQLLQLDCTVYPVNPLSAKSYRQRKAPSGNKTDHLDGWSLAEALRAEGQDWKALQPLDPLTQQLQLLCRDEIGLIEQRTALVNQIQQALVEYYPAALQAFEDWTHPYCWDFIIQFPTPQKLAAAGKRRWEKFLHTQKLWRPETAPKRMEIFQNASQFCGSAPVTLAKSLLAVSLARLLNALQLQLDQYRQQIEALFKQHPDHDLFGSLPGAAQTLAPRLLGEIGGPNRFEDTQTLQCIAGTAPVSFQSGQIHRVHIRYSCNKVLRHTVHLWSQCCLRTCPWAQVYYRQKRADGKSHACALRCLGQRLLKILWKMLQTRKPYDADLHARNQKQHGSWVLTLIKPETNACV

SEQ ID NO: 318053 - protein, 351 aa, unidentified
MSLVMLGVDPHKQSHTATALVTGSHQQLATLRVPASASGYRQLLGWARQVPQRRWAIENARGLGCHLTQWLLARGETVQDVRTTATARVRELSRGRGRKTDALDAAAAAGIAALQGDAAQLQPEDTTVVLAVLEERRSNLVGQRTRSVNQLHAVLRELIPGGAPRKLRADRAAALLRGLRPLTAADRARKQVAWDLVAEVRGLDRRLTVIGQRIQDTVAALGSRLTETVGIGPVIAGRLLGRTGRASRFPTAAHFASYTGAAPVEVASGEHARHRLSRAGDRQLNHALHIIALVQVGTPGCAGYHYFRRKLAEGKTTREAMRCLKRRIADHVWRIMLSDEQARNHRQPQAA

SEQ ID NO: 318054 - protein, 341 aa, unidentified
MGQASTIGLDIAKHIFQAHGADASGNVVFRKRLTRAKLLGFLAAQSPCVVAMEACAGSHYWAREIGRLGHTARLIPPAYVKPFVKRQKNDAADAEAVCEAAQRPSMRFVPVKDEEQQANGVVFRARDLLVRQRTQCINALRGHLAEYGYVFPKGITHTATLFDLIEDPASSVPESARAILKVLINTFNALDAQIRELDVEINRRSKTDPAARRLMTIPGVGPIAATAITALVPAAENFGTGRNFAAWLGLTPLQKSTGGKQKLGAISKQGERTIRRLLILGASAVIRQACLRGAPAGSWLARMLSRKPRMLVTVALANKVARIVWALLVKGGVYRAPVLPA

SEQ ID NO: 318055 - protein, 312 aa, unidentified
MTLTPNYIGVDIAKGWIDVFDPETARATHILSSPKRLANFARGLKNCIVVFEASGGYERPLAEALAAQNIAYARVNPRQAREFARATGRLAKTDRVDAEMLAQMGAALRLSPTPPPEKTRAELAEMVARRADIAAMIRAENNRLKQVRLAVVRRDIRAVLAHFAKRLARIEAEIATHIQAHKPLRDTAARLQTMPGIGPILSAALIASLPELGHMDRRQIASLAGLAPHARESGVFKGKRRIWGGRANVRRTIYLAAFIASRYDPTLKAFRNRLQDAGKPTKVAIVATARKLVTILNAMMKNECDYRKSATM

SEQ ID NO: 318056 - protein, 406 aa, unidentified
MDANYANRLQWFRQFKEHINASTSTLVVGIDIGKDTHHAFLGTPAGRTIHRRLIFENSIQGFDTLLFLIQRYMRDEQLSDVVIGVEPTSVYHKPLSEHLITMGYQVVYATNTAIKKNRAILDGRWDKNDTKDSANVADLVSRGRCHFYDLPDINLRDIRNLLSLRKRLKKQEHRLVTRIRNNLVAQYFPELDGAWYRCQQENLAIVRFCLSPHKVAELGFDDFCRMVIRKRRGVRQYQRLRYIYEIAQDSIGCRLGSAVVFEARLLVENLQRSREQVREVEEQLYAICESYKEYELLQTIPGFGPYVSAVVLGAIGYAQRFDNAKQVLRLAGLDLNASRSGKTSRTAVPVISKVGKADLRYALYQAAHVATSLTAEFKAYFKRILKSREKERGIKTKMRVKVSAKM

SEQ ID NO: 318057 - protein, 344 aa, unidentified
MNIATIGIDLAKNVFQLHGVDGRGKVVLRRQIHRGQMRGLFVNLPPCLIGMEACASAHFWARTLESYGHTVRLIAPHFVKPYVKTHKTDATDAEAICEAVSRPNMRFVPVKSIEQQSALSLHRVRQGFVRARTAQACQIRSLLAEFGLVMPRGISNIKQVPKLLQVAGKELPAPFCRLIERLLAHLKELDRQARELEEQIVDWHQRSEPSRRLAKIPGIGPITASALVASISDVRSFKSGRELAAWLGMVPRQHSSGGKPTLLGISKRGDRYLRTLLVHGARSVIVQVLKRDDDKGSWLKRLLERRHVNVATVALAHKTVRTVWAMLAHDREYCPNYKSLPVAA

SEQ ID NO: 318058 - protein, 416 aa, unidentified
MDSGCDSQMGGMQMNSVGIDISKGRSTIAVMRPFGEVVISPFEVRHTDSELSKLARRLKSLNGETRVVMEATGNYHAPVAKLLHDAGLYVSVVNAKLVHGYGNNDLRRVKTDRKDAVKLANYGLDRWLTLPRYIPEEDTRLLLKNCYRQYRQYSKVQTILKNNLISLLDTVFPNVNRLFSSPARADGSEKWVDFVAEFWHCRCVSEKSEKVFTNKYQRWCRKHGYNFSEEKAHTIYVEASGHIGVMPKSETTKLLVEQAVAQLRATSAALAALKHEMQSLASMLPEYPVVMDMFGVGPTLGPQLIAEIGDVRRFYSKKALVAYAGLDAPPNDSGDVTGRHKSMSKVGASSLRRTLFLVMGVYLQKSPLDEPVYLFMDRKRAEGKPYRVYMMASANKFLRIYYATVKAYLESLELTA

SEQ ID NO: 318059 - protein, 339 aa, unidentified
MNFIGVDLHKQFSTVCVMNENLTVVKRKTLYSSQPELIVEFFKQHAPFKVVIEATASYVWFAELLEPLAEKIVLANPKKLRVIAESTKKTDRLDAQILAEFLARDMIPEAHMPTPRQRQHRILVRQRQYIRSRVTGVKTKIRRILSDYNADRKNLFSIDCGPAYTKQVSLNDADRFVIGQLWSEYMEHSERLAKVVEKIRKFAAKAPRREAEARKILKTAPGVGFVTAEVVLSELGDVSRFRNAKAVCAYAGLVPAVRQSGGKKSHDLHITKEGSGLLRWALVESAWRLVGSDSKWSTTFMRLKKRSGARRAIVAIARKLLCVLYAMLKTSTPYKAMVA

SEQ ID NO: 318060 - protein, 316 aa, unidentified
MKNKTNQNINVGVDTGKSQLDIYIHPLDIYFIVSNDEEGIKEAVKTLKKYSPERIIIEATGRLEMPFIMACAKAGLPFVVANPIHVKRFAGALGQRAKTDKLDARLIALYGEAIKPKLSNLKPETMRSMSDLVARRNQLLVMQTMEKNRLQILPKELAMTIKPILTAFKIQIDKIEKKIISLIESCPDYQTKNTILQSMNGIGKIASASIISNLPELGYITNKEASSLVGVAPMNRDSGRFKGQRKIQGGRHQVRTVLYMAMMSAMQSNLVFKETYQRLVAAGKPKKVAIIACVRKMVVILNSMLRDGVMWEAPKA

SEQ ID NO: 318061 - protein, 346 aa, unidentified
MKILALDLGKYKTVGCAYESESGAHQFQRTFTAPADLQRLVQEIKPDRVVIEVCSIAGWVCDLMGQLGVTVQVANTSDDAWRWRKVKQKDDRRDALKAARLSAVNQLREVYIPQIEVRQWRALITYRQHLVGRRTKIKNHIRDLLVREGQLLARGSKCWNQLGQELLSKMARPLAEVGPAELWRGELWEELQQLQMIQAHIASVEEKLNAIGAADKRVQLLRTIPGVGPRLSEAIVALLDQPQRFRKASQISGYIGMVPKAFDSGESERRGRITRQGNRLVRSLLIEVAWVGLRHNGWLRQTYQRLCAGKKARKKIAIVAVGRKLLVRCWAMLRDNRAWSWQPQIT

SEQ ID NO: 318062 - protein, 348 aa, unidentified
MSQRNQYVGLDVSLKETSICVIDEADKIVWRGRVDSTPKAIASAVKQHSPHAVRIGLESGQLSNWLFQELQAAGLPVICVDARHAKAALSLKVNKTDANDAVGLAQIMRVGWYREVTVKSLDCQAVRALLVARAQIVSQITTLKNSVRGILKTFGRVLPKGLRSQFPVRVRAAIDGHPVLEAIIEPTLRVLEAARAQLLVYDRAVIQRARSDSTAGQLMSAPGVGSVVVLAYITAIEDPARFKRSSSVAAYFGMTPRRYQSGEVDYAGRISKCGDGMVRCLLFEAAKVLLSRSARPSALKTWGETLGKRVGAKKATMAVARKLAVILHRMWTTDTTFQWSAEAGSSAA

SEQ ID NO: 318063 - protein, 480 aa, unidentified
MAEKTARESDKTQRLTRKQRKELGRRIWSEHPGLDVVHRDAAGIDIGSREHYVAVGPDRDAEPVRMFGGFTADLQRMAGWLKECGIATVVMQSTGVYWIPVYDVLEQNGFDVWLVNARETRNLPGRKSDVQESQWLLKLHTYGLLRKSFRPAQDIRALRTCWRERAEYVQQAGTCIQRMQKALTEMNVQLSTVLSDLSGVTGMRILRAIAAGERDGMRLAEFRDPNVKASKEIIAQSLEGTWVPEQLAIVKRQLADWDHLQQQIAACDVDLQAMMKKLPDAKTEPKPPSPDPTGPRKRRRKNGRSSSNEPKFDLSAELKRVAGVDLTRIDGIKVLTIQTIITEAGLDMSKWATEDHFVSWIGFSPRNDVSGGKILKKKTRRVVSRLATALRMAATTLRKSESYLGAQFRRLRTRLGAPKAITAMGAKLARLVYRMLKYGQEYVDKGTEHYNTRYREQQIKLLQKKAAQHGFTLVPQPLPA

SEQ ID NO: 318064 - protein, 359 aa, unidentified
MNKLTKIERFFKESSFTADDQLFVGVDVHKKSYHVALYLNDAPSFDFVMPANNKQLSQMLKSTQPALRQVAYETGFSGYGLARCLKNDHLPVSVAATSKIPRPSSADDKTDKLDSKKLAEYAAKGLLKPVAIPTLKQEADRQLYRMRHRQVRNLAKVKTQIKSFLLMHDIAEPVGLSHWSQQAVTCLRTVPLRKTLRLSLDELLCDLDYYTTRMKSLDKALADHLDKGALARRMALLQTHPGVGTVVACQFATELFHYRDFNSTREVFKYLGLAPRIHQSGEHASRGSINKLSNSRLRSNLNQAAWRWVAVDINAKKCFLRILNNCGGIKQKAITAMARKLAGHLWMMLIKDQPYDPTK

SEQ ID NO: 318065 - protein, 335 aa, unidentified
MAQMVAIGVDTHKDTHVAVALDALGGELDDCVIQATRAGYEQLLEWSRRLGQPVFAIEGSGSYGAGLARYLEQAGERVHECERPHRRDRRAGKNDRIDATLAARHLLTGEGLSCRRGDGSREQLRALLCERRGAVQARSAARNQLHALVVTAPDALRERLTRLSSDRLVATAARLHASPDGLNGVLRRIAKRVQYLTAEINEIERSMLALVRQVAAFLLEQCGIGVVCAAQLLVSSGDIERMRTEASFAALAGTSPVDASSGKQQRHRLNRGGDRQLNWALHVITLQRVRRDPETITYYKHLLANGKTRREARRCIKRALARRLFHLLRQTPLTT

SEQ ID NO: 318066 - protein, 395 aa, unidentified
MFIVGIDVAKRSHEVCMITSDGRTVQRPFSIRNNCTGYNLMLEKIRKHTNIKSQIVFAMESTAHYWLALFTRLRKDGYHVILLNPIQTSAMRDMFIRKIKTDAKDSFIIAELIRFGRYAESNVAQDRLLALKELCRNRFYLVDMAGDLKRKLIALIDRVFPEYEAQFDTIFCKSSVALLKKYPTPQKLSNAHLDKLTELLWNSSNGHFGEWKARELKELARNSFGVEDCDGAYSTLILLMLDQIQSLSGKADALEKEISRLFQSFDTTVTTIPGVGPIIGAVILSEVGDISRFSSADKLAAYIGVDPSVNQSGEFQAAHAHMSKRGSPYLRRCIWMASQVAVQRDPMFRAYYEKKAAEGLKYMTIIGHVTRKMTAVVFAILRDHKVYEPVLPTAA

SEQ ID NO: 318067 - protein, 408 aa, unidentified
MSHNIAGIDVHKKLLVVVVTAADDAQNILSSRRFGTGHAALGELRDWLLSLEVKEAVMESTAQYWKPVWLELEPYLKLHLAQAQSNRAPGGRKSDVADAKRLVRRFVAGELYLSFVPDPEQRSWRTVTRARLQLIRERAQLQNQIESLLEEGRIKLSSVISDLLGASGRRILRAMAQGEEDPEALAALASERLKCDEETLKDSLQGSMTIVHQTLLAQHLDRIELIDGQIEQLNRLCAEHMQAHQAAIVRLVEVPGIGPETAQEIIAEIGPAASAFPSGPQLASWVGACPGSHESAGQNKSGHCAKGNRFVRRVLCQAAQAAVKTNGSYIQSTFKRLIVRMGYTKAIWAIAHRLCRIIWKILHQGVQFIEHSGAVNPKAIRRSVNKHLRALRRLGYIIPASAVPGVGA

SEQ ID NO: 318068 - protein, 347 aa, unidentified
MALATISVLGVDLGKNVCSVVGLDASGAVVMRRKMRRETLIGLAEKLPACVIGMEACCGAHHLGRVFAAHGHDVRLMSPEYVRPYVKAQKNDDRDAEGIAEAATRPTMRFVDLKSQDQLDIQTLHRSRDRLVGERTALINQLRAILLERGMVAPQGKRKLEQFLTVLMDEQGGEGLSPRMILLVADARAQWAELDRRIAAFDTEFIRWAKENDNARRLTTIPGFGAIVASALVAAVGHAESFDHGRDLAAWLGLVPRQFTTGGKPKLLGISKRGNKYLRKQLIHGARAALPYVAERDTPLGRWAKALMARTHHNVAVVAFAHKLARIAWAVLRRGEPFAVTGIPAAG

SEQ ID NO: 318069 - protein, 401 aa, unidentified
MTTTPTQYSTDRRPALYLAFELGWSEWKLAFASAPADAPRLRSVGARNTQAVLQEIAKAKHRFGLPADAAVYCCYEAGRDGFWLHRWLSAQGLHNLVVDSASIETKRRRRRAKNDRLDAAKLVSMLIRYHGGEKKVWSVVQVPSVADEDRRQLHRDLLELKAERTQHVNRLKGLLAGCGLAVTRIGDDFPAVLAALRQWDDQPVAAELQKRLLREWERHQFVVRQIRDVENERSRQIRTSTAQPMEQVRKLLSLRGLGANSAWLFTLEFFSWRAIRNRKQLAARAGLTPTPYDSGESSREQGISKAGNRRLRTMAVEIAWCWLQYQPQSALSQWYARRWGSGNSRQRRIGIVALARKVLVALWHYLETGEVPEAAATVDWKVKMKGRKPEAVSGAEPLTRS

SEQ ID NO: 318070 - protein, 394 aa, unidentified
MKEQKESAALGRIIGLDLHPDVFSAAGLSGRDAATAQPVQQWDRWATAQLEVWAKTLGAGDLVVLEASGNSFESCERLKRCGVATVVLESQRAGQIRKTYCANDRSDAVKLARIYLSGLAHPVWQPDATTRERREVLHAYRKAVTTTTRTRNRLKSFLSDHGIRLKAGVRLIQASGQKTVRGCREWSPLQSMLVEQMLEELQSADVRRHQLSAVMAQEVAADPKLLPLVRLLGVRHIIAFAIAAVVGDIARFANPKKLVAYLGLAPTVDQSGNGPRGQQGLVTFGRGDLRALLTQSAQNALNQRSSPLHTWGWKLCLRKGHKNVAITAIARKLTVSIWYMLRGLFTPLKQIDASLRVKLAKIATTIGVKTIRHLGYKTKAAFIEEKYQWLLNPA

SEQ ID NO: 318071 - protein, 344 aa, unidentified
MDIAVVGVDLGKNVCSVVGLDASGAVVMRRRVRRETLIALAEKLPACIVGMEACCGAHHLGRLFAAHGHDVRLMSPEYVRPYVKAQKNDDRDAEGIAEAATRPTMRFVELKSQDQLDMQTLHRSRDRLVGERTALINQLRAILLERGLVALQGKRKLEQFLAVVMDEQAGAGLSPRMILLVADARAQWAELDRRIAAFDAELVHWAKENEDARRLTTIPGFGAIVASALVASVGRAESFERGRDLSAWLGIVPQQFTTGGKPKLLGISKRGNKYLRKQLIHGARAALPYVAERDTPLGRWVKAPLKGAHRNVAVVAFANKLVRIAWAVLRRGEQFAVKGSLMAA

SEQ ID NO: 318072 - protein, 413 aa, unidentified
MKALLTRCMGLDVHKDTIVACLLVGEIDTKPESEIRTFSTLIPGMQELREWITEVGCKHVAMESSGIYWQPIYEILEDCFDSEITLLVVNARHMKNVPGKKTDMRDAEWIATLLRAGLLRGSFIPDKEIRELRHLTRYRKSIVRDVASQKNRIEKFLQSSGFRISTFISDIFGASGRNIMKHLIAHGSITMAELGLCLKTKTRKNINEIMVSVNGTLSAHQMEFLGMKLAHLEILEGHRAYVEASISSFIERFSTAMSLLCTIPGISITAASSIIAEIGVDMSRFPTAEHLCSWAGLAPGNHESAGKKKSVAVNKGNPYIKSMLCEVAWVVAGKRNTYLAGWYWRIKQHRGAKRGIIALARKTLVMIYAILKSENPYDESAFEIRKQRVKQKRTSKLIHELASLGYRVEQMAG

SEQ ID NO: 318073 - protein, 448 aa, unidentified
MSKSKTKNETVKRISQLTVINTTAAGIDVSDKEMMVAYPIGSGQLEVRCFGCFTSDLHSIAKTLRKFSITSVAMESTGVYWIPLFLLLQEYGFEVWLVNAKHVKNVTGRKDDESDAEWIQKLHSCGLLTASFQPDNLTRTLRSFVRHRKSLERTCSSYINRIQKALELMNLKIHTIISDIDGKTGLLIIEAILAGERNPEVLADLRDRRIKASREEIILSLEGHYTTEHLFELRQCYQLYCTHREMIGECDREIEKQLVEQVASKNEGLIPEIPEVKRKATKKHKLPFNATAYLNEIFGVDVTEVFGISELSALAILSEVGTDMSKWKTENHFTSWLGLAPNTKISGGKVISSRIMKKKHHAGQAFRMAANGLKNSKSPLGDYYRRIKGKAGAGKAVVATARKLAIIFYIMVANQQAFDPKALIEYQEKSKQKKINQLKRKLELLEAA

SEQ ID NO: 318074 - protein, 269 aa, unidentified
MTFKRNGCYAGLDVGKDWLDLAIHDVDGTRQFSNSPVGVKNLIIHLSRLDPALIVVEATGGYEQRVVQAMFSAGIPVHVANPTRIRSYARAKGVLAKTDTIDAVMITEYGYMLSPEPQNAKTEEEIRLRSMIIRREQLVEIRAAESNRLHTAHLCMKSSVEDHLRWLSVQIEELEVQIQALIHALPAVQASVNLLEGIPGVGPITAATVQAEMPELGQVNRQQIAALAGLAPITGIVERSGGGGAFLAEERVCAACCTWRAYQVSVITL

SEQ ID NO: 318075 - protein, 425 aa, unidentified
MRYFGVDVHLEFCEIAVCEDGRVSQVGRIASTPEAIREFAAGLGSEDEVVLDASGSVMAIARILRESDVGRVVVSDAAQTRAISHARVKSDRFDAAMLARLLSSGMLSEVWVPDEATLALRRRVARRAALIRARTRIKNQVHGVVMRCLLGRPPVSDLFGKKGRAWLLEQQLHEEEAETVQGCLRQIDFLNGEIAQLDRKIAEQALAWPGLGRLLTIPGVDIGTAAAVIAAVGDISRFPSAGQLVAYLGLDPKVRQSGSEAARYGHISKRGNAQARSMLVEAAWIAIRSPGPLRAFGERVRARRGAQVAAVAVARKLVVLCWQLLSKDEDYAFARPSLTRQKTRPLELTAGASRRPRRHDGLTVSPTAAQRAAERELQSQAEQAYRRLVADWRAAAPKGGAGATPGRASSNRPSKGKAARQATSP

SEQ ID NO: 318076 - protein, 304 aa, unidentified
MNGIGIDVSKRRLDVGTTDGKTLQVSNSRSGFAELDLWLQGHPAVQIVLEATGGYEQPVLDFLHNAGHPVVRANALRARKLAQGLGHMAKTDRLDAYALAKMAALVKLRSYQPLEPWQREMRDFVRARRQAMHALTVARQQQEMVGNRELRRLLQANITCLQKTVERLGKRISEQVSKQPQLAVLKSMKGVGPGLQAVLASYLPELGKISGKAVASLVGVAPMTHDSGTMRGKRSIHGGRAEIRQVLYMASMSAMRHEPRLRDFYQSLRARGKEGKVAIVAVMRKMLVILNARMRDAQGGSIPA

SEQ ID NO: 318077 - protein, 323 aa, unidentified
MGIDQHKRYSHITIIDEIGDLVEERKLYHYDKEGMLNYFKSFNPHQTKVVLEATGNWYWLADLLESANLTHILAHPYKTRIIAESKIKTDSISSFTLAQLLRAGLIPQSYLAGRKTRSLRELLRYRISLVKVRSSLKCRIHSILDREGIDTPQISDLFGRKGLMWLESLSLAYPLSCSLKDYLNLIERLNSLIDETEKSIKLTIKENPLAQLLLTVPGIGFFTAYLILCEVVDITRFLTPKKLSSYIGIVPSIHQSGNFSHTGKITKQGNKYLRWALIEASQKAIIKDPYLKAIYDKITYKKGKQSARGRSALGGKSKGSSCQ

SEQ ID NO: 318078 - protein, 335 aa, unidentified
MKSYKRVIGIDISTERLDIADSNSKIVHEVDYMVDAIKSKILKLIKKPSETLVVCEATGGLEYTLVDVLHDAKIDVVVANPARIRDFAKGHGFLEKSDKIDASVLQLYGQQVKVSLAKPRTLQERNFIALTRRRTQLLQLISQESNRLRQSNDPQVKAFVEEMLKSLQTQMKSVDSWISKALDEHAKTNPSIDVIRSVPGVGPVMTATLVAELPELGTISRTKIAKLVGVAPMIKQSGKSEERRRARGGRGGVRRVLYMATLAATQKNDVIKKRYIKLLASGKPKKLALVACMRTLLTILNDMVRHETKWGEKKKSVAGSVVSNRPAPAHVLDKS

SEQ ID NO: 318079 - protein, 483 aa, unidentified
MKSKQPEKNKKAICRPTQNNWHQMNRKQRREMTRKIQSEDLSLEVVHPDAAGIDIGNESHYVAVPLTRDSQPVRRFGCTTSELKGMAVWLKQCAIRTIALQSTGVYWIAVYDILEEAGFEVYLVNAKETKNLPGRKSDVQESQWLMKLHTYGLLRNSFRPSQEIRTMRTYWRQRHDLVRAAGRHIQRMQKTLTQMNIQLANVLSDVSGMTGQAIVKAILAGERDPYQLAALRNWRVKASEEEIARSLEGNWQEDLLFVLQQEQDGYEFCQRQMAECDQRLQQYLQQLEDRSHGAGLPEEKRKERLRKKKKGNAPQFDLRAELFRMTGTDLTQIDGIDVTTTMTILSEAGWDMSKWKTEHHFVSWLRLCPDNRISGDKIIGKGRLPTNNRVTNALRMAASTLRLSNTYLGAQFRRLRTKLGAPVAIKAMAAKLARLVYRMLRHGMTFVDRGAEFYDAQHRKLQITYLKRKAAHLGFQIIEAPAA

SEQ ID NO: 318080 - protein, 412 aa, unidentified
MNIVFERCAGVDVHKRNVVVCASTPDEHGQRHKERCTFSTMMPDLLRMRHWLQSLGVTHVAMESTGSFWKPIFNVLEGHVEVFVVNAQHLKAVPGRKTDLTDAEWIAELLQHGLLRPSFVPPAFQRELRELTRYRTSVVEERSRTINRLQKILEDTNIKLSAVATDLMGRSAREMLAALVAGEADPAVLAQLARGKMRAKRDLLVQALQGQFQSHHRILISAQLAHIDALDEEIGHLSAEIAQRLRAYEPQLKRLETIPGIKRRLAAVILAEIGPDMQRFPSARHLASWAGMCPGNRESAGKRLSGKTRKGSPWLRTALVEAAHAASHGKESYLSAHYHRLVLRRGGKKAALALGHTLLVMVYHVLADEKDYQELGGNYFDEQDRLAVQKRLVHRLEKLGYEVTLTPTSPAA

SEQ ID NO: 318081 - protein, 414 aa, unidentified
MSYKIAGIDVHKKVLMVVVIDATTPEGKPERRRFATMASDLRRLSTWLREQGVQEAVMESTAQYWRSVWLELEPCMLLHLAQAFSNRAPRGRKHDFKDAERLVRRLIADELILSFVPDGEQRTWRNMTRMKTQLTRDRVRLQNQMECLLEEMRIKLSIVVSDLLGGSGLRMLRALADGETDPKKLAALGDDRLKCSEEQLVDALTGRPEPMHRAMLGLQLERLQLIDRQIAQLNRMIAQAMKPHQDAVIRLAEVPGLGVDSAQQVISEVGPQASTFASAAELTSWVGTCPGKEESAEENHSSRSAKGNKYLRRVLNQAAHAAVRKNGSHFQAVFRRLLPRLGYQSAIWAIAHRLCRVIWKILHEGVRFIEQGSESDPKIRKQRSRILARALRKLGYDVAITPRNPATTEMGIQM

SEQ ID NO: 318082 - protein, 308 aa, unidentified
MSKVRFLGLDVHADTIAVAVAEPDGEVRSLGVIPNRLESIRKMVAKLGPVKDLKACYEAGPTGYVVYWQLTALGVACEVVAPSLIPVKAGDRVKTDRRDATKLARSYRAGDLTAVWVPDADHEALRDLVRAREDARQDQHRARHRLSKFLLRHGRRPPEEVKKHWTLKYLTWIKEQVHFDQPALEATLLDYVHEVDHMAERIQRLEKAITEAIQKAPPVIRAVVEALQALRGVAQITAVTVVAELGTLSRFASPRQLMGYSGLVSSEFSSGNRIRRGAITKTGNAHLRRVIVESAWAYQYRPWPGSGD

SEQ ID NO: 318083 - protein, 412 aa, unidentified
MEVSYPRCCGLDVHKQSISACVIIREHGKAEKLERRFGTFTHQLEELAEWLEEFGVTHVVMEATGVYWKPVWNVLEGRFDLMLVNPEHIKALSGKKYDRRDASHLADLLQHGLLQGSYIPPMEIRQLRDLTRNRARTVQEAARIKSRIQKILEEANIKLGSVATDVLGVSGRLILKGLIEGEQDATKLADLAVGVLRKKRNQLTQALNGKVDDHYRLMLRKLLRALKEREAEIADDETDIRQQIEPFGKAVLAWMQLPGIDEVTAWSLVAEMGPDMAPFETAEQAASWSCVCPGNHESAGKQGNGRTRKGNPWLRSAICEAAWGASRTKKSYFHAQYARICVRHGPKRALMAVAHSMIVVGFYLIKYDLEFKDLGADFFDRRNREHATRRAVKRLIALGYKVHLEEEVSVLS

SEQ ID NO: 318084 - protein, 420 aa, unidentified
MEHLIGRELPAKTLVVAIDCGKATNRVMLASGEQGVIGEPVSLPTLRRGVEELERLILAAGSADRPVIAVEATGSLHHAWVAELERRFAGSLRLFAPSETQAARTGLGSRRTKTDDRDCAALLTLARQGLGRPPEGATVAAMLGAVRHRRALVGVRKVTQQRLHDQLNALCPGLSAPVGHGRALALEDTSGQAVLACAVEFCGRAPAPRSLIARAPGRLTKANASYWSARWKALLPPPPDAELRARRLGGDLERWRSLARDISAVEEQVAMLLAASPGQVLTSLPGVAQTRAAAFAAHALPIERFPSAGHLYSATGLAPATYESATLRRRGQISRAGLAEFRDALMGIAWGLSRNCAAFAARDRELRERGMAPIQARVALARHACRLCFALLQTQQPFDEERYVRMRHGASGDGVYGYAA

SEQ ID NO: 318085 - protein, 415 aa, unidentified
MTNQLNIVCGADIHQRFLVATILCRDGRAWTSRFLMNLNGLLDFKSWLISLGCQKVAVESTGRFWIPVHMILEGTIDLIVANAYKIKHTPKKKTDLKDSEWLAELCLNDMIEPSRIFPKEDRELRNLTRTREAYVRDLSKEKNRIHHVLESCSIKLASVISDIFGKSGMYILNGLLSGINIEDVLKGIPDKRVRERKAEELRDALMGKLEVSDIFLIRQSLRIINQLKICIEELDREIRSRIASRPMDIKILRSIPGIGMVSAYTILAEIGNYLDFKKPELLAMWAGLVPSVYQSADKLITGGITKQGSKHLRWILVQVAHAISHAKGGKLKKFFLKIKAKKGYLVAIVALARKVLCLIHHLLVNREMYEEDGWAAKKDASISKNKNMGTMTIDDMIQCIAQAGYEVKKIKSGGG

SEQ ID NO: 318086 - protein, 358 aa, unidentified
MKQTTKYVGLDVHQATTVAVVGDDTGRVIARSVLPTEAPALLEFVRGMRGAVQVALEEGTQAQWLYDLLIGHVAQVVVCDRRGEPRHGSKGDWHDATMLMDRLRKGELRAVYHGSPHRAALRELARAYRNLTEDATRVMSRLKALFRARGVRTTGRGVYDPTQRAEWLAKLGDAGVRFRAATLYAELEVLRALRPAAKAALITEAQRDPAWGVLRTVPFLGPVRVALLLATLQTPWRFRTKRQLWAYAGLAVVTRTTSEYALDASGRPVKRRRPPMTRGLNQNHNHVVKEVFKGAATVAAVRAGEFRELYRVLVARGMREELARLTLTRKLAALTLRLWKTGERYDATKLTGYAVPAR

SEQ ID NO: 318087 - protein, 346 aa, unidentified
MTKSVMAGIDLHSNNLVIGVVDETGQRLKHQKLECDLQQVVRFLKPYKSRLKSVAVESTYNWYWLVDGLRALAYPVVLANPAQIEQYSGLKHADDQSDAYFLAELQRLNILPTGYIYDPVLRPVRDLLRRRLSLVHQRTALLLSFKSLYTRTTGQALSLGRLKSLAVAEAKTLYEHPANQLIATVQKEHIEQLDGSIVRLEKAVLGSARELPCYDRLQTLPGVGRILAMTITMETGDMGRFPTPGDFASYCRTVDSQRLSNGKKKGDNNQKCGNKYLAWAFVEAANFAKRYDERCRKWFDRKAAKAGTVVATKALACKLAKAAWHVATRATDYDPRRMFPELALAE

SEQ ID NO: 318088 - protein, 456 aa, unidentified
MKGVPEEIAAEDHEQITERVCAIDVAKGSGKVCTRVPHEPAAGRRATNVWDVDATTNAVIELGDDLAGQQIELVTVESTSDYWRIFFYLLEARGLRVQLVNARDARNVPGRPKTDKLDAVWLAKLTERGMLRPSFVPPAEIRRLRDYTRLRVDLTAERTRHWSRLEKLLEDALIKLSSVASKMDTLSGRDMIEALIAGERDPRVLAALARGRLKAKRAELAEALTGRFDDHHAELARMLLDQIDHLTRQIDTITARVTELVAALPAVRAPGGTAPPSDEAGPGDGCAHAPEVQAASAIDRLDEIPGISVHSAQVILSEIGLDMSQFPTAGHLVSWAKLCPRTIQSGPRTSKGKTGKGNRYLKGVLGETAAAAAKTDTFLGERYRRIVKRRGKLRALVAIARSILTIIWHLLADPAARYHDLGASYYDSRINKGSKARNHIRQLEALGYTVTLTQAA

SEQ ID NO: 318089 - protein, 353 aa, unidentified
MIRYYGCDAHKRYSVFNWVDESGRRGQPVRVEHDRALFRGYVESLPAGTPIAVETLGNWYWLIEEMEKAGHDPHLTHAGKAKLMMGQINKTDKLDATGLAVLLRNGTLPRVWIPPEGLRDKRELPRMRMMLVGMRTQLKNRIHATLAKYAIQIDEPTDIFGVRGREVLGQRLEELPPYTRVSAEMELRLLDQVGEQIAEVVETTPEMKLLMTLPGVGMILTVVIALEIGDVERFGSGERLASYAGTVPRIVSSGGKTRHGKTRSDVNRYLKWAFVEAANVIVRSRARHPDSHVVRLYVRIRERKGHAKAAVAVARHLAEAAYWVLKKKESYREPQFPGSTSSTRKETRTSHEN

SEQ ID NO: 318090 - protein, 411 aa, unidentified
MVKENFIYVGIDLHKETHTAVMIDCYNQKLGEITFPNRPADFPKLVAKVKKCNTDGKTIVFGLENAYGYGRALAVWLIDKGYLVKDVNTAISHRQAKHRGAMYRKSDSDDAKAIALATLNMLDKLPDACPNDAYWSLGQLVHRRDNIMKQRTRLVNQLHEQLCIAYPSYKQFFNDISRPTALYFWEHYPSRKYLKGKSVEDLRAELVPVSHNKCSTKTCEKILDAVASDKVKNNAYQDARDMVTLSIVSDLQHYDKQLAEVDKMLKQMYKMLGCTLTTIPGVNVITAVKILSEIGDIERFANANKLAQFAGIAPLHLSFSGKGKDVATKQGNRRLQATIYFLAIQMVQVSSKGTPRNPVVRAYYEKRKAEGKTSQQALICISRRLISIIYGMLKHGTEYRMPVVENAGEKL

SEQ ID NO: 318091 - protein, 460 aa, unidentified
MTPRKDHFPHPSARPRRVSLAVTNPHAAGIDVGADEHWVCVPAGRAAEPVRRFATYTADLMALADWLQACGVTTVAMESTGVYWVPLYELLEARGFVVLLVDARQVARAPGRPKSDRKDCQWIQRLHSYGLLSAAFRPQDEVVVLRGYLRQRDMLVTYGGQHIQHMQKALEQMNVKLTEVVSDITGVTGMGIIKAILRGERALQELARLRDPRCKESEATIARALQGNWREEHLFALQQAVALYEFYHQQIDACDAAIEAHLRTFADRSSGQPLPHRPRRRKREANEPRFDARARLYCLCGVDLTAIEGIDETTALVLLSEIGSQMSRWPSLKHFCSWLGLCPQHKISGGKILSRRVRRGASRAKRALRLAARSLHHSRSALGAFFRRMKSRHGTPGAITAAAHKIARLVYALLKHGKDYVAQGMAEYEAKYRERKLQAMARQARALGFQLVPAAAGAVT

SEQ ID NO: 318092 - protein, 419 aa, unidentified
MMIEDIQWFVGIDWATQSHRVCLLDVEGRHVNERDFAHGGAGLTELRDWLLEKTKAVPGQIAVAIETPHGPVVEMLLDHGFCVFAINPKQLDRFRDRFTVAGAKDDSRDARVLGSSLRTDRQAFRRLVVDDPLVIELREWSRLADELQQERTRLANRLRQQLWRYYPQAAELTDDVADDWFLALWQQVPTPATAAKVSEKTITRMLKDHRIRRLDATTVLQTLRKTPLFVAPGTTEAACVHIRSIAARLCLVNQQIKEAHQALDRLCAELEASMESPSGQNCEQHDVTILRSWPGIGRIVLATLLTEATEPLQRRDYHALRALAGTAPVTRRSGKQCFVIRRLACNKRLRNAVHHWSRVAIQHDATARRRYDALRRRGHGHARALRTVGDRLLYALCTTLERQTPYNPNYQTAQVTAGP

SEQ ID NO: 318093 - protein, 369 aa, unidentified
MISVGVDVSKEESTVCVMKPYGEIISKPFELSHKVKDLSDLENMLLRLDGEVRVFMEVSGVYHLPILMYLKEQGFFVSVVNPYEMKKYRSQGLRRVKTDKQDAITICKGLDYWYQLKNYEANGAIYEELKLLGRQYRNYMKMHIEGVQNLAHLLDCVMPGIKLLLGGWNESSGKNKLSDFASEYWHFDNITKKSERQFSANYIKWAKKNGYHQNQDKAEKIYLLAKSGITTISSGNPTTKMLMQEAVKVLKEVDNTLKKILTQMQLLAKSLPEYAVVRAMGGVGEVLAAKLIAEIGDVRRFHHGKSLIAYDGIDSPPYQSGQFTAQNRRISKHGSAYLRKVGYEVMQSLKTHDAPTDDCVYQFILKKRT

SEQ ID NO: 318094 - protein, 336 aa, unidentified
MKKDYQIFIGLDVSKDKLDYCITNKADSQNQFGIIVNNAKGINGFIKSLNKKYKAMQAELLFCLENTGVYGMPLCYWLQSAQLDYWVVPALEIKRSKGITRGKTDKADAKDIACYALSHLHELKLSKLPENDFIELRLLLAEREKVVKTISVFNATNENKNFLPAVILKTTLQHNKAMMAFLKKQLLLIDKSVESLVQCNEIFKQQDELLQSIPGVGRQTSVMLIAYTQAFTLFKTHRQFACFAGVAPFEYSSGSSVKGRTKVSSIANKKVKTILNMAALTAKKFDPQLKLYYEKKVSEGKNKMLVLNAIRCKIISRAFAVINRNSKFINTFKAVA

SEQ ID NO: 318095 - protein, 369 aa, unidentified
MENVIYIGMDVHKESFSLCALHGTTGEIVGEARCASNVSLVKKFVEKLKTKYGEDINIKVGYEAGCLGYSPHNLLEQNGIDCDILAPTTMYSSSKNKMVKNDKFDAKMIALNLANGIYKEVYVPEEEDVAVQEYIRMLGDFKTSLKKIKQQIKAFLLRHGYAYKGKSSWTITYMKWLKNLDLQGLFKETLGEYLLQYDVLVDKIERFSLRLEELSHSERYEEPIAKLRCLKGIDTTVAMTVHVEIADFTRFPTAKAFMAYLGLTPSESSSGDKISRSSITKQGNSTVRSTLVECANALVKGTIGLKSKRVKARQKGQQSEVISYADRTVERLQRKYHRMMHQGKPRNVAITAIARELGCFIWGLETGKI

SEQ ID NO: 318096 - protein, 472 aa, unidentified
MIRSVGIDLHQGRHRARCLDDRAQPCDSFSFQTTPEGLATLEERVFRDGANPIIVLEPAGLPWLMVAVYLRSRHPDCRLVKAKTQKVAALRRYLRGPVKTDRLDALTLAKMPFIDPEQLDEIYLPPAEIHALQRLGRQRKRIEQDITGRKVRISAIVDGYLPGVRKAFNDVWSSPVRAFLRFRLNPFAVVRDGEEALHTFLSKASARSKWSRAETQLVFLACQSVASVCELSRPAGTVNEEFFLDLQDEIARELRLIEVEEAESESLARRIAELYQKLHPSDNLRTIPGVGEHTAPIFLATVGDPARFHNQSAFANWEGVVPGARQSSDVQAKGLRMTKAGPSIMRMALYQAGDVGRRWDPQLAAVYHREMVYHGKNHKQAMGAVMSHLGARVLRVLKEDSPYELRDIEGNPISKDAARKLVLSKYHVSEDIRRERRRRNPKVGKDRETATASTNEAANAPQAEQVKAVSRK

SEQ ID NO: 318097 - protein, 376 aa, unidentified
MSKVTMIGCDLHDRNMLLQVAVGRGKPWQLEFRNDAKGRLKMISGLKKIALEKGNGRIVLAYEASGLGHNLSDQLHDAGIQCHVLSPNQLPKTPKSAKLKTDAKDAMMLLEQVRGFVLAGNSMPAVWTPPKQLRADRELVRARVDSGDEITRVKLKLKSFMKVNQLSLESPTERLWTKAHIREIRKVLLDQLDFSLATKLDLLLQRLEYYQQEQLALDRAIKTLSGSQRYAAACQQLRNLPGVGLLVAMTFLTEMGDLNRFNNRREVAAYLGLCPASHESGNTDNRKGRITRQGPARLRKMLCQATWVAIQRCQEAQAAYHRIRQDQQKRTKKALVALMRKLAIRMWHEAMSMGVSPELEGRGGPSAMLDHAATPA

SEQ ID NO: 318098 - protein, 312 aa, unidentified
MITVSKIYVGVDVSKDNLDICIEPLGKTFRIANSEDAIEKFIKKLPQFDELKIACESTGGYEKLLDKVLSKHGMHLWIVDPRRIKGFIVSKNCKSKTDKIDAIKIAQFVMQNSEDYKQMKKTEQEQLLQALVDRKQDLIVMLSAEKTRLKHPVHELSIKSIETMMNHLKIEIELIEKQIKKHIEQDEDLKQKSELLASIPGIGKATAAILLSSLPELGKIGNHQIASLVGVAPYARESGNFKGKSFVSGGRAIPRKALYMCALTTIKYHLPLKDFYDRLISNKKPFKVAMVAVMRKLIIIANIILKKGEMCK

SEQ ID NO: 318099 - protein, 330 aa, unidentified
MNFCGIDVSADELVVALRQGDRDLPQQRFANTAAGHRRLLAWLRGPGGATRITLEATGVYSLDIALALAAAPGREVAVVNPKLIRRFAESLDERSKDDPLDARILLEYTVRMPFRRWQPPSPTQLALRAITRHMLATTELRTATRNRWQSARRSASTPACVRRELERSLRQIDASLLRLQRQARTLVAHDPTLESQFQLLLTVPGIAELSALQLLAEIALLRDRKVRQWVKHAGLDVRHYSSGSSVCRRPHLSKCGNRYLRRALFMPALVASRFDPSLRAFYQSLLARGKHKRQALAALMRKLVHAIYGLFRHRQPYLGTRLCPRFAEAL

SEQ ID NO: 318100 - protein, 451 aa, unidentified
MARKASVTNEVWSVVNPHAAGLDIGASEIWACVPADQDPTSVRSFGTFTPDLQALVAWLVACQVTTVAMESTGVYWIPIFELLEERGLQVYLVNARHIKNVPGRKSDVQDCQWIQRLHSYGLLSASFRPEAEMVVLRSYLRHRAMLIEHRAAHIQHMQKALQQMNVQLTQVLSDISGVTGLAIIRAIVAGERNPAKLAQLRHGRCQRSEADIAKALTGHYRAEHVFALKQALALYDAYTTQVAECDQQLEQQYQAIKPRFDPDDPDAPLGPDPKINSHSKNAPDFDVRRQLFRLTGIDLMRVDGLHVSSVQQLLAETGTDMSKWRTVKHFASWLGLAPHNDITGGRVVRSHTLNSHNRAGQILRVAAQSVGRGKSALGAYFRRMRARLGVEQAITATAHKLARIIYHMLQYHQAYRPLSAEAYDEQQRQREIKRLKRQAARLGFSLQPQSS

SEQ ID NO: 318101 - protein, 356 aa, unidentified
MSHEVKYIGMDVHKEAIVIAVQNENGKLVMETIVETKASSILQFLHGLRGELHVTWEEGTWAAWLYDLLQPQVQHIVVCNPRRNALLKEGSKSDKVDAQKLADLLRTGMLRPVYHGEHGLRTLRELGRSYQTISKDLTRVMNRLKALYRGWGIPCAGTQVYAARAREEWLDKLPQAGVRRRAELLYQQLDGLQALRREVRPELLAESRKHKAAKLLRQIPCIGPIRAARLIALMQTPHRFRSKRQLWTYSGLGIETHDSAQYRFVRGQLQLSKKPQQLRGLNRNHNHEMKEIFKSAATRASCGRGPFHDFYAALLAKGMKPEMARLTLARKIAAITLTLWKKEERFDAEQLKTQAA

SEQ ID NO: 318102 - protein, 393 aa, unidentified
MRRDTKEVLAELVGKLKEKLDRKKVAARSAGEKHQRGELRPNLDRLTVGVDLGDQWSHYCILGLEGETLAEGQLRTTEEDFATFFQGLNAARVVVEVGTHSAWVQEVIGGCGHEVLVANPRLMDGSKRRKRKNDRIDANKLARLGRVDPESLYPIQHRSREVRQDLVMLRARDALVAARTEIINTTRGLVKSMGTRLPKCSSQSFAKKGEEAVAVEMREALLPLVRLAATLSADIQEYDKKIEELGREKYGHTALLRQVKGVGPITALAYVLTLENPERFAKSRDVGPYLGLVPKQEDSGESQPQLGISKAGDTMVRKLLVGSAHYILGPFGPDTDLRRYGLRLCERGGKNGKKRAAVAVARKLAVLLHRLWVSGEVYEPLHNAMSAPIEAAA

SEQ ID NO: 318103 - protein, 402 aa, unidentified
MKVFIGVDPHKLSATIEVVDDRETVLATGRFGTDKAGYTAMRKVVARWPDRTWAVEGSNGAGRPLAQRLLADGERVVDVPAKLSARARQFDTGHNRKTDAHDAHAVAAVAVRTAGLRVLSYDVQLETLRMLVDRRQELTRTRIQTVNRLQRLLAELTPGKAKKDITTLQAKAILGSVRPRDLAGRTRRRLAAEQLAELVVVDKKITALTKELKIMVLARGSTLMDLRGVGPVVAARTLADVGDVARFADRNRFASWTGTAPIEASSGEIVRHRLSRAGNRRMNHMIHIAAACQIRLDTPGRAYYRRKLAAGKTRAEAMRCLKRRISDALYRRLLIDARALMSGGADAGPGGHCGASLESSAAGSHPYTSTSDQPLPGPARTTLPAPTSTQKSSISRPLQPAS

SEQ ID NO: 318104 - protein, 391 aa, unidentified
MVCVGIDVAKDKHDCCILDSEGTTLVDCFTIPNNMDGFKSLLQTIQDCSQKSDKIKVGLEATGHYSYNILGFLLDNDLPVYVMNPLHTNLYRKSLSLRKTKTDRVDARTIATMLLSDVDLKSYTDTAYHNEELKSLTRYRFDKVQERAKLKQSVSRLVTILFPELEQLVSSIHGTSIYALLREYPGAKQISEAHLTRLANILVTTSRGHYRKDRATHIRDAARTSIGSVMPAKSLELKHTIKLIQELTSEINEIEDAIRKIMDELKPPILSIPGMGFYSAAMILAEVGDFSNFNSPDKVLAYAGCSPSTYQSGKLTNCYAHMEKRGSRYLRYALYTATKYVCYWNPVFTEYLTKKQAEGKHYNVALSHATKKLVRLIYALQKSGKAYLAIT

SEQ ID NO: 318105 - protein, 377 aa, unidentified
MKKELYLGLDVHKDCIITAVAEEGRKGEVRESGALSNDLHAVEKWIGRLRKRHGKGTLLRACYEAGPCGFGLARRLRQLGVECEVVAPSLTPTRSGDRVKTDKRDARKLARLLRAGELTPVYIPDARDEAIRDLCRARSDAVDDRRRSRHRLKGFLLRHGYRYQGKSSWSAAHERYLRELVLPHPAMKVIMEEYLQGIAAVTERIERCEAAMGDLLEKWRLAPAVRALMAMKGFQTVAAMILVSELGEVHRFAHPRQVMAYLGLVPTENTSSERRRQGAITKCGNAHARWLLVECAQHYALPPKVSRELSRRQQGQSAQVRAISWRAQNRLHNRYRRLLARRLQRNKAIVAIARELCGFIWELLRTQDCYQAQSTPV

SEQ ID NO: 318106 - protein, 345 aa, unidentified
MKILALDLGNYKSVACIYELASLSHKFATVVTTPKALHDLLVAEEPDRVVIEICPLAGWVSDLVRALDIELEVASTTHDAWRWKNVKRKNDRQDGLKLAQLSALGQLTLVHVPEQGVRQWRALINYRQRLVSRRTKIQNHIRALLLRQAVAMASGHRGWTRAGITQLEALARPLNEVGQEELWRGELALELEGLKALAEPLRQVEAKLDELGAVDERVQLLRTIPGVGPRGAEALAAVIDKAQRFKRGKEVGAYLGLVPKQIQSGESNRLGRITRQGNRLLRSLLVEISWSGLRYNSWMRSVYERVRRGSKARKKIAIVAVARRLLIRCWAMLRDGTTWRPATST

SEQ ID NO: 318107 - protein, 312 aa, unidentified
MSAFVGIDVSKGRLDVAVRPTDKHWSVTNDATGLADLVKELQKLQTPLVVLEPTGGYERELVSSLARAKLCFVVVNARQVRDFAKAVGKLAKTDRIDADVLAHFGEAVRPEPRLLPDEDTAELDALITRRRQLVDFRAAEMARKHLAPEVVRPSIDKVIDFLSKEIDDIDGGFRKLLKNTPAWREKDDLLQSIPGIGPVVSCTLLAQLPELGRLNRKQIAALAGVAPFNRDSGSHRGTRKTWGGRAPVRSVLYMAAVTGARHNPALRCFFQRLIGLGKAPKTALTACMRKLLTWANAMLRDGKRWNPAQLPA

SEQ ID NO: 318108 - protein, 412 aa, unidentified
MSLALPEALFFTGIDWAAATHAVCVINAAGEIIAEFTIAHSADGITQLIRRLARYGDPAAIPIAIERPNGRLVDLLLEAGHPVVPVSPNAIKTWREGEVLSGAKSDAGDAAVIAEYLRLRRHRLQVAVPYSGQTQALRTVVRTRSDVVDMRVAATNQLSALLEASWPGAQAIFADVESPISLAFLTRYPTPASAARLGEKRIAAFCATHGYSGRRPAAELLARLRAAPAGTADPALTTALGAAVLAVVAVLRALNNAVKDLDRSAATHLGEHPDGEIFTSLPRSGQINAAQMLAEWGDCRQACDGPDSVAALAGCTPVTKESGKHRAVHFRWACNKRFRQAMTTFADNSRHASPWAAQIYDSARASGKDHPHAIRILARAWIRVIWPCWLNHTPYDPARHGAAAALIKPGAA

SEQ ID NO: 318109 - protein, 411 aa, unidentified
MQVVYPRCAALDLGKDVLVAAVRLQDAGGVSCECRTYGTTANQLSTLRGWLISHGVTHVVMEATGSYWKCVWRALEGHFELTLANPRQIRSLPGRKSDVKDARRIVDFHAHGLIQGSFVPPAEIDAVRELTRTRKQFVREINRHIQRIQKILDVANVKITGLITDTLGVSGRAILKALIAGQTDPERLAALAHPRLRASRVQLVEALQGQPTEQQRSLLGMHLQLIETLETSIAQLDDRIAQAVEPFRELVARLGLVPGLSDEVSIPALLGEIGVDMTKFPTPGNLISWACLCSRNDESAGKVRSRRTLKGAVWIKTLMIQVAWTAVRTKNSYFRAQFYGLCRTTGDRRKAIVAVAASILTVVYHMIREGTPYRDLGVNYFDERNRAGAARRLVARLQTLGYNVQVTEAVA

SEQ ID NO: 318110 - protein, 356 aa, unidentified
MQSMPAPAAPVTVGVDTHLDLHMAAVVGQTGRLLATQAFPASTRGYVALVTWAERYGPVERIGVEGTGTYGAGLARFVRAYGLEVVEVNRPDRSLRRRRGKSDPIDAQAAARATLAGVAATVPKTREGQVEMIRVLRVARRGAMKARVAAAEQLYGVLYSAPDELRQPLLGLKTKALVTACAAMRPGPLTSPTAATKASLRILARRWQQLQAELLQLDSQLQELVSAAAPTLVALPGVGIDTAGQLLVTAGDNPQRLRSEASFAHLCGTAPIPASSGRTHRHRLNRGGDRRANHALWRIALVRMHCHPPTRAYVQRRTNQGLSKLDIMRCLKRYIAREVYHHLTSLHPTTPAPCPK

SEQ ID NO: 318111 - protein, 366 aa, unidentified
MKKYTVFHSVTAAPAVAKSKVMRSGSLLKIGLDIHREKFVAVAQYDHATARPPQHFAPAEFVPWVEARLREGFQVHVVHEGCGFGYGLYRALLEAGASCYVIAPQKLDEANTRVKTDGRDSHALCLRLDRYLAGNKNSLAVIRVPSEEEERARHWGRQREQLVHHRQKLEAQGRSLLIDHGLPAPARWWRPQSWSRLDKLLPVWILSHLELYRPMLLALDQQIRTLTAELEKAAPVALPKGMGALSTVVISREICDWQRFNNRRQVSSYTGLCPGEYSSGAKRVGRSITRHGNSRLRAALVELAWRLVRYQPQYHAVQKRLSVLGKGAQATRAHRKKAIVAVARQLAVDLWRLHTGRCTPTILGFK

SEQ ID NO: 318112 - protein, 430 aa, unidentified
MKSNTQNAKIEAITEKTLVLGIDVGSEMHYARAFDYRGIEYSKKPFKFSNTEAGFVTFKEWILDLKERHEKDKVIPGMEPTGHYWFNLGKFLQDNEMKPVLVNPHHVKKSKELDDNNPTKNDRKDPKVIAGLVREGRYMIPYLPDGVYADLRTASNIRFQLQAELTRIQNRISRWFNIYFPEYKTVYGKSDAKSGMLILKTAPLPEDILTLGIDGVNQIWRDAKLRAVGKARAKTLIEAAEHSVGSKEGAVSGKMEIRMLLEDYESRNTRLQEVMVLIEELVRKIPMTEKLLEIKGVGIRTVSGFLAEVGDISRFNNPKELQKLAGLALVENSLGKHKGETTISRRGRKRLIYLLFEVAMSLVSKNQEFRELHNYYITRRLNPLKKMQSLMAIAAKLIRVFYAILTKGVDYDPKKMVSDIKRPAVYLQAA

SEQ ID NO: 318113 - protein, 392 aa, unidentified
MIYVGIDIAKDKHDCFITNSDGEVLFKSFTISNNRDGFETLFQKIQSVSDDLTKVKVGLEATGHYSYNLLGYLLDKGLPTYVINPLHTNLYRKSLSLRKTKTDKVDARTIASMIMSDMNLKSYSDTSYHNEELKSLTRYRFDKVKERAKLKTSVSRLICILFPELEKLVPTLHMASVYALLSEFPSAHAVASAHLTRLINLLSQSSKNRYGKDTAVMFREAARNSIGSNMPTKSLELKHTIKLIQELTSEIDEIEAAIKQIMDEEIQSPILTIPGISYRMGAMIIAEIGDFCRFDSADKILAYAGMSPSTYQSGQLDNCYSHMEKRGSRYLRYALYNATKYVCHWDKSFGEYLAKKRSEGKHYNVAISHAAKKLVRLIFAMEKSRKAYLPTA

SEQ ID NO: 318114 - protein, 412 aa, unidentified
MQDILTCVMGLDVHRDIIVACLVKGAVDAEPEAETRTFSTLIPEMQKLRDWVIESECRNIAMESTGIYWQPIYEMLESCFDGEISILVVNARHMKNVPGRKTDMKDAQWIATLLRAGLLKGSFIPDKAFRELRHLTRYRKSVVHDITAQKNRIDKFLQSSGFRFTAFLSDTFGASGRNIIRHLIEHGSIDREALDKCLKTKTRNRIDEILVALNGSLSEHQRRFLNMVFRHLEDLEAHKHTVEDEITEEVLKHTDTLNLLCSIPGIDVTAAAAIIAEIGTDMSSFPDSQHICSWAGLSPGNNESAGKRKSVHINKGNPYLKSMLCEVAWIMASHRKLYLSGWYWKVKQRKGAKRATIALARKILSIIYTMLKTGTPYNEECFEQRRLRCERKRANRLVNELQKLGYVVVAPD

SEQ ID NO: 318115 - protein, 358 aa, unidentified
MDKIIRIGVDTSKSVFVLHGVDAAEQPVLRKKLRRRQVLDFFAKLEPTRIGLEACAAAHYWARELQALGHTVVLLPPQYVKPYVKRNKNDTADAEAICEAMSRPTMRFVPVKTAEQQAALMLAGMRDQLVRRRTQAANAIRGYAGEFGATAAKGLANIEPLLARIAADAAVPELAKELFAVYGRDYGQLEMQIAQIESRLMAWHKGNELSRRLAEIPAIGPIGASLLAMKVTNPYAFRSGRDFAAWLGLTPKDHSTAGKTRLGVITRAGDEALRSTLIVGATAVIQQVRRGRGHASPWLIELLRRKPPKLAAVALANKTARVAWKLMISGERYHGARKFGHGCAPSVSREGRSRTTPP

SEQ ID NO: 318116 - protein, 357 aa, unidentified
MKKHTTIAVDIAKSVFEIAVSDRPGHVSERQRLTRARMLAFFRERPPAVVVLEACGSAHPLGRELGEMGHEVRLLPPKHVRPYVLRDKTDRTDARALLEANRNEEIMPVPVKTVGQQALSAVHRLRSGWLRTRTARLNTLRGILRELGVTIPVGARHVESRVLEVLGAGRVSQPLAMLLTSSLGEIRQLEQSIAEADRQLKNLAREMDSVVRLQTIPGIGLLTATALVASVGEPSRFRSGRRLASFLGLVPREHSSGQTRFLGRITKRGDPYLRTLLTHGARSALLAAARRRNKGGALDRLGQWGLELSQRRGHNRATIAMANKLARLAWAIWSRHDVYRPVLQPPVPMITDMASTH

SEQ ID NO: 318117 - protein, 408 aa, unidentified
MKTLHKRCAGIDVHKTEVVACLRVITHRKVEREVRRFPTTTHGLLELAEWLESARCTHVAMEATGVYWKPIWHILDGRFALILANAAHVKTVPGRKSDVNDATWLADLLAHGLIRPSFVPPAAIQELRDLTRSRKQLTREVAQHSQRIQAVLEEANVKLCSVITDILGASGRRMLKAMIAGEADAHKLAAMGSERLGCAPETLVEALTGRMREHRRFLLAQHLQTTEQLEKTIAAFDARIEEKLVPFRDTVERLKEVPGLGSTVTEFVIAEIGLDMSLFPSAGHLLSWAGFVPRLDESAGKSRSTRIRKGAPWLKPVLVQAAWGAARKKNSYFQAQFLRLKARHGAKKAAIAVAASILTTVYHMLRDGTCYQDLGPEYFTRRNPAKAAARLANRIRNLGYYVEIRPAA

SEQ ID NO: 318118 - protein, 370 aa, unidentified
MRRQDAALDRRDTLPADMKNKIPAITIGLDLGDKKHAICVLNKAGDIVDERSITNHRESLKRLSRKYPKSRIAMEVGQHSPWTSRFFEELGHEVIVANPRKLRAIHTSTRKSDPEDARMIARLARVDPSLLHPIQHSTEEAQRDLLQVKLRDNLVRQRVDIISSIRFTLKSMGVTVASPNTDCFAKRCRTTLKAQDPLLLAMCEPSLLVVDQLTNSIRDLDKRIEELCVESYPETEYLRQIAGVGPITALTFILTIGDPQRFESLRDVAPYLGLVPKRDQSGETDKQLGISKAGDSYLRRLLVSAAQYILGPFGPDCDLRRHGLQLAERGGRAAKKKAVVAIARKLSVLMLTLWYNEDIYEPLRNESLAA

SEQ ID NO: 318119 - protein, 376 aa, unidentified
MNRLVYVGMDVHKDTYSLCALDAQNHCFLSELTVKSDLGHVLKFLKSIGNRFKDDELDIVCGYEAGPTGFSLCRDLQKAQVSCVVMAPSSLPKSPDNKRRKTDKLDARDLALHLAHHTYKAVNVISPELEAIKELTRVRASATRAKKRAKQILLSFLLRKGMVYPFGGRAKYWTQQFYAWLKTLEFANPLDRYCFQEYLTEVNHEVSRVALLDEKITEVAENKLIVEDVKKLCCFSGISTYTAVSIVSEVGDFRRFDRASHFANYLGLCPGVHSSGLSSQNLGITKAGNSNLRRLLIEAAQAQGHSLKYAKKSLRILARQKGMDPSIVAYADRATARVKRKRSAMIIRGVNVNKATTAAAREMACFIWGMMTNNVA

SEQ ID NO: 318120 - protein, 346 aa, unidentified
MTIVEAARGVTGGVDTHLDVHVAAVLDPLGALLGTERFDTDPAGYKALLTWLESFGALTKVGVEGTGSYGAGLARFLRRADVEVIEVDRPNRAERRRSGKSDPLDAVEAARAALGGRAKSISKSKDGAVEAIRVLVVAKRSARGARVKALTQMRHLVITAPDQLRCRLKGLSVSALVTEAARLRPSRSGDVVMAAHKASLCSLARRIQGFEDEIAELDRRIEALRKVTAPELLARFGVGPDTAAALLVSAGDNPERLHSEAAWAHLCGAAPIPASSGKSNRHRLDRGGDRQANSALWRIVMVRIAHEPETTAYFERKVKEGRSKRDVIRLLKRYVAREVYRYLPRG

SEQ ID NO: 318121 - protein, 383 aa, unidentified
MFYTGIDQHRASSVLTTLTAEGERVMQLTVPNDRRLLTEYFAQWPGEHRAVVEATGRWYWLRDLLAPQGIDLRLAHAKFLKAIAYGKVKTDAVDSDTLAQLLRTGLIPEAHMIAEAQRGPRDVLRARLRLVERRSRSNNSLDRLLEKFNVVEVAALPPFYRLQADLHAAQITLLTEQIPTLERAVQGELLDTPAIQRLLWIPGIGRIVAFTLALEVDDIQRFPTVRHFWSYCRLVPGAADSGGRHRHRASKAGNRYLKLAFSHATVRAIRYFPEIRQWYQRWKRKKPIRIARALVAKELAKSVYVVLHDQVDCNQEFKGTPLTRQNKAQWPRRASPLPNWTRQRAPARDWEARRSCRGEDLGRGRVTALRSPHREPSRAPNGV

SEQ ID NO: 318122 - protein, 395 aa, unidentified
MDPKGRRQGKKKQSVIHNMKQSISYPARLSPSSLVVGVDVHKYSHSAVAMDAWGQERSRIAFSNDNLTRCTDWLRSLGNQSDIIVGLEDANCYGIHIAETLRQEGFFMRSVPAILTERERKQSTGRHKSDFVDAKRVGKVILTKYEETLPAKESIADADELRIAKELDLLLMERRDLVKQKTILKNQLHALLHQYYGDHYADRFPKPFQRDAVSFWLSDLENKASVEEGQKRILATGIVRRIRHLILIEAQIGSISRELSRVGECSLAVTALYRDLHGCGMTTACAIMAELATAKRFSREDKLAMYAGVAPREHSSGRHDRLYTNPFGNRLLNRALHTIALSQIAVKGDERGKEYYRKKLGEGKTKLWALRCLKRQIVKRVFRILRSQAAAEAAV

SEQ ID NO: 318123 - protein, 371 aa, unidentified
MKKRSSSQKNRKRTVKTKRAQESVTIGMDLGDRTSRYCMLGSEGESLREGQVQTSKAGMLEAFGSLGRARIAIEVGTHSPWVSRLLGSFGHEIVVANPRQVKLISESSRKDDGLDAQTLARLARIDPQLLRPIQHRSETAQTALTVIRVRAALISVRTSLVNTARGLAKAMGERLPKCDADQMGVLRAESLPTKLRQLLEPLLKEVESLTEKIKDSDREIEQIARKDYPETALLQQVGGVGPLIALTFVLTVDDKNRFQRSRDVGCYVGLRPRRSDSGQRQPQLRITKEGDPYLRTMLVQGAHYILSRRGPDTDLKRWGLRLAERGGKRAKKKAVVGVARKLSILLHRLWVTGEVYEPLRNLRDLRKKSAA

SEQ ID NO: 318124 - protein, 366 aa, unidentified
MFHKLNSAATLIQRTTTEAPRDHMYYIGLDVHKRTISYCVKDAAGHVHQEGKIGSTRCELDAWIKTVPQPRMIAMEATIFTGWIYDHLLPHAEKVKVAHPLMLRAIAAAKKKNDKIDAAKIADCLRCDFLPECHMASTEIRDRRRTLRYRSLLVKQMVQMKNRVSGLLLETGVSYNKSRLHKVGYFADLMSTSEEVYESIRPLLKLSREHIVRAQKLEYALVSSLERDPLLAERLERLRTVPGVGPITALTWTLEIGDFTRFRSIKQAISYCGLCGDEKRSADKVMRMPLSKQRNKHIQRVLIEAAKLAPRYSHELAMVRENELQKGNPNRATLAVARKMVSYMLAVERRKQNFVPAENFNCTTAA

SEQ ID NO: 318125 - protein, 351 aa, unidentified
MSHKTAATVAHTIGIDTGKNTLHLIGLDDQGAIVLREKIARGRIAARLANVPRCLIGIEAGMATHYVARELGALGHDVKQVPPAYSKPFRQGHKNDFRDAHAIAEAVQRPSTRCVPVKTDDQLDLQALHRVRSRLVGQRTAVINQIRGFLLEHGIAVRQGLRFLRQQLPDILAKRSDVLSPRMIRIMEDLSGDWRRLDERIEHITKEIEVLADTDVNCGQLMTVPGIGPIVASAMVAAIGNGAAFARGRDFAAWLGLVPKQMSTGDRTILGRITKSGNRYLRMLFVQGARAILLRPKSWVKHSFGPWLTTAARRLHRNILTIALANKLARIALSVLIQGRSYETRIVPAAA

SEQ ID NO: 318126 - protein, 352 aa, unidentified
MDRYLGLDAHSQSCSLGVVGPSGKRLKSLVVETNGRALVEAVRSIPGQLHLCLEEGELSAWLHEMLEPHVAELVVTVPRSTKGRPKDDLRDAFSRAEEIRIGAVGTRVYKPPLFLTPLRNAVRAYGMAVQDVTRVKCRLKAVLRSRAVPADSSVYQPASRERWLQQLPTAHRPLAEWLGEELDQLIPLRDKAEQWLLREAKTHPIIRKLETAPGMGPIRTAQLVAITANPLRFRTTRQFWSYCGLGIVTRSSSDWVRNKTGRWVRAEVRQTRGLTRQRHPLLKYVFKGAATTVIRMPGHPLQAEYHRRLEAGIKPNLAKLTLARRIAAIVLSMWKHQEVYDPKRQKRGTEPS

SEQ ID NO: 318127 - protein, 347 aa, unidentified
MKKDSRSEAWKQEEGLVIGVDLGDKESQVCVLGADHEIRHEVRVRTTREQLRSWFGALKPCMVVMEAGSHSPWVSRLLEELGHPVVVCDPRRLKLISQSDSKNDRADGRMLARVGAGMPELLKVVKHRSAEAQKDLTVIRSRARLVEVRTKLWCSLRGLSKSLGHRLPRRVSAEQLGEHEEILKPLWNALEDVSKRIEEYDQQVKELEKKYPAAGRLRQISGVGPLISLTFVLTLDDHLRFRKSRQIGAYLGLRPRQRDSGQQQPQLRITKAGDRYLRSLLIQGAQCILRGPDTDLKRWGLRLAARGGKNAKKRAVVAVARKLAVLLHRMWVDQSPYEPLRRSQHAA

SEQ ID NO: 318128 - protein, 346 aa, unidentified
MEHYAGIDVSLEWSSICVVDALGKIVKEAKISSEPATLVAFFEALGFAVKRIGLEAGPLSQWLHAGLKRAGFEAVLLETRHVKAALSAMTVKTDRKDARGLAQLIRMGWFRPVHAKSIRSQEVRALLVARKQLLGRLIDVELSIRGILRGFGLKVGPVTRKGFDARIRELVTGQATLERIAGAMLSARVALKAEYEKLHKTVLAIVRDDAVCRRLMTVPSVGPLVAITYKSAMDDPNRIPKSKAAGALFGLTPRKYQSGEKDVTSGITRAGDEMVRTALYEAANVLLSRITRFSKLKRWGIDVAKRRGSKRAKVALARKIAVILHRMWVDGSTYRWTETQPIAVQA

SEQ ID NO: 318129 - protein, 337 aa, unidentified
MKVTLIGIDLAKNIFQVCGVNQAGKRIFNRQVRRAMLLELLVQHPDAALAMEACSGSNYWGRELQQRGFQVKLIPPQHVKPFVKGNKNDRNDAFAITEAARRPNLRCVEPRTLAQTDMIQVHRVLDRMIRQRTALINQIRGFLNEYGVVVSRGKEKLLAAMPDLLADGDNGLTPASRALYQAMYDEWRQMNAAIERVEKVLKGQAKADEVAQRLMQMKGVAEKIATATIACAGNGSGYRSGRHFAANLGLVPKEHSSGGKQSLGGITKRGNRYLRRLLVQGAWSVIRNVDHSDDRMSRWAKQLIERRGKHRAVVAVANKMARIMWSMLYHQTEFRAN

SEQ ID NO: 318130 - protein, 349 aa, unidentified
MKKVSVIGIDLAKNVFQVHGVDEAGKPVLRKQLKRGQMKRFFAQLPPCLIGMEACGSAHYWARTLEGYGHEVRLMAPSFVRPYVKSNKNDRNDAEAICEAVTRPNMRFVAIKTPKQQAVFHLHHGRRQLVKQRVAISNHLRGVLLEFGIALPPGDRVLRSKLGEILEDGENGLPMLVRQLLAPLWEVFRQLEGQIDALTRALAQWHRENEVSQRLARIPGIGLQTATALAALLGERGADFRNGRQLAAYLGLVPRQASSGGKERFLGISKRGDAYLRSLLIHGARAVIRHVRRRLAAGQPGGNPWVEQLLERCHPNEAAVALANKLARTAWAVVAHQRAWQADWKGAAA

SEQ ID NO: 318131 - protein, 318 aa, unidentified
MEATVVVGIDVSKDRLDVAIYPSDEPGFAVARDAAGLDALAARLKPLGAAAVAVEATGGFESVVVASLAAAGLPMLVVNPAQIRAFANALGKRAKTDPIDALVIARFVAATTPEPRPLPDEATQRLADLVARRRQIIAMMVAERQRQKRLLAPRLQHSITRLLEALQKELSEVDREIDAEVRGSDIWREKEKLLGSVPGVGPVIARTLLAEMPELGRLDRREIAALAGLAPWTRQSGQWRGKSFIGGGRASVRAVLFMGAITAARHNTTLRAFHQRLIDAGKPKLVAIVAVARKLLTILNAIIRSGQAWKSEGNAASI

SEQ ID NO: 318132 - protein, 385 aa, unidentified
MTMTRTEESTAVANSVVPTLLLALELGERTWKLGFSMGLGQPPRIRQMPAGATARLLDEIAAAKVRFKLPADAAVVSCYEVGREAFWVHRWLIAHAVDNHVIDSSSIEVNRRARRAKTDRLDLGGLLNLLARHQLGDRRVWRTVRVPSREEEDARQLHRTRETLQQDRNRLINRLKGLMTTQGLALAVGADFLTQLDTVQLWDGTPIPAGLKARLQRAWGQLESLNTALEELDAARAALAVDPQTTMGRYLLALPTLRGIGPVGTWTLTTELFGWRQITNRRQLGALVGLVPAPYQSGERSHDQGITRAGNRHVRRVMVQLAWGWLRYQPDSALTQWYQRKFGSGSGRLRRIGIVALARKLLIALWRYVEHGEIPAGAIVKDQAA

SEQ ID NO: 318133 - protein, 338 aa, unidentified
MQWTVAIGVDTHKHVHVAVALDRFGTQLGSREVATTETGYRSLLAWALELGVPAFAVEGCGSYGAGLVRFLELAGVAIWECERPRRQERRRGKSDLIDAALAARRLLSGEGLCLPRGGGRREELRLLLLERRSAIQARTAALNQLGAVVVTAPEQLRQRLGRLSGERLARAAARLRPGDDVGTAVMHRLGHRAERLSHEVTEVDRRLLEILTEVAPALLAECGVGPVCAAQLLVSSGDPNRMASEASFAALAGTSPLDASSGQQRRHRLNRGGDRQLNRALHVIALARIHHHAETTAYYQRLLVAGKTAREARRCVKRALARYFYRRLREIPQLALTT

SEQ ID NO: 318134 - protein, 414 aa, unidentified
MHIMHERCAGLDVHKKTVVACVLTPDRQGGWGQEIRTFGTMTVDLLALSDWLLACGCTHVAIESTGDYWKPVFNILEGTCEVLLVNAQHVKAVPGRKTDVKDAAWLAELLQHGLLRASFIPPVAQRELRDLTRYRSTFSQERVTLINRVQKLLEDANIKLAAVASDIMGVSGRAMLAALVAGHTEPHALAELAKGRLRSTRDLLAQALDGRVKPHHRFVLTELLCQIDSLDETIARFDAQIQAICGPFDEAVELLDTIPGVARRTAEMLVAEIGTDMTRFPSAGHLASWAGVAPGNHESAGKRTSGKARKGNRFLRTTLVQAAHAAARTRGTYLSAQYRRLAARRGKKRAILAVAHSMLVMAYYMIQRQEPYRDAGADFFDRLQPEDTARRLVKRLEGLGYHVTLQSPPTNALP

SEQ ID NO: 318135 - protein, 371 aa, unidentified
MMNATTFAGLDVHARSIKAVALDVVTGEVRSATFGYDACAVAEWIRSIDPGARCVYESGVTGFDLQKKLSSLGVDCVVGAVSKMIKPSADRRRKNDRNDAEFLARMLSVGNIVEVWVPDDECEAARDLARALDDAREDLRRQKQRLSKFLLRHGLVFDEKTPSGQRKSNWTGAYWIWIKGISFREKADNDTLAFYVDAVRQAEEDKRRLEKLVADEASRPRWRKRVDSLRCLKGIDVMTAADIVFEAGEFARFRNARSFAAWLGLTPSEHSSGEKVAQGGITKAGNKHLRRVMVEAAWHYLNASPHSKGPAPGQAPDPAARRHASKGVRRLVGRRAALLERGVHKNKANVATARELACWCWAVGSMAEGAR

SEQ ID NO: 318136 - protein, 323 aa, unidentified
MMAEPAEIQSVLGLDVSRNTVTLCDGRTRHTVTIANDADSLRAALLPYQGTATLAVCEATGGHEDTLLGVLLELAVPAHRADPAKVKAYIKSFGKRAKNDPIDARWLSRYGRDRAATLPRWQPVDLTQQKLELLVARRLDLVAMRVQEQNRLKARRSRLIADNICDHLAELERHIEALNAEIDTLVGESRDLALRAEQLRSVPGIGPVLVPLLLAVMPELGTLNRRQVASLAGVAPHPKDSGKASSHRSTTGGRRQIRPALFIAALAACRGDNPLATAYKALLKAAKPKRVALTAIMRKIITIANARVRDALPHQNEIMPINA

SEQ ID NO: 318137 - protein, 365 aa, unidentified
MKKISTVRVNGNMIFKGHKLTIGVDLGDRWSCYCVLDEAGEILLEQKVATTPEAMKQIFEKIPRGLIAMETGTHSPWVSRLLKELGHAVLVAHAQKVQLITKSNRKDDRHDARTLARLARIDPELLGPVRHRSAKAQIHLTVIRARAELVSARTGLVNAARGLAKSYGERLRKCGTQQVSRELAAELSVELREVLEPLLKEIESLNERIKEYDVRMEQIARESYPQVELLKQVKGVGTQIALTYVLTLDDPQRFPKSREVGCFLGLRPGRRDSGESHPQMHISKEGDPYLRTMLVQGAHYILGPFGEDCDLRRWGLKLAARGGKSAKKRAVVAVARKLAVLHRLRVSGEVYEPLRNSQKAMRAAA

SEQ ID NO: 318138 - protein, 453 aa, unidentified
MGKSNKKAIKIGFHEGLPQIRANAGGMDIGASEVWVDVGGKDPEPVRRFETFTAELQEMGDWLKRCGIETVAMESTGVYWIPICQVLESKGIEVVLVNARYAKNVSGRKTDMLDCQWLRILHSYGLLGASFRPARDIGVLRAYMRHRQMLIEYAAAHVQHMQKAMTQMNLQLQHVLSDITGATGMRIIRAIVDGERDRNRLAAMRDVRTKANETTIAKALEGDYRAEHLFALKQSLELFDSYQKQIEACHQQIADHLRSLESKADPAAGLKPARTTKKKRRNQPDFNIREEAFRISGVDLTEIDSIHESAALGLLAEIGVDLSPWKTEKHFASWLTLCPNNKISGGKVLHRSTRKSASRARDILRLCAQSLLVSRSALGAYCRRMCARLGKPKGIIAAAHKLALLVYRMLKFGRRYVDIGQEQYEEKYKERALKQLARKAQHFGFQLVPSSQQ

SEQ ID NO: 318139 - protein, 344 aa, unidentified
MQRYLGIDVHKASSTCVVLSERGKRVSRDRMETSGEVLVRYVQSLAGEVLICLEEGEWSEWLAEILSPHARQVVVCRAEKRRGVKNDQADAGVLAERLRTGRIGTPVFKASARWAKLREWVRVYAKLKGDVVRSKLRLASLMRRRGVSYTSAELYDPKRRGVWIKELPVALRPAAELLGFELDGLEELRSRAERAMIEEARRFPERKILETAPGIGPIRTAQLMAMIVTPHRFRTKRQLWSYCGLGIVTRTSSDWVQAESGWQRAPVTQTRGLNRTCNRTLKGVFKGAATTVLQCRSPEVLQEKYERLLEAGTKPNLAKLTIARKIAAIVLAMWKSNTRYQAVR

SEQ ID NO: 318140 - protein, 355 aa, unidentified
MNQEKYIGMDVHQATISVAVRDSSGKLIMECILETKAATILEFIAGLRGTLSVTFEEGTSAAWLHDLLKPHVSHLVVCDPRRNALLKDGSKSDRIDARKLAELLHGNKLHAVYHGEHGVRTLKELGRSYLTITKDLTRVMSRIKALYRSWAIPCSGATVYAPRHRDEWLAKIPHPGVRLRAERLYQQLDVLEPVRQEARRDLLLESHKHQAVKLLHQIPAIGPIRAALLVALLQTPHRFRTKRQLWAYSGFAVETHDSGEYRFVRGKLVRNRERITVRGLNHNHNHDLKNLFKGAAISASTRPGPLCDFYVALVEKGMRPTMARLTVARKMAAITLAIWKKGVDFDAKQLNRQAA

SEQ ID NO: 318141 - protein, 342 aa, unidentified
MTIIRIGLDTSKHVFQIHGVDENEKPELRRQIRRGEVAKFFAKLPPTRIGIEACGASHHWARLLRGLGHEVLLMPPQYIKAYVKRGKNDAIDAEAICEAMSRPTMRFVPVKSADQQAVLMLHRTRALLIRQQTMLANAFRAHLAEFGIVVAQGIRHVRALIERVFGEDPIDLPALARIALRPLVAQLMELRLNIKMIEKELLAWHRTSQESRRLETIPGVGFITATAIAATVTDPSHFRSSREFSAWLGLTPRQNSSGGKDRLGRVSKMGNGYLRSLIVVGATAMIRYAREKGPVSARWINVLLEKKPARLVSVAVANKTARIAWALLVRKENYRVSVPVAA

SEQ ID NO: 318142 - protein, 365 aa, unidentified
MATILEPEPRRVIGGVDTHKDVHVAAVIDTVGRALASESFPTTRHGYRCLLSWLRSHGELEAVGVEGTGSWGAGLARYLTTRGVVVVEVNGPNRQNRRRRGKSDAIDAEAAARAVLNGQATVTPKSGTGPVEAVRQLRIARSGAMKARTAAANQLHSLCDTAPDPIRAQLVPLSLNKKVAIAERWRPGAATTVETAAKRALTSVARRWRALDDEARELDRHIKAILDQIAAALLAVHGVGYETAGQLLVTAGDNPGRLGHEKSFAALCGSSPVQASSGRTNRHRLNRGGDRRANSALWTIVLTRMVSHAPTKAYVERRTTEGLSKTEIMRCLKRYVARELYPHLQAITIATTLEQRHANPAKSHP

SEQ ID NO: 318143 - protein, 318 aa, unidentified
MAVLGIDVSKADFHCCLIDDSETTRNSFPNSPVGFRQLKKWLKNRGIQQVLACMEATGQYWEALATDLHESDHRVAVVNPARIKAYAQSKLTRTKTDRLDAALIAQFAQREQPRLWEPPAAEVRELQALVRHLDDLKMARAQHLNHLQSPLLPKVVKASIRKVLATLKAEIEQFEEAIKDHIDRHPSLKGKHELLDSIPGLGETSAAQVLAEMPYMERFASARAVAAYAGLCPRIRQSGTSLRSRGHLCKTGNPRLRRALFFPALTAMRYNAILKVFADRLRAAGKPRMVVVGAVMRKLLAIAYAVLKSGRPFRALPV

SEQ ID NO: 318144 - protein, 399 aa, unidentified
MDRNRTVAGLDVHKDSIYLCIMGHDEAIIFEKTYGVLTPDLRQMCNDMVNRGVTEAAMESTAVYWVPVWNELCESMELKLVNPYFIKQLPGRKSDVKDAQWIAECLLKNLIKGSFVPEPVVQDMRKLNRRIFDLQEDVTYYSNKLDAALHRCGFRLSNYVAKITGKSYRKAVVAIASGVTDPNELIKCVHGRIINKHGKETMLTAMTGSFTITDITVIRQYWELLAIYIRQSEECQSRLTALCDIHFPTEYKRLQTIPGVKERAATAIIAETGVDMKMFATAAALVGWCGLKPRNDVSNGRYKSRKITHGNKYLRQILVEIAWVASRTRNCFFSNFSYIQVTQKHKSKMKIQVAIARKILVAVWHMLSKREDFIDLYLKRLEDNRKMEEQLKSLKSKMA

SEQ ID NO: 318145 - protein, 402 aa, unidentified
MTAAIAGYDTIAVFVGLDVGKSEHHAVALDRTGKRLLDRALPQDEARLREIITGLQEHGPVLLVVDQPATVGALPVAVAQAAGATVGYLPGLAMRRIADLHPGEAKTDARDAAIIAETARTMPHTLRSIAVADEQVAELTMLCGFDDDLAGQITQVSNRIRGLLTQIHPALERVIGPRLDHPAMLALLRKHPSPDALRTAGVKRLGNLLLKHAPRKGRVWAEEIVTALGQQTVTVTGTNAAALVLPRLAEQVETLRTQRDQIAAEVERLVEAHPLHPVLTSMPGVGVRTAARLLTEVAGKSFPTAGHLAAYAGLAPVTRRSGTSIRGEHPSRRGNKILKRALFLSAFAALRDPESRAYYDRKIAQGKRHNQALIALARRRSDVLFAMLRDGTLYEPRLPLAA

SEQ ID NO: 318146 - protein, 406 aa, unidentified
MSLPIRRRLTLDAVARVTPDRPGESLKQGGRVVSDLTEAFVAFDTSKLRNAVAIADPGRTGEVRFLGEIESTGAATAKLVRKLAAKYERLTFCYEAGPTGYGLYRHIESLGHECMVVAPSLIPKKPGDRVKTNRRDALSLVKLLRAGELTAVWVPDARHEAMRDLSRARAAAVEDLRSKRQQVSSFLLRQGVHYAGKKTWTKAHMAWLASQKLEHVEQRIAFEEMLFAVRQAQERIERLEQAIRTALPDWSLAEVVTALMAMRGIDLISATTFLAEIGDLSRFPTPRELMAYLGLVPSEDSTGDKVKRGAITKAGNRRARRTLIECSWSYRYPPRVGKKKQEKVAAAPRAVREIAWKAQCRLSARYRALSKKGKLATVVVTAVARELAGFIWAISREITTARSAVR

SEQ ID NO: 318147 - protein, 361 aa, unidentified
METKKARKKIYHYFIGIDVSKNELDFAVVKDQAMILHKEILNSVEAILEFVAELKKISGFRVSKALFCLEDSGFYSNHVLNTLKKLKAFVIVENPQKIKKSQGLVRGKTDKIDALRIAQFAQKNKDELRLWVSRRPVLLLLKNLISTRERLLGISVILRTPLKEQLSYISKGIHHQSALSCKKSLVAVTVDLESINLAIKGLIDGDERLKSIYHLITSVPGVGPICAYQIILCTNEFLDITDPRKFACYAGVAPFKNESGRFIGKARVSHYSNKKVKTLLHMAAITAIRYDAEIKAYYERKTKGEGKPKMAVINAVRNKVILRVFACFRQDRTYIRSYEYPVRQEAVKDIQVFSACPVIVS

SEQ ID NO: 318148 - protein, 538 aa, unidentified
MVSPILAQWTTLSEDFVLLGAIMDTVSLIGIDLGKHCFHLHAQDGSGRMVFRKKLTRSQMFALLGNFPSCTVVMEACAGAHWIARRLQVGVNRMVSPILAQWTTLSEDFVLLGAIMDTVSLIGIDLGKHCFHLHAQDGSGRMVLRKKLTRNQMFTLLSNFPSCTVVMEACAGAHWIARRLQTLGHEAKLISPQFVKPFRQGNKNDFADAQAICEAASRPSMRFVSPRNEAQQVVSALHRVREALVRNRTGTINQIHAFLLEFGISRHEAKLISPHFVKPFRQGNKNDFADAQAICEAASRPSMRFVSPRNEAQQVVSALHRVREALVRERTGTINQIHAFLLEFGISLPRGMAVIRRLPAVLETQALPPRLVAVLERLQAHFKYLDEQIGQLEHELLTQLHEDERSERLLEIPGIGPITASVLMSELGDAHQYGSARQFAASIGLVPRQYSTGGKPTLLGISKRGDKELRRLLVQCARVIMLGIERRTDSLGTWVRSLLARRHSNVVACALANKLARIAWAILAKGTHYRSAPAALAA

SEQ ID NO: 318149 - protein, 311 aa, unidentified
MSNICGVDVSKKVLDAFVASSGTYCRFANDMDGIAALSRFCGSQDVDLVVMEASGGTEQMAYLMLWQADVKCAVVNAASVRFHARSLGLLEKTDRIDARVIASFAAATGVVACDPPSVDQIHLKALVTRLSQITGDMTINKQRLSSCTDGEARASLAEVVALLKRQARCIEGEIASMIDDDPLWAKLAEAFSSIKGVAGRTIATLMAELPEIGLISNKAVSKLAGLAPLADDSGKRRGKRHIKGGRTRVRTILYVISRSASQYDDGLKAFHQRLTEAGKPKMVVRIAVAHKILVRLNAKAREARMELQNAT

SEQ ID NO: 318150 - protein, 426 aa, unidentified
MKNLDVLTTLFVGIDVSSQANVLCAIGFDQDKLLTLTVSNNHSGAEEISERICLLMESTGYRAVVFAMESTSFYGLHLANFLSSDSKLLEFHPYVYCINPKLIANYRKSFVGLDKTDDRDAFLIADFARVGRITTAPWRGSQYLALQRLTRHRLHLVECLVREKQYMVANVFLKFSELTVLKKKDHPFASNYGATAEALLTEFYSPESILEMSVEELVGFLVDKSKGKIEHPGTTAGILKRAAKDSYRLDKTLYEPLNTAIASSFNCISAFEREIKTIDKAILMQLKGLNQNEYLCLKSIPGIGPVFAAGILAEIGSISAFHSQDALAKYAGLVWIKNQSGNFEADDTPLSKAGNRYLRYYLIEAAGSVSRFEPEYRDFYQKKFAEVKNHQHKRALALTARKLVRLIFGLLAKNQLYSPNRVGETS

SEQ ID NO: 318151 - protein, 347 aa, unidentified
MRFYTNKHPFYCGIDLHARSLYVCILDDDGQTVLHKEIKAKPEPLLDLLKPYLGNVVLGVECMHCWYWISDFCHEHNIVFILGHALYMKAIHGGKAKNDRIDSYKIAHLIRGGNFPLAYVYPAEMRATRDLLRRRTRIVRHGADLKAHVKNTTSQYNLPPNNLNLRYPNAREQMRDKFADESVQKNIDLDLNIIEFYHRQLSAIECYIEKHAKHHNGRDYHILTSVPGMGRILALTILYEIGDITRFESVQKFASYSRLIKCRAESAGKVYGTQGNKIGNAHLRWAFGEVAVGYLRGNEKAQSYLARLHKRMGKAKALTALTHKLGRCVYFMLKNRQVFDEQRFLAG

SEQ ID NO: 318152 - protein, 342 aa, unidentified
MEQQQQYVGIDLHRRRSVIVRMNDAGEVLAVSKIDNDPVALSMAVAEAGPDPEVVLEACYGWYWAADLLQAEGARVHLVHPLGLHWDTRRVKNDVKDATELANRLRRNDLPEAWIAPPEVRELRELVRYRAKLVALRTSAKAQIHAVMAKLGILPPQAEMFGPSGQKLLDEMDFPGPYGLRVESLRDLLEIYDRELALVEREIHRWLKDDPGYKAIQALHGVGPITAAILVAEIGDVHRFKSARHLCSWAGMTPKLHESDTTSKSGKISKQGSTIVRWAVVESVARYHGGDPIAPTFRRIAERRGGKVGVKIAKVAAARKLLTLVFYGLRDGEIRCLYREAA

SEQ ID NO: 318153 - protein, 419 aa, unidentified
MIEAVLERCAGIDVGKKYVVCCLSLGAANSTATEETSQYDTTVAELEKMRDWLLENQCSHVAMESTGPYWKPVFNLLEDHFTVILANAQQVKSLPGKKTDRKDGRRLAHFLRHNLIEGSFIPPVAIRQLRDLTRRRRKLLGAGGSERNRVQKVLEDANVKLGNVLSDVFGASGQAMLEALLSNQGTPQQLAEFARGKLRRKMPEIVTAVEEHRMREHHRFLIRQSLRHMAFLEEQVAALDEEILRQMKPFEKEFESLQTIPGIKATAAASILAEVGVDMKQFPTAHHLASWAGICPGNNESAGKHKGTQTRKGDPWLRGTLTESAWAASRKKGSSFAARFRRLAPHRGQKRALVALGHNLLIVVYQVLSTGQPYQELGSTYHEERTKEARVRHHLRCLRALGALAPGADLTEVPHAPTV

SEQ ID NO: 318154 - protein, 344 aa, unidentified
MPHSIKDPHRVPPPETPCCPNGSVVGIDISKDYFDACFEGQHRRYAYSLEGIEAFMSETACLGEARFVMEATGNYFYKLALALVEAGRKSYVVNAYRVRAFGKSRLQRHKNDKADARLIDDFAVANREAMMLWQPESQTIAALRQLRTVRRQLQKTATVYENQLHALLQLPESQQSQDALQICKQMIAHCQKQLNLIGKQMQALSDDELKKNDELLDTIAGIGRESALMLLILTGNFTKFRSAKAFADYIGIAPTHYESGTSVKGRGSISKMGDARARQVLYLAAMSAVRHNVACRVFYVRLRQTGRAHKHAVVAVANKLIRQAFAVIRQQAPFETRGAWSVST

SEQ ID NO: 318155 - protein, 317 aa, unidentified
MKRYVGVDIGKANLDIYFDKNFLKTSNDEIGYKTLIEQIEHDKDKIIIVYEPTGGYETSFAKKFLSEGFALHQAHANRIRNFARSKGQHAKTDKIDSKMISEYGEAMKVEKDIIYCSENTEKLGDLLKRRDELLDTKTQENNRLETSRNQITRKSIKSHIEWITKEITQIETKIKEMKNADPELKKQHELISSVKGIGEIVGCSLIAYVPELGKIDNKPLTALVGLAPFNHDSGSYQGRRYISGGRSKIRKVLYMAALSSIRFNTDLKEFYLRCKAQGKPSKVAIVAVMRKLLIMVNSIIKRGTPWQEKFERVRICA

SEQ ID NO: 318156 - protein, 365 aa, unidentified
MEKISIAKMKRQVAARTKKWTIGMDLGDRSSRYCVLDENGDVIAEGSVATTKPAMEKLFGAMVGCRIAIETGCHSPWVSRQLQGFGHEVIVANPRNVRLIGESTRKDDRLDARTLARLARIDPNLLGPVRHRGAEAQAHLAILRARHALVKARTLLVNAARGLTKAFGERLRKCDPEQLGVHAVSGLSAETQAAVGPLLAEVETLNEGIAAYQRQIERLAKEHYPEIALLKQVKGVGTLSALTFVLTVDDPHRFRRSRDVGCYIGLRPGRRNSGKSQPQMRISKEGDTHLRSLLVQGAHYILGPFGSDCDLRRWGLKLAERGGKNAKKRAVIAVARKLAVLLHKLWVSGEVYEPLRNNSEVVAAA

SEQ ID NO: 318157 - protein, 325 aa, unidentified
MQGKEASEQETLNCTVGIDVSKSWLDAHALPSSASLRVANTAEGIRRLKRWLLRHKPKLVAVEATGKWHRELCRSLQASEIAVSITDPYRVRMFAKAQGTWAKTDRLDAKVLAQFAAVMAPACRAATPQALEAMKELVTARASAVAEKTALKNQCAAAEGCFLKRQLTRRIAQLALHIKALERECLRQIKADEGLAQRYAILTSIPSFGAVVAMTLIACLAELGSLSNKQIGMLAGLAPVADDSGERQGARVIWGGRPAVRRILYLAALSAAQRSQDMKAFYRRLIGKGKPPKVALVAVARKLVLLANTLIAQSRPWRPTAPQRA

SEQ ID NO: 318158 - protein, 317 aa, unidentified
MNQITSVFVGIDVSKAVLDVAVRPSGTTLRFSNDEGGIKALVAEMNALAPALIVLEATGGFETPSVAALAAANLPAAVVNPRQVRDFAKSTGKLAKTDTLDAAILAHFGEAIGPAVRPIKDADLQALEALVTRHRQLLEMLTIEQNRLSMASSQTRKDILQHIAWLKKRLKDIDEQTTRCIKATPLWLVKDQLLQSVPGVGPVTSSILLVALPELGKLNRRKIAALVGVAPFNCDSGTLQGKRRVWGGRAQVRSTLYMATLVAVRFNAVIRAFYRRLCQAGKPPKVALTACMRKLLTILNTMLKTNTPWTQSAPENA

SEQ ID NO: 318159 - protein, 368 aa, unidentified
MIVIGTDTHKRTHTCGAVDALTAAARGELTAPARKASFGMLLRWARALDAERVWAIEDCRHVSGAFERFLVARGERIVRVAPKHMAGARRSSRERGKSDSIDAFSVARAALKEGIENLPRAHLDGAALDIRLLVDHREDLIAARTAEQQRLRWHLHDLWPELEIPAGALDTSKWLGIISRRLARAQQTTRVRVVCELGRQISARTSRIRELQAELAALVESYAPQLLAERGCGPLTAAKLIGEIAGADRFATDAKLARTGGAAPIPASSGNTSRHRLDRGGNRQLNCALHRLAVNKGKWDPDTAAYLARKQTEGKSRKEALRCLKRHLARRVWKLLQTPAPAAAAAATRPTTPPTITASAPTPMPCLT

SEQ ID NO: 318160 - protein, 334 aa, unidentified
MNWKYFIGVDVSKATLDVCVLNGREKNKSFEIENKPTALAAFWKVLAKQIPDLPKENAVFCMEHTGIYNEHILSFLHKKNAAICLEHPAHLKLSVGLTRGKNDKVDAERIAVYAYKERESIRMWEPPRAIIKKLKQLTTLRNRLVRTKKALTVPVKEIKSFDRAGGRAIEEICKGTLRHIAKDLEAVEKLILDTIKSDPNLKRLFQISTSISGIGTVTAIEIIISTNEFKNIRNPKKFACYAGIVPFEHYSGTSLRGRPRVSHKANKRVKALLHMAAMASLISGDMKRYFERKNKEGKNKMSIINAVRNKLIQRLFSCIREDRLYTRTDQRQFA

SEQ ID NO: 318161 - protein, 408 aa, unidentified
MRRKKGKRSASSIVGCAPRCAEPHAERPRASICNSQRRQTVSKSITSFVGLDVHKDSTAIGEAKAGGETPQFVGTVGPELGQLLKALKSLGKPETMLVVYEAGPCGYGLARQLRSRGYSCEVVAVSKIPRRPGERIKTDRRDALTLARLARSGDLVKVIVPDERDEAMRDLSRAREDAVRARLKARQQLKALLLRHGHRYTGKSSWTLAHERYLAAVSFAHPAQDIACAEYRQAVGEGHERVERLTQALRTQSEHWRMQPLVAALASLRGIDFVAAVTLAAEIGDFGRFAHPRELMGFLGLVPSEFSTGQTRRQGAITKTGNGHARRVLVEAAWNYRFPARLTRGLQIRQEGQPKAVRAIAWRAQLRLAHRYRRLSSRKLHPNKICVAIARELAGFLWDIARQVKVAA

SEQ ID NO: 318162 - protein, 385 aa, unidentified
MSGLNDLSRSLTSLEQDKTIIAVIEMSQSSWLVAGIVPGIERHPLKKLEPSEEELVRLLMRWRTEATKNGHTITRIAVAFEAGRDGFWLARWLRARDIETYVIHPTSVAVSREHRRAKTDRLDTGLLKRVFIGWLRGEPDHCHMAAIPTLAEEDAKRPNREREGLVRERTRIVNRMKSCLARFGIRNFKPTLRKAPERLATLGTPEGVPLPPNTLLELRRDMARLRFVMDQIKEVEEARAQRLEQAPQEKTHAMVRLIARVIGVGIETADMLVHEILSRQLRDRRAVARYAGLTGAPDESGNKRREKGLAKAGNARVRRGMIQLAWRFLVFQKDSALARWYRTRTESAGKKRKTMIVALARKLLIALWRLVTIGEVPAGVLLRAA

SEQ ID NO: 318163 - protein, 416 aa, unidentified
MNAVGIDVSSRKSTVAVLRPLGEVVCLPFDVTHDIAGLASLAEKLKAIDGETRVVMEHTGRYYEAVAKALHEAGFFVCAVNPLLIKEYGANSLRRVKTDKADAIKIARYALDNWADLRDFTPMDAIRYDLKTLNRQFQLASKQRTASANNLIALLEQSFPGIRKCFDSPVRSDGTQKWVDFAHSFWHVDCVRKQPFPAFCERYRKWCKRHAYLFKLSNAEEVYALAKRAVVLTPKAKVVKVLVQEAANQLISISRSVEVYRAEMDRLAAMLPEYPVVMAMYGVGKSYGPQLMAEIGDVRRFERKQALVAFAGIDPMPNQSGDKNVRSNKSSKRGSPYLRKTLFNVIRTYLQCAPQDEPVFQFLNRKQAEGKPFYVYMLAAANKFLRRYYAKLRDYFASLDTLQPVAPIPTILKATL

SEQ ID NO: 318164 - protein, 427 aa, unidentified
MDNALTTTLFIGIDVSSRSNYVFALDFFGKKLLSFEARNNLPGSEEIVSKILTCLNENNLTHLTIAMESTSFYSWHIANTLATHDALVWFKPKIYCLNPRVISAYKKSFVDIDKTDPKDAFVIADFARVGKITTAPWSGGQYIALQRLTRCRLHLMENISREKTYILSNIFLKFSELAVLGKDESPFSNTFGASSLATLTEFMTIEDLANSSLEDLITFLIEKSKNRFSNPEATAKLLQKAARDSYRLDKALYDPLNATIAASLNCIKALEKEVKGLDKAIEKAIKRIDNHQFQCLLSVPGIGPVFAAGIIAEVGDITKFNNQAAVAKYAGLTWRKKQSGNFTADNTFLTKTGNKYLRYYLLEAAASVMRNSSEYLDYYHKKYGEALIHKHKRALALTGRKLVRLIFALLRNNQLYTSNEVVEKATI

SEQ ID NO: 318165 - protein, 403 aa, unidentified
MSFNGAPVMAATVVAVDVGKNTAVLSVTDSARHRLLGPVGFAMTAAAVAAVVERVSAVLPAAPVKVGVEAAGRYHRRLLGSGVWPAGWELLELSPVRVSEQRRVQGRRRVKTDAVDLEAITDLVLAGYGVPVTARSGRITELSGWAMHRSRRIWTRTATKNQLLAQLDRCFPGLTLALPDVLGTQIGRLVAAEFADPHRLATLGVTRFVRFAANRGLRVRRSAAERLVAAARTALPASEAVVARQVLVDDLGLLGDLEVQIAGAEAKIAQLLPETPFAVLLTVPGWGMIRAGNYGAAVGDPRRWPGASQIYRASGLSPAQYESAGKRRDGSISREGSVQLRRALIDLGIGLWRSDPAARRYGQRLRARGKKSGVIGCAMAHRANKIAYALVREQAGYDPDRWA

SEQ ID NO: 318166 - protein, 379 aa, unidentified
MIATTRPEMSVSEPTLYVAFELGKKEWKLAMTSGFGVAPWLRSVVSGDWRGVDRAIAQGRARFGRGAAVPVVSCYEAGRDGFWIHRALQQRGIRNRVVDSASIEVNRRARRAKTDRLDALKLVTMLVRVCWGERRVWSEVHVPSVAAEAARQVSRERTALTQEQTRLTNQLKGWLATWGATLPRRRPSGWWTTVSDWAGAPLPVEVQARVARAEARQAVLAGQIAELDAQQQAAVTTAAPGSAVRQLVQLKGVATTSASVLLDEGLVWRAFQNRRQIGGFLGFAPTPYESGESAREQGISRAGNNRLQSISIQLAWNWVRWQPHSALTAWYREQFGKGKRSRRIGIVAVARKLVIALWRYVTTGVVPAGAILKGARPVA

SEQ ID NO: 318167 - protein, 389 aa, unidentified
MGEAIRATVAYLGIDVGKRSHSACGLGEDGEVAFRSDLENRPADIDRLLERAGAGALVVVDQKRNIGALVLARAFAHGNPCAHLPGYAERQARGMFPGVAKTDAIDAEVIARTARGMPGALRPLAEEPEGAASLRILSSQREFAAAARTRAKNRLRATLLEADPALERAVDPSRGWHVAPLAEFGSAAGCSAAGWRRFSAAARRAGAPAAGARAPWESMLASARSGRSLPAGEDVAVRMLAREIAALDADVAELEGLVADSLAGDEVYECLLTVPGIGPKTAAALVTSVDVSMFRGHDELASYCGVAPAGSRSGTSVRSTSPQRGGNKQLKNLLIFSCNSLIGTQNRFGRYYDECRARGMRHNKALKAVARKRLKVIYAVMRDAVPYAA

SEQ ID NO: 318168 - protein, 399 aa, unidentified
MAAPSLWAGIDAGKLDHHCVLIDASGERLLSRRVRNDEAPLTALIDDVIALADGGLVQWAIDLNAGGAALVISLLLARDQHLLYIPGRIVHHASAAYRGDGKTDAKDAAIIADQARMRRDLPEFRHRDEFTVELRTLCARRTDVAADRNRAINRLRAQLLEYFPALERAFDYSHRKGALILLTGYQTPEALRRIGRTRLEKWLRGRNAYNSVAIADRAIAAANAQHVVVTGQRLGSTIVARIAQQILDIDAELSDLDDMIEERFSQHQQAALIRSMPGFGPLLGAELVAATNGGLDSFHSADRLAAVAGLAPVPRDSGRISGNLKRPRRYDRRLLRVFYLAANNSIKTCPQSRAYYDRKRAEGKHHRQAILSLARRRVNVLWAMQRDNTAYQSTAKTAA

SEQ ID NO: 318169 - protein, 409 aa, unidentified
MAVPEGADEKPVREFSGFTGDLERMVEWLISCGVTTVAMESTGIYWIPVFEILESRGLEVKLVNARHVKNVPGRKSDVLDCQWLQQLHTYGLLRGAFLPVEQVCTLRAYVRQRAMLVRSAASYIQRMQKALAQMNLQLHNVVTDITGMTGMRIIKAILGGERTPDVLAAMRDRRCKNSATTIARSLQGSYRPEHLFSLRQAVELYEFHQEKIADCDRQILEQLKSFDAQNAPNDAPPSSVDEALQRMSGVDLTSINGIDTNTALKILAEIGTDMTRWKTAKHFASWLGLSPGTKVSGGKVLSSATKPVANKAASAFRMAAFTLFNSNSALGAYLRRQRARLGAPKAITATAHKLARLVYAMIKQGTAYVDAGQEYYEKRYRSRVIQNMKRKAQELGFELVAIQGATIPA

SEQ ID NO: 318170 - protein, 413 aa, unidentified
MNKHTYRAQKVNTINWLQVKEHVAGEALVLAIDVAKVQQYALLTNQDHTKSWMMQWSHLEQTPYLIEQIKALEVSIAVVMESTSTYGDSLRYQCRQAGFAIYQANAKKVHDAREIFDGVPSLHDAKSAWLIANLHKDNITKLWCEPTLEERRMNALRLEYDLHQSQHLRNQNRLEAYLSRHWPEVLTLMPLDSVTLEQLIKHYGSPQNIAAESKQAALDMRSWGRSGLSLEKIAFVIASAINTLGEPCIEAERQFLMALASELEHSRLQKQTAKNALEALVDNDEALREMGQVIGKVTTAVLVSLHLDPRRFATPKSYQKALGVNLTEKSSGQINGRLRLSKRGSAVARKFLYMAALRLLVNDPLVGKWYKAKKDDRAKLKTVIALMRKLPLALWHIARGERFDASKLLKVAI

SEQ ID NO: 318171 - protein, 355 aa, unidentified
MSSEKYVGMDVHQATISVAVMDSTGKVIMESILETKSSTILEFLGGLRGTLSVTFEEGTWAGWLYDLLKPHVAHVVACNPRKNAALQQGNRSDKIDARELANRLRLNDLKPVYHGENGIRMLRELARSYLTIVKDLSRVMNRLKALYRSWAIPCAGRDVYYTRHRRQWLEKIREAGPRHRAEHLYLQLDMLQHLRQQARRELLAESRKHSITTKLRKIPALGPIRSALAVALIQTPHRFRSKRQLWKYCGLALETRITGEYVYVHGERRRSKKQLSIRGLNKDHNHDLKGLFKAAATRASVIPGPFREFYQRSLAKGIKPTMVRLTLARKIAAITLTLWKKGENFDVEKLKSQAA

SEQ ID NO: 318172 - protein, 373 aa, unidentified
MPKYSTAFGMDVHLRSTTVCALDADTGEAVTRRFPGNPWGEIAGWMDGFPGPSLAAYESGYLGFAPQRELAGLGVECVVAAVSKIPRSAADSASKNDRNDAARMAKAILAHDISPVWIPSPEVEGIRDLAGAYDGATARLATAKQRLLAFLAKRGFVYGGTTPAGNPRKYWTYDFLRWLDKVRPEDDGGVRTLAALRNEVEAAAEARADLLSEYRAAVDASPIAAEVAALQSIKGCAFALAAAFSAEVGDFTRFRSGRQVTAYFGLAPSQRSSGGSVRLGGISGAGNALVRKLAVEGSWCYAAARHQPKLMPRDTGVPLEIRMHGRKGSERLLRRREEMLARGMPAAKANAATAAELVRWLWALGAMCREATE

SEQ ID NO: 318173 - protein, 352 aa, unidentified
MPEHPSPGQSYFAGLDAHQEYVIVAIVDKQGTLVHEARVRTAQPATLVSTLASYHSPPHPLTAVVETSPFWPWIHDQLVPQGMRFVLAHAQELEAIARAARKSDQRDARLLARMLAAGLIPPAYPKPPAQREAACLLRHRAALVRMRTQLANRIHSQLHAVGLALPRERLLRKATREWLVTTAGPVLSTEQRFLVDTHWVLMRRLTRHLATVDARIASAAAVHPAAGLLASIPGVGPYRSLLLATELLPLTRYASVHKFVGYAGLAPITRASADTVRHGPLPRAANRWVRGALVSTIPTHLRLAPESHLSRYYARQKARLGWQVARVATARQLARTIYSMLASGECWREAEA

SEQ ID NO: 318174 - protein, 346 aa, unidentified
MNKHNVIAVDLAKNILQVCVLNSANEVVSNKAKRAASFEQYLSKQNPSVIAFEACGRAQHWARRAQHYGHQAMIIPPKVVAAFRQGHKTDYNDALAIGIAAKQPEIKTAGVKSLEQQSLQTDLRVQKHLSDQLTATSNILRALIAEFGIEIPKGISKLKAQMPLILEDAENGLPFAARESLYQGWLLWQSQSDYLQVLEKLLEKRIKENEPCQRLQQLEGVGVKNAIGLYIELGNGRHFKQGRNAAACIGVSPKQHSSGGKVKIGTIGKYCGNQRLRSNLITGAHAVIKVLVQREPRNEKERWLKALITRRGAGRAAVALANKTVRTAWAMMHNNEPYRKPAMLVC

SEQ ID NO: 318175 - protein, 394 aa, unidentified
MFYLGIDIGKNTHVASMIGVDGKPVFRAFSFSNTTEGGESLLAKLSGIAPTELEVGLEATGHYWLAVYSYLHDRGYKLHVINPIQTDGWRKGVEIRRRKTDVIDSVLIAELMRYGEFIEAQLPEEAVLSLKNLTRFRSYLVDSIGDLKRKVICVLDQVFPEYQSVFSNVFGKTSKEILLQFSSPADLEDVSADTLAELLAALSRKKLGFEAAEKLSAAASKSFGVTFCRDSFTFQLRMLIEQIKYIESQVKDTEAEIETIMSNLASPITTIPGIGKTTGAVILGEIGSIDRFDKPAKLVAFAGIDATVLQSGEFEGTSNRMSKRGSPYLRRALYQASLIAATGRNPDPILRAFYLKKMAEGKHHSTSIGAVSRKLCYIIYSVLKEDRPFEVRIP

SEQ ID NO: 318176 - protein, 342 aa, unidentified
MGEVTTIGLDIAKSVFQVHGVDADGQVVFRQRLTRGRVVAFFRKLPACRVGIEACATAHHWARELGSLGHDVRLMPPAYVKPYVKRQKNDAADAEAICEAVGRPTMRFVPVKTVEQQSVMMLHRVRLMLTRQRTQVGNAIRAHLAELGIVAPVGRKGLASLLAIIADETDARLPATMRGCLAMLAEQLQLLNAQVLENDRAIRDTVRASEAARRLMAIPGVGPLLASALVASIPDPETFKSGRNLAAWIGLVPKQNSSGGKERLGGISKQGNRYLRQLLVTGALAVIRQAQRYGSKRPWLIALIGRRTTRVAAVALANKTARIAWAIMTSGEPYREPKPAAA

SEQ ID NO: 318177 - protein, 458 aa, unidentified
MVFGVPEEIADQEFEQLVDRVCAIDVAKESGKVCTRVPQLGVSGRRVSRVWDVPATTRAVVALAGELVGLGIAKVTVESTSDYWRIWFYVLEAAGLDVQLVNARDVKNVPGRPKTDKLDAVWLAKLTEKGLLRPSFVPPARIRVLRDYTRMRIDLTQERTRHWQRLEKLLEDSLIKVSSVASKLDTLSTRDMIEALVRGERDPGVLAGLARGKMRAKHAALLEALTGRFDNHHAVLARMLLDQIDGLNRQIDVLTTHIEQVIATLPAAAPRADPHGPGNLGGPATGGPVQATGAGLPGAVDRLAEIPGIGPRGAQIILAEVGLDMTRFPTAAHLASWSKLCPRAIQSGATNRAGTTGKGNPYLKGILGEAAAAAARTNTFLGDRYRRLVKRRGKLKALVAVARSILVIVWHLLADPTARYQDLGPDYHTTRINTGRKISNLIRQLEALGHTVTLQPAT

SEQ ID NO: 318178 - protein, 343 aa, unidentified
MDHFAGLDVSVKETSICIVDDTGKIVREVKVASEPGTLQAMLKNPAYRFKQIGLEAGPLSQWLFSALAEAELPVICVETRHMRAVLKAQINKTDRNDARGIAQMMRVGLYRPVHVKTLRSQKLRMLLTHRKLLQSKAIAIENDLRGTLRNFGLKVGIVGKVKFEARIKELVENLPDLGILVEPMLIVRRVLREQIVVLHRRLLAIVRDDEVCRRLMTTPGVGPVVSLTYRATVDVPARFRNSKAVGAVFGLTCSKYQSGEVDRSGRISKCGDEMMRVMLYEAAQSMLRSTRWSWLKAWAMQIARRRGMKKAIVALARRLAVIMHRIWVDGTEFRWTREQATAA

SEQ ID NO: 318179 - protein, 386 aa, unidentified
MSAGRDAVAAVPGAAPTVFLALELSKASWIVAVHSPAGARVSLHRLPAGDARALLAFAEKARAAAAEATGEVVAVASCYEAGYDGFWLHRVLVAAGTANLVVDPASLKVDRRARRAKTDRIDAQALLRTLMAHHRREPRVWSPVRVPAPADEDARRTHRERQNLLKERGRHVNRIKGLCAQQGIYGYEPIRRDRRERLAQLVTGDGRPLPPRLRAEIGRELRRLELVLEQIGAVEAERDAAASAEAGEEAGRAARIAALGRLKGIGPEIATVLGNEVFYRRFANRRQLAAYVGPAPSPYRSGGLSRDQGLSRAGNPRARTAVVELAWLWLRNQPESPLSAWFVRRVGGPKGRIKRIRVVALARKLLLALWRYLGAGLVPEGAVLKG

SEQ ID NO: 318180 - protein, 442 aa, unidentified
MDTQFGSPDAPPSKLGAANISREARPFHLGLDMSRRTGTACLLDHLGQAVVPRWNFPNNQPGAEEVAQKVAKLLKIHGSTRILVGMEATGIYGWHLACFLSGTYLLRPWGVQVYVLNPNRTLNFKKALGDMGKTDRVDALVVAQWLRIGHLPTPFAIDSVYGPLQRLTRFRYHLSQSLTREKLHALGILSLVFSELQIASPFQDPFGSTSQAVLSDFSLDELATKPLEELTSYLAQKGHGRLVKPEEVARTLQRAAKDSYRLDTLQNNALRLVLSVALTNIRALSRHMDDLGTSIKQELKAIPLSICLLSVPGLGPVYVAGLLAEIQDIHRFPNHAALAKFAGLTWRSHQSGDFTAEETPLTKSGNSYLRYYLVEAANSVRVLEPEYRAYYQAKYAEATKHHHKRAVVLTARKLVRLVDALLRDAQLYLPSEQRHRRSSTMA

SEQ ID NO: 318181 - protein, 347 aa, unidentified
MEYFAGLDVSLETVNVCIVNAAGDILLEKKIAAEPAAIVHLLKSFGSPFKRIGLEAGPTSSWLYGELRAAGYGAICLECRHVKAGLSAMRNKTDRNDARGIAQLVRLGWFRQVHVKSEEAQRTRMLLVNRQQLLTKALDIENSVRGSLKVFGLRVGVVARRGFEARVLELVADDPILLAVTEPMLRVRQALFEEFERLDRLCQQLARRDPVCRRLMTVPGVGVVVALTYRTGVDAPERFSKSRDVGALFGLTPKRYSSGQTDYDGRISRCGDEMVRTALYQAANVLLHHGRWSSLRSWAMRIAKRGSVKGAKVALARRLAVVMHRMWTDGTDFRWSDTSRMTAPTAA

SEQ ID NO: 318182 - protein, 347 aa, unidentified
MMVVLGTDAHKRSHTVVAVDEAGAQIGELTVAATSDGHLRALCWAGQFDSRRWAIEDCRHLSRRLEADLLAAGEWVVRVPPKMMAGVRRSARTRGKSDPIDALATARAALREPGLPVARLDGPSREIKLLVDYREALVRERTATQNRLRWRLHELEPGFDPPTGSLNRYKTLDAIDQFLNGHDGVVATLAAREVARIRDITQQARQLERYIAALVANVAPSLLALPGCGTLTAAKLVGEAADITRFRDRNAYAMWAGAAPIPVWSANNERFRLNRGGNRQTNAALHRIAVTQIRMHPDAQAFMARRLANGDTKRQALRALKRRLSDVVYRTMIQNTQTLQAAQPQAA

SEQ ID NO: 318183 - protein, 311 aa, unidentified
MNNTIGIDISKDTLDAHRLADGQHKQFLNGKTGHAQLVKWIGKQSDPLIIFEATGAYHRQLERVLCTHIIPFVKVNPKQARRFAQACGKLAKTDRVDCEMLAKMGAALQLMPKPFTAENLYDLKELLSARRALIKDRTAAKARKATVINALIKQQLEKRLRQIKNDIAKIDALMLDVAREDQYMSERLDILFSIPGIGVITALMILVDMPEIGALNNKQVASLAGLAPMSQSSGKWMGKARIQGGRPNLRNAIFMPALVAIRHNADLKTKYDQLVTAGKEKKVAITAVMRKLLVLANALLRDNRKWAEKAA

SEQ ID NO: 318184 - protein, 344 aa, unidentified
MTYITSIGLDVHARSVSACAFDPFTGEVAQRRFGTDAGEIAEWIPGFESPKAIYESGPTGFALCRELRAPGVDCVVGAVSKMQRPSAEKRRKNDRRDAAFLARLLATRNIAEVWAPPVEAEAARDLSRALDDAREDLQRARRRLSKFPLRRGPVFDETDALGRRRGAWTRAFWRWAESCRPSDPAAAAAFDRYVACVRCAESDKRALEKRVLAEARADRWRGAVEALSCIKGIDAVTAFCLATEAGRFSRFPTAGAYASWLGLAPSEHSSGEKEAKGGITKTGNSASRRALVEAAWHFKSCSPKPKAPPCFLSIRSDQKYHQELNIPMICFCTSRSRDMASLRT

SEQ ID NO: 318185 - protein, 423 aa, unidentified
MAGVMIGIDPHKGSHTAFVIDGREKPLGQLRVRASCKQAEALLGWAGRWRQRTWAIEGARGLGQLLAQQLLAAGERVLDVPPKLTARVRLLESGQINKTDENDARAVAIAALRARQLPQLTVEDQTIVMRVWARRYHDLGRLRTQAVCRLHTVLCELVPGGVRKQLRTSQAIAMVDSITAESPVAQAKLELAHDLVADLQRLDAQRREVKRRVSRAVAAAPTSITEVYGVGPIVAACVLGYVRDIRRFPSRDRFASYNGTAPIEVSSGDRKIYRLSRRGNRQLNHAIHIAAVSQISHRGSEGHAYYQRKRAKGMTGKCALRALKRKISDTLYERMLHDIRPRKDPGGHSGNDAVSSAAGSHPDGPALRTSHSRATANSKTATTNQRPLTSPPAPDKRRTSRSGTGVKLQPRPRPRRGRGQERA

SEQ ID NO: 318186 - protein, 454 aa, unidentified
MAPRHQKTKQKVPAQLPTFHPHAAGIDIGAREIWVAVPPGSDPKPVRSFDTFTDDLLKLRDWLLACGVRTVAMESTGVYWIPLFQILEAAGLEVCLVNARHCKNLPGRKTDVQDCQWLQYLHTVGLLRGSFRPSEQVCAVRSLLRHRSRLVRCAADQVRLMHKALTQMNVQLQHVISDLVGVTGEAIVQAILAGERNPVKLAKLKDHRIKASHDTMARSLQGDWRPEHLFTLSQAYQTWQHYQKQITACDERIELQLANWDARVNVKAQPLPAPRTTHRTAQRNEPQFDARTECYRVLGVDLTALPGFQAPTALVLLAELGPDFAGKFPSAKHFASWLGLCPDNRITGGKIMSSATRDVKSRVAETLRLAAQSLWHAQNYFGELYRRWKARLGTPKAITAMAHKLARIVWHLLKHRQAFNPEIFRKEEEKMRRRKLARLQNTAAALGYRLIESQ

SEQ ID NO: 318187 - protein, 414 aa, unidentified
MDVVHPRCCGIDISKRDAKVCVRVASSGRAKAKSTVTTFGAVTSQVLALRDYLVDEQVTLVVMEATSDYWKPFYYLLEDGPFEVMLVNARHAKNMPGRKTDVSDAAWLAELGAHGLVRGSFVPPEPIRQLRDLTRTRTTITRERSREFQRLEKLLEDAGIKLSSVASDISGVSSRAMLEALINGERDPGVLADLAQRRLRSKIPELTEALVGRFNEHHSFLARLHLDLIDNHTHAIAELTARIEVVMEPFRCARDLIVTIPGISTSVADVIIAETGGDMSRFPSAGHLASWAGTCPGSNESAGRVKSTHTRPGNPYLKGALGIAAMSVSRTKNTYFAAKFRRIASHRGPIKAIVAVEHAMLIAVWNMLTAGTFYCDPGGEFFTNLNPDRAKNRAIDQLRKMGYAVTIEPLEAAG

SEQ ID NO: 318188 - protein, 345 aa, unidentified
MSMVSGVVGGVDTHADVHVAVAIDLNGGVLGVGSFPTDEAGYRSLTDWLCGFGPVVKVGVEGTGSYGVGLARYLHREGVVVVEVDRQNRQTRRRLGKSDPIDAEAAARAALSGTATVTPKRRDGTVEQMRVLMIARRSARMQRNQTLNQLRQIVICGPDEIRARFKDRPKAGLVSEAAGMRPRKGNDPIVFTTYVVIRGLARRIKDLNDEIGSIDRALRELIDATAPSLLECYGVGASTAATLLVTAGDNPDRLHTERSWAHLCGVSPVPAGSGKTSGRVRLNHGGDRQANAALYQIVLTRMSSDAETRNYVRRRRAEGLSTREVMRCLKRYVARQTFKHLPRAA

SEQ ID NO: 318189 - protein, 351 aa, unidentified
MEMVGGLDLHRRQITFRTVDLRTGELQRGKIYPGAREAVREWLDQFQSGTDAHFALEGTTGWRFVVEEIERRGFTAHLADPAELSERRGPKRRAKTDHADCELMVNLLLEGRLPQSWIPPAHILELRALVRLRKTLVDQRIEWQQRLQAQLFHQGVVPGLHLCRPEDRRRLAEMEMSPAGRQTMQRGLVMLDAFDSQLKPLSAQVVSLAKAQPGCRALEQLYGVGWLTSAAILAELGDCRRFTSADQAVRASGLDVTVHESNGKRPGGHLARQGPQVLRWALFEAAQCAARRSSPDHDYYVTVRDRIDHNRACLSVARKLCRRACHILKDLGEAAMAAPELPSASHEPKAA

SEQ ID NO: 318190 - protein, 431 aa, unidentified
MQTARIMNTNNDWTKHTHFAALDWASDHHDVVIVDHSGAIAAEFRFAHTAAGWAEFTEKMQPYAGAPFALETSSGPAVDQLLQRGWTLYPVNPKAAERYRERKVPSGTKTDRHDGWSLADALRTDGHGWRPLLPQDEATATLRALCRDEIALIEQRTALVNQLIAALREYYPVALEIFDDWTQPFTWALIQQFPTPLTLQSAGKRKWEKFLHTHRLWRTDTAPARLKLFARANALPASAAVRNAKSLLATSLVKVLQTLETQLREYRRRITETFAQHPDHDLFGSLPGAAEKIAPRLLGELGAIRAVYPDADALCCQAGVSPVSFQSGKLDKARIRWACDVVLRHTVHLWADCSRKKSAWAAAYYQGKRQQGHDHASALRCLGKRWLKVLWRLWQDGQKYDATRHEQSLKVHGSWVQAHLDAALQATPATL

SEQ ID NO: 318191 - protein, 368 aa, unidentified
MGNDITVFVGLDVHKDTIAVAAAQAGRAAPRFVGTCGPSVTELLKVLSHLGGPADTLLAYETGPTGFALARDLARQGWRCQVVAVSKTPRKPGKRIKTDRRDALALASYLRSAELTPVTVPDERDEAIRDLSRAREDAVRARMKARQHIKAMLLRHGQRFPGKTSWGSTHERYLARIAFEHPAQQIAWAEYRSALLEAHERVERITAALREQVESWRWAAVVQALMCFKGIDFVAAASLVAELGDLHRFAHPKHLMAYLGLVPSEYSSGDSRSQGGITKSGNGFARRMLVEAAWCYRLSARMSRPVTERQQGQPRAVCTIAWRAQLRLCARYRKLAMRGLHANKICVAIARELAGFLWEAGRCVQPQP

SEQ ID NO: 318192 - protein, 398 aa, unidentified
MTESSDYESVLVFIGVDVGKDTHHAVAINRSGKRLFDKALPNDENKLRSLISDLKQHGQILLVVDQPATIGALPVAVARSEGVLVGYLPGLAMRRIADLHAGEAKTDARNAAIIAEAARTLPHALRTLKLADEQIAELSMLCGFDDDLAAQTTQASNRIRGLLTQIHPAPERVLGPRLEHPAVLDLLQRYPSPEKLASLGEKKLAAQLCKLAPRLGKRLAADIAQALAEQTVVVPGTNAAAVVLPRLALQLITLRKQRDEVALEVEQRVLAHPLYPVLTSMPGVGVRTAARLLTEVACRAFASAAHLAAYAGLAPVTRRSGSSIRGEHPSRRGNKALKRALFLSAFAALRDPLSRAYYTRKMSQGKRHNQVLIALARRRCDVLFAMMRDGTFYTLQVS

SEQ ID NO: 318193 - protein, 346 aa, unidentified
MDQQCHYVGLDVSLETTSICVIDDAGAIIWRGKCRSDPDTITAIVRQHAPDAVRVGLETGQLSNWLTLSLRRRGVPVVCMDARHAKAALSLQINKTDANDAFGLAQVVRTGWYREVAVKSMDAHTLRMLLVARSRLVSQRQATANTIRGLLKTFGLVVARGSKGLFPVRVREQIAGNPALIAIIEPLLAVWHAIRDQVAMLYRQMLARARNDPVARRLMTIPGVVVIALAYTAVIDDPARFRRSVSVGAYLGLTPRRYQSGEVDTTGHISKCGDSLLRGYLYEAAAVLLCRDARASTLKSWGLGLAKRIGMRRAKVAVARKLAVIMHRIWSDHGEYRWTAIPPTAA

SEQ ID NO: 318194 - protein, 457 aa, unidentified
MAQITKRRGSSKRSRLPSIHGGAAGLDVGATFHVVAVPPERADPPVRSFRSFTGDLHQLADWLREVGVSTVAMESTGVYWIPVFEILEARGFEVLLVNARDVKNVPGRKTDVNDAQWLQQLHQHGLLRGSFRPRDGLVRLRAYLRHRERLIDYAASHIQHMQKALMQMNVQLHHVVSDITGLTGMRIIRAIVEGQHDPSVLAEYRDVRCKASRDTIGQALTGNYRSEHVFALRQALELYEFHHAKVTECDVEIEAVLHRLNDDRQAPEAPLPDARHEPGRNEPKFELREALYTLLGADLSQIHGFGPYTVLRLLAECGDDMRKWPTVKHFTSWLSLAPGNKKSGGRVLSSKTRRSSNRAAALLRIAAVNVGRTQTALGAFYRRLAARTGKAKAVTATARKLAVLFYNALRHGMSYVDPGVDYYEERYRQRVIRHLHRRARQMGYTLVQATGATAGVS

SEQ ID NO: 318195 - protein, 323 aa, unidentified
MFYLGVDVSKKKLDCMLLNSANGKLKSKSLSNTKAGFEELIGWLAENKAPEAHVVMEPTGVYHEPAALALTDAGLTLSLVNPAQLRQFAQGLGVRNKTDKADSTVLARYGEAVKPEAWQPPSKSARHLKALLARRDAVADDLQREQNRQEAVEFAVSPEEVRQSINQSISFLKAELKRLEETIEEHIDSDPGLRDKKDLLETIPGVGERVSTNLTALFAAKTFDSAEQLAGYLGLVPVHGESGTSVHKRPRLSKAGPAHLRKLLYMPALVARQWNPHIKAFSERLLAKGKTKMAVIGACMRKLAHLCFGVVHTGRPYDPNYAM

SEQ ID NO: 318196 - protein, 480 aa, unidentified
MNVKATRTKKQVNVENQAIKLLSKEELGIKIEVIKKELRSYTWRDLETNGKFAKNDKLSFITDDMLIAGCDIGSETHYIRAIDVRGRELSSRAFEFSNTSEGFANAKAWVLALAAKNDKKQIVLGLEPTGHYWFALAAWMVSNGISVVQVNPYAVKQSKEIEDNSQLKDDRKDPKLIANLVKDGNYGMPYLPEKVYADMRRLSMFRDQLTEDRIRNINRLHRELKIYFPEYMDAFGKIDGAFTLEVLKVSAIPSDITALGAEGIKNIWHNEKLRGRGYSRANEIVSYAEKSVGLTDRTDAGRETVKWYAEQILKLDEQLAVIESTLHEKCREIPYAENILEIRGVGENILAGILAEMGDISRFDDVKEIQKLSGMGLVACSSGKHKGQTKISHRGRKRLRYWLFQAAKSAVSHADEFKQLHEYYTTRTNNPLKKMQSLVVIACKILRVSYTILKTGTTYDPQKLLKDIKRPTASQAPMAA

SEQ ID NO: 318197 - protein, 309 aa, unidentified
MKEELVYVGVDIAKAYLDAAIGNEKRRFANDALGHRQLINWIKQMPASVQVICEPSGGYERALVRALVAAQLKISLVPANRVRQFARAAGILTKTDRMDAKVLCAFGEAMQPGTISASQLEQEHLRELESQRRHLTHLLVMEQNRAARMSDLWVCKLNRRLITQIKKQIEQVDLLIQQQIKASRELSSKAEKLTAISGVGARTAALLLAQMPELGQLNRREVAALVGVAPFNRDSGRMRGKRAIYGGRRSVRHGLYMAALVAARHNPILCAFYLRLRAAGKPAKVALTATMRKLLIVLNSSLKPDLTYA

SEQ ID NO: 318198 - protein, 310 aa, unidentified
MENIIVGIDVSKDRLDVAVRPSGEIFAVERNSAGLDLLVARLKELSPRIVALEATGGFETVVAAALAAAGLPVVVVNPANVRSFAKAIGQRAKSDPIDAAVIAHFAEATKPELRPLPDEATRLLADLTARRRQIIEMMVSERQREKRLTAPRLKKSITRLLKALQKELTSVDADIDDAVRGSPAWREKEDLLTSVPGVGPIIARTLMAELPELGQLGRKEIAALAGLAPFTRQSGQWRGRSFIGGGRTVVRTAVFMGALVAKKHNPTLKVFFERLVAAGKPKMVALIAVARKLLTILNAILRDNRPWQNA

SEQ ID NO: 318199 - protein, 346 aa, unidentified
MICIGVDHSKKFSQYTIGNEFGQIFKRTRIANESQEIQDLMESLPEGPKIAALEASRSWGWLHDQLEQYVDQVLLGNPLEMKAIAHAKVKTDSIDSQTIYHLLRADLLPACYVPTKEVREIKHQLRFRSFLIRLRGMIKNQIHTLVDRNHVLQPGQRQAQDLFSQSGLKALKGVGLPDRERKILDELLRLYQQLEVQIEFGNQWVEELYHESPEAHGIDTIPGFAHFLSVFVRYEIGDIHRFREARKLCAYAGLVPRVYASGEKVFYGKITKRGNAHLRWAAIEAVTAAVRCDSRLRSEYERIRQKKGTGVARVAIARKLLEWVYRTWKTGKTFQELTSQAALCNR

SEQ ID NO: 318200 - protein, 345 aa, unidentified
MKKIVRQVAGVDVAQKELVVCLGRMYDDLRQELYASKTFANTSKGFIAFVQWVTKLSDTGLSVRFIMEATGVYHESLAYYLDEQGLEVSIVLPNKISNYARTLDVKTVTDKTASEAIARFGLERKLDRWSRPKGIFKKLKQLTRERWQLVDERTVLKNQLHAEQVEAEPSKKSIERMKKRIALLDKQEEEIREELKTLLKTDSEMQQLILLICTLPGIGLLTAAAILGETSGFELIRNKRQLASYAGLDVKEKQSGTSVKGKPRISKKGNKHLRKTMHLPALTAIRCDERFKAIFARLVSKHGIKMKAAVAVQRKLLEMIFIIYKTNKPYDKDYLKKLESSVAAP

SEQ ID NO: 318201 - protein, 386 aa, unidentified
MQKLNDLSRSPSPLDPNGTLIAVIELSLSSWLVAGIVPGVERQPLKKLAVDESALVKLLHRWREEAEKAGHRIKRIVVAFEAGRDGFWLARWLSARDIEVHVIHASSVAVSREHRRAKTDRLDTELLKRSFLGWLRGERDHCKMVAIPTTKDEDAKRPNREHESLVGEQSRIVNRMKATLIRLGIRGFNPKLKKAAGRLEDLRTPEGEPIPPNTLAELRRDMERRRLISDQIRQIEDARLERIEQATGDGPHAMVRLLARVIGVGIETADMLVQEVLARNMRDRRAVARYAGLTGSPDESGTKRREKGLARSGNARVRRGMIQLAWRFLMFQKESALAQWFRARTETARGTRKTMIVALARKLLIALWRLVREGVVPDGVVLRPAQ

SEQ ID NO: 318202 - protein, 390 aa, unidentified
MQVIADQAEAPSAIRSNLGAIFVSLELSRSTWLITSLLPGGSEKMSKHSVPAGDICALLARFSELRQKAFTRTGKSFPIIVIQEAGLDGFWIHRVLQNEGIESHVVDPASIATSRRHRRAKTDRIDGETLLRTLLAYKRGEPRVCAMVKAPTPEEEDRRRLCRERKVLIAERVQHVNRIKGLLLCQGVSGYEALRRDRRQRLDELKTGDGRALPDHLKAQISRELARLELLLEQIKAMEAERDALFAAAKATMPASGPVAMLLEIKGIGPEFAAILWMEAFFRSFANRKQVAAYAGLAPTPWQSGSVDREQGVSKAGNPRLRTMLIQLAWLWLRHQPQSALALWFKERVSRNGGRFKKTTIVALARKLLVALWKYVTAGVIIEGAVMKPA

SEQ ID NO: 318203 - protein, 356 aa, unidentified
MQSIGIDYHKRYSVLCVLDEEGREQHLERIEHAFPERFGSLLQDYTPCQVAFEATMNWSWLYELLEEIPGVARIIMANPLHVRLISAAQVKTDKVDARKLAQLLRAGLLPASHIPDRATRLRKEVLRQRTFWVRQRTKLRNRVHRLLGRQHGLVMPQVSDLFGKKGRAALNAIQLEAPDDLLLRQQLEMLDALARQIRELEEKIAASGKADETVARLATIPGIGNLLGNVLATEIDGFARFGTGDQLCAYAGLIPTTSSSGDKTYHGRLVPGCNKWLRWAFVEAAWVAIGCSACFGGLYRQHRARGKKANTAIMIVARRMCHIVFRILKEHRAYEARAYSTNLPGGSHKGRTERVA

SEQ ID NO: 318204 - protein, 323 aa, unidentified
MIDSSSVVGIDVSKASLDVAFGLGSPVQQFPNQPKGHRALTRALVKRPVAPARIVMEATGGYEQAVLRHLIDQSLPAIRVNPRQVRDFARSVGILAKTDAIDARVLVRFGSAVEPEHRPLPTPQQERLANLQSRRTQLLDLRTVEINHREHHPDGLIRRTINDVIKTLEKQIALIEAESAQVIAEHKELERTYAILTSVPGVGPVTASVLMGHMPELGTLARQTVAALAGLAPYNQDSGTQRGQRHIRGGRAPVRTVLYMATLSAVSCNPVIAEDFERLTAAGKPHKVAMTACMRKLLTILNALVRDDMLFGEKKSSKPAPKG

SEQ ID NO: 318205 - protein, 371 aa, unidentified
MGAALQADGEYEVTVVTGLKHQKEKRSIDHFAGLDVSVKETSVCVVDDTGRIVREVKVASEPDALLAVLNKSVYHFKRIGLEAGPLSQWLFSALAEAGLPAICVETRHMRAVLQAQINKTDRNDARGMAQMMRAGLYRPVHVKTLRSQKLRMLLTHRKLLQSKAIAIENDLRGTLRNFGLKVGMVGKLQFEARIRELVENLPDLAVLVEPLLIVRRVLREQLGVLHRRLLTIARDDEVCRRLMTVPGVGPVVALTYRATVDVPARFKNSKAVGAVFGLTPSKYQSGEIDRTGGISRCGDEMMRVMLYEAAQILLVRSTKWSWLKAWAMQIARRRGMKKAIVALARRLAIIMHRIWVDGTEFHWTREEAAAA

SEQ ID NO: 318206 - protein, 341 aa, unidentified
MTSIIGIDLAKNTFSVCALNSRGKVLYNKKFSRKKLAIFIKTTEVSFIAMEACGGAHHWARMAETAGHKVKMIHPKYVKPFVKTNKSDEADAHAICEAALRESIVSVPIKQIWAQDVLVLHRVKTRLTKNRVALSNEIRGFLLEYGVSIPIGTSQFKKKVAIILGENPDNLTQLFLGELRDLIVEFDEIQEKLLIVKTKILEFAKSHEICKKLQKIPGVGPMISTAIVAAAGSGSNFSNGRHFAAWLGLVPKHTGTGGKTKTTSISKRGDKYIRSILIQGAHTVVNWAKKNDTPQRKWVNEKLRSKHRNNVAVAIANKNARIIWKILVTGEDYKQSIAYCA

SEQ ID NO: 318207 - protein, 370 aa, unidentified
MKSIVYIGMDVHKNSYSLCGYNGITGEIIGETKCGADSKNILKFMNSIKKKYSDHLEFKAGYEAGCLGYTLYHQLRKEGIECDILAPTTMYRSSKNKVNKNDKLDARNIATNLAYGTYKAVYVPNSDDIEVKEYIRMMDDFKTEQKKVKQHINALTLRHGFKYDGKSRWTEAHIKWLKTIDLSKFLREILNEYLAEYTSLSDKIDRFKEKLIEVSHNESYEKPISQLRCFKGIDTVSAMSIHVEVSDFRRFQTAKMFSSYIGLTPGENSSGESVNFTSITKQGNTTVRKILIECSQALVKGTIGVKSKNVKARQKGQGVETISYADKAVERLQRKYHKMIYRGVNRNKVITAVARELACFIWGMETGNIE

SEQ ID NO: 318208 - protein, 318 aa, unidentified
MRKLEVKSCFVGIDVSKNTLDICVRPTGESWTQPNGDFEGLCKKLKPLNPKLIVLEPTGGYELGVLNVLIERGFRVSREHAYKIHHHAKGSGQLAKTDRLDASMISHYAECYSEQIEPMGKNALEQKLIKQLTSRRRQLVVMRASEKNRLSQPGLSQVIQTSCKSIIRMLSKEIESVEKKIGEVIKSDERLGKKREILESASGVGARISSVLLSNLPELGQVNRKRIAALVGIAPYQHQSGKFKGQQHIRGGRSEVRAALYLAVLSATKHNPRIKAFYESLLQKGKKKKVALTACMHKLLRILNAMISKQEVFNPILS

SEQ ID NO: 318209 - protein, 434 aa, unidentified
MWKDALLVVFQKASDEFLGGAAMEVVYPRWSGLDVHKRFVVACLSLIQNGERHKEIRQFSTMTSDIQALKEWLKAAGCSHIAMESTGVYWKPIFHVLEGEFEICLVNAQHMKAVPGRKTDVKDAEWIADLLQHGLLKASFIPSSEQQAVRDLTRTRTRLIQERNRLVNRIQKVLEDANIKLASVVSDIMGMTGHAILTALVAGQEDAECLAHLAQGRLIKKQDQLKAALQGKLISHHRVLLGELLQLIATLDRSIAHLDREIAERLRQHDGLIDRIDEVTGLSRRSIEVLLGELGWDMSRFPDAAHAASWVGICPGNHETGGKRLSGRIRQGNRWAKTVLIQAAHAAAQTQTYLGEQYRRIRTRRGAKRAAVAVGHSILVIFYQMVKTGESYHEKGSDYFITAHKHKIQQRLVRQLERLGNTVILQPKGETALA

SEQ ID NO: 318210 - protein, 387 aa, unidentified
MNKSNRVIGLDVHPDSFAGAVLLKGKDAASARVVSTSRRVELPELEKWAARHTGEQDVLVLEASGNAFAVAERLRVLQRQVVILDSHRAGKVGKAYCANDRVDAIKIARIYLTALSPVVWQPDAKTRERREVFSAYQAVVKEATRLKQQLRSMLNEHCVRLESGFRLSHPSAINRLLKLREWTPVRAMLLEQLHSGLVSARVRRTRLRRYMAQEVLDEPELLRLTRLCGISLITLYGLSASIGDIKRFSNSRKLSAYFGLNPSVEQTGNWEGEGALKRHGRGALRALLVQSAKKLLRVNNPLQKWGLAVATRRGRNKAAVAVARKLCVAVWHVMQGHVIGAIERMTTLHTKLHKLATELGLNTIKSQGYETKEAFVQKKLFVLRSYA

SEQ ID NO: 318211 - protein, 353 aa, unidentified
MPPARTVPAPLKYVVGIDIAKDTFVACFGRIDLHQHMSFGKEITFANTLAGFAALLAWASKQQGVDAPCWFVVEATGVYYEELAYFLADQAQALSVLLPNKVKHFAQSTEQKSKTDQLDARLLCRFGLERALPAWQPPTPALRQLRALSRERQSLTQQAARLKTQRHAYEHSYQPDARTLDRLNNRLHLLEQQLHAVDHDLAALLATEPELARKLAHLTSVPGIGLTTALVVVAETNGFVLMENERQLASYAGLDVVQRQSGLSAGATRISRRGNVRLRTALYLPAVSSLRYNPQQIAFYARLRARQPSGKPGVIAVMRKLLLLCYSLWKNDCAYDPHYHPARCPEKEVAPAS

SEQ ID NO: 318212 - protein, 361 aa, unidentified
MCQSRSLEKEKEEPIVENNTLVAVDIAKEVFEVGVSDRPGHVARRRRLARYEFLEFFAQQPQATVVMEACGSAHYWARRIEELGHVVVLLPPQYVRPYVVRNKTDRTDVDGLLEAFRNQQIRPVPIKTVTQQVVGTLHRLRSGWLGDRTRAINALRGLLRELGFFIPEGRKHVLPDAWEIIQDPKSGLPDALKPSLGSLCQEIVSLSTRIEEIEAQLEALAKQIPVVARLRTVPGIGLLTATALYAFIGDISRFPSGRHLASFVGLTPREYSSGLRRRLGRISKRGDIYLRMLLIHGARSVLWHAKRMKNRDRLRAWALRLEKKLGHNKAAVALANKLARITWAVWKNDRSFEPVPELQAA

SEQ ID NO: 318213 - protein, 350 aa, unidentified
MDAIKYGIGIDISKSTFTVSISVLQKHQEIHLIASEEFENVKKGFNQLLRWVKKNILKDVEVFYVMEATGVYYEHLAYHLHHLDKKLHVALPSKIKYYFKSLNVKSKTDLIDSQILAQYACERKHNQWNPPKEVYLRLRALTRYQDQLKRQLVVVKNRLHSKECAYQIPKEIIKQEKRLIKELEKLVESCSEQIVVLIESDEELKAKNEKLLSIKGAGQLTVAVVIAETLGFQNFYNKKQLTSYAGFDVVYRESGTSVYGRTRISKKGNRRIRKALYFPSLVAARYNSSIKTFYERIVEKKKIKKVALTASGRKLLELMYTLWKTDQFYIENYEQTKTAPRLLEAELDIS

SEQ ID NO: 318214 - protein, 355 aa, unidentified
MNAIKYIGMDVHLATISIAVLDGAGKLIMEVTIATQAGALLDFIRGLSGTLYVALEEGTSAHWLYTLLEPQVAKVVVCDPRQNPRRLGEKKSDRLDARKLAELLRLGTLKPVYHGNALGPALKELARSYRTLMSDTTRVMNRLKALYRARGIRCAGTRVYSARFRDQWLAQLREPGARGRAERLYKQLDLLLPLRQEARAALLAESRKHPAQKILRSIPALGPVRVALLLALLQTPYRFRGKRQLWTYAGLGLVTRTSADYQMLDGQVTRSRKPAWVLGLNANHNHALKGLFKDAAVTALTRPGPLKDFYTTRVAQGMEAELARLTLARKIAAIALTLWKKGECFNAEHLKAQAA

SEQ ID NO: 318215 - protein, 340 aa, unidentified
MKHIGMDVHSTTTDACVRNDKGVIILRRRIATKADELEQFMLSIKGHKRVVLEEDQMADWVTRVLIPHADEVIRCQPRYNKLITGSEDKCDKVDAESLSELLYLNRIKSVHHPDEKYRTLREAVRAYWIASRDLTRAKNRVKGWYLFNGVHETGRTIYSLRNRTKHMKALQQQGRNRELAELLYERMDACRQLKAKHVRMLRKVGGPVKDLVQLVTTIPAIGPISGYTLVSLLEDGWRIPNKRKLWRYAGLSLRRYESRDIGFKGASKTGNRILKHVVMSAAITIVARGECNGLLALWERDIRQNVDPKRARRNLARKIVVIAQHLLRSKEEYMDERIEP

SEQ ID NO: 318216 - protein, 343 aa, unidentified
MQDVATVGLDIAKQVFQAHGADASGETLFNTKIKRENVLEFFSKLKPCLIGMESCATSYYWARQLLDFGHDVRLIHTGYVKPFVKRGKTDANDAEAINVALTQKTMRFVPVKTLNQQAAITIFRTRSLFVSQRTQLVNALRGHLAEAGLVAAKGIQNYSKLLKLMESAADTVLPTVMKQALTDICDQIHRLNDLVTKLDKEIERRVQHDENACRLLTIPGVGPKTAMCVIATIPDIHRFPSGRHFSSWLGLTPRTHSSGGRSVLRRITKMGNSELRRMLYLGGTVIMMRDSKTPIGRWAARLRARRPYKVAVIAVANRIARIIWALLTNGGVYDPTYGREASA

SEQ ID NO: 318217 - protein, 300 aa, unidentified
MDSLDVMVLPERRGFSVDNNAAGWTELIERLHGSPVAAIGIEPSGGYERGVIRALLAASLSVRRINPNKLRQFARARGVLAKNDRLDARLIAEYVAIMPTRIVQRDVAAERLAEVVTMRRQLCDERVTVENQAAHVEDAMLRRLNKRRLARLEADISLLDKRLAEMVAADPILAQRYELLTSMPGVGPVLAFTLIALLPELGQMSRKQIAALVGLAPYDFDSGKLRGHRSIYGGRMPVRNVLYMAALSACRYNPALKVFHNRLAAADKKSKVVIVAVMRKMITTLNAMLRDGAEWQPKSA

SEQ ID NO: 318218 - protein, 317 aa, unidentified
MIVIDIDPHKSTHTATALDPATNSDVGSLRIEASITEYQRLIVWAKAWPDRAWANEDADGLGHHLALWLLALGEVVLDIPTTATARVRELSRGRRKNDRIDAAAAASVAALQGDARQVYPDTTADSLALLDERRVNLSHNRTRTVNQLHALLRELMVGGAPTSLTPLSATSALRGLRARTGPDRIRVELAKELIADVRRFDEHLAANAAKMTALLDEHGTTLREIDGIGPILAARLLGRTGSPSRFASAAAYANYTGTAPVQIASADASRHRLGSPIGTGMMCDCEDITGIPTPRSARRVLSTCSRWAIRSATDRFR

SEQ ID NO: 318219 - protein, 317 aa, unidentified
MSNPDSFIGVDVAKAWLDVAWLDGRTLRVDHTPEAIAGLLEQLRSQPPTLVVMEATGGLETELASALAAAGIALAVVNPRQVRDYAKACGRLAKTDRIDALVLAAFAAAIRPQVRALPDEHTRALGDLLARRRQLVEMRVQEKLRLQQASAVQRTSLREHIAWLDERIGRLDIGLTHALRSSPAWCDKDDLLKAIPGVGSLTRATMFALLPELGSLNRRQIAALVGVAPFNRDSGKHQGGRVIWGGRAQVRRTLYMAVVAGLRCNPVVRSFYGRLRGQGKPAKVAITACMRKLLTIMNAMLKHHSHWMPSLDMQHSC

SEQ ID NO: 318220 - protein, 424 aa, unidentified
MKKNHPSKIDQEEIIYERCAGIDVHKKMIMVCLRIGRKTQVKEFGTLTCDLHEMAAWLKENDVQMVAMESTGCYWKPLYNVFEQEGIPAMVVNAGHMKSVPGRKTDVKDAEWIAKLLSQGLLKASFIPDREQRELRELTRFRKSQIEERARSLNRLQKMLEGANIKLSSWVSNIGGKSATQLLKLIIGKEEFTAHEVESLRHFNMKASTDELYKSLEGIVTPIQRELFTHIMNVINEQTAQIEKTERLILGYMTQPYQEAANAIDAIPGIGQISAQQIIAEIGIDMNRFPSAAHLCNWAGICPGNNESASKRKSGKTNYANKTLKSTLTQCAQAVKKNKDSFFYAQYQRLVVRRGKNKATLAVAHSLLIAIYHVLSGKSFCDLGADYYNRFNKEKKINSYVKQLSKLGVNVPDDVIRVALEKTA

SEQ ID NO: 318221 - protein, 343 aa, unidentified
MKLSRVGVDLAKNVYQLHGVDRHGKTMLKRRLKRHQWFKVLLDKTEPGCVIGMEACAGAHHWGRELQSRGYTVKLIPPQFVKPYVKSNKSDAKDAEAICEAMSRPNMRFVTVKRVEQQDIQATHRIRAELMTQRTAKANQIRGLVAEYGLVAAKQLSSLRAAIPCWLEDAENGLTGDFRRLLHGVWEDLRLLDDRVGEMDKTIKRLADNNEDCVRLQQLRGVGPMISTAMIATVGDARQYHKSRQMAAAIGITPKQHSSGDKHRLLGISKRGDVYLRTLMIHGARAVVARAIHKDDRLSRWVTNIANKKHPNVAAVALANKTARMAWAMLRHETDYDPDYAIS

SEQ ID NO: 318222 - protein, 400 aa, unidentified
MRTVFGIDVSKASSEVAILVNGEKVYAYTMPNDIIGFSRLLEDLKTVSNPEIIFEATGVYSRRLQAFLEEYSYDYTRLNPLEAKKQLDGLRVRKTDKIDAEKLASSQFVLNRKPTYVQEEVYQNLHDLSRFYQNLTEDIVRMKNRLHKVLQVAFPEIENLLSTPTGEQYWNLVSIFPTKHWVLELSEVELKEAIRNSTSKRISENRVGNLTEKLVGLAKQSYSGISKTSPMVEEVKYDAQELIRLTNRREQVLQQLIALAEPLPEYEILLSIPGIAETTATSIIGELGDIRRFKSANQINAFIGIDLKHYESGDFLGQEHITKRGNPYARKILYKCIHNIVSASHTNPCHIADFYEKRKRQSQITSTKPHTIASIHRLIRTMYYLIMHNKLYDYTLAQSH

SEQ ID NO: 318223 - protein, 339 aa, unidentified
MKYTPVGVDIAKHLIQVHFINEHTGEVVDKQLRSRDFLTFFSNREPCLIGMEACGGSQHWARELTKLGHKVRLLQARFVKAFVMGNKNDVMDARAIWMAVQQPGKEIAVKTEEQQSVLVLHRTRRQLVKFRTAQINSLHGTLLEFGESIHKGRAAMEREFPEALERMKERLPPYLITVLEDQYNRLSELDSLIDDIEKQLTSVARQNETCKRLLDIPGIGPLIATAAVATMGEASAFKSGREFAAYVGLVPKQTGSGGKIRLLGISKRGDTYLRTLFIHGARAAALLTREPSPWITELKKRRPASVAIVAMANKLVRTVWAIAAYGRKYDKNHVSIRPY

SEQ ID NO: 318224 - protein, 410 aa, unidentified
MEVFLEHCAGLDVHQASVVCCVLIGTPERKPQKLLRTFGTTTRELEALRAWLAEHGVTHVGMESTGVYWKPVYAVLEGHFDLTVGNAHHIKNVPGRKTDVKDAEWIAQLVRHGLVAKSFVPPPAIRDLRELVRHRRTLIETRTAVRNRVLKLLEGANIKLSGVASDVFGVSGMAMLEALAAGTNNASEMAGLARGRMRRKHAALEAALDGRMREHQCFLLAMQLRSLEAIDQDLEALDARIETQLEPYQAQHRLLMQIPGVDWVTAAAIIAEIGTDMDVFATAQRLAAWAGVAPGNYESAGKQKGAGTRRGNVFLKSALFAATSAAVRTKGSYYRDKYNRLRARRGPVRAIMAIAHKLLIAAFHMLSTGEDFRDLGEGYLDQVARKRSTTKLVQRLSNLGYDVMLVPKAA

SEQ ID NO: 318225 - protein, 342 aa, unidentified
MSNVTIAAIDLGKNTFHLHAQDDRGHELCRKKFTRVALIQYLAKLESCTVVMEACGGAHFMAQEVARLGHTPKLIAPHLVRPYVKSNKNDFADAEAICEAATRPTMRFVPPKNQAQQALAMLNSIRDSFIKDRTATVNRIHAALLEVGISLTPGFKSIRNLPALLEASSVPASFKNPLMRLHKLFNYLDEEVKAQDKEVESQAAEDDLASRLMTMPCVGPITSSALAAELGDGKQFKCGRDYSASIGLVPKQHSTGGKTVLLGISKRGDRNQRRLLIQCARVYLIQLDRQKGRLADWVRHLVASRRHSNLVVCALANKLARIAWAIAAHHCEFDAGPSAMDA

SEQ ID NO: 318226 - protein, 463 aa, unidentified
MRTDKKLWRNRKARKELARRLQSENPGLEVVHPHAAGIDVGNSAHYVAVRPDRDAQPVRRFECFTADLHRLADWLDSCGVKTVALQSTGVYWIPLYDILEERGFEVYLVNAQHTKNLPGRKSDVQESQWLLKLHTYGLLNNSFQPPSKIRTLRTYWRQRLQHVTGAATCVQRMQKALTQMNIQLANVISDLSGVTGQLIVRAIIDGQRDPWKLAELSHPRIQASRAEIAKSLEGTWRPELIFVLQQELEMYDTYQRRIAECDQQLQKHLAAFANTVTPPPKEELPPKKKKKQNKNNPHFHLADELQRIAGVDLTRIDGVDVFVAQTVISEVGLDMGRWKTEAHFASWLGLCPDNRISGDKVLARGTRHVLNRAATALRLGASTLLKSQTYLGAQYRRLRTKLGAPKAITAMAHRLARLLYRMLKYGQHYVDKGAEYYERRNRQQQVEFLRKKAARLGLQIIPA

SEQ ID NO: 318227 - protein, 343 aa, unidentified
MKIIRVGVDLAKSVFQVHGVDRDEKCVWRRKLSRNNWLEILLENIEPGCEIGMEACGSAHHWARKLEALGYTVKLLAPQFVKPYVKSNKNDANDAEAICEAMSRPNMRFVSVKTVDQQDTQAVHRIRSGLMEQRKAKANQVRGLASEYGMVAPKELLHLRRAIPCWLEDAENGLSGRFRKLLVGMWHDLLRLDDRIAELDREIALIAAADPVAKRLQQLRGVGPMIATALLATVGDAHQFANGRQMAASLGLTPKQNSSGGKERLLGISKRGDAYVRCLLVHGARAMIRTAKAKDDRLSQWVTRIATTRHPNVAAVAMANKTARIAWAMIRNGTDYQPELVAG

SEQ ID NO: 318228 - protein, 388 aa, unidentified
MPQPIDLSRSLTVLDPDSTLVAVIEMSQSSWLVAGIVPGIERQPLKKLEPDAEALLALLHRWRDEGVRAGKTIKRLSVAYEAGRDGFWLARWLRTRGVEAHVIHPASVAVSREHRRAKTDRLDTELLKRAFLGWLRGERNHCSMAAVPTLDEEDAKRPNRERESLVGERTRIVNRMKSVLVRLGIRGFKPTLRKSSERLEALRMPEGSPLPPNTLAELRRDMARLRLVREQIKEIEEGRLRILEATSRTQGRHAMVRLLARVIGIGVETADMLVHEILSRTLRDRKAVARYAGLTGSPDESGGRRREKGLARAGNARVRRGMIQLAWRFLQFQKESALANWYRARTTDGRSGTRKTMIVALARKLLIALWRMATMGELPEGVRLHPAG

SEQ ID NO: 318229 - protein, 354 aa, unidentified
MKTVSLDVHTEASQLTVVSAEGEVLLEMKVATNAEELRRVVGAIAGPKRVVFEEGPLSAMLHEALAPLAEEVISCDPSHNALIALAEDSNDERDARRLATLARLGAVRPVYAPDASHRRLRSLLRHDRSLGESMTGTKNRIKALARRQGLRCRGASVYQSAGRAEALGRLSDAAARWQMQSLYRQLDALRRERVGAHRVIEKAGRPFRALLSRLTTIPGVGPVTARTLVAWLADPGRFRSWQALNAYAGLGLGQGWTNWQPTGRARASRRGNREVKRVLFIAAEAAIRGDNALARRYQARRACGWDPSKAIRDTARTLLKIVEALWRKKSRYDDSQVRVPTVTPDPVRRTKARA

SEQ ID NO: 318230 - protein, 341 aa, unidentified
MMGNVTTIGLDIAKSVFQIHGVDAASEVVVRRKLTRGRVLAFFESLPRCLVGIEACSSSHYWARELTARGHDVRLLPAQYVKPYLKRQKNDAADAEAICEAVTRPTMRFVPVKSPEQQSVMMLHRVRLMLNRQRTQISNALRAHLSEFGIVAPIGRNGIEQLLVVVNDENEIRIPADARLCLRMLEAQLRVVKKQILENDRRVRANARETELGRRLMEIPGVGPLLASAFVATVADVHAFKSGRCLSAWIGLVPKQNSSGGKEKLGSISKAGNRYLRQLLVVGAMAVIRYAERNGTRRPWLVQLMARRTAKVAAVALANKTTRMVWALMTNGERYREPVIA

SEQ ID NO: 318231 - protein, 347 aa, unidentified
MSTSTDHSRTDLPSDPGSPGSRMYAGIDVSKAKLDLARSGSGSGSGSDAVETFANDAAGVGRVVEVLAALGPALSVVVVESTGGLERPLVEALLDAGLPVALVQPGRVRYFAKGLGILAKTDRIDALVLRRFGELAAPRLLERRSKNQAELRDLVACRRQLVQTRAQQYNRRSSTFSKAALRSIDAVVGALDRQVESLDRQIRRLLEADDDFKHLDGLLRGVPGVGPALSATIAAELRELGRVDRQRACALAGVAPFNDDSGAVKGKRSIRGGRTALRCVLYMAALSAMRSNPVIRAFAARLKAGGKAGKVVVTACMRKLLTLINAMLRDGLTWDQLDIVKKLATNG

SEQ ID NO: 318232 - protein, 372 aa, unidentified
MHQSSTLYVGLDVHKESIAVAYVAQDHGAEVLSLGTIGTRQCDIDKLIRQLQSKSKQLVFVYEAGPCGYWLYRYLTKKGYVCWVVAPSLIPKKPGDRVKTDRRDAMQLARLMRSGDLTPVYVPAIDDEAIRDLSRAREDTLRDLKAAKLRLKACLLRHNIRYTGRANWSPAHLRWLSEVICPTPAQQIVFQEDVQTVTEQTERLGRLALELHEQVKTWRFAPVVEALQALRGVQFTVAVTTVAELGDLTRFANPRQLMHDLGLTPSEYSSGARRQQGSITKTGHTHARRALVEGAWAYRYPAKVSRHLQLRLEKLPTAIQAISWKAQVRLCKRYRQLMAKGKNANQVVVAIARELSAFMWAIAKQVARPPQA

SEQ ID NO: 318233 - protein, 402 aa, unidentified
MGMTLGIDLACRAAHVASLAGPDGRLVWRGRKFFSRTVELERLWADIGRDPGELTVVMEPTRNAWIPVAAWFRRRGVKVVMVPTTQSADLREYFSKHTKNDRLDSVVLARLPLLHPEGLREHVGDGPADPLRRVVKQRSSIAKRRTAVFNRLDAQLELLGPGWYDAQGTDYGKATLAFLARYADPTVVIRLGQARLARFLRRYSRGHWREGKAAELIAAAQESLRLWDGDGIDFAELAADIAVEAEQAIALTAQISDLDERIANLYAEADPAGIVRSAPGVGPVLAGIIAGRLGDPHRFTSLAAVRSYSGLVPKVSQSGTSERTGGLTKAGDPLLREAVWMAADQARKLDPQLAAKYARLMAADHRHHDSAVCHLATILLTRIATCWRTGQPYQICDVDGTP

SEQ ID NO: 318234 - protein, 420 aa, unidentified
MPNIEIGVDFMVKENFIYVGIDLHKETHTAVMIDCYNQKLGEITFPNRPADFPKLVTKVKKCNTDAKEVVYGLENAYGYGRPLAVWLIDKGYFVKDVNTAISHRQAKHRGAMYRKSDSDDAEAIALATLNMLDKLPDACPNDAYWSLGQLVHRRDNIMKQRTRLVNQLHEQLCIAYPSYKQFFNDISRPTALYFWEHYPSRKYLKGKSVEDLRTELVPVSHNRCSTKNCEKILDAVASDKVKNNAYQDARDMVTLSIVSDLQHYDSQLAEVDKMLEQMYKMLGCTLTTIPGVNVITAVKILAEIGDIKRFSNANKLAQFAGIAPLHLSSSGKGKNVATKQGNRRLQATIYFLAIQMVQVSSKGTPRNSVVRAYYEKRKAEGKTSQQALICISRRLISIIYGMLKNGTEYRMPVVESAGEK

SEQ ID NO: 318235 - protein, 345 aa, unidentified
MNISRVGVDIAKSVFHVHGVDRHDQVQWRGKYSRDKWLDAIANRVPVGAEIGMEACASAHHWARELQARGYSVKLIAAQFVKPYVKSNKNDRVDAEAICEAMGRPNMRFVAVKTVGQQDIQAAHRIREELVHQRTAKANQIRGLVGEYGIVAPVGIGKLRAALPRWLEDAENGLTDAFRVLLAGLAEDLRHLDDRIETVTASIEHQVQTDPVAKRLMTLRGVGPLTASALSGALGDGQAFRRGRDFAASLGLTPRQHSTGGRDRLLGISKRGDSYLRKLLVHGARAVLRHAEGKDDGLSDWVRRLSERKHVNVAIVALANKTARIAWAITHRDVAYDPALASQAA

SEQ ID NO: 318236 - protein, 410 aa, unidentified
MEVLYHNCAGLDVHKETVVACRRNVIAGKVVHEVRTFKTTTSDLLALSEWLGSLGCTHIVMEATGVYWKPVWNILSDGDFALILANAAHVKNVPGRKTDVNDATWLADLLAHGLIRGSFVPDTQTQEQRGLLRTRKQLTRERTSHVQRLQKTLEEANIKLDSVISDIIGTSGRAMIEALIAGETNPAKLAALAHRRIKASPATLADALRGRVTKHHRFLLRLHLAQIDALDLAIAEIDTAVEANLDPFRPLIPVLTSIPGIGELAARVLLAEIGIDMSRFPTAGHLISWAGLCPKNDESAGKRRSNRMRKGAPWLKTTLIQCAWAGARKKGSYLQAQFHRLRARRGAKKAIGAVAASMLTAAYHMIANGTFYQDIGADHFERRAKPTQIKRLVAKLQSLGYEVEVKPLAA

SEQ ID NO: 318237 - protein, 378 aa, unidentified
MSKNNTRFVGLDVHGETIAVAVADPGGEVRSVGTIPNRPEAVRRLVRKLGEPETLRVCYEAGPCGYVLYWQLTELGVPCVVVAPTLVPVKTGDRVKTDRRDAEKLARCHRAGDLTAVWVPDAAHEALRDLVRAREAAKKDQLRARHRLLKFLLRHGRRRPENVTVWTQKHLLWVKGQCFEQAASQATFLDYLHEVDHAADRVERLEKALDEVLETIAPEMKVVIEALQSLRGVRKLSAATIVAEVGPLSRFNHPRKLMGYSGTVSSEWSSGAKTSRGAITKAGNAHLRRIVVEAAWAYRHRPAISKELRRRQKMASEKVKGIAWKAQHRLTERFRKMVGRGKPNQKVATAVARELLGFIWAIGIQAEREHAAGQLHAA

SEQ ID NO: 318238 - protein, 408 aa, unidentified
MESQIIFGIDVSSKSSTVCVVNDRIKQGESFRISNDSFGYQKLYEQLNQYLITPLVVFEATGVYSLSLQAFLEDYHIKYLKLNPLKAKKLMDNNLRHNKTDKVDAYRLALIQFNAPQKLRDPQPREYHELQNASRYYEELTRSIVTTKNQLHRNLQSTFPQIEEILSHPSGRIYWALVSLFPHAGYVLEKNETQVTQMLNSISGIRQQRARYLTTRLYAFAREAYPYDSKDSIIVRAIQRNISNLFSLQQERDYVINYMEKLAKAVNARALSIYLSIPGVARITAVRLVAELGDLRRFSTSAQIDAFVGIDPGRYQSGEKDSSLGITKHGNHIARKILYRVIIQMETVKATQPCHITDYYDKKKRSSNSQGYKKIAIASVHKLIRTMFALIKHDQLYDYNIATKNKRL

SEQ ID NO: 318239 - protein, 311 aa, unidentified
MANIICGVDVSLKTLDGRISGSGLELSVRRDPEGIAKLAAFCVEHGVELVVMEATGGYEKLPFGLLWEAGVPCAIANARSVRRFAEAMGVLEKTDRLDAGIIADYARAKGLAAQSPESRIQERLRALVTRLRQLTQLKVAQSNQRRLVQEPEVLAAIDEMLALIGRQSRALELQIADLLGADPLWRALDAALREIKGVAGRTVARLMAEMPEIGTLSNKAVAKLAGLAPIARDSGQRQGKRPIRGGRAHVRSILVVIAGVVARHDPDLAAFHQRLSLAGKPKMAVRVAVARKLLVRLNAKARDARAAFVPA

SEQ ID NO: 318240 - protein, 379 aa, unidentified
MTTSPAATCGEQSLYCAPELSKNSWLLAIQVPGRDNPSLHPIQGGDADRLMAKLDAARERLSKLSGRVPKVILCYEAGYDGFWLARFLGQRGIECLVMEPASLQVNRKARRVKTDRIDVEKLLHALIAWCRGERHVCSMVVIPSVEEEDLRRSHRERDRLVRERTAHINRIKGLLFGQGIRGINVKRHYKTLVPADLVTRDGRPLPERLAREIAREIERLALLQVQLREIERERDLAPTSCLAVERKRHQLLRLNGIGVVSASILTREVYYRRFVNRRQVASYFGMTPSAYDSGESRRSQGISKAGNKLARTVMIQTAWLWLRHQPESDLSKWFHRRTEGQSKRIRCVMIVALARKLAIALWRYLETGLVPKGAVLVVE

SEQ ID NO: 318241 - protein, 443 aa, unidentified
MFQRTIGIDLAIRGDHVAQIFDHGQPAGTPIRFRLTPQSLRSFLDKVRAGLPNGAQVQAVLEPTGMAWFPVAFWLMRAGIGVIRVKGQRVKALRRYLSEYAKTDPSDAYVLGAIANFGGPTLEPVFVPGPEQHTLRRLTKQRERYQDALCASKRRLLDLIRWACPALEAVLPDLRTRLARAVLSQYFDPRRVLATKPGSLIRFIARHAAGNQPRRGPFVEDLAGHLRAAAHETLALVGEAVDFDALQFEVGQEIAQLELLDQHIGELSSRIDELYTRLHPSDALRTIPGIGTQLAPVLFALLHTPQHFRNERQVRGFCGLFPKRRASGGVERPGQKVTKSGHDRLKRALYLAADAARRVDPGLAEVYWRLMVHKGHHHKQALCAVATRLINRICAVFRTGRAYELRDPEGRSISVTEGRQIIAARFTVPEDIRRGRRQQRAAA

SEQ ID NO: 318242 - protein, 342 aa, unidentified
MVHVGLDLSRTRLDVHVMDESGAPLAVTTALPEAGGLAALVSRIGAEFGGPVYAAIESMNGARFVHDQLELAGWQVEIADAQKVKGLAPLACKTDKIDAWVLAELSRRDLVPAIWLPTPTVRAERERARWRLHLVRHRTALKNRIHATLLAFGHPCPVSDLFGVGGRELLAGLALPEPWAADTTAALHLIDELDAEIADCEHALRRAGADHRYVPLLMTAPGIGWVLGYTIAAEIGDIARFASPTKLAGYTGLCPRVYQSGGKDHRGPLAKNGPKYLRWALIEAATHASRHPVYAERYRRTKTRLGRQRGPKIAQVDLARRLSEAIWHMLSTNKPFAPAGAA

SEQ ID NO: 318243 - protein, 499 aa, unidentified
MSSRIVPGVLRSVIEGAFVKQNHRRCCGIDVHKKSVTVCVLPGVGQAHIEVKKRKFRTFTRDLKQLRAWLKHCQVTEIALESTGQYWRSLWNLLEGEFEKLILVNPQHIKGLNGYKTDPKDAQWIADLLEGGKLKGSWVPERPIRELRDLTRQRVHVLEDLNRAKNRIEQLCQAGNIKVSSVATDLFGVSGRKMLKAIIEGKRDAGWMADYARGSLRGKRRELELALEGTFSDQQRWLLEKELRQVEWLEKQVEALEEEIERRVAEYAEPIRRLETIPGIDRKTAWTIVAEVGIDMRVYGDAKHLASWAGLCPGNRESAGKRMSGRTRKANRYIKRAMCQAAWAASHTKQTYLAAFYRRMAIRKGAPKAVMALAHHMLTVVYQVLSEGAEYIEMGGDYYDQRNKPRTVSRLLGRLARLGYYVSISPIGPASPGESTTAVDAPVQVTPTMPLPAADAATTGQRRRGRPCKCEERGIICKHRGTQEVNSLIQQPSSPGRFS

SEQ ID NO: 318244 - protein, 438 aa, unidentified
MSALPVIDPKAAAIDIGSEQMHVSIAGGEPKVFGSTTAQLHALREYLLSQGVSSVAMEATGVYWLCPYEVLEKAGLQVVMVNGKYVKNLPGRKTDMKDCQWQATLHAHGLLKGGFVPQEHIRRLQDYQRLRADHIAEAASCEQHMQKALERMNIKLHDVISDLTGVSGLKVVRAILQGERNPVALLALCDCQIQRKKAERVCESLVGTWKEEHLFALRQALAAWEFYRGQIAECDQALEQVLKAVTDDKPAPADKLPSWGRRSGGNSPQIPQLREMLWKLCGGKDPTAIPGISDYTLLQLVAETGTDLSCHWKTDKQFTAWAGLAPGARQSGKRRGSQKRSRNRAGRIFCLIARAVGRAADKALGGFYRRLRARRGGLVANLALARKLAQMFWWAMVHGLAYVEHGIKKYEEKVQKTEQAWLTKLARKHGMVLQPAPA

SEQ ID NO: 318245 - protein, 320 aa, unidentified
MTYIGIDVSKDSFVAAYPTKSGYTTKTFPNTTSGVRKFINSLPEECHCVMEATGNYSMLLLYLLQESNKPVSMENPQKIKHFARAMLSTTKTDDIDAKLIAMYGEKMNPDPYKIPSESIILLKQKRTVLRQLKKQLTAMINLQHSLSVLPKQDPTAKVATEQTIKFLRKQISKIEEEITNLSNKEFKRQMELLTSIKGIGENIASALIMATGGFTYFSNAKQISRFLGLCPTYQQSGTSVNIKGHINRNGDTHLRSQLYIAAMSSLRCNAACKETFERLIAKGKSGKVAIIAVANKLIRQMFAIVTNNRPYINGYVSSLA

SEQ ID NO: 318246 - protein, 316 aa, unidentified
MDDKHTVQGVDVAKAELVIGHGESETLLRIENTPPAIAAWLAQLPTGSWVAMEASGHYHQMLAHMAHAAGMVVYVLNPQLIKHYGRAVGMRGKTDRLDAQLIARYVLREHSKLRIWEPPSPGADALSRLLVRRQALVNARQMLAQSLSGLTELKAPRQALMASFKRMLAQVELLIRTEIARVPAMAALHRRLVSIVGIGPIVAAQLVASLSALRFTRADSFIAYTGLDPRPDDSGQRRGRRRLSKHGHALLRCLLYNAGMAAARSKLFKPTYLQLRARGLQSTEAIVILARKLARIAFALYQSGTTFDAQRHVKPA

SEQ ID NO: 318247 - protein, 347 aa, unidentified
MRFYEGQHRFYCGIDLHSRTMCLCILDQAGKVLVHDDGPCDPERFLRLIEPYRDDLVVACECTFHWYWLADLCAEHQIAFVLGHALYMKAIHGGKKKNDKIDAQKIALLLKGGMLPQAYVYPRGMRETRDLLRRRMYLVHHRAELLTHVANTNSQYNLPPFPKKLCYKANRGGVAEQFTNPCVAKSVAIDLELLEHYDRLITELELYLVRHAKIDDAYAFHLLRSVPGVGKVLALVLLYEIHRIERFAAAGEFLSYARLVAGRGSSAGKPKGVMGRKIGNAHLKWAFSEATCLLIRQSPQAKRFVARQQKKHGKARALAILAARLGRAVFLILKRKQPFDVQRFFAS

SEQ ID NO: 318248 - protein, 352 aa, unidentified
MNNPIVVFNPCGIEVSYLTLVVALRGHDHDEPLREFPNTRAGHQAVLRWLERSARPVRVVLESTGLYGLDLALTLHQAGVAVMVANPRAVRHFAQALLQRSKNDQLDAVVLCEFAARLPFQAWRPPSASALKLVAVARRLEALTDMMAAEKNRAHAASLSEVLPVIIRRDIQRSIQTQQRALDRLSRAAQEFILADPELARRYELLLSIPGFGVTSAVHILAELTLLPADLDVRQWVAYAGLDPREYASGTSVHKKVRISKAGNKHLRRALYMPALVAVQHQPQVRAFYEHLLARGKTKMQALVATMRKLLHAVYGMFKHDQLFDGQKVYASTSTTLAPPPSIPEEVACSQT

SEQ ID NO: 318249 - protein, 361 aa, unidentified
MSFKIFKFNCCGLDVHKTWIYACIGITDSNNRTEYKQARFSSFTKGLNELCDWLAKYNCKDVCMESTGKYWIPVFNILEQHSFWVTLSHPKYTKPMKGNKTDRKDAKWICDLYMCGMVKPSFIPPADIRELRDLVRYRFKLTCMITGEKNRAQNCLTVSNLKLDDVFSDVFGKSSRSITEHILQHPGEKFDIAPFVDSRCKTPITEIQAAVDGAISKEQVVKLRQCLDHIDELNKHISEVEQEILRLSDKYEAALNLIRTVPGFNKNPLTAIQVLSEIGGDMSVFPTAKHLVSWAGCCPRNDQSNQKIKSTRISRAGSYFKPVLVQVANALIKSKKHSEFTSRYKRIKARRGHKKAVIAAV

SEQ ID NO: 318250 - protein, 338 aa, unidentified
MHATTIAVDLAKSVFQVSVANQADRIVERKRLTRSQFHRYIAQQSPSLIVMEACATSHYWSQVAQQYGHTPKLLHPYYVRPYVRRNKTDAADADALVRASRDPELLPIPVKQPEQQALQGLHRIRQQLIQSRTSRINLARALLAEFGISLKRGAGGISARLQEQAEQLPISLQASFSEVVIDINDLKTRITLIDNRLEAITANSEIAQRLLSIPGVGVITATALIASVPHIRMFKKARQFASWLGVTPRENSSGNTRRLGRISKQGNEYLRTLLVHGARSVMLQAHRRDNARQPLTSMQRWIISLESVKKRNVVTVAVANKLARTIWATWVFEKDYTP

SEQ ID NO: 318251 - protein, 343 aa, unidentified
MNEISMIGFDVAKNVFQVHGVDGSGKEVLRKQLRRKAVEKFFAELPPCTVGMEACGSAHHWARVIGRYGHDVKLMPPAYVKPYVKRNKNDGRDAEAICEAVSRPTMRFVAVKSVEQQAMLSVHTTRALLVKQRTMVANALRAQLSELGIVAAQGREGLHELMTRLEAPSEEIPEMMRSALLILVEQWHALDAKERVLEKQIVKAVRCDQEARQLMAVPSVGPIIASAVLAKVPDARVFRSGRDFAAWVGITGRDHGTGGKHRPGRISKQGDRTLRTLLINGASAYLRQQKRRGVSDPWLRELLARRPYKVAMVAFAAKTARIIWAMLAKGEAYRDRTSAPAAA

SEQ ID NO: 318252 - protein, 345 aa, unidentified
MSIVRTVIGGVDTHADFHVAAAIDGNGGLLDVESFPADSAGYEALLGWLVGFGAVTLVGVEGTGSWGVGLARFLRDQDVVVVEVDRPNRQARRKVGKSDPTDAVAAARGALSGAAAVIPKTRNGPVEQMRVLLVARRSARRQRIQTLNQLRHLVFTAPEEIRVRFKDRYKTGLVTEAAAMRPRKGSDPVTYTTNLVIRNLARRIQGLNAEMASIDDLLTELVAATAPSLIALYGAGTDTAASLLVTAGDNPDRLGSEPSWAHLCGVAPLPAGSGKTSGRYRLNRGGDRNANAALYRIVLTRMSSDEETRRYVARRRDEGLSTAEIMRCLKRYVARQVFRQLPRAA

SEQ ID NO: 318253 - protein, 323 aa, unidentified
MKFIGIDIAKDTFVAAYPQLHDYKTQSFNNDLKGVKKFISSITKTEYHCILEATGNYGTLLLYLLCNHEIAVSLVNPKQIKHFARMMMTVTKTDHVDAKLIAQYGEKMTPATFKMPSDAIIMMKQRGVVLRQLKKQLTSLTNLRGSFDVLPQTDKNSLSVLNKTIKFVHNQILELQEDLVTIANEQFSKQIRSLTSIKGIGLTLATSLIISTGGFTQFENAKQLSRYIGICPSYQQSGSSINIKGTINRNGDSDLRSLLYVASWSAIRYNQACKESYQRLKAKGKPSKVALIAVANKLVRQAFAICKTESFYVNEYKYKLKII

SEQ ID NO: 318254 - protein, 345 aa, unidentified
MKIIGCDLHTRYQQIAMLDQETGELVERRLEHESGEARAFYAALTGPVRVGIEATGHTRWFERMLAEMGHELWIGDAAQIRASVVRKQKTDARDAAHVLEMLLSGRFPRIWRPTMAERDLRQLVWHRQKLVWMRNAVGNQLHALAMGEGVCRKKKLFTKKGRAELESLALDPWASRRRQELLQMLDQFDESLKGLDCAVAEQAEQNAAAVLLMTHPGVGPVTSLAFVLTIGPAARFQRSKQVVSYLGLNPREHSSGGKQRLGSISKQGNPMMRSLLVEAGHSAARLDAELKQDYQRLKVRRGSGVAKVAIARKLAVRMYWMLRSPASYAQLVRMQGSPRGTLVGQ

SEQ ID NO: 318255 - protein, 343 aa, unidentified
MDHFAGLDVSVKETSICIVDDTGRIVREVKVASEPEALLQVLGNPIYRFKRIGLEAGPLSQWLFSALAEAGSPVICVETRHMRAVLQAQINKTDRNDARGMAQMMRAGLYRPVHVKTLRSQKLRMLLTHRKLLQSKAIAIDNDLRGTLRNFGLKVGMVGTVKFEARIKELVENLPDLAVLVEPLLMVRRVLREQFSILHRRLLAIVRDDEVCRRLMTVPGVGPVVALTYRATVDVPARFRNSKAVGAVFGLTPSKYQSGEINRTGAISKCGDEMMRVMLYEAAQILLVRLAKWSWLKAWAMKIARHRGMKKAIVALARRLAVIMHRIWVDGTEFRWTREAAVA

SEQ ID NO: 318256 - protein, 322 aa, unidentified
MEAVYAGIDISKQWLDVGLWPGAETFRLSNDASGVAELAERLRALGSRAVVLESTGGWEVLAASELHAAGLTVAVVNPRQVREFARSLGTLGKTDRLDAVVLAQFAQSSHSNGRLVARRLADEAERELKALVVRRRQLVGMLVAETNRRERAPKVVRQSIVQTIKGLKRAVAQVEQQLKQVLAGSPPQQRKATLLTAVPGVGPQLTFTLIAELPELGQLGRRQIASLVGVAPHPYESGKFKGRRMIWGGRASVRTMLYMAALSAVRHNPLLRTSYQALLARGKSKKLALVACMRKLLTILNAIARDSSPWNPSHHLDFLHSR

SEQ ID NO: 318257 - protein, 408 aa, unidentified
MEVLHQRCAGLDVHKATVVSCLRVQEGGRVRREVRRWGTTTAELLALGDWLRQAGCTHVAMEATGIYWKPVWHLLEGELELLLANPAHIRNVPGRKSDVNDATWIADLLAHGLMRASLVPPGPIQELRDLTRTRKQLMREIGQHKQRIQKVLEDANVKLASVVSDVFGESGRRMLQALSAGATDAWQLAALRDGRLTASHETLAAALHGKVTAHHRFLLSQHLGTIAHLEQTVAAFETQIEALLAPFHTAVERLRTVPGISATAAHVIIAEIGLDMSRFATAGHLRSWAGLCPQLNESAGKVMSRRLRHGAPWLKTVLVQCAWAATRNKNSYLHAQFVRLRARRGPQKAIIAVAASILTVVYHLLRNQAVYRDLGALYFVRTDKERTAQRLARRIKELGYEVEIRKAA

SEQ ID NO: 318258 - protein, 476 aa, unidentified
MSKRVQKRQERKRVQPKVDWKALAVVHPDAAGIDIGGSEHWVAISPDRDEQPVRCFDCFTADLEQMADWLAARGVRSVAMQSTGVYWIPVFEVLQQRGMEVYLVNARHTKNLPGRKSDIAECQWLLKLHTFGLLQNSFQPSDEIRAVRTLWRYRGGLVGQASSTIQRMQKALIEMNIQLSNVLSDLSGVSGMAIVEAILEGKRDPQELAALADPQVKASQEVIAKSLHGNWRSELLFVLGQEMDSYRALRKRIAECDGKVQQHLQRMGSRVDLSVQPIGSRPKGKRARGNAPQTFDLRSELYRLTGVDWSQVDGIDVQVAQTVIAEVGTDLKAFPSEKHFANWLGLCPTNDSSGGRVLKRRTPKVVNRAKTAFRQAASTLIRSHSYLGAQYRRLRTRLGAPKAITAMARKLACLFYRLLTKGQPYVDRGAHYYESHHREQQIRSLIKRARQLGLQVLSGNGQPLGLQVPSPEGQSA

SEQ ID NO: 318259 - protein, 381 aa, unidentified
MTTAVTHHEQRNPNEATLFVAFELSEKTWKLGFTTGHGQKPRERTVTARHQERVLEEIAHAKRRLGLPDTAPVVSCYEAGREGFWLHRFLQGHGITNHVVDSSSIEVNRRRRRAKSDGLDVRKLLSMLIRYHHGERQVWQVVKVPSVEAEDQRHLHRDLETLKQERASTMTRIEGLLSSQGLRVTSLTKLPEQLEALRLWDGSPMPPGLRRRVMRVYAHYTFLSEQIAAVEAERRAQLQASTDARIDKVRQLMLLKGIGINGAWLLVMEFFGWRAFKNRREVGGLAGFTPTPYQSGESAREQGITKSGNRHVRWMTTELAWSWLRFQPDSALSVWFRERFGSGGKRLRRIGIVAVARKLLIALWRFLETGVIPAGAVLKEV

SEQ ID NO: 318260 - protein, 309 aa, unidentified
MNNQSKHYCGIDVSKKKLDIYFKGKVKQYDNTIKGIEKLANSAKDAHYVLESTGGYERLAAWYLMERDHEVSIINPKRVRDYAKSTGQFAKTDKIDAKMIYQYAESINPRKSLLPPASYRRLCALIDRRLQLINIRVAELNRLDMSTDDFMIKLIEENLDQLNQQIALIEEQLKILWVDDQNLSNKISAMTKICGISIITALTILAHLPEIGHLNKQEAAALAGLAPYNRDSGGFRGKRFIYGGRAKIRTALYMPAVCAITHNPHLKIFYQRLVNENHCPSKVALTAVMRKMIVALNSSLKNPDFMLAS

SEQ ID NO: 318261 - protein, 400 aa, unidentified
MDPMIRVGVDVGCKTHQVGIAGPDGTLLEEFSIPHTQEGFTEFFTRIEHHRRKLGLPVAVAMEGYNGHARPLDRMIVEKGYRLYNVNNLKLARFREIFPGPAKTDSLDVRKILELFHLKDHLPMAKDVLQEVPEVPKENEKLKRLTRRRRQLVNEKVRVMKRMQADLQAVCPELLGLTRKVDNLWFLRFLASCDDLEELAQLATEEIREIPGIGVKYAGIIREWQKGAKFSAEVEYVGPMIVADARRVLELLEEIAVLEGAIEELCEESELARRLRSMPGFGTISAAELAGEIGTLNRFSSEASLALYLGMCPLDKQSGQLHGTRSPRQVNKRAKAAMMTAVAHHIWEVPESRAYYERKRAEGKRHNQAVRSLGRHLVRVIWSMIKQGRDYELGEVECLT

SEQ ID NO: 318262 - protein, 369 aa, unidentified
MTDLTLFVGLDVHKKTISVAMVEATAGAEVRFYGTIANTPDAIRGLCKKLTKDGQQLHFCYEAGPCGYGVQRQLSRLGHRCDVVAPALIPRKVGDKVKTDRRDAMMLAQTLRAGQLTAVWVPDEAHEAMRDLVRLRAQAMRDLRKTRQQLLSFLLRHSLVSPYGHWTKMHRRWLGELIFAHPAQHLAHEEMLQRIERAEALCDRLKRAILELVPQWSLAPVVQAIQALRGVSLIVASVIVAEVGCFSRFDSPRQLMAYLGLNPSEHSSGAMIRRGAITKTGNALARTCLVEAAWTYRFPARVTQIIRDRLNGLPEPIRNVAWKAQVRLSARYRKLIAAGKPAPKVVVAIARELVGFIWAIARMVEPKFA

SEQ ID NO: 318263 - protein, 375 aa, unidentified
MGDYSEAFVGIDTSKLRHAVAIADGGRDGEVRFVGEIESSEAATAKLVRKLAAKYDRVTFCYEAGPTGYGLYRQIKSLGHACVVAAPSLIPKRPGDRVKTNRRDAVSLAKLLRSNELTPVWVPDRDHEAMRDLTRGRESAMLDLRTKRQQVSAFLLRQGRHYPQGKKTWTKAHMAWLASQKFDYPAQRLVFEEMMLAMRQAQERQARLEQAIRDAVPEWSLGEVATALMAMRGIDVISAATFLAEIGDLSRFANAPELMAYLGLVPSENSTGDSIRRGPITKAGNRRARRILVECSWSYQHPPRVGQSKQPKVDAAPQGVRENAWKAQCRLHRRYRALIRNGKLKTVAITAVARELAGFIWAVSRQTSTARAAVK

SEQ ID NO: 318264 - protein, 372 aa, unidentified
MAKSTSKSMIPLQALSSEQLASIHTVGNDVGDTWTYYAAVDGEGTVIAEGRVRTRAVELQRLYAILAGRRVRMVLETGTHSPWMSRLLEGMGHEVIVANSRDLHMIFKSKKKRDRVDARTLAKVGRFDIELLHPVHHRAEHIQRDLMMIRARDGMIAVRTKLINLIRGMVKTSGERLPGCSADAFGSKMKPYLPAALADTLAPLVDQVATLTTQIQACDKRVDELIETSYPAARIIMAIDGVGPLTALSFVLLVEDARRFSSSRSVGAYFGLVPALDESGESRPQKRITKRGDAHMRRLLVNAAHYILGKFGKDSDLRRHGLRIAERGGKNAKKRAVVAVARKLTVIMHHLWLTGAAYDPLFNAKRMSAMAA

SEQ ID NO: 318265 - protein, 397 aa, unidentified
MYIVGIDIAKRKHEAAVIDGEGTVIIKPFSFTNNCSGYNRLLAMLTRAKLPLDEVSFAMEATGHYWLALFTRLQKEGFRVQVINPVQTNSIRSFYIRQAKTDPRDALLIAEVIRFGHFSESTLHPENIYELRELCRGRHAIVSMQADVKRKVVALLDQVFPEYETAFTNMFSDTSMAILQTCPTPKELSEMPLEELCHLIEVSSHKRFRMAKARELQALARNSFGFAMAGDVFSTMIRLYAKHLDFLKQQVREMDRKIAEIMDTLDTPITTITGIGPTLGAYILSEIGDISRFSSAAKLAAYAGIDPTMRQSGEYNGVRNRMSKRGSPYLRHAIWLAASSAVLHDPALKLYFQKKRDEGKPYMASVGHACRKMVSIIYAVMRDNKAYTPYIPNEISA

SEQ ID NO: 318266 - protein, 314 aa, unidentified
MTNNRFVGIDVSRTSLDVFVRPSGETWTEPNTPEGHALLTRRLTELGPALVVLEASGGIQRPLARALGQAGVSVAVVNPRQVRDFARAVGRLAKTDTLDAEILAWFGEAVRPDPQPVPNQEVQHLSDLVSRRRQLVEIAAGEKNRLGTAAPEIRPGIERHLRWLEGEVEDLEQEISRLEREDPRWREREALLRSVPGVGPVLSATLLGCLPELGELNRKKIAALVGVAPFNRDSGARSGKRSVWGGRGNVRAVLYMGALTAVRCNPVLRSFYHRLLASGKPTKVALVACMRKLLVILNAMLHHNTPWDPEIARA

SEQ ID NO: 318267 - protein, 343 aa, unidentified
MKLFVGLDVSLEKTAICVVSEHGKIEREAQAASEPEALTRWMGNLDGTIAAIGLEAGPLSQWLHRGLTEAGLDVVLMETRQVKGALKAMPIKTDRRDAEGIARLLHLGWLRPVHCKSVSAQEVRAVLNARKAVQQGFIGLEMSLRGLLRNFGLKVGSISRGRFEQRIRELTTGNPMLEAATEPMLRARLSLRQELAGLERRVRQLAQGDPACRRMMSMPGVGAVVALTYRSAVDDPRRFTSSKKVGPWVGLTPSRNQSGERDVSGGITKAGDVNLRRALCQAATDMMHRGRSTWLRTWAAQVARRRGTKRAMVALARRIGVILHRMWVDDTEFRSDSAVPYAA

SEQ ID NO: 318268 - protein, 356 aa, unidentified
MIKNKLAVAVDHTFHPEPVAPIPGLAAAGAALPGVADPEAALPAECWVGIDVAKAHLDVAIWPTQERLRVPRDEAGLAALMAWLQPRTPTLIVLEATGGLETLVAGMLIEAQFPTAVIHPRQARDFAKALGVLAKTDALDALVLARFGQSIQPEPRPWKDEETQALTALLQRRRQLIAMLTAEKNRLTSAHRQVQADIRTTVAWLEQRIKALDDDLQGRLRASPVWRESEELLRSVPGIGPVTAVTLLAALPELGTLDRRPISALVGVCPLNRDSGQCRGQRHIFGGRAVVRTALYRATLAASRYNPVIRAFYQRLCAAGKPAKVALTACMRKLLTILNAMLKAKTPWRPTEECRA

SEQ ID NO: 318269 - protein, 411 aa, unidentified
MMEALFECVAGFDVHSKTVAVCLRRVIHRKGLKEIRTLGTMTRDLLALSDWLTSEGVTHVAMESTGVFWKPIYNILEGQLEILLVNARHIKNVPGGKTDVKDCEWIAQLLQCGLLQGSFIPPKPQRELRDLTRMRTQLTRESSAVANRIHKVLEDTNVKLGLVATDILGVSGRKMIAALIDGETDTARMADMACGRLREKIPLLEQALLGKVTDHHRFMLRALMDHLIYLESQIERFNPRIEGAARPFEKAITALIPRPGYDRASAQSGIAEIGPDMNPFPTDAHLCSWARVCPGNNESAGKRRSGATGQGNRWLETTLVQVAWAASRKKNSYFQAQYRRLAGRRGKKRAIVAVAHSILTDTYHILKEGTSYHELGADYFDHLHHDRIRRYHVKRLQDLGYTVVLGEEQVA

SEQ ID NO: 318270 - protein, 339 aa, unidentified
MSKVSVRGQAFCGIDVSKATLMVAVQREGGIGFERREFANSSAGHKQLIGWLLQRGTKVRVSLEATGVYSQDVALALEAVDGVEVAVLNPKTASLFARSLGRSKTDKTDAQALAEYSLRMEFVRWRRPGAVVLALRATGRHIASLVQDHTRVKNQLHAAGVSAIAPRCVRQDLKQALDKLEKRIARLRREALAMIRQDAELAHRFERLISIPGIAETSAMHLLSELAGLDPEMTARQWVASCGLDAGHRVSGSSVNLPSRISRHGNRHLRKALYMPALVGVRCDPHLRAFYRELKAKGKAPLQALMAVARKLLHAIFGIFKTATPYDGAKLFPQLIITS

SEQ ID NO: 318271 - protein, 416 aa, unidentified
MKDSRKHHIGLDVHKHYLIALGVDEDLNVVLLARRVEFSYLETWMQKTLTKQDEVVLEMTTNTWQLYDELCVYAGSVLVVHPPHVALITRSQVMNDKIAASILARLLAKGLLVGIWVPPQEVRELRGLVAQRKKMTGLATQAKNRLHAVLQRHHLVPPEGNLFQAAQQRWWLALPLGPLEKVNLQSDLETLQFAENQILRLTSMLAEIANQNEPITRLLQLPGFPGTARQGRCGVVTAVTVWAAIGDIQRFADPQHLVGYAGLGTKVHDSGMTSRSGRITKVGRRDLRVVLIEAAQVAANSHPPLEGRTGSSAAAPGTQQGHCGHRPQTARGRLVYPGTAQDRPLRPTRSDCPEVLEVCLPTRKRNSSGRTVGCPVRSPTPGSLTPGKRANQHCLGLEETHPTATLHQQSERRPKH

SEQ ID NO: 318272 - protein, 320 aa, unidentified
MIVAPVFVGIDVAKASLEVAVYPAGEQWTVEYADPAVATLGARLTALVPALIVLEATGGLEVHLVGALAAAGLPVVVVNPRQVRDFAKATGQLAKTDALDAAVLAHFAAAVRPPLRPLPAAATQDLAALVTRRRQLVGMLTAERNRLGCAPKVLHKELQGHIRWLERRITGLDTDLDQAIRTSPVWRAQEDLLRSVPGVGPVVARTLLAQLPELGTLSPKTLAALVGVAPLNRDSGVCRGRRMIWGGRAAVRAVLYMGTLAAVRFNPVLRTFYLRLRAAGKLPKVALTACMHKLLTILNALLTHQQRWDPTYAQTREKSG

SEQ ID NO: 318273 - protein, 340 aa, unidentified
MKRYLGVDLHRNCFTVCTLREDGQSELQKWSIHSLGDFAQQVQASDAVAVEATGNARHFCQVLKERGCRLVVVNPHQFQVISRSVKKTDAHDAKTLAEFLAKDMLPEVRLKEDLPAEMASLLQTRDKLVKLRTVLKNKINNLLAARGILLPKESLSTEKGLEQVLRADVGELVRVELSVLVEQIRHLNQGIAKLEAAIKKQGPKLPGYENLKSIKGIGDIGGSTLLSAIGDINDFASEGKLAAYFGIVPRVSNSNETERSGRITKRGNKLGRTALVQCALIAMRYSPYLAHYYARIKAARGTGKAIIALARKFLGIIYKTLKNGWVFEDFPRFVLAPAGA

SEQ ID NO: 318274 - protein, 358 aa, unidentified
MNYIGCDCHISTLDCAVVNERGHETRKQKMNTSVRGLIKFVKSIPKPRKIIIEEGTLASWLLEVCTDYGEELIITDPKTNRWIGRADQKNDTIDASKLAQLARGGYIKEIYHPIGHRRRFRELVMLYHATVKSQTRIKNQLKGKFRQDGIKCNGETVYAAKFRNKWRKKLPQDKVVQMMVEGLWRQLDQVHEVKEELFGHMCKQSRLYSEIKRFKQIPGIGPVHAATISAIVETPHRFANKKKLWMYAGFGLAERASGEKVYSRSLTHNYNRLLKNALKQATEAAISARDNQFRRQYLRLTIEKGISSHRAKLTVARSILATLYGIWKSGENYDATIDKKRIESDKIQVRAYHLVRTG

SEQ ID NO: 318275 - protein, 351 aa, unidentified
MDAETFVGLDISRKGAVATAVDPLGQLIDQSSLGSTAAELIAYLQRLPGTKRVALEACTMWEHFYDAAVAAGADVVLSHPYKTRLIAEASLKSDTVDSEALANLLRLHGLPTSFAPPDETRVLRRLVRDRVFYRRQHTAIANHVYAFLIAKGIPYDDGILGLRRRREELRSHHLPEVDRGLDRLRDLDLATGELDKAIHAAFLESKEAQLLKSVPGIGELTAVVLVAFLCPIDRFENFDKLSSYCGLCPTNHQTADTSYEGNLKPDCNHILRWILVEASYIHRQHARGSYVSRVGRRIARRKGAKCGTIAAAHALLHVVYAILKRGTPYTPHAPERPSCRQGTATSSLTVA

SEQ ID NO: 318276 - protein, 464 aa, unidentified
MKSKKQVGEKKKRRIRKHLEQVNLFAAGIDIGSKSHYVSVPVELDDEPVREFPCFTGDLKRMVDWFVEIGITTIAVESTGVYWIPVFEMLEERGLEVLLVNARHVKNVPSRKSDVQDCQWLQQLHTYGLLRGAFRPDEEAVALRTYTRQRDMLIRRSADHIRHMQKALRLMNLLLDNVVNDIKGMTGMKIIRAILDGERDPIKLAQFRDGHCKKSEQVIASSLVGHYRAEHLFSLRQAVELYDTYQTQIASCDHAIEAQLERMGSGNDRGDMPPAKKRKTKSCPDFDVRGDLYRMIGVDLTQIDGLNEASVLKIVSETGIDVTPWRTEKHFASWLGLSPGNKITGGKVLSSKTKPSANRAAAAFRMAAFGLFNSKSALGAYCRRQRARLGAPKAITATAHKLARLFYSMIKYGHEYVDVGQDYYEKTYRERMTKNLKKRVEELGFNLVAREESIPSSSPAISMA

SEQ ID NO: 318277 - protein, 353 aa, unidentified
MKTYYVGMDVHSASIRIAVLNGAGKIVMESTIETGAERVRGFLKQLRGKVCVTFEEGTQANWLHDVVRGLVSEVVVCDPRHNKLLKSGNKNDRVDAQKLAELLRLGSLQAVYHGDNGVRTLKELVRTYDCLVSDTTRVMNRLKAIYRGRAIACAGHEIYRQDRREQWLAKLRERGANQRAGFLYEQLAALKPLRRKAKLAMVKEARRQTAYRWLMSMPKLGSVSVAQLIAVVGTPYRFRSKRQFWTYVGLAVVTCSSADHEVVNGVLRRSTRPLATRGLNRNHNHLLKRVFKNAASSACHSGPFKAAYDVRVGRGMAPSLARLTIARQLAATTLSIWKRGEQFSTERMKQQAT

SEQ ID NO: 318278 - protein, 417 aa, unidentified
MQIIPWEERKYFGALDWACDHHDLVVVNGKGVIVCEVRFAHTAEGWQQLRDKLAAFTPLAIAVETNQGLAVEQLLAARYTVFPVNPQSAKRYRERKAPTGVKDDRRDAWSLADALRVDGHGWKPLCADDPLVAELRLLTRDETALIEQRTGLINQLQSALRDYYPAALEAFADWSCPGAWSFVASFPTPAALVKAGRRRWVKFLHVHHFWREATAQRRLEIFARAERLQGQPSSVAAKSLLALSLVRILQTLEVQLRAYRTAIDELFARHPDHDLFGSLPGAGKKLAPRLLAEIGDQRSRFARAEGLQAYAGTAPITFQSGQIEKHLVRRACARPLRSTVHLWANLSRRKCPWAQAYYQAHRDKGQSHACALRCLGQRWLKILWRMWQDGTRYDESLHTRNQRQHGSWVLARQATTT

SEQ ID NO: 318279 - protein, 390 aa, unidentified
MSQHCHFDASRCLAALEQDNTIIAVIEMSQSKWLVAALVPGIERQPLKRLNADEAGLLKLLLRWRNEAGQAGRQIRRIVVAYEAGRDGFWLARWLRARGVEAYVIHPTSIAVSREHRRAKTDRLDTELLMRALLGWLRGERRHCSMVAIPTIEEEDARRPNRERNNLVTEQTRIVNQMKAIFVRLGIRTFRPTLRKAEEKLKGLHTAEGAPLPENTRAELRRHLARLRVIREQIRAVEQERLRKLAAAPPAENGSHAMVRLIGRVLGVGIETADMLVNEVFSRHWRDRKAVARYAGLTGSPDESGRRRRERGLARAGNARVRCGMIQLAWRFLRFQKNSALTQWFYARTADGRGSTRKTMIVALARKLLIALWRLVTTGQVSDGIVLRPA

SEQ ID NO: 318280 - protein, 303 aa, unidentified
MASDDDALAERFANDEQGHGQLVTRLRELSPRLVVMEATGNFQLELSIVLASAKLPMAVVNPRQVRDFAKALGILAKTDAIDARTIALFGATVKPEAQPLPDDQSLELEALMTRRRQLIGMIASEKNRLQALFGPAKKSWAEKSIRDTLSHLIKQLKQIDKDLQKRIERSPAWKAKDDLLKSVPGIGKVTSLTLSIDLPELGSLDRKQIASLAGLAPINRDSGKSTGKRRIWGGRASVRTALYMACVASLRCNPIIQALYARLTQAGRKPPKVALVACMRKLLTILNAMVREQRPWNHALAGA

SEQ ID NO: 318281 - protein, 413 aa, unidentified
MRVMIERCCGLDVHQETVVACLLIGAPGVRPTKEVRTFRTMTRELEALRNWLKAAGVTHVGMESTGVYWRPVYAVLEGLFELIVGNARHIRNVPGRKTDVKDAEWIADLVRHGLIAKSFVPARPLRELRELLRYRRKLVESQSAERNRLLKLLETANIKLASVASDVFGVSGRAMLKTLSEGNATAEEIAGLAKGQLRRKHDELVLALEGRVEEHHRFLLAIQLHRLEAAEHDIEALDARIAERLEPYRTQHALLMQIPGVDWVVAAVLIAEIGIDMSVFLSACHLASWAGVCPGNHESAGRQRSGRARKGNVHLRTILVGAATSASRTKGSYLKDKYHRLKARRGALRAALAIAHKILVAAYHMLAKGLAYRDLGEAYLDQLHQTRTAANLKRRLERLGYTVALQLKEATTA

SEQ ID NO: 318282 - protein, 387 aa, unidentified
MARKRILSTLDTSITYDALGLDIAKEDVALAAFGDDHDEPYFVDKLTFDGLYALLADMAPTLVAMEPCSGAHQIAEHIEALGHQVMMISGKHVQAWVKDHCNGQKTDLNDAFAILNLAYDRWLTPIRGKTREECRLLALQASYRQLQGQRTKTLVHVKATLHAWGYPIRTGSFNQKALHELIEANRDLFGDEVAETLHLMINRVRDLDHDIAKVLELLTEATKRDPRASLLRSIPGFGVLTTSRWCAVMGDIARFESPKQAMAFIGLVPNNRITGHHTETSSGREARGQGKMSKRGDKMLRSLCILGAASLCLMVRNNRLPDCPFVAGIKERLASPRPWFKVLVYVAAKLVRIATALLKYGETFSFKKAGISKAVLKQWELEQAKAA

SEQ ID NO: 318283 - protein, 329 aa, unidentified
MNNAPASSVSDSPVFVGIDVSKRKLDVCLLIGSSKQLLSFDNTVGGISSLIDRLRSQQIQLIVLEATGRYERRCGVELMTHGFEVAIVNPRQPRDFAKATGQLAKTDAIDAFILATFGKVIGPRISQLPSENQLLLDEMVARRRQVVQMHAQEDNRLQQAFDKKIQSSIKRIMRLLDQQREDLDRQIARLIDRDDDWRGRLELLKTVPGVGDVTASTLVAELPELGKLNRQQIAKLVGLAPINHDSGKSRGERHIIGGRSPVRCTLYMATLTARTFNPLIKAMADRLTRAGKPFKKVMTACMRKLLTILNTMARTGEKWRTPCVAMPNT

SEQ ID NO: 318284 - protein, 412 aa, unidentified
MADVVAWIGLDWADERHSVHLQPADGRLEHFELEQKPAVLHEWVAQLQKRFAGGKIAVALEQRKGAVIHALLMYDCFVLYPINPKALARYREAFATSGAKDDPRDSELLLDLVVRHRDKLRAWVPDTVESRKLQALCEQRRKLVNQRVALTNRLTSLLKQYFPQAPEWVGDLASVQACDFLTQWPTLADVQAARRTTVRRFYYHHNCRKRAVVDARLAAIADARPLTTDPAVIEPLSLSVQTYATQLRTLITAIQTFDARIAAVFAQHADHDLFGSFPGAGDVCAPRLAAAFGTDRARWDSAAELQAHSGIAPVTERSGKSVWVHHRLACPKFVKQTFHEFADQSIRFSRWARAYYDQQRARGNDHHAALRALAYKWIRILFRCWKERRPYDESQYIEALRRRGSPLAKNFA

SEQ ID NO: 318285 - protein, 359 aa, unidentified
MSQQPSDRSVIIGGVDTHKELHMAAVVDAHDRVLGTASFPTTRHGYKTMLTWMRSFGELSRVGIECTGTYGAGLLRYLQHAGITILEVTTPDKTVRRKRGKDDAIDAENAAHAAYAGIRTVTPKTRDGMIESLRVLKVCRKTAVAARRVALQMIQTQVVSAPEELRDLLRNMTRMQLLRTLAAWRPDLNGYRDVTMAYRIALKSLARRYLELHDEIADLDVMIKAIVDELAPKLVSRTAVGYETAAQLLITAGDNPDRLGSEASFAALCGVSPIPASSGKTQRHRLNRGGDRAANSALHIIAIGRLRLDADTQAYIARRVGEGHSKLEAIRCLKRYIARELYYVLRSRHREINQTQIAT

SEQ ID NO: 318286 - protein, 351 aa, unidentified
MRIIGVDFHAGQQTIAMFDTETKELVEKTLKHEGGQVREFYSALPHPVQVGIEASGSMHWFLELMEELGIDRQVGHPTEIRAAEPRKQKHDRRDAALLLKLQVENRFPSIWMPSTELRDLRALLRHRHQWVRMRTRVQNTLQAIAISHGLRRGSSLWSQKGQHAIALLPLAPHAAHRRTELQVLYRTLSTQIDKLDEQVMNKALQRPGAKLLLTHPGVGPVTALATDVFLGEPGRFDDGKAVASYVGMIPSEYSSGGRQRLGGLSKQGNPLLRFLWCEAAQHAARQDPELQRFYRRKLLQKGLGKARVAVGRKLGIRLWIMLREQIDYQEFCRRGQMRQKNGAACDASRGS

SEQ ID NO: 318287 - protein, 340 aa, unidentified
MGEVTTIGLDLAKHVFQVHGVDAEGATVLRKQLRRAQVLAFFSRLPPCLVGLEACATAHYWARELRALGHEVRLMPAQYVKAYIKRNKHDAADAEAICEAVGRPTMRFVPVKTADQQAAVLLHRGRERLVRQRTGLVNALRGHLAEFGVIAPQGLRNVGKLIAIVRDEGDARLPDLARQVLQVLAAQIEQLEAAVAAIEKQLMAWHKSNPVSQRLASVPGIGPIIATALAATVVEPSGFRSGREFAAWLGLVPRQNSTGGKHRLGGISKRGNPYLRRLLINGASANLLRSKATKADPWVIGLRRRRPPLVVAVALANKTARIAWAVMHRHENYQRVAAAA

SEQ ID NO: 318288 - protein, 343 aa, unidentified
MDYFAGLDVSVKETSICIVDAVGKLVREVKVASEPEALLQVLMTPDQAFKRIGLEAGPLSQWLFSALAEAGLPVICVETRHMRAVLKAQINKTDRNDARGIAQMMRVGLYRPVHVKTLRSQKLRMLLTHRKLLQSKAIAIDNDLRATLRNFGLKVGMVGTTKFEARIKELVEDLPDLAVLVEPLLVVRRVLREQIGILHRRLLVIVRDDDVCRRLMTVPGVGPVVALTYRATVDVPARFRNSKAVGAVFGLTPSQYQSGEVKRTGAISRCGDEMMRMMLYEAAQIVLVRSTKWSWLKAWAMKIARHRGLKKAIVALARRLAVILHRIWVDGTEFRWTREVAAA

SEQ ID NO: 318289 - protein, 469 aa, unidentified
MSKIGYLGIDVSKGYSDFIILQSDKEVVEKPFRLYDAAEGHQQLGKIIDGLFKKGFEQIYCGVESTGGYENNWVNYLQELGKTKAVAIARLNPKAVKSLGEAGLTRTVTDSVSAQNIALYLIGFHHKIHYLGPSQTTKAYNDGRKHGSFIRMLKKQKNQLGNQLEKIIYQELSVLMCYCRHGFPAWLLLLLEKYPGAELIKKAGEKKLCKIKGISSEKAIALIKKVSSLDNSTSSHISSILKSTVNQILHLDESIKAEKVNLLDIFKNESDAILLTSITGVGEQSAVEILIEIEDVNRFETAKKLIAYFGTHPMYKQSGDGTWGNHMSKKGRSEIRAVLYMCSMTAIRYDEMFKGKYAAARAQGKNHYSAMGVVMNKMLRVIFGVLKNKTKYNIETDQKNQQNAQAKQKQKEDKQKEEKKEKQTRLERYNDTVQENLPISNRHAKKKRQSPKLQIEECTGSSAPLKTNI

SEQ ID NO: 318290 - protein, 352 aa, unidentified
MTVTIVETRVQARAITGGVDTHAGVHVAAALDPIGGLLGVQEFPATPAGYAQLLGWLGGFGTVCLVGVEGTGSYGAGLARHIAAAGVRVVEVDRSDRQDRRRAGKSDPLDAVSAARAALSGRARGASKGRDGQVEAIRALMVAKRSARSVRTQTINQARALIITGPDDLRARFARHTPADLVAELASLRPRPGSMVRYHTLLSLRELGRRARYLDDQLARLDQLIVPLVTARAPGLLALYGIGPDTAAMLLVAAGDHPGRLRSEAAWAHLCATAPLSASSGKVTRYRLNPGGDRQAGHALYRIVITRLSSHPPTRAYAGRRTKEGLSKKEIIRCLKRYVAREVYPCLRPPAG

SEQ ID NO: 318291 - protein, 391 aa, unidentified
MIYIGIDVAKDKHDCFITNSDSEVLVKAFTIANNLDGFNDLYQKIESVMDDVTKVKVGLEATGHYSYNLLGYLIDKGLPTYVINPLHTNLYRKSLSLRQTKTDKVDARTIASMLMSDVNLKSYSDTFYHNEELKSLTRYRFDKVKERAKLKSSVSRLICILFPELEKLVPTLHMASVYAMLSEFPGAKQVADAHLTRLTNLLTKASKGRYGKDTAITFRDAARASIGSNMPAKSLELKHTIKLIQELDSEIDEIENEIKIIMDEINSPILSIPGINYRMGAMIIAEIGDFNRFDSPDKILAYAGFSPSTYQSGQLDGAYAHMEKRGSRYLRYALYNATKYVCHWDPTFAAYLAKKRAEGKHYNVAISHAVKKLVRVIYHLEKTNQQYIKAA

SEQ ID NO: 318292 - protein, 359 aa, unidentified
MRNLKYSIGIDVSMKDFACCLSVINDQQDVKVIASHKFPNSLTGFASLLEWVKRHCKDRISIVFVMEATGVYHEQLAWFLHAKGHTVSIMLPNKAKKYLQAGGSKSKNDQIDARGLAQIGAEKKLDEWTPPSENLYVLRAYTRQHQSLNELHTSVSNQLHSIVHSHFQPKDIIKQLKGTLKMCQKQLKEMEQTMLRLIQSDPVLNHHHQNLCAIKGISTLSFAVIIGETNGFTLFDNAASLVSYAGYDVVENQSGKHTGKTKISKKGNSRIRRILYMPALCAVREDQPQFRKLFERVYERTRIKMKGYVAVQKKLLVMMYYLWKKNEKYNPVFEKIVAPDKAEATRDELQEEVLIMTQN

SEQ ID NO: 318293 - protein, 408 aa, unidentified
MNEIRKRYIGLDVHKHYLVALGVDADLNVVLPLRRVELSHLESWMQKTLTKDDEVVLEMTTNTWQLYDELSEYAGSVTVVHPPHVALITRSQVMNDKIAAAILARLLAKGLLAGIWVPPQEVRELRGLVAQRQKMTRLATQAKNRLHAVLQRHHLKPPAGNPFAKANNNWWQGLTLGKLETMNMQSDLETLQFAEQQEARLEGEMTVIAAEDEAIGRLLHITGFGVITAVTVFAAIGDIKRFSEPKKLVGYAGLGARVHDSGMTTRSGKITKAGRRDLRVALVEVAHIAANNHPHWKAELARLQPRLGYNKAIVAIARKLLVTVWYVLQGKADRYAEPKAVAQKMLKFAYAVGKANRPKGQTAAQFARIRMDALGLGRELTSIPWGSKKPIPLPPSTTKEGSDVPHTK

SEQ ID NO: 318294 - protein, 482 aa, unidentified
MKKKTIYAGQSQELLRLFEEAGNNAKIMCVPIDYAKKDNVVMFCNGYGDILRKPFSVKNSPEGIEYLSDQVTRSCLSRSINPNHVFFGGEDVGSYAENFANALRAKGWFVGGVNAHDAKKQRANAQASTDRLDLMGIAIMLINRRANCSPAQSGIYLNLRNLVRHRGSLVKLSTKVRNQIHTAVDRLLPGFLDEKKTGIAPFSKSSLYLMKDRFSAARIRRKKKDTLTEILRRYGTQNPERAASKLKEYAKTVLIPPNEYIGTLQVSLAQHVKHYRCIRENIEQLEKEIALWLAQTQGAFLTTVRGIGIVLAAGVTAEIGDPNKQKPLNNLVSYSGIIPRVKQTGGPEGKTYTGKVAKRCNRLLKNYVVQSGLHLGLHGPEDLMTDYKRREASGQHADFGIARRYLRMGMCLMRTSQIYLPQRLRHRNVEPRQRANYYLMIWPKLRDKWSKLDALNAAFADDRPLGRWRNMVQELYGITLKL

SEQ ID NO: 318295 - protein, 374 aa, unidentified
MHHTGWDRSINTRSRKTEREPGSSRPPSTKLVQLPGPSGARIIRKTERSRKGTEQEDTMDRTPQFVGIDISKTQLDVAIYPQDTVEAVAHTESGLLHIVEHLQALQPVRIVLEATGGFERGLVRALAAAQLPVIVVNPRHVRDFAKATGQLAKTDTLDARVLARFADAIRPALRPVPDVAMEEARALLARRRQLIDMLTAEKNRRERAASSVRPRIQRHITWLTAELTRVDADLDASIQRSPIWQTQNDLLQSVPGVGPVMSRTLLAELPELGTLTHKQIAALVGVAPLNHDSGALRGRRHVWGGRASVRAALYMAALVATKWNPAIRRFYRHLREVGKAPKVALVACMRKLLTMLNAMLKHQTPWRAEPVLAS

SEQ ID NO: 318296 - protein, 392 aa, unidentified
MVVSVGVDVSKDKHDCFIVSSEGEVLADVFTIPNTMDGFHYLLQRIRHCTAPQDKIKVGLEATGHYSYNLLGFLLDNGLTTYVLNPLRTNLYRKSLSLRKTKTDRVDARTIASMLLSDAGLKPYTDTAYHNEELKSLTRYRFDKVKERAKLKSSIARLVCILFPELEKLVPSLHIASVYALLEEFPGAKQVAAAHLTRLKALLETASNGHYKRDMALEIRNAAKNSIGSQMPAKSLELQHTIRLIRELNREIDEIEEQIQSIMDELHSPITSIPGMGFRMAAMILAEVGDFTRFDSPDKLLAYAGMSPSTYQSGQFKNCYPHMEKRGSRYLRYALYNATKYVCHWDPAFADYLAKKRAEGKHYNIAISHAAKKLVRLIFALEKSRQPYCSAA

SEQ ID NO: 318297 - protein, 342 aa, unidentified
MEQVTTIGLDIAKSTFQVHGVDARGGVVLRRRLTRARLVAFFAKLSPCLVGIEACATSHYWARELRNLGHDVRLMPPSYVKPYVKRQKNDTADAEAICEAVTRPTMRFVEVKTPQQQSIMVVHGARTMLMRQRIQLSNAIRGHMAEFGIVAPVGREGLLTLIDALHEDMNDRVPADARDCLQMLAAQLRLVNAQILENDRRIRASARATDVGRRLMGIPGVGPVLASAFVATVPDPHAFRSGRCLAAWIGLVPRQNSSGGKERLGGITKQGNRYLRQLLFVGAMAVIRYAERHGTRRPWLVQLLARRTTKVAAAALANKTARMVWAIMTSGQKYREPELRIA

SEQ ID NO: 318298 - protein, 358 aa, unidentified
MQKEIKKISFKGQKIFVGLDTHLRSWKVTIMLEQSVFKTFSMNPKVEELVSYLHKHFPGGTYYSAYEASFCGFNIHRKLLANGIENIIVNPADIPTTDKERKQKEDKRDSRKIARSLRNGDLKAIYVPTNATVEFRGYVRYRKTLVKEITRNKNRVKSQLHFYGIEIPAALDSASSYWSGKFTQWLAGLEFETEYGKMVLDNLVDLTQRLRKDLLITNRSLRKIYREGEYSRILQLLTTIPGIGLITAVTLLSEIENIKRFKSLDQLCSFVGLIPRTNSTGDHEKIGGITPRKNKPLRNEIIECSWMAIRADPSLALSFNELSKRMSRNKAIIRIAKKMLNRIRFVMQNETEYVCGVG

SEQ ID NO: 318299 - protein, 393 aa, unidentified
MSKSNITNQNVQVEPSNLYVGVDLGLERNVGVILTDRGDRADRFSFSQDRQGYDYFLQRLQGLREKYQAPEVIVGMEPSNYFWKLLAFELEKQKIQYRLVNAYTVKKYREGDQLDRSKDDQRDANQIAELCRTGKTTQTRLQKGAYQDLRQYATLYHQYKQAMHREKTIIWGLTGQVFPELLKEFDNLAGSTCRSLLIACAPAVTIRQMALEQFVEEVRAAYQGRRFGLARLKRVYHLAENSIGILEGVNAIQLAIQVHFANLESLETQLERVTAAMTNCLLTLPEAPYLLSCTALQPLTAALFLGEVGDPQRYGSASQWVKLAGIQPAPNTSGKKQRSRTPMSHQGRAQLRTLLYFACLHMVRFDTHFAELYSQLQREPKTHSPKCRLWVCL

SEQ ID NO: 318300 - protein, 418 aa, unidentified
MGVLSLQNNVITAVGIDVSKGKSMAAIRRPGGEIVQMPFEVKHTVLGLKDLVKLLHKTGGEIRIVMEHTGIYWCPIARALQEAGFFVSIVNAILIHDFSDNSLRKVKTDRADALKIANYALSFWDSLCELSSEEETRVLLKTQSRLYERTIDASVVLRNGLISLLDQTFPGVNKLFSSSSRNRSGHYKWIDFAKRFWHCDCVAGLSFQSFSETYGKWCKREGYVYYLSAAERIYDAAKQAVAVFPKNDRTKAIIVQSVNTLNAIYESLQTMREEMDRLASLLPEYDVVMEMHGVGKITGSQLMAEIGDVRRFTNKSALVAFAGVDAPPFQSGTFDAKSRRISKRGSPHLRRTAFMVCSSIIQIGNTDDPIYAFMDKKRAEGKHFYVYMVAGAAKLLRIYYARVSERMSSLNHGLKQSA

SEQ ID NO: 318301 - protein, 415 aa, unidentified
MADQRQWYAGVDWASESHHVFVTDGDGRKIGERVFKHSGEGLAEMAAWLMAASGAADPSQILVAIEVPHGPVVETLLERGFKVHAINPKQMDRFRDRFTMAGAKDDSRDAEVMSSALRTDARCFRLLAVADPMVCELREWSRIAEELGVERNRLTNRMREQLWRYFPAFLEFDSDLSAGWLLDLWQAVPTPDKAASVRETTIAKLLKRRRIRRFDAAHVLSVLRKPPVQVAAGTIEAASAHITTLIARIRLVNRQIEQAHQRLDSLIARLSPPEEAAPGQNKQHDAEILASLPGVGRIVLATLLAEAHDALQRRDYAALRSLTGAAPVTKRSGKSCTVIRRHACHARLAGAMYHWARVATQHDPTSRAKYAALRSRGHSHGRALRSVADRLLNVACAMLRAGTTFNPDRAVQKTS

SEQ ID NO: 318302 - protein, 397 aa, unidentified
MYIVGIDIAKRKHEAAVIDGEGTVIIKPFSFTNNCSGYNRLLAMLTKAKLPLDEVSFAMEATGHYWLALFTRLQKEGFRVQVINPVQTNSIRSFYIRQAKTDPRDALLIAEVIRFGHFSESTLHPENIYELRELCRGRHAIVSMQADVKRKVVALLDQVFPEYETAFTNMFSDTSMAILQTCPTPKELSEMPLEELCHLIEVSSHKRFRMAKARELQELARNSFGFAMAGDVFSTMIRLYAKHLDFLKQQVREMDRKIAEIMDTLDTPITTITGIGPTLGAYILSEIGDISRFSSAAKLAAYAGIDPTMRQSGEYNGVRNRMSKRGSPYLRHAIWLAASSAVLHDPALKLYFQKKRDEGKPYMASVGHACRKMVSIIYAVMRDNKTYTPHIPNEISA

SEQ ID NO: 318303 - protein, 335 aa, unidentified
MQIYGIDLAKEKFDVSFFDLTSKKVSNQPSHKVVTNNLKGIGKFFKGLPSDAVLVAEHTGVYGDTLLKCCMDSNVKIAFVGGYVIHRYRTTPDRAKTDVLDCALLRDFGERYPDKLKYKTFPEEALYELRQLARHREMLVEQRKQLITADKSEDCRPIRSLAVKRSMDHIKEMLDTEIAETEKEMLKVINGHESIHHNYELVKSVDGVGLITAVELLVKTENFTKITTARQYAAYAGTAPYEKSSGKMDKGAHISKIGNRRSKTLLYICAESARLHNKEIKLYYERRTLIDKKPRHYVLNAIANKLLRIIFTLVEKGEYYDANFIRQDPRVVKYN

SEQ ID NO: 318304 - protein, 343 aa, unidentified
MKLMRVGVDLAKSVFQVHGVDRHERVVWRRKLTRANWLRVFLETVEPGCEVGMEACGGAHHWARLLQARGYCVKLIAPQFVKPYVKSNKNDANDAEAICEAMSRPNMRFVAVKRVAQQDVQAVHRVRAEISKQRKAKGNQIRGLVSEYGLVAPKQLVHLRAAIPAWLEDAENGLTGRFRRLLNALWHDLRELDQRLSELDYEIAQIAAADPVAKRLQRLRGVGPVIATALVATVGDVRQFANGRQLAASLGLTPRQNSSGGKERLLGISKRGDVYLRTLLIHGARSALRTAKNKEDQLSRWVRRIAATRHHNVAAVALANKTARIAWAMMKNGTEYEPTRAAA

SEQ ID NO: 318305 - protein, 425 aa, unidentified
MASMRSNGDRIKRFRELKATLRTQRDRLLVGIDIAKAQHVAQLRVAHGQIVVPKVGIPNTTAGFAAFWRQVQTAQRTTGCAEIVCAVEPTGTYHEALGRFLEQHGADVVLVANQVAHANRRTLDGTWGKSDPKDAHNLCELLERGLVLFYSLPEGPLAALRRLVRLLRRARVERAACKVRWRNTLRPCLGPAGEPLPAAVLAQLPAAVQAFERPEDAGTGSRPRARRPVPLPPGFAAECTDLTARLTAAARRIATLEAALVQVATPLPAYLLLLSLPGVGPTLAAILLAEIGDIAWYTKVSQLRKLAGLDIIWVESGQWAGTPRISRAGRPLLRWALYQAALGATKRPAWRARRAALIAKRQGDRFAFFKATVELAAKLLRLVWGVWRSGRPYDPARVEARPVPARGGTARRGRALGPRQPAPRD

SEQ ID NO: 318306 - protein, 350 aa, unidentified
MEYIALDSHKRYSFASVEEHTGAILREARIDHRRGAIAEFLSAWKPGTSVAVETIGNWYWIVDEIEAAGMAPQLVHARRAKMMLASVNKTDKLDCHGLNRLQRTGTLPTVWIPPAAIRDLRDLPRTRMMLSGERTKLKNRIHATLAKYCISIEGASDAFGKRGLEELERKLELLPPHSRFCVQRLLAILEKLQDEITHFEARMRKAFRTSRLMELLQTLPGVGFILAVVILLEIGEVSRFPDAPRFAAYSGTTPRVHASGGKVRYGQTRSDVNRYLKWAFVEAANVIALNSRRTRVRHVSQLYLRIRQHKGHQKAVGAVARHLAEATYWVLKKEEAYREPRKLVVSSTRG

SEQ ID NO: 318307 - protein, 366 aa, unidentified
MRKISTMALDRIEVFKDQKLTIGLDLGDRFSHYCILNGAGDVIGEHNLPTTPKGIEEVFARIPRSRIALETGTHSPWVSRQLSRLGHEVIVAHARNVRLIGDSSRKDDQLDARTLARLARIDPGLLGPVRHRSAQAQIHLTVIRARAGLVRARTALVNAARGLTKSYGERLQKCGTQKMNREMSQGLSQELRDALDPLFGEIESINERIAEYDGRIEKIGKEIYPQIALLQQVKGVGTLIALTYVLTLDDPHRFRRSRDVGCFVGLRPGRRNSGMSQPQLPISKEGDVYLRTMLVQGAHYILGPFGQDSDLRRWGLRLAERGGKNAKKRAAIAVAQKLAVLLHKLWVSGEVYEPLRNNHQVVSAVA

SEQ ID NO: 318308 - protein, 466 aa, unidentified
MENNYILYVGMDVSKGKADAAILKVSDRRSVKPKFLRKKLSFKFVKSEVASFLESVRSYSDVNCTSICFALEVTGIYSTNVYDYIKANLYENESIKFLNTDFVNQWRIAHNIAKSDPLDAQTISTIIGTDLDVQYVNDNVFENKNGYQDLKALVHRHYQIKKIYSQEINRLIAQCDCLFPELQYVFEPKSAAFIAVLSSYPTTHDIINASRVEVFDVVYEATKHRCSMDKVDKLFELCQDTLVPDDISSYGKSIILDLVENIKNIKGQLKSIERYIKDIASLNPAYKLLLTITGCGPITAATVIAETGNIRRFKNADCFVSYSGTSPRNKRSGTSVETMGKISKKGSRYLRHAIYMIAEFARRHNPVLKHQFERIKNGNKKRHKLANIAIANKIARYIYSIMKNKSSFVILHDHIMRLPEETRDTFFNSISLDFPKNTRKQIYQYSDINGELHRFVSIKTDEMIPA

SEQ ID NO: 318309 - protein, 352 aa, unidentified
MRRYIKKVHEGMEIFVGIDMHKTSWHVTLMSEPGEIWHGNIPGEWEALQAVFEHYLGCRIHAVYEAGCFGYWLYDRIVEYGATCIVTPPSLVPMEYGNRVKTDRRDSKKLAYLLQKDLLKNVHVPTEEERSYRQVIRQRRQLIEDRVKVQHRIKSALLFFGIEIPEQTGAFSRGYMDRLRKIRFSNRIHDRSFRILLDEYDYFSDQLERHTVLIREIAALDKYRDRMALLTSIPGIGMLTAIEILVELQDVARFQSPEQLAAYLGLTPSQYSTGEKIHMGHITKVGKSHLRATLIEAAWRLIRHDAKVRTFYEQLRARAGSKRAIVAVARRLIIQIRKMLLSNSSYYGKAAA

SEQ ID NO: 318310 - protein, 301 aa, unidentified
MKAPSARPAAVLGLDVGKSSHWACLIDRDGEVLASAPVRNREAELDALFASAPAGTLVVVDQFRNIGSLAVRRARAAGLGVAYLPGLAASRAAGLFAGEAKTDERDAAVIARTALGVPDSLSGVPGRGEALEAARALSSQRDHVVACATRDKNRLRAVLLESCPALEAETAALLEGDETYACLLTVPGIGPRTAAQLAVSVDIGRFPDHDHLASYCGIAPRVRSSGTSVRSVRASRRGDARLKSLLIFSCNSLVRSSGRYGEYYRACRARGMGHGRALKAVARKRLRAIYAVMRDRVPYRE

SEQ ID NO: 318311 - protein, 475 aa, unidentified
MVILFPQHSRMAGCPFILIASLSHKLLYCLTIKSKVMAKEAIFETVHENVAGIDIGAEQIYVSPDGKEVTVFETFTSGYHACARYLKEKGIEKVAMEATGVYWIAFYFLLEELGMMVCLVNPKETKQVKGRKTDVKDCQWIQRLFTAGILRHSFIPEGKYMELRMLVRERVDIIDMGSTYVNKMQKCLELMNIKLKEVISQIHGASGIRMIKSILSGERNAANLLSLCDERIQKNKKAKVLKALEGTYNDTYLYMLGQNMELWEIHQDRIEKIDTKIAQLLDELSMNKEEVPTGKTKRIRHHAPKIQGLQSTMARLYGVDLSSISGMNDYTVLRLIGETGTDMSRFPTAKQFISWLCLSPKTHKSGKIKKNVRGTPCNPAGQIFKECAQGLMNSKFIAIGAFMRRIRGRKDSGIAIKAGARKLALAYYNALTKGMAYVEQGTKQYEEQIKRRELISLKKLAKKYNMQLIENQMAA

SEQ ID NO: 318312 - protein, 366 aa, unidentified
MVQTRYRPQKGSTRMQIIAFDSHKRYTWALVETKDGHRLCEKRIEHRKGNITEFLSHFQTGSPVALETIGTWYWIVDEIEKAGMVPRLVHAHKAKLMVGSTNKTDKLDARGLNMLQRAGTLPVVWIPPGELRDKRELCRTRMVFADQRTKLKNRIHSVLDKYGMNSEFDGISDIFGKAARRRIAEVARQLPRETRYSLDGLLRQLKIVEAQIESLGKRMLKVYRETEEIKFLKTMPGIGFILAVVIWQEIGDISRFSNPEQLASYAGTCPRIHSSGDKSRYGPLRSDVNHYLKWAFSEAGNSVAVNRAYLANRHVGQLYNRLRSRRGHSKAVGAVARHLAEASFWVLKRKEGYKERKVLSVSPTVA

SEQ ID NO: 318313 - protein, 346 aa, unidentified
MKILALDLGKYKTVGCEYESESGAHRFHRSLTTPATLRKMVQEINPERVVIEVCSIAGWVCDLMGELGVAVQVANPSDEAWRWRKVKQKDDRRDALKAARLSAVNQLREVYIPAQEVRQWRALITYRRQLVRRRTQIKNHIRDLLLREGQILARGSQCWNQIGIELLTGLARPLSAVGLTELWRGELHEELQQLELLQARVATVEEKLNAIGKADARVQLLRTAPGVGPRLAEAIVALLDKPQRFGKASQVSAYIGMVPKAFDSGESVRRGHITRQGSRLVRSLLVEVGWAGLRHNAWVRQTYQRLHGGKKARRKIAIVAVGRKLLVRCWAMLRDHRAWDWQPQIT

SEQ ID NO: 318314 - protein, 421 aa, unidentified
MKQKDNADRDDRYAAWVGFDWGDQEHVWALQWTDTGERERGRLEQTPEALDVWLGQLMSRLNGRRIGVAIEQKHGAVVWMLLKYECVEIYPVHPQAAGQFRQALYPSGSKSDPADGELLLELLVHHRDRLRPLEQDDEPTRRLLMLVEQRRHWVEEKKRHGNRLSARLKVYFPQVLNWFDDIGAAPVLDLLARWPRLEQLQKAQRKTLETFLRQHRRTPEEAAAWAKQVSAAVPAVQDSVLLDSYVLEVAALVALLKQMQTSIKKFDTAIAETSRQHPCWAIAQSLPGAGPVMAPRLLAAMGNGKRYQNAHEMQCATGIAPVTVASGRTRIIQFRRACPKFLRQTFHEWAQHSMKSCRWARVYYDQLRTVGKRHHAALRALAFKWQRILFRCWKDGIAYDESKYIASLKKRNSPLSTWLPE

SEQ ID NO: 318315 - protein, 348 aa, unidentified
MLADELDYVIGVDTHLDEHVLAVVALPSGAVVAKRSVRASGRGYASALAFALEAGSGARVWAIEGTGSYGAGLARYLVGRGETVLETGRVPQTERRLRGKDDALDAVRTARAALAGDTLALPRVGERREALRLLLVARRSAVDVRREALGQLRAVIVTAPDGLREQLRTLPVGKLLERCSRLRRSSAMSTDEVATRLVLRSLARRIEAATVEAAELERELLGHVHALAPRPLDEPGIGPIVAAQLLVAWSHRGRLRSEACFARLAGVAPVPASSKTTRHRLSRGRDRQLNRALHTTVLHRRQHDRATRDNIERRIAEGKTRRDATRLLKRHLARHLYRLLQQTEPLMT

SEQ ID NO: 318316 - protein, 352 aa, unidentified
MIIIGVDFHPEFQQIASVDTDTGEFQEKRLTHPEEAEKFYRALAGQKVRMGMEASGHARWFERLVAELQFELRIGDAAEIRTKRVRKQKTDRQDAQLILSLLLEDRFPQIWVPSWENRDLRQLLWHRHRMVQARIRIMNQLQAVALNEGLRCKKKLWREHGRQQLESFRLAPWATRRRRDLLELLDRLTPTIAELSQAIEQEVEKCPAARRLRTHPGVGSLTALAFVLIIGQADRFQCGKQVASYLGLVPLEESSGNRRRLGHITKQGSSMMRFLLVEAAQVTVRSVPEWRSKYLHLMMRRGRKTAKVAMARRLAVHLFWMMRKEWDYPQWIKFGSHVGQPGHRDGVQSNTE

SEQ ID NO: 318317 - protein, 344 aa, unidentified
MSKLDTCGIEISAKELVVRLRQQENLGPCRSFANTPEGHQSIRAHLRRVGGVVRVCMESTGLYGLDLALALSGQEGIELMVANPRAVRHFAYALMKRSKNDPIDAGVLAEFAARMPFRPWARPSPAALALHALARRLRELVEMQAAEKNRRHAARLSQAIPAAVRRDLERSLRTQERALARLTRAARQLIAQDPQLTERFALLDSVPGIAETSAVQLLGELCVLAPDLEARQWVASAGLDPRQFDSGSSVHKKPRISKAGNKHLRHSLYMPALVAVQFDPHLRAFYQHLLAKGKLKMQALVAVMRKLLHALNAMFKNHQPYDGSKLFSLQPTPVQEVNGVSVGA

SEQ ID NO: 318318 - protein, 396 aa, unidentified
MLTSVMVNNSLIGNPGVGEASVASRANTSRRREIGRAQVREAVTKRDPRRHRGTSPNSRLNRRRPTHPVSSYLQVREKTMSEPVYVGIDVAKETFHVATCPDVLKTQLPNTRKGHRQLSQSLKNHTIALIVLEATGGYERPLTAELLSDSLPVVVVNPRQVRDFAKGMGQWAKTDPIDAQVLAKFAQIVKPAPKTHSTPQTAELSELVRRRRQLNDLRTQESNRLLMIHHPKVKKSIQKMIKTLNFQIDEIDRLIREHIDSDANFKNKDRILRSTPGVGPQTSAMLIANLPELGKLNRQEIAALAGLAPWDRSSGKSDGKAHIWGGRKDVRSVLYMAAFTACRFNPVIRALAERLKQKGKAYKVVITACMRKLLIILNTMVRDQTLWTPEKSVKNT

SEQ ID NO: 318319 - protein, 353 aa, unidentified
MKTYYVGMDVHRASIVIVVLNGAGKVVEQLVVQTSAERVRSYLKQLRGRVYVTFEEGTQANWLHDVVRPLVTEVVVCDPRHNKLLQSGNKSDRVDAQKLAELLRNGSLKRVYHGDNGVRTLKELVRTYDCLVGDTTRVMNRLKAIYRGRAIGCQGHDIYRQDRREQWLEKLREPGAKQRAGFLYQQLAALKPLRHEVKLLMVKEARRQRAYPWLKSVSRLGAVSVAQLLAIVGTPHRFRSKHQFWSYVGLAVVTRSSADHEVVEGVLRRSKRPLATRGLNRNHNHVLKRVFKNAATSACHQGPFKVGYDQRVAHGMNPSLARLTIARQLAAIVLAIWKRGEQFDPERMKQQLA

SEQ ID NO: 318320 - protein, 344 aa, unidentified
MLADELDFVIGVDTHKDLHALAVVEAPSGGVLVEAQVEASSRGYAAALALANEQAAGRRAFAIEGTGSYGAGLSRFLVCRGEQVLEVGRLPREGRRSRAKSDALDAIRAARSVLGAERLARPRAGGEREQLRALMVCREGALQAKRAGLCQLRDLLLTGPQKLREDLTALTRARLLGRCARLRRNGAAPGTRLALALLARRVLVLQAEERELASQIRALVEELAPELLAEPGVGPISAAQILLSWSHPGRLRSEAAFARLAGAAPIPASSGKLVRHRLDPGGDRKLNRALHTIVVSRRKIHPATIAYVERRVREGKTTREAIRCLKRYLARHLFRVLEGITQAA

SEQ ID NO: 318321 - protein, 455 aa, unidentified
MPKRTISDHPELKPVNVSAAAIDIGSKMHMAAVNPACTDMPVRTFGTFTQELHDLADWFKACGVTSVAMESTGVYWIPVYEILEQRGFDVILVNARFAKNVPGRKTDVSDAAWLRQLHSYGLLRGSFRPDAEIATLRAYLRQRERLVEYAAAHIQHMQKALMEMNLQIHHVVCDITGATGMRIIRAIVAGERNPDVLATYRDVRCHSSTETIRAALVGNDRHEHVFALTQSLELYDVYQAKMLDCDRKLEVLIAALSNKGAKPVGKLSKPRIKTKQVNTPTFDVRTALYGVLGVDLTEIHGLGPSLALKLVGECGTDLRAWPSAKHFTSWLCLAPGNKISGGKVLSSRTRRSSSRAAALLRLAATTVGRSDTALGAFYRRLSSRAGKSKAVTATARKIAVLFYNTLRHGMSYSDPGADHYEQQYRSRVLANLQRRAKSLGFVLQAIPGDANPAVS

SEQ ID NO: 318322 - protein, 338 aa, unidentified
MRSLAVLTRNDGSKMNDARLGIDVSKATLDADYASDQRKQVRKFANDPDGWRQMLVWLKAMDGEQAHICMEATGRHSLGLALALHDAGHVVSIVNPAQIRDFARTKLGRNKTDKVDAALIREYVELFKPAPWAPPSPAMRRLCELQTVRAGLIGSRTEWTNRIGSGLGDDTARKLAAATIEHFTTQLEAVDKAIAETIDQDPELRRRRGLLLSVVGVGETLAGLLLAELPEPGVLRRSSEVVAYAGLNPSHHRSGKSIDRPTRISKIGNAALRSSLYMPALAAMRFNPAVAALAARLKSAGRLKPKQIVVAAMRKLLVICFGVLKTGKRFAPGIAMPG

SEQ ID NO: 318323 - protein, 379 aa, unidentified
MTRPAAIPTDEHTLYAALELSKNSWLLAIQFPGRDNPSLHPVKGGDAEGLVAKLDAACERLAKIAGQVPRVTLCYEAGYDGFWLARLLEQRGIDCFVMEPASLQVNRRARRVKTDRIDVEALLHTLIAWCRGERHVCSMVIIPSVDEEDLRRSHRGRDRLVRERTAHINRIKGLLFGQGIRGINVKRHYKTLTPADLVTGDGRPLPERLSREIAREIERLALVQEQIIETERERDQALNSCEATERKRHDLLRLKGIGPAFAAIFARELYYRRFANRRQVASYIGLAPSPYDSGEGRRSQGISKAGNGLVRYTMIQAAWLWLKHQPQSALSQWFHRRTEGHTGRMRRVMIVALARKLAIALWRYLELGLIPQGAILSAR

SEQ ID NO: 318324 - protein, 388 aa, unidentified
MQVAADRTDASTAIQTDLPAIFASLELSRSTWLITSLSPGAGEKMSKHSIRAGDVAGLLVRLAQLKEKARGRTGRDFPIIAIQEAGLDGFWIHRVLQSEGIESHVVDAASILTSRRRRRAKTDGIDGETLVRTLLAYKRGEPRVCAMVKAPTPEEEDRRRICRERKTLVGERVEHVNRIKGLLFAQGVSDYEPLKRNRRARLEELKTGDGRPLPAHLKAQISRELDRLELVLPQLKAVEAERDALLKPVSEGCPTPAAMLAQLKGMGPEFTAILWSEGLFRSFSNRRQLAAYAGLAPTPWQSGSVAHEQGVSKAGNRRLRTTMIQLAWLWLRHQPTSALSVWFQERVQSNGGKMRKTTIVALARKLLVALWKYSTSGVVIEGAVMKTI

SEQ ID NO: 318325 - protein, 396 aa, unidentified
MQGEAQRVVVGMDPHKRSVTIEVMTADEEVLGGGRFGTDVAGYRAMLAYLRRWPDRVWAIEGCNGIGRHVALRLLSDGQEVVDVPPKLSARARVFSTGQGRKTDATDAHSVALVGTRMTGLRPVVDDQELTVLRVLVDRRRSLGEDHTRMISQVHQLLLELIPGGAKKDLSAAQAKSLLAKVRPRDAAGKARRRVAAELISDLERIYQRSKAADKELKELLAATGTTLIDLHGIGPSGAARLLVEVGDITRFPDRDHFASWNGTAPIDASSGDQVRHRLSRAGNRQINRVVHIMATVQLRNPTEGRAYYNRRKGEGKTSMEAMRALKRRLSNIVYKTMLDDAMSHAVAGARTGPGGQRGNDSGSCAAGSHPHTSSSDKPLPGPATTQPRTPFPAAS

SEQ ID NO: 318326 - protein, 351 aa, unidentified
MRIVGALDLHRQQITYKWIDQESGELGRGRITPAAREPLRAWLERLHGLNAHFALEGTTGWRFVVEELERAGLVAHLAEPAETAARRGRKRAKTDKSDCDHICELLRLGHLPESWIAPAHILELRTLARLRTTLLDERTAWQQRLQAQLFQQGAPPGLKLRSSAGRARLSELDLSPAGRQLLNTGLRRIDDLDGELAPLDRQLSTIARCQAGCRALTAALFGVGPLISVAIVAELGDCRRFANADQAVGYSGLDITVYASDSKRAPGHLSHQGPSLLRWALFEAAVCASRRTSPDHAYYQTVANRIDHNRACLAVARKLCRRAYHLLRELGADAIAPAEITRQSEPLPHAA

SEQ ID NO: 318327 - protein, 278 aa, unidentified
MSQNLNSAVAVIGIDIGKNSFHIVGLDYRGAIVLRQKWSRGQIEARLANMPPCLIGMEACVGAHHLSRKLQAFGHDARLMPAKYVRPYSKGQKNDFRDAEAIAEAVQRPTMKFVATKTPEQLDLQALHRVRERLVSQRTGIINQIRAFLLERGVAVRQGLRFLRAELPRILATPPDVLSARMVRVIKDLAEDWRRLDERIDHLSSEIAALARQDSGCERLMSVPGIGPIISSAMVAAIGTGDAFAKGRDFAAWLGLVPKQISTGDRTILGKISKRGNR

SEQ ID NO: 318328 - protein, 287 aa, unidentified
MPIKTARKFDPRHAALVRWIKQSATPVQLICEASGGYEQALLESLQKSEVKVTLVQAVRVRQYARAAGILAKTDRIDAKVLAAFGSALQPQPTSPLSGEQKRLRQYEAQRRHLSRILVAEENRLAQLSCTELRTLSRSLISKIKTQIKTLDRGISDLIAQDQTLCVKAQKLTAISGVGVRTAALLLAQMPELGQLNRRQAAALAGLAPFNHDSGSVRGKRAIFGGRPALRSGLYMAALSAARFNPILSSFYQRLRAKGKPHKLALTAVMRKLLLALNQTLKPLPCST

SEQ ID NO: 318329 - protein, 317 aa, unidentified
MSEPVYVGIDVAKDTFHLASCPNIIKTRLPNTPDGHHQLCQALQNHTIALIVLEATGGYERPLAAELLNAGMPVVVVNPRQVRDFANGLGQWAKTDPIDAQVLAKFAQIVNPAPKPHFKPQIAELSELVRRRRQLNDLRTQESNRLLMIHHPKVKKSIQKMIKTLDFQIDQLDQLIREHIEADDDFKNKDRILQSTPGVGPQTSAMLLANLPELGSLNRQEIAALAGLAPWDRSSGKSDGKAHIWGGRKDVRRVLYMAAFTACRFNPVIRALALRLKQKGKAYKVILTACMRKLLIILNTMIRNQALWSPKISIKNA

SEQ ID NO: 318330 - protein, 416 aa, unidentified
MEDDFGMRALYRRVAGIDVHRMLHVVTVLLEQPDGSMQRLMRQFGGFRRDCRELAAWLAELGIELVVMESTGIYWKSVYAHLENAGINAWVVNAHRVKHVPGRKTDTADSEWLAVLARFGLVKASFIPPKDLRELRLISRYRRKLNAMRASEINRLHKILDDGGIKLGGVVSDIDGVSARAMVKALIAQQPIEHILNLARGKLQQKREELRASLEGDLSARHLFVLGHIEAHIETLQRELAEIDSYMLNALQPYAWAHELLQTIPGIDQIAAALILIEIGDDMARFGRAQSLACWAALSPGNNESAGKRKSGRTAHGNSVVRCILCECANAARMTKSTLAAKYRSLMVRKSHKKSIIAVAHKMIRLIYVMLSRRQPYIDQGIDYAAMSAKKNAPRWIKQLKSIGRWPSPTPAAAGA

SEQ ID NO: 318331 - protein, 424 aa, unidentified
MKNCNKQNEKIELVDEKTLVIGVDIGSYDEYARAFTCRKQELSKKPLHFYNTAEGFKTFKDWAVNIMKANGLEKIIVGMEPTSIYWEALATYCKDNGMILVHVNPAAVHKSKELDDNDPSKNDRKDPKVIAGLVADGRYQFPYMPEEEYAELRELSNLRIRTQESLTQCKNRLSRWYSRYFPEFKGAYKNVVSKTAMMILDLYPLPEDIVTLGVEGILQIWKSKKVRGAGERKARKLYEAARNSIGRKEAASIARIEFKSIKEDLDRYQERLDEIEKKADEILPKIKNVDKLFEIKGVGKATVLTFLSEIGEISRFDNPKEIQKLAGYAIVTNESCKHQGEKRISYRGRKRLRWVLYQTALSVIAKNAEFRQIHAYYTTRANNPLKGIQSVVAVACKMIRIFYKILTDGVSYDGTKMTQDIVHA

SEQ ID NO: 318332 - protein, 345 aa, unidentified
MELHTIGIDLGKTVFHLVGLNLRGEVVVHKKFSRKQLLHFTANLKVELIGMEACGGAHFLGRALREQGHEVRLMPAQYVKPYVKTNKSDYIDAEAIAEAVGRPKMRFVPIKSDDQLDLQSLHRVRERWVMRRTAVIHQIRGLLLERGITLRKGRCHVDAALPGILEDASAKLSGALRVLLAQLKLELDHLQMQIDEADAVIKKTAGDNEACRRLVAIPGIGPITATAIIAAIGNGAAFKKGREFSAWLGIVPGEYTTGGKQKLLGISKRGNSYLRRLFVQGARAVLQQSAKQSSGLSAWLAQLTARAHHNVVAVALANKLARMAWAVLAKNESYRPPVLVDVAAA

SEQ ID NO: 318333 - protein, 464 aa, unidentified
MAKRKKTSGQDKEPRATSLPTIAPMVAGIDIGSKEHWVCAPVRADGKPNVRVFGTTTPELNKLVDWLAEQRVKSAAMESTYVYWIPLYELLESRGIEPVLVNARTLHNVPGRKTDFSDCQWIQVLHSCGLLRGSFRPSDAIVRLRTLQRQMGNLVAERSRCVQWMQKSLDQMNVQVHRAVTDLTGITGMAIVRAIVAGERDPVALAMLRDGRCRKSAAQIAQHLTGNWREEHLFNLASSLKLYDAIEETILSYDTQLNKELRTLQPPERQDQPVPPHPNRSKERSIKATGQQQARTTLWQFAGVDLTHIDGISVGSAQVILTEVGPNLAAFPSEKHFVSWLRLCPRTPISGGKPVKKRRNSLGANRIAGVLRMAATSLQRSKTALGANFRRIARFKGGAVAVFAIARKLAQLAYRMLRFGQAYTDQGAESYELRFQARRLSGLKEAARSLGYQLIPNEISPASG

SEQ ID NO: 318334 - protein, 416 aa, unidentified
MRDGDKKKERIRIYQKRNTCFIGIDMHKDTHCAVIIDCWMNKIGEVNFENRPSKFPAFVENVREICGTKEFVFGLEDTRGFGRNLSAYLVGRRFDVKHVNPAYTSAVRLSNPIVFKDDSYDAYCVARVLRDMVDSLPDAKHEDIFWTIRQLVKRRDLLVKNNVMNKNTLHNQLMYSYPSYRKFFAMIDGKSALCFWENYPSPMHIKNTTPEQVYETLKAINQGLKVERINDIFAMMESDGDTSKDFQEERDFIVKSLVKSIRNNLEQIKEIDVELEKIIPLTGYKLRTMPGIDLTTEAHLISEIGDINRFPDSDKLARFMGLAPVQFSSAGKGKDERCRNGNRVLNAIFHFLAIQMVAVSKGGKPRHPVFREYFEQKVKEGKNKPQALVCVARRLVRIIYGMMKTKTEYRPYEKAD

SEQ ID NO: 318335 - protein, 321 aa, unidentified
MAYFRDVVGIDVSKENLDLYVLSAQQRRTVPNTAAGYRDLVSWLKSLGVRMAVMEASGGYERDVAKALRQAGFDVRIVDPKRVRHFAKAAGRLAKNDRIDAEMIAEFGAVFAAAQRCEIPLDAKREHLAGLVATRQALMDHQTSLQNQISACPKGPARQALAAALKPIPASIKQLDRLIAEAIAAHPQFAALAARLNTVPGVGPVTIAALIAWLPELGRLDRRALAALVGVAPFDDDSGKRTGQRYIKGGRGKLRNIVYMAVMGAATKHNPVLKAYYDSLLKRGKLKKVALIACLRKLLTILNTMVAKQQDWNPASMAIAA

SEQ ID NO: 318336 - protein, 428 aa, unidentified
MAYAIAGIDVHKRMLAVVVSDLAADGEDAFERRQFGSTPAQLRLLADWLSEHPVNEVVMESTAQYWKPVWAALERHWTPRARARAGAGPMAGTLHRAPARSNRARRGRKRDFTDAERLVKRLVAQELTLSFVPAPEQRLWRTVTRTKVQLTRNRVQLQNRLEALLEQAHLKLSSLVSDLLGVSARRMLQALADGATDPGALAALADHRLRATPEQLRDALEACQELSPVYRRLLKMVLEELQLLDSQISRLDQEMAELLCPYQDQVQRLAEVPGLGVDSAQQILAEVGPTAATFPSAGQLASWVGACPGEHESAEVNYSHRSPKGNRQMRRLLNQAANAAVKSKGTIFEILYRRYVPRLGHPQTIGVIAHRLCRLIWKILHQGVRYEERGPALSQKSKRHRTARMIRALRSFGYRVELASAQSTVVPA

SEQ ID NO: 318337 - protein, 353 aa, unidentified
MRTYYVGMDVHLASIVIVVLNGAGKVVMESVLETGAERVRGFLKQLRGKVYVTFEEGTQANWLHEVVRPLVTEVVVCDPRPNKLLQSGNKNDRVDAKKLAELLRNGALKAVYHGDNGVRTLKELVRTYDCLVSDSTRVMNRLKAIFRGRAIACGGHEIYRQDGRGQWLEKLREPGAKQRAGFLYEQLAALKPLRRKAKLAMVKEVRRQTAYLWLMSVPKLGSVSVAQLIAVVGTPHRFRSKQQFWSYVGLAVVTRSTADHEVVAGVLRRSQRPVSTRGLNRNHNHLLKRVFKNAATSACHSGPFKAGYDLRVARGMAPSLARLTIARQLAATTLAIWKRGEQFDPERKKQQAA

SEQ ID NO: 318338 - protein, 386 aa, unidentified
MEHTRFIGLDIHKERISVAVAQSGRSGAVEYLGEIINEPGAISKLCDRLRRPGKLLVFCYEAGPCGYGVHRQLTSLGHRCDVVAPSLIPTKAGDRVKTNRRDATMLARLHRAGELTPVWVPDADHEAMRDLIRLRSVVRQIVTRARQHLQGFLLRHGRKHGGGTAWRMAYRRWLSTLAFDHPAQQIAFQDYVDAVTDAEGRLKRVEEQIFSLLPDWNLRPVVDGLQAMRRIAPINAVVLVTEVGDFKRFSNPRQLMAYFGLVPGERSSGASVRRGAITKTGNAHARRALAEGAWAYRMKARIGRHKVDLIEALPKVVCDIGWKAQLRLCARYRRLSARGKTANVVNVAIAREMVGFIWSIACMEIQPRRGMRRWGRDNAGEPSRVL

SEQ ID NO: 318339 - protein, 351 aa, unidentified
MYIVGVDYHPSFQQIAFLDQETGECGDRRLDHSDGEAERFYRELRQKGVSVRVGLEATGYSRWFERLLVELGIEVWIGNAAEIKAKRVRKQKTDRQDAQLLLKLLEENRFPRIWVPSPENRDLRQLLWHRHRLVQMRTRIMNQLQALAMNEGKRWKHRLWSAEGRALLEKFPLAPWASRRRQDLLELLDRLTPTIDELTAAVEQEARRWPEAVRLMTHPGVGALTALAFVLIIGTPGRFARGKQIGSYIGLIPSEDSSGGRQRLGHISKQGNALLRFLLVEAAQAATRCNQDWRQRYWHLAMRREKSIAKVALGRQMAVRLYWMWRNGCAYSQSLEFGSHAGQLGTGHGVQ

SEQ ID NO: 318340 - protein, 308 aa, unidentified
MRCIGAGIDVSKATLDVAVHGQSAQLKAANDAAGWAKVTYWLAQYAPEQVVLEATGGYELAALDALFEAGLPMVRINPRHARRFAQALGQLAKTDRIDARVLAHMASVLTLHRYHPLDEKARALKPFYERRQHILQMLVAEKQRRRQVTEPMLRQMLEQNIARLQADRQTIDSAMAEQIRGTPQATVVATIRGLGPLTVIALLCDMPELGHVSSKTMANLSGVAPLARDSGTAHGKRVVWGGRPRPRRVLYMAMLNVVRYDPLIKAFYEGLVARGKPKKVALVAALRKTIVLLNARLRDLLNEPAQAV

SEQ ID NO: 318341 - protein, 337 aa, unidentified
MKYSGIDLHSNNSVVTVTDEEDRVVAEKRLPNDLAKILGLLMPWREEMAGVVVESTFNWYWLVDGLQAAGFKVHLANTTAIKKYAGLKHGGDETDARHLAHLLRLGILPTGSILPPAQRAVRDLARKRMQLVRSRTTHILAIENITARQHGARISSNQVKRLTAETVDQMALPEDVALAIKTNVAVITTLSAQIDLLEKRLQERIGERAEYGLLTSVPGIGQVLATTILLETGPIERFAAAGNFASYARCVDSVRTSNGKKKGEGNTRNGNKYLAWAFVEAANFALRYCAEAKRFYERKRAKTNNVVAIKALAHKLARACFHILNERKPFDVTRCFA

SEQ ID NO: 318342 - protein, 344 aa, unidentified
MEQYAGIDVSLELSSVCIVDAQGKIVKEAKVASEPEALIGFFETLGFAIDRIGLEAGPLSQWLHAGLKRAGFDAVLLETRHVKAVLSAMTVKTDRKDARGIAQLIRMGWFRPVHAKSIGAQEIRALLVARKQLLGRLIDVELSIRGILRGFGLKVGPVTRKNFEVRIRELVTGQAMLERIVAAMLSARAALKAEYGKLHKAVLTIVRDDTVCRRLMTVPSVGPLVAITYKSAIDDPHRIAKSKAAGALFGLTPKKYQSGETNVTGGITLAGDEMVRTALYEAANVLLSRITRFSKLKRWGMDVAKRRGSKRAKVALARKLAVILHRMWVDGTTYRWAEAGAITA

SEQ ID NO: 318343 - protein, 350 aa, unidentified
MQIIGVDLHARQQTVAMLNVETGEIVEKTLQHEGDSVREFYSTLAGPTRVGIEATGSMQWFLALMEELGIDCQVGHPAKIRAAEPRKQKHDRRDAALVLQLLVENRFPSIWMPSREQRDVRSLILYRHQWVRIRTRVQNALQAIALSHGLRRGSSLWSGAGQHAIASLSLTRYTAERRTALQSLYRHLEAQIEDLNRKVEELAWQRPQARRLMTHPGVGPITALATETFLGEPKRFVDGKAVASYVGLIPSEHSSGGRQRLGGLSKQGNPLLRFLWCEAVGHAVRKDAELQRFYQHKLVQKGLGKAKVAAARKLGIRLWILLRDQIDYQEFCRRGQLRQKHGGAHAGMPA

SEQ ID NO: 318344 - protein, 350 aa, unidentified
MNIMAIDLGKNKSVACMYEAFSGEHAFTTLPTRQQELHDLMVQHHPDRVVIEVGPSVGWVGDLVRALDIELEVANPNHEAWRWRNVKRKTDRDDALKLAKLSAMSQLPTVYLPEAPVRQLRSLIKHRHALVGRRTRIKNSIRAILDREGLGMPAGQSGWTKRTVTWLDSLACPLNEASGDALWRAQLFEELDGLAQADAHVMNVERKLDALSDEDTRVALLRTIPGVGPRLAEALVAIIDDPHRFKTGKQVGAYVGLTPRQYQSGSMDRQGRISGQGDAMLRALLVEVSWLGRHHNGWMKEIYDRAYRGDSSRKKIAIVALARHLLVRCWAMLRDGTAWEPDRNKPAAAA

SEQ ID NO: 318345 - protein, 346 aa, unidentified
MMIIGCDFHPSWQQVSWLDSETGETGEQKLVHASGDAKVFYQQLVAPVLIGMEATGNSQWFIELVEDLGHEIWIGDAAQIRASYVRKQKTDKRDAAHILKLVVEGRFPKLWNPDREQRDLRQLVLHRHKLVEIRSRVKNELQHLSMNKGMQKKRTLWSQAGQKMLRELPLKPWASCRREDLLGLLGMLNQQVGTLDAAVQKTAEENPQAKLLMTQPGVGPNTALAFVLTIGDVSRFPRGKQVASYLGLIPREESSGGRQKLGAISKQGNCMLRSLLVEAAQIAVRFDPGYRKQYLHRCHQKPKGVAKVAAARKLAVRLYWMLRTQVGYPEIVRIESSPRVPLVGAS

SEQ ID NO: 318346 - protein, 340 aa, unidentified
MKQIKRIGIDLAKSVFQLHGVDAHGHVVLRRQVKRAQLRAFFAQCPPCHIGMEACGSAHYWAREFGKLGHTVRLIAPQFVSPYRKNDKNDGNDAEAICEALGRPTMRFVPIKDEEQQAVLCVHRARSLLVEERTALVNQIRGLLAEYGMVVAQGVVRLRHALPGILEDGENGLPLLAREVFADLYERLRGLDTHIAAYDRRITHLARTMAAAKRLMQVEGVGPLTATAVVASVGDARLFKNGRQFAAWLGLVPRQHSTGGKSRLGRITKRGDVYLRTLLVHGARSVLMHRAEKTDAKSRWGAALQARRGFNKAAVALAAKHARILWALLAHEADYKPATT

SEQ ID NO: 318347 - protein, 447 aa, unidentified
MCQEAPSNVATDGSPSSASAAAAAAAAAEIPLEQMTHLVGFDWATKRHQVVVVDRQGSRTLELCFDDDAAGWALLRARLGPWMPAGVAVAIETCNGPAVERLLEMGLAVYPLNPKSAERYRDRKAPAGVKDDLLDAWSFADALRTDGHGWRRLAPLDPLTAELRMLCRDEMGLIAQRTAMINALRAALHEYYPAATEAFDDWTGRFAWEFVIAFPTPAALLAAGRRKWEKFLHLHKLWRPETAQKRLEIFARAAAFASPSTAVTAARSLLAVTLAKQLLVLQTQLDEYRRRIGQAFDNHPDAGLFGSLPGAAEKLAPRLLAELGADRAVFDSPQALQCYAGTAPVTRQSGQRRVVQVRFMCNRFLRHAVHLWANASREKSPWAQAYYQRKKDQGMGHAAALRALGQRWLKILWKMWQTRTPYDAELHQRNQVRHGSWVIALIPNPAA

SEQ ID NO: 318348 - protein, 317 aa, unidentified
METTPAANRFVGIDVSKSWVDVHVRPDGDAFRCATDSDGLLELVRRLSPLRPTVIVMEASGGFESMVAIGLAEAGLPVAIVNPRQVRRFAEALGQLAKTDAIDARVIAHFAEAVRPMPRPIPDPMMAQLQELLARRRQLVVMINAEKQRLAKAAGAVTQRSHKAMLKSLEGEQARIDRAIDKLVQQSPLWCRKLDLLTTVPGVGNVVACTLLTELPELGSADRHQIAALAGVAPFSRDSGRKKGKRFIRAGRVQVRGPLYMACLVAIRFNPPLKAFYRRLRDAGKPARLALVAVMRKLLTILNAMLRDNQPWAFAHD

SEQ ID NO: 318349 - protein, 384 aa, unidentified
MNKHSMIFIGLDTHKEFHEVAYCEEQRGATPVHYGRIPSSKVSVKKLLRHFESKYPGATLHVVYEAGPCGYWIYRLITSLGHCCYVVAPSLIPKKPGERIKTDRRDALKLVRSLKSEDLTPIYVPEPEDEAVRDLSRAREAAMKDLKEGKYQLKALLLRNNIRYEGTANWSKKHLRWLTELILPHPAQQIVLQEQLQTIEERIRRLERLDNELTHHVHQWRYYPVVKAIQAMRGVRLLVAVGVVAELGDLHRFDHPRKLMAYLGLVPSEQSSGGKRHLGAITKAGNGRARRLLIEGAHSYRYPANVSTEMQLRQEGLPKDIVDIAWKAQLRLCKRYQRMSKKSKHYNLIITAIAREMAAYIWAIAKEVVLTPVNPKLRLSRVPA

SEQ ID NO: 318350 - protein, 323 aa, unidentified
MLGIDVSKETLSCTLLDPLTRQKEWHLEVANSSQGWKQLLRKTPATSVWVLEPTGRYSQDVARIAREAGRDVRLAPPKSAQLFLKSVQSRAKTDKLDAHGLALFGLSRELAPYPLKSAMQDEIDQLLCARRGLSRSLTELQARARELPRAALALAPAIEALQKQLKEVDQEIAKLTAAPELTAVQELQKVPGIGPVVSASLVSRLSARSFGHSDQFVAYCGLDVRIRQSGKKSGQVGLSKQGDAELRRLLFLAAQSSLRAKDSPFKAQYERERAKGLASTAALCAVARKIARLAWSLVHNGSTYDPQRIYKQPIVPEKTPAGT

SEQ ID NO: 318351 - protein, 371 aa, unidentified
MNSIVYVGMDVHKEQYTICCYSYETDKVEYKQTIPSDYKLVLKYIEQVRSRYDGEVTFVCGYEAGCLGYSLYHQLKDHAVDCKILAPSTMAVTNTHHVKTDKRDAANIARCLAFHTYSEVYVPDNDDNDVKEYIRMRDDQKLYLKKVKQQILAFVLRQGKRFEGGKTYWTIAYLKWLKTLELSDLQRETLNEYLMTYEYLTEKISRFDERIEELASVERYEEKVKHMSCLLGIKTHTALSMIVEVGDFERFEKAPKFASFLGLVPSEDSSDTRVNRYSITKAGNSHLRRLLVEAAQSYTRGNVGHKSVALKQRQKGNPPEVIAYADKANERLRRRFYKMTLNKGVNRNVAATAIARELACFIWGMMTEHVS

SEQ ID NO: 318352 - protein, 351 aa, unidentified
MLIGVDVHKDTHTAVGVSPFGEKMFELTVGNYQKDFDALTAKVEAAAREAKLSPYFGLEDCHGYGERLAMYLDAAGYPVMHVASTLVDRQRHVNTHPEKSDSLDAYGVAEVMLRKSDKLPRYTVTEASAVAKNIKDVATDRENIVLERTRIKNQLHDILHRIWNTAYKEKFIDPFSLKALRHWSRAECKDASLFLMRSMKRKVRRLQALHVEIKELDHELVRLLKESGITIATASGCGTVVAATIIAEIGDIRRFHSPAALAKYAGCAPREYGSGKKQRYRKTRSGNRRLNSAFHLMALTQISPTGNDKARVYFKKKVSEGKSKSQALVYLRRQLVNVIWCMLKYKTVYRS

SEQ ID NO: 318353 - protein, 338 aa, unidentified
MKKYSGIDLHSNNSVVVVSDEADRVVYRRRLPNELGTILEALEPHREELAGVAVESTYNWYWLVDGLQAAGYAVQLAHTAAMKRYEGLKHSGDDTDAAQLAHLLRLGILPSGYIYPVAERGLRDLGRRRLQLVRHRTMHVLAVENVQARQTGARMTGDRVKRLSAQELQALGLPEDVTLGLQANVAMIGALNEEIAKIEKHLAQRLRPRPEYTLLNTAPGIGRILAPIILLETGSIERFAAVGNYASYARCVDSVRLSNGKKKGEGNVRNGNKYLAWAFIEAANMARRWCPEARRFHDRKRAKTNAIVATKALAHKLARACYHMLRTGEPFDMKRCFG

SEQ ID NO: 318354 - protein, 373 aa, unidentified
MFSLPVFVGLDYHQNVIQVCVMDQNRKILTNQSVGNDPCEVIRVVAPFGANVHATIEASTGAAEFAEQLINKTHWCVELAHPGYVARMKQTPDKSDWTDAKLLADLTRAGYIPRVWLAPKSIRELRELVRHRHGLVEQRKQVKLRIRALLRNHRIVCPHSPWTIQGKAWLLDEANIPSQNVMFLLRDHFDTIDHFDKKVSNVTEKMQAEVMDDPVVKQLLQQPGIGIITAITMRALIGRFDRFRTGKQLAHFCAVCPRNNSSAGKTTTGGLIKAGDELLRIVLIEAAHRLVRYNPYWRDMATRLRANGKKACVTVAAVANRWIRKLFHQMRNPEPFDEVAVGFLRRGQKSTGVLKNLSDAGKRTSHGTGKLGT

SEQ ID NO: 318355 - protein, 402 aa, unidentified
MNQPVLSIDVAKGKSVAAAFLSYHNCLYKPFTFHHSQEDFQRVLAVLEELKSVSGQEPKVVLEATGNYSKPLASFFAAHGYSVVLLNPLLTHQLKQKAVRKVKTDPIDAMRIAHVFYLQDPQPHVPLDETVQQLRVFCRQYQHWTALYGQTQLHFRAVLDLLFPGYDQAFQKVCNRTSLELLSRFPTPAELLAADPEEVLNLLLSNRRGRAWNETKRQQLLEIARHSLPDLHGIEAQKAVLRSYIHLLQTYQDCMDDLLRSMQTLAESIETYALLRTIPGVGPLTAAMLVAEIGDIKRFPSVKQLTAFAGLDSAVHESGTFKSKKNRISKRGSSYLRTALYQATVAGISKQIHGPRNSTLFQFYQQKRDEGKPAKVAIVAASHKLLRIIFGMWNSGTAFQAH

SEQ ID NO: 318356 - protein, 317 aa, unidentified
MDNKTEPDRYVGIDVAKGHVAVHVRPDGIAFNCKTDPPGLRGLLARLQPLEPTLIVMEATGGYEAVVAATLAEAGLRVAVVNPRQTRKFAGALGRLAKTDTIDAADIAHFAEAIHPEPRPMPDEQTTQLRALLARRHQLVVMAGAEQQRHDRAETPLARRSCAAMLRSLKAEITRIERAIDTLITASPIFCAKQDLLKSIPGVGDIVARTFIAELPELGTVDRHKIAALVGLAPMNRDSGRQRGERHIKGGRPQIRAPLFVACLSVIQHNLPLRRFYQRLVNAGKPRRLALVAVMRKLVCIANAILRTQQPWAHAET

SEQ ID NO: 318357 - protein, 423 aa, unidentified
MDTLHERCAGLDVHKAMVVACVRLMIGGKVNRECRTFDTTTTGLLALLKWLTESGCTHVAMEATGVYWKPVWNILGDGPFELRVANAAHIKNVPGRKTDVNDATWIADLTACGLIKASFVPEEAIQQLRSLLRARTQLTREQTSHTQRIQKTLEEANIKLDSVISDILGASGRRMIEAMIAGVRNPSKLAELAGRRIKASPKQLYDALHGRLTDHHRFLLRLYLKQYDALQAAIAEIDQQVDAAITRMDEEAKEGQPPFRSLIDLLCTIPGISILGATIILSEIGSDMSRFPTAGHLLSWAGLCPSQNESAGKRRSSRLRKGAPWLKTLLVQCAWAASRKKDSYYKAQFLRLRAKRGPKKAICAVAASMLTAIYHMLKDGTEHRDLGAAHFDRRSTEVKTNRLVAQLAKLGFKVELQLLADAA

SEQ ID NO: 318358 - protein, 353 aa, unidentified
MNKILAIDLGKNNSAICIFDRSSLKSKFMTIHTHKQVMHDLFTEYQDQIEIVLFETGSQMGWVADILWALNIPFKVANTNHAAWKWKNNPNKSDRKDAHRLAMMYHSGFFPTVHVPKRDIRQKRSVIAYRADIVTRITKVKNSIRALLSREDIHLPNNKKGWTIKALTSIRELALPIREVTDLEDIWKGHLHCELELLDNLIEQLRNIESKLDDLGRADEKVKLLRTIPGVGPRLSEAAVAIIDDPHRFKNGRHVSSYLGMVPRRWQSGQVDITGRISKCGNKLLRTLLVEVSWLGLREPWMREIYDKVRHGDKKRTKVAIVAVARQLLVRCWAILRDGSCWEADHAKKFVKC

SEQ ID NO: 318359 - protein, 389 aa, unidentified
MPGLSFHQGSTLGQYDIFSGLDVDKKSITVTYADSQQILCSLRVPYEARHLIAYVRKHFADRRVIFAYEAGPTGYGLYDGLTAAGFPCLIAPASMIPVAPGQRVKNNRLDSKKIAIALRNGELKSIHVPSPLYRHLRHLTKQRDLLVRQITATKIRIKALCLFEGMAFPPGKWSRQVIEQLQRFSCSEAVRFRLDGLLAALEFNQRQLLQTMRALRRFCRQEEELWRCLGYLRSIPGIGLIVGTDLLARIGDWRQLAGHKVSQLGSFLGLVPTEHSTGEKVHRGSINRAGDRRLRSKLIQSAWAAIRKDPELLEFYQAVYKRHSPNQAARKAIVAVARKLTGRIFAILKEQRAYEVRPALRSRPLTAEEIRPGASLDGPQKQEEAQRPS

SEQ ID NO: 318360 - protein, 346 aa, unidentified
MQKDKDIILAVDYHAENTEVRWLHCHTGEERCLNIPTTRAGILRLVDKALAEAAEVGGQVIWIMESTTGWARVKELIGSRVQFVLANVLQMPLPPKAYRRKTDKIDTGRLQREFLNGSLPESYQPTGKWRELRRLVDSRQDLVKRQTAVKNWISHFLHHETWEDRSGLWTAKGLKRLRSLKLSVGDRMVLDIKLAALEEIGSLLSRVEAEMQKAYEQWPEAQWVDEVRGIGMVTAVSILAHIGPIERFASAEHLISYAGLAPGHRQSDDTRHSGKIGGGGTDSHLRYLVIESMQWVCQIPRYREAFDRAASKHGKNVARIIVARMLLRSLFKMLHDGVRFNGVRAA

SEQ ID NO: 318361 - protein, 390 aa, unidentified
MMVLGVVTPRLGGRLEVLRQQLLGHGLLPGTCGTPLRKGKGMAMAIVDSTRPVVGGVDTHLDEHVAAVIDQVGGLLGVARFAVTPVGYRQLVAWMRGFGSLDRVGVEGTGSYGAGLARHLRRAGIAVLEITRPNRQERHRNGKDDDLDAVNAARSVLAGTANAVAKKTTGSTEALRVLVGAQRSAMRARISSMVQLRHLMFTAPDNLRDRYAKLSRKDLTTECARLRPRPEADGVRYATKVAAVTLAHRVQELEREIDELDVLIAHLVKQIRPGLLNVYGVGTDVAANLLVAVGDNPERIRSEAAFAKLCGVAPLPANSGKRTNRHRLNPGGNRHANSALWHVVLTRVSQHEPRTHAYVTRRREQGLSNPEIFRCLKRYVAREIFTAITR

SEQ ID NO: 318362 - protein, 388 aa, unidentified
MIYVGIDVAKLNHFASVVSSDGEVLVEPFQFSNDLEGFRSLSLVLDRYDRDQLLIGLESTAHYGNNLVEFLVAKGYRFCVLNPIQTSSTRKKNIRRVKTDKVDTFVIAKTLMQEEHRLFEKQDLDYLHLKSLGRSRQDLMKKRTTCKIRLTSYVDQAFPELQYFFNGVHHKAVYALLKEAQTPEQIASMHMTHLANLLRVASHGHFKKEKAQELRVLAQRSVGSNDSSISIQITQTIEQIELLDRQIDDDEAKIEEIVKAMGSVIMTIPGIRYIEAGMILGEIGDIHRFPSYSKLLAFAGLDPTVRQSGKFNASRTRMSKRGSRVLRYALVYSAHNVVKNNETFRKYYDLKCSQGRGHYAALGHCAGKLVRIIYKILSEDIAFDPNRL

SEQ ID NO: 318363 - protein, 374 aa, unidentified
MENTITYAAMDTHKKQHKIALHYPCQEEIVEFTINNTVRDIKKMVNKIKKHAPGKVEFCYEAGVCGFTLKRRIEQFNCRCCVIAPSLVPRKPGERVKTDRRDARKLLMMFKAGLLTEVHAPNEHQEAARELTRLRETAKDNLKRIRHQLLKFLTRHGYIYSNGNHWTQKHITWLRTLEFSEPMLANVFESYFNEMIYCIERLKNLDKEVELLAGSQEYKEIVGLLRCFHGIDTLTAITIITEIFEFGRFESPRHLMSYLGLTPSENSSGDKQKKGSITKTGNKRIRRLLNETSWHYRYRYVPSKALKKRRKGQPRWAVEIADAAGRRLSKRHRHLVSKGKMPCKANIAVARELAGFIWFVVTQYHARKNTKDAA

SEQ ID NO: 318364 - protein, 389 aa, unidentified
MKIFVGIDIAKLNHFAAAISSDGEILLEPFKFTNDADGFQLLVSKLESFDKNSIIIGLESTAHYGDNLVRYLVAEFYQVCVLNPIKTCQMRKNNVRKTKTDKVDTFVIAKTLMMQDDLRFITFFDLDMMDLKALGRFRQKTIKQRTRLKIQLTTYVDQVFPEIQYFFKSGLHQNAVYALLKEAPSPKEIASMHMTHLANLLKVNSHGHFTKEQAKELRVLAQKSVGANDSAISIQITQTIQQIELLDSQLEKIEAEMTDIMKFNDSVIMTIPGIGYINGGMILGEIGDIHRFSNPNKLLAFAGLDPSVYQSGNFQAKTTRMSKRGSRVLRYALVNAAWNVVRNNATFKAYYDAKRAEGRSHYNALGHCSGKLVRVIWKMLTDNVEFNLK

SEQ ID NO: 318365 - protein, 340 aa, unidentified
MPQPNDLSRSPIALNQDGTLIAVIEMSQSSWLVAGIVPGIARHPLKKLAADAAALLGLLERWRGEATQAGRQITRIAVAFEAGRDGFWLARWLRARGIEAYVIHPTSVAVSREHRRAKTDRLDTALLKRVFLGWLRGEPGHCTMAAIPTLEEEDARRPNRERESLVGERTRIVNRIKANLARLGIRGFKPTVRGASERLEALRTPEGAALPPNTQAELRRDMARLGFIVGQIKEIEDVRQKGLATQPDEGPHAMVRLLARVIGIGIETADMLVHEILSRNLRDRRAVARYAGLTGSPDESGSRRREKGLARAGNARVRRGMVQLAWRFLLFQKDSALAQW

SEQ ID NO: 318366 - protein, 433 aa, unidentified
MKVKYEDRLKQKVIAITTDTLVVGVDIAKNYQWARFVDFRGIEHDRALKFKNSKGGFETILARIREICKKENFAKAVVGMEPTGHYWKAFANWLEKQEGITVVLVNPYATKQAKELDDNSQTKSDKKDALTIAKLVKDGRYFELYLPHDVYAQLRGLSTTRTGLNKRKNAIKNTITAVMDEYFPEYEEVFKCPLSGKASRHILKTCPFPKLILGLGEDGVTDEIKRAVKKTVGRKKAVQLVEAAKDSIGVDYGEEAARLKLRLMLEELELLEKQTEELERQMEDTLRQTDYADFLLSIKGIGIVTLATCLGELGDPTRFDDPRQMSRMAGYNLVEDSSGKNKSGTKISKRGRKNLRGVLYQMALTMVATNDEMKQLYHYLKTREKAPLRKMQALVVVSKKILTLIHTLAKKKESYDPEKVFGHVRREQLKAAA

SEQ ID NO: 318367 - protein, 375 aa, unidentified
MDELSKIHVGLDVHKDSISIGVAEPGRGPARVVGKIAHDVGKLTKLLSRIGPPAQLHLVYEAGLTGYGLQRSLAARDYLCEVIAPAQMPRRPGDRVKTDGRDCVQLAECSRAGQLRAVWVPDPGDEAIRDLSRAREDAVNSRTQARHQLKGFLLRHGLRFAGKTSWTKAYHAWLGSLSFDAQSAQTAFTEYWLAVQAADARVRRLTQAVCDSVSGWRFEPVVKSLQALRGVAVVAAVGLIAEIGDLRRFEHPRKLMGYLGMVPSEVSSGDRVCRGSITKTGNAHARRLLTEAAWHYRFKARIGTHAQRRQQDLSPQVREIAWNGQLRLNKRFMMLQARGVQVNKACVAVARELAGFVWAIGRQTMIESGDWPHAR

SEQ ID NO: 318368 - protein, 388 aa, unidentified
MIYVGIDIAKLNHFASAISSDGEELIKPFKFTNDNDGFQLLLSRLDPLDKDSLIIGLESTAHYGDNLVRYLVAKNYKVCVLNPIKTSTMRKNNIRKTKTDKVDTYIICKTLMMQESLRFVTFYDLDLMDLKALGRFRQKTIKQRTLLKIQLTSYVDEIFPELQYFFKSGLHQKSVYSLLKEAPTPEAIASMHMTHLAHLLKVNSHGRFDKEMAQQLRVLAQKSVGASDSSLSIQVTHTIQQIELLDSQLERVEAEMTEIMKFNDSVIMTIPGIGYINGGMILGEIGDIHRFSSPNKLLAYAGLDPSVYQSGNFQAKKTRMSKRGSKVLRYALVNAAHNVVKNNATFKAYYDAKMAEGRTHYNALGHCAGKLVRIIWKIMTDNVEFNLD

SEQ ID NO: 318369 - protein, 337 aa, unidentified
MSKITLIGIDTAKNVFHLVGIDERGNYVFRKMVSRRQLLPALVRLEPCEVVLEACAVSHHWARQIAQIGHRVRLISPQHVKPFRRGQKNDYRDAEAIISAALSPGIHFVGVKSVGQQAEQALHRVRSRLLSHRNAAASELRGLLGEYGLAFNKGIKPLRAGAVRFADSEQAQALGLVELVWDVLEELDQLQQRLDGYTHRIEQRVRNDVTSQRLRDELLGVGPLSASALRVKVADVRDFTNGRNFAAYLGMAPGHRGTGGKVKIGKIRRGHDRYLRQLLIHGARAVVQHLGDKQDPQSRWLRGVLERRGFNIAVVAQAHKNARQAWAILAKEQALQS

SEQ ID NO: 318370 - protein, 356 aa, unidentified
MITIGVDAHKRVHVALALDEAGRELGQWRGPNSTVGWQALGQWVLGVLAFGGDRQWGIEGAWGYGRGLAQHLVAAGETVYEVNARWTASGRRSARRPGKNDRLDARAVALLVRQETPTLPQVQAEDETAVLNLLTTEREQALSESTRLRNQIHALLLQLDPEYQVHLPMLKSRASLAALETYIAPGGGPLQLERAASVRRLAQRLRLALTQAEELASRIRDSAAEDFSPLTRLCGVNLLTAGTLAGVLGPGRRFATDAQLAAYAGVAPLEASSAGLVRHRLNRGGNRRLNAILYRIALTQAHHSSEARAYLDRRVAEGKTRREAIRALKRFIIRAIWRLWQECRPVSNTSLEVRAA

SEQ ID NO: 318371 - protein, 355 aa, unidentified
MCAKKTGSLEDLAVVGVDIGKDTFHLVGFDRTGQLVMRKQIKRLALSATFEQLPRCIVGMEACLSAHFVSRTLRGMGFEPRIIPAIYVKPFNKGQKNDYNDAEAIAEAALRPNLRTVSEKDQDQLDLQALHRVRARLVSRRTATINQIRAFLIEQGITVRSGLRALKNSFETILEQRRDEISPRMRGILIGLYGDWLWLDKRIEDVSGEIEEISRTEENCANVMTIPGIGPMISTAMVAAVGKGEAFDRGRDFAAWVGLVPTQYSTGGRTILGRITKRGSRYLRMLFVQAAKVIMMRQNRWSTFSFGSWLTEAVKRMPRNKAAVALANKLARTAWSVLRHGTRFDAPRDMAMETI

SEQ ID NO: 318372 - protein, 357 aa, unidentified
MTANGPPVVGAILAIDLGKYKSVACEYRGASDGVRFHTVRTRREELCRLIERLRPGVVVIEACAMAGWVHDLCGERGVCCRVANTASEAWKFRHSKRKTDRDDARRLADLTALGQLPTVAIPAKAVRERRALIAVRQTLVGRRTTVRNRIRGILLGQGLPVPVGHRAWTELGRAGLAQLGRPLAACSAEDLWRGLLDLALTELGQVEALVAATEAKLNAQGRDDAATRLLQTVPGVGPRTAEAIVAHLDDPHRFRTGKQVSAYAGLVPRQYQSGESDRRGRITKRGSVVLRSLLVECAWALVRYNAWGRATYRHLTRGGPARRNVAIVALARRLLVRCWAMLRDGTAWRVGPAAAVH

SEQ ID NO: 318373 - protein, 348 aa, unidentified
MERSYFIGVDLHRVVMQICIRDERGEIVAEKRVHYASRDEGLAAVAWLRTFAPARVTVEAVGLNRWFVNACRAVGLEVLVCDPRKLDLKKLGKKTDRRDARELARRLWLGDLDRMATTYYPSDEEYGHRKLLRVRHQLVQMRQQAINPIRGLLNAYQIPAPAGVLYTIRGRDRLRTCRLPTPEMQAAFDALVNTLDTLQNQIDQLSRQIEAAVAQQPAVAAVRDVLPQIGAQSAATLVYELGDARRFRGARAVAAYAGLVPTVSQSADKTHHGRLTKQGNRELRWILSQWAVRLLARDPIARTWAARLRRRMHSNKIRMALARRLLVGVWIMLSRGEAFDLQRCLATV

SEQ ID NO: 318374 - protein, 345 aa, unidentified
MKKVMAGIDLHSNNVVIGIMDTDGKRVTSAKLPCELKEIAKFLAPFKKRLEQVAVESTYNWYWLVDGLQELKYPVVLANPAAMQQYSGIKHADDTNDAFFLAELLRLKILPTGQIYDAQLRPVRDLLRRRMTLVHQRTALMLSFKSLYTRTTGQEMTLSQLKELEIKEAQELYDHPANQIIAGMQIKHIEQLTESINKIEKVVMASARELPAYGKLTTLPGIGIILGMTITREVGSIERFAEAGHFASYCRTVQAQRTSNSKKKGENNSKCGNKYLAWAFIEAANFARRYDPQCRKWYDRKAAKTSKVIATKALACKLAKAAWFLMSEGSDYDAKRMFGQPATVK

SEQ ID NO: 318375 - protein, 489 aa, unidentified
MKSQPSKRARKDKKQGKEASNNPTLVKWNEMNRKQRREMMRKVQSEDLSLQVVHPHAAGIDIGNESHYVAVPPSRDPQPVRCFGCTTAELKKMAEWLTQCGIRTVAMQSTGVYWIAVYDILEEAGMEVYLVNARETKNLPGRKTDVQEGQWLMKLHTYGLLRHSLRPSQEIRTLRTYWRQRHDLVRSTGRHIQRMQKALTQMNIQLANVISDISGVTGQTILKAILDGQRDPRELAAYRDCRVEASEEEIVQALEGNWQEDQLFVLRQEQAGYEFCQKQITECDQQLAQYLARLEDQTQGATLPEETRKGRRKKKKGNPQFNLREELFRMTGTDLTQIDGIDVMTVMTVVSEVGWDMSKWKTENHFVSWLKLSPDNKISGGKVIGKGRMPTNNRATTVLRMAATTLRESDSYLGAQFRRFRTRLGPPVATKAMAAKLARLVYRMLRYGMKYVNQGAEFYEAQHRKQQVIHLKRKAAQLGLEIIEVAAAA

SEQ ID NO: 318376 - protein, 407 aa, unidentified
MGRYYIGVDWADKVHEVCVIDEAGEKVVQRKVEETAEGMGEFGRWLDERRAEGMELWAAIEKPDGRIVDLLLDHGAVVYPINPKALDRARDRFRQSHSKSDPFDAWVLAEFLRTDHGHLKTLRPNSDKAQELKILTQDHLRLVRSQSRLLNQLRITLKEYYPRPLEVFEDLTTQIALDFLQHYPTPEALSKLSQKQCRRFAREHHLGEQRQGELWQKLSKPQLRIPEHVVRAKSRLVEVLVEELKVVVRNVDRYQKEVERFFASLPAAKLLEKLPGGKSGTIVPMLWAHVGDAEGRWESFGQLQAQAGTVPVTKKSGRSQVVCFRYACNQRLRYAVYWLAFISLRQSEWARAYYDKQRARGHSHHRALRALGTKWLKILFVIWRDHVPYDETYHLANIARQYLRHAA

SEQ ID NO: 318377 - protein, 354 aa, unidentified
MKYFAGMDVSLEETAICVVDETGQMIKEARATSEPDALHALLASFNLPFERVGLEACSLTAWLHGELTSAGWPAICIESRHAKAAMGAMPNKTDRNDARAIAQIMRTGWFKAVHVKTPTCRSWRSLLVARRAVLNQMRTIENVVRAILRETGLKLGTPARKDFIVRAREFVAGEKGLAMMIDPLLEILATMLREFTRLTKQVLVIVRDEPVCRRLMSTPGVGPMTALAFRATIDQPERFKKSRDVGAHLGLTPRRYQSGETDIQGRISRCGDELARTALYEAAHSLLIRSKKWSALRAWGMKIAKRRGMARARVAVARKLATILHRMWVDNTKFRFGREQAANPTIKAITVVAA

SEQ ID NO: 318378 - protein, 335 aa, unidentified
MEQSSVCVVDASGRIVREAKAASEPEALVQFLRGLALPLARLGLEAGPLSQWLYTGLAAAGFEVVLLETRHVKAALSAMVVKTDRKDARGIAQLLRMGWFRPVHCKSPPAQEIRALLVARKQLQAKVRDVELSLRGLLRGFGLKVGEVSKGQFAARVRDLVAGHPMLEQIATAMLQARAGLQEEFAKLHRAMLAIARVEPVCRQLMTVPGVGALVAVTFTAAIDDPHRFAKSKAVGAHFGLTPKKYQSGETDVTGAISKVGDALVRTALYEAAHIMLTRSGRFSALKRWALAVAKRRGMKRAKVALARKLAVVMHAMWRDGAAFRWGKQSEAQAV

SEQ ID NO: 318379 - protein, 316 aa, unidentified
MTQISMTAGIDTSKATLDVAIHGSAEHWQVANAKAGWACLARQLHKKEVRRIGIEASGGYERGVIKYLRENGFIVVLLQPIQVRAYARAHLLRAKNDRIDAALIAACTAAIDRPRIEPDPRLEELADSLTFVEQIEEDMARLKTRLEHINDPRLRRLVQADIARLKARRAAELLRIAGRLRSHGDLARRFDLVLSVPGIGERTALALVIRMPELGLLDREQAAALAGLAPFDDDSGKHRGQRHISGGRERLRRSLYAAALPAAFRWNKTLIELYQRLIRRGKTHKVALVACARKLLIYANTVVARGTPWVKADAPC

SEQ ID NO: 318380 - protein, 337 aa, unidentified
MIVIGVDVHKHSLTAVAVDELGRTVAERSGPVGGEVLVWAQTLEVERLWAVEDCRHVTRGLERTLLEAGERLVRVPPRLTAPQRRRGRVRGKSDQIDALAVARAALQEPTLEGPRAGEAELRELKLLVEHRDDLVAERRRCQQRLRWHLHELDPTLMVPLGALDRAVWLDRLGRQLARREQSTQVRIARDLVGRCRTLTRSIGELDRELHARTKTLAPQLLELAGCGALSAAKLLCEIGPIDRFRSDAQLARHAGVAPLDASSGKHQRHRLDRGGNRQLNCALHRIAVTQGRVHPPARAYLERKQSEGKTRREAIRCLKRQLARTVYTTLKNEPLLT

SEQ ID NO: 318381 - protein, 318 aa, unidentified
MIKYHKHIGIDIGKYNFVVGIEGIKDTKEYENTSSGIFEFINDNKDILANSLTVVETTGGYELELLYSLCERGYVVHRADARKVKNFIRSYGNSAKTDKLDAKALGLYGKERADKLEVFKPESKQNIQLFRLVQRRNDLKQMLVAEKNRLQQANTDKFVKNSCINMIDVLSNQITEITNQVEVIISSDQLLKAKHEILKEINGIGNIVAFELLILLPELGKLTRRQIVSLAGLAPKANDSGKYQGYRKVGHGRAGVKPILFLAAMSARNSKTSGLRLFYERLINNGKKKMVALTALMRKIIVIANAKLKSLLFNLKHS

SEQ ID NO: 318382 - protein, 410 aa, unidentified
MEPIIMSCAGMDVHEKKVDVCIVHGSFDKPPKFEIRTFSTMTSDLEDLMIWLKKYGVTTIGMESTGIYWKPIFNVMESDFTIVLANAQRLKAIPRKKTDIIDCKRIANLLRYGLLPNSFIPPREIRELRDLNRTRRKLVGTMTSEKNRLIKVLEAANIKLSSVVSKIYGVSSLALIQSLLEKDKLSREEISQLAKGKLKKKVDLLEKALNGKLTEHHRFLLRMHLENIDHTAKQIKKIDEEIQRKMVPFQKESKLIQTIPGISEVNASAILAEIGVDMSQFPDEAHLSSWAGVCPGNNESAGKKKSSKTQKGNSFLKGALTESAWAASKTKDTTYNAFYHNILRRRGKKRALVALAHRMLIDIYYVLKTGEAYQDMGFEAVRERAVKRQERSMIRFLEKAGYSVIKAEAA

SEQ ID NO: 318383 - protein, 429 aa, unidentified
MNSTQNKKIEQVKETTMIVGIDVGSEKHYFRAFNWRGIELTRKPVAFSNSMEGFNSFYNSVVELMQKNELKEALVGIEPTGHYWFDLGQFMGEKNIKFVMVNPHHVHKTKELDDNSPSKNDRKDPRVIAGLVRDGRYFYSYMPTGVYAELRNASNRRFVLVEEQTRAKNRLQKWVAVYFPEYKGIYTHIDAKGGLLVLKQAPTLEEIVRLGVEGIIKIWKDAKLRGNGHKKAMLILNAAMKSIGLKAGLTEARMEIQDLIEDYELQTKRLERVNDLIKELCQQVRYADKLLEIKGIGITTVAGFIAEVGDITRFDSTKELQKLAGLELVADSSGKHDGKTKISKRGRKRLRYLLFEAAISVVGKNEEFKEIHRYYTTREKNPLKKMQSLIAVACKLIRVFHVILTKGISYDASKMLKDIRRPGEQLKAA

SEQ ID NO: 318384 - protein, 421 aa, unidentified
MERIEDDGQVVARIAGLDIGKAEVVCCVRVPAGGGGAGRLQEVRTFSAMTPSLAGMSDWLAGLGVERVVMEATSDYWKPPFYLLEAAGFDVWLVNARDVKHLPGRPKTDKLDAVWLCKVAERGMVRPSFVPPQPIRALRDLTRYRVDLVGERGREKNRVEKLLEDAQIKLSVVASDIFGVSGRAMLAALIAGQRDPKVLAGLARARLRGKIGALQEAFVGRFSDHHAFLLARMLTHIDTLNADIAAVEQRIEDLIGPFAQQVARLDEIPGVGAAAAAAIIAEIGVDMSRFPTPAHLASWARFAPTTAESAGKTKGNAATGHGNRYLARALGEAVVCAARTRTFLGERYRRLARRRGKKKAIVAVGRSILTIIWHLLTNPNKTFTDLGPHHYDTRAGTQHAVHNHIRQLQALGYQVTLHPAA

SEQ ID NO: 318385 - protein, 408 aa, unidentified
MQVLYARCAGLDVHKDTIVACVRCVSPPMHQEVRSFGSTTTELLALADWLGEHDCSHVAMEATGVYWKPVWHVLEGEFELVLANAAHIRNVPGRKTDVNDAMWIADLLAHGLIRSSFVPPQAIQQLRDLTRTRKQLVREVSQHSLRIQKVLEDANLKLGSVLSDVLGKSGRAMLDAIVAGQTDPEQLAALAQGTARHKTAELREALRGRISEHHRTMLKLHLQVVDALQRTLAELDTAVGKALAPIRQRARLLTTMPGVSDLTASVVVAEIGVDMSRFPSAGHLISWAGLCPRSDESAGKRRSTRVRKSGTWIKTTLVTAAWAAVRVKTSYLRAQFLRIKARRGAKKAILAVAASMLTAAYHMLRDGTEYHDLGSEHFDRHDRSKTIRRLLKRLQDLGCDVPVAAHVA

SEQ ID NO: 318386 - protein, 324 aa, unidentified
MNIIGIDVSKAKLDCAWFKEDNKVKTKVFTNQLEGWKELVSWAKTQTGNELSELHFVMEATGIYHENVATWLHDSGATVSIANPAHVKYYAQSLGGRTKNDKKDSIVLARYGIKEHPMLWHPAPQEMRALKALLTRLDAVEKDLQREKNRHEKIIVSDTPTAVLASIKQMIEHLETEQKTLEKLIDDHIKAHKNLKENKALLETIPGIGKVMSQRMLMILGTHQFKDAHQCAAYLGLVPVQKQSGSSIKGRSQLAKNGNKTVRAKLYMATVTATRYNPDIKAQYERLTKKGKSKMSALGAAMRKLVQICFGVFKHQLPYQPQSA

SEQ ID NO: 318387 - protein, 391 aa, unidentified
MSMYFIGIDISKYKHDCCIISAANQKVVSKVIIKNNKAGFNELLTIIHSLANPADIRIGFESTAHYALNLELFLENSLLTFMEVNPVLISEYKKSKTLRRTKTDSVDCESIARWLMTVEYKPHSKGFYHAYSLKSLTRLRDKLIRQHSFYLVKITNVLDHTFPEFKPFFNERLSKTALYLLENYGSAEKMARMNSASYEKLRSVSRGKFSPQQFLLLKELAVNTVGVNNSIFDVELNSLLSLYKSLVKEIDTIKKEINQLIEEVHPHYMSVPGIGPLSAAVIYSEYGDISNFTNPGQMLAFAGIEPGINESGTESHGGKMVKRGSSQLRYTLINCCLPLIRFDMTFATYYAKKRGEGKPHRVAITHVAKKLIRVIYALESQDIDFNAQELR

SEQ ID NO: 318388 - protein, 369 aa, unidentified
MNKEIYVGLDVHADTIAVALAEGGRGGEVRFFGTIQHSGDSVLRLTKKLTETGKIPAFCYEAGPCGYGLHRLLSKLGFDCAVVSPAMIPRKAGDRVKTDRRDAEMLARLWRAGELTPIWTPDEEQEAMRDLIRTRKQAMDARKVAKQQLLSFLLRHGLRYRNGKYWTKRHRRWLAELRRFPYPHQQLAFEELKRAIDQIETRVATLDKTIDEAVPQWHFAPVVDALRALRGVNTTVAATVVAEIGDIARFESPRQLMAWLGLVPSEHSSGSTTRRGRLTKTGNALARTMLVEASWSYRHPPKEGHPYLNRSAHLPQQIRDIGWKAQVRLCKRFRHLSRTGKPQPRVLAAIARELAGFVWDIARKTPLPA

SEQ ID NO: 318389 - protein, 312 aa, unidentified
MAHRVVDAGVDVSKPWLDVALWPTRETVRVSRDAAGLSELASWLTLHEVGRIGVEASGGYEREVIDTLQALGFDVLLLNPLRVRRFAQAKGRLAKNDRADARTIAQFVSVMVDTPQPARRRELDPLVEHLTLRRQLLDWSTDCTNQLEHLKNDGLRATIERQKARFEDVLATIEAKLAKLIAEHDDWSALSRRLRTVPGVGPVLAQTLIALLPELGTLSGRAITSLVGLAPFDHDSGKYAGERHIKGGRSEVRNVLYMAMLSAKQHNPLIAAFATRLAGKKFKVIMVACMHKLLVMLNAMVRDGADWRTNAA

SEQ ID NO: 318390 - protein, 344 aa, unidentified
MHQANISVAVLDSTGKSIIDCVLETKAATIVEFIRGLRGSLSITFEEGTSAEWLHGLLKPHVAHLIVCNPRKNALLKAGNKNDRVDARKLANLLRAGRLSPVYHGECGLRTLQELARSYLTITKDLTRVMNRLKAVFRSWAIPCAGQTLYSPRHRSDWLQKLPEPGVRRRAEQTYEQLDNLMTIRRKARIELLAESRKHPATHLLQGIPRVGPIRAALVIALLQTPHRFRTKRQLWAYSGLALQTQISGEYRLSGGELQRSKKPFVRGLNINYNRDLKAVFKSAATRGGRSSDAFGVFYQGLLDKGMKPSLAHLTVARKIAAIVLKVWKKGERFDPAQVKQPAA

SEQ ID NO: 318391 - protein, 410 aa, unidentified
MELLHRRCCGLDVHKETVVACLRLVADGKVTTEVRTFQTTTVDLLRLSEWLAANGCTHVAMEATGVYWKPVWHILDDGEFELVLANAAHVKNVPGRKTDVNDAMWLAELLAHGLIRASFVPDTQTQEMRNLLRTRKQLVREQSSHVLRVQKTLEDANIKLDSVLSDLMGKSGRAMLEALIAGETNPTKLASLADRRAKASHEEFREALHGRVTKHHRFLLRLHLNQIDALDAAMATLDAQVEANLGPFRTAVELIMSTPGIKNLGAHVIVSEIGIDMSRFPSHAHLISWAGICPRNDESAGKRRSNRLRKGAPWLKTTLVQCAWAAVKKKDSYLQAQFYRIKARRGPKKAIMAVAASILTAIYHMLKDGTMYKDLGCNHFDRRSTDKQKQRLVKRLAELGYAVEIKPLAA

SEQ ID NO: 318392 - protein, 366 aa, unidentified
MEATEEQGEWNGRTESGNPVWVWFGLDVSKESFTAARFHGLTKEASRPREKSFPLKKEGVAAFLKWRKSFGEKLLEDAVAMEATGPYTGRLCRLLLAAAPALRVSVCNPLSVSLYTKSHTPAKGDGTDAVYIAMFACDRQPREWRVPDRDQAHLRALENERKKLVELRTGLSNLGQTIEFKDVAKINREMIEEVEKRMERIEAAMKEIIKSRRDIAEEIALLDSVPGIGFTSAAAIYAMLGSLKQYTRKELSALSGVCPANAQSGKSLKKSRIDRRGPSHLRQILFCDSKWATKIPSVKALKDRLDAQENSSRMRSRCACMRKMLLVCRAVVVSGKPFDKSYNASNSLQESDEKSEKKSEIAVQTA

SEQ ID NO: 318393 - protein, 402 aa, unidentified
MNAVGIDVSKGKSMVAIMRPFGEIVSAPFEIKHTASDIHSLVELINSVEGESRIVMEHTGRYYEVLAHQLSEANLFVSAINPKLIKDFDNDSLRKVKSDKADAVKIARYALDKWQNLKQYNVMDELRNQLKTMNRQFGFYMKHKTAMKNNLIGILDQTYPGVNTYFDSPARSDGSQKWVDFASTYWHVDCVRKMSLNAFIDHYQNWCKRKKYNFSQSKAEEIYGKAKELVPVLPKDAITKLIIKQAVDQLNSASTTVESLRTLMNETASKLPEYPVVMAMKGVGTSLGPQLMAEIGDVSRFTHKSAITAFAGVDPGVNESGTHEQKSVPTSKRGSSDLRKTLFQVMDVLIKTHPQDDPVYQFLDKKRAQGKPYYVYMTAGANKFLRIYYGRVKEYLSSLPES

SEQ ID NO: 318394 - protein, 416 aa, unidentified
MKVVYSTCCGVDVHKTFLVATLITTEGITPHYSKKRFSTFNNSILQFKQWLIENNCLDICMESTGKYWVPIYNLLEDKIRITVANPKWVKAVKGNKDDVKDSKWIGDLFRLRIVPGSYIPEKPIRILREYTHYRYKLVSCKSSEKNRFQNAFTVCNVALDAVVSDMFGKSASSITDYLISTDSFDPEHCSTLLKGSLRDKVDSVIESIEGYQMTKEQKDRMLMVRSHLEFVQTSIGKLDKMVAPFESAITLLCTIPGVDRVSAITIISEIGTDMSQFASSKRLCCWAGLTPGNNESAGKKKSVRITRAGVYLKPALMQIAHASVTSNKSPYYKNKYNRICKRRGKKRAIIAVTRMILTAIYHMFITGEEWNPSDLYKIDMPQEMMEKQKQKALKQAAKLLISSGLIKAADISLALN

SEQ ID NO: 318395 - protein, 403 aa, unidentified
MSTFFAGLDWASQTHAVCIIDTHGSVREQLEVAHDAAGLAQLQRRLRHWGSPPLAIERPSGLLVDTLVEAGFTVVPIHPNAVKASRPRYRSHGAKSDASDAYLLADLLRTDGHRFKPLVAQSDEIRALRALVRGRDDLVAARVQLANQLRSLLDSFWPGAAVLFADIDSPIALAFIDRYPTPEAAARLGPKRMAAFCAQHTYCGRRSADELLRRLQEAPSAVCAELEMEAKGELARCLARTLARLIEQIRLLSRRIEHHVAALDDGRILMSFPRAGRICAAQILAELGSVRERFANPEQLAAEAGVAPVTYQSGRSKAVTFRWACNHRLRAAVTCLADNSRHASAWAAHVYSLAKARGCDHPHAIRILARAWLRVLWRAWIDRQPYNPAQHGAAQLIPNTLGS

SEQ ID NO: 318396 - protein, 400 aa, unidentified
MVAERQAEWENGSDCHTEAVLLKGKEERERMSKAEETRICVGTDLHKLQMTVCAEQEETGEVLLSEQYRTDEEGYKAFCEELHRIEEETGNPIAIAVEATGNARYFKNRMEKEGFEVLVVNTNKFKVITASTKKTDRQDAATLAYYLMKGMLPESHLCDQTSEELRRMLKARSILVSSMVKIKNQIHGMMLGYGIETKAAQLQSKKKRQELIQDLADHGYTQFSALSLQVTLNIVDAIGEQIKAVEKQIQEMVREDDTVELLMTVPGIGLINAATIASYTKDIERFDHDFKRFASYLGVVPSVHNSGDSEHYGRITKRGPQTLRTAFVQVAMGMIRQPQKTGEWKLMKDYELMKTNKGTGRAVIALTRKVARIVFAILNTREPFNPELMKLDERNKKQTA

SEQ ID NO: 318397 - protein, 347 aa, unidentified
MLIIGCDLHTRTQQIAMLDTETGELVERRLEHEKGEAKRFYEELKEAALVGMESTGYALWFAEMLAELGHELVVGDAAKIRAMEPRKQKHDRRDAEHLLNLLVRGDFPRLWLPSVEERDVRVLLEHRHQLVELRTRAKNGLQAIALNYGLARRGRLWSARGQEALQKLPLREGMARRREDLLRLLAQLDTWIHELDERLQREAEKREAARRLMTHPGVGPLTALGTVLVLGPVERFPDVRHVTSYVGLIPQEESSGSRQHFGHLTKQGNRLLRFLLVEAAQTASRCDPGLRRVYRRLAFRKGHALAKVAVARKLLIRLYIMLRDQIDYAEFVQRGSHAGMLGEVALA

SEQ ID NO: 318398 - protein, 330 aa, unidentified
MKKTQIIGIDVSKEKLDVIIHSSRQHFIVENDTAGFLRLLETVITSTKCKKQDLFFCFENTGKYSKMLSVFLHSQGILFLMAPALEIKKSLGISRGKNDKVDASRIARYAYEKSDRLVPTVLPGEKIDQLKSLLSLREKLVKHRTAYKNGITDLKDCYREGENIIIKSIQQRLIDTLDEEIDNLENEIANIIKTDPAMDRNYTLVTSVRGIGKILGLYLIAFTDNFTSFVDARSFACFAGTAPFANSSGMITGKSRVHPFANKQIKTVLNMAAMSAIQIKGEYREYYNKRLEIGKNKMSTINIIRNKILFRAFAVVKRGTPYVDLHRFAA

SEQ ID NO: 318399 - protein, 462 aa, unidentified
MPSRKTRLRVDRLGVRLNLLVVRVFTITTVNRYKHMPAEHVIHYVGLDVHKDSISVAIAVAGGELRFYGKIGGKVADLDKLIKKLAHSEVELRFCYEAGPTGYVIYRHLKKHDQECRVVAPSLIPRKASDRVKTDRRDSQTLARLFRAGELTFVHVPDQEDEAVRDLVRARLAAVKDQRRARQRVKGLLLRNGFVYEGGGSWGPTHLNYLARMKMPTAAQQIAFDEYKDAVTVTTDRVQRISEALEKHLDTWSWKKVVLALMTLRGIQTISAMTLIAELGDLSRFDNPNQLMSYLGLVPSEDTTGDSRKLGGITKAGNEPSRRVLIEAAHHYRLPARITRTLQERQHNQTREVRGIAWKAQGRLHGRYSNLAGKGKKPQVIVTAIARELAGFVWAIACTAMGRPPLPRADQPSKRSENSNPKTSGKVYHLSPDTKYQPTEKRPGRSSITNGKARSEGVCANK

SEQ ID NO: 318400 - protein, 349 aa, unidentified
MRFYTKQHRHYCGIDLHARTMYVCILDAAGQVLVHQNLPAKPEAFLETIAPYREDLVVACECIFTWYWLADLCAAEGIGFVLGHALYMKAIHGGKAKNDRIDALKIATLLRGGMLPQAYVYPAGMRATRDLLRRRLHIVRKRGQLLAHIQMTSQQYNLPPLGKRIAYPSNREGVAEHFEDRVVRKSIAVDLALLERYDALVTDLESYLVRQAKHHDAQAFALLRSIPGVGKVLALTILYEIHDVRRFDRVQEFASYARLVKCAKESAGKKHGTSGAKMGNVHLKWAFSEAAIGFVRHSEPGKKLLAKLEKRFGKGKALSILGHKLGRAAYYILLRGKAFEIERFAATAS

SEQ ID NO: 318401 - protein, 387 aa, unidentified
MPQPNDLSRSPIALNQDGTLIAVIEMSQSSWLVAGIVPGIARHPLKKLAADAAALLGLLERWRGEATQAGRQITRIAVAFEAGRDGFWLARWLRARGIEAYVIHPTSVAVSREHRRAKTDRLDTALLKRVFLGWLRGEPGHCTMAAIPTLEEEDARRPNRERESLVGERTRIVNRIKANLARLGIRGFKPTVRGASERLEALRTPEGAALPPNTQAELRRDMARLGFIVGQIKEIEDVRQKGLATQPDEGPHAMVRLLARVIGIGIETADMLVHEILSRNLRDRRAVARYAGLTGSPDESGSRRREKGLARAGNARVRRGMVQLAWRFLLFQKDSALAQWYRARTADARGGTRKTMIVALARKLLIALWRFVSTGEAPEGVVLRPAS

SEQ ID NO: 318402 - protein, 328 aa, unidentified
MNGYKIVIGVDVSKNSFTATVLYDNKKENFEVKSDPVEFEMKIKPYLKKFKKSDMLIIMEHTGVYHLKLANYLYENGYKVAVVNPFSIKKFMEAKMTRVKTDKADSFFIAEYGRTFFDGELYKPKSDVEKEIEVKLKILEDLQQQLTMLRNKRESLTYVPMKKLKENLEYYDELIRKIEKNIKELEKEIKELSKKNYQEEYKLLKSIPGISDRTIGMIISVYGNFERFKSVKDISSFIGINPSPYESAACVKKSGWIKKMGNPYARKILYMAALSAIRFNKYCRELYERLVSKGKAKKLALVAVAHKLLRQAYGVLKSRRPFDENFCT

SEQ ID NO: 318403 - protein, 368 aa, unidentified
MGKSSKLYVGMDVHKDSIDVAIGDAAGGEVRHYGAIGGEMAAVSRLARKLESTGKVLVFVYEAGPCGFGIYRMLRDRGHECWVVSPGMTPRSNADRVKTDRRDCLKLARLARAGELTPIHVPDQTDEATRDLVRAREDAVIMQRQARQRLGALLLRNDVRYNGKTAWSPAHRRWIAELKLPHAAQHIAFEEYVQSVDEAGKRIERLEAALGDELTRWRWRPVVAALEAFRGIRTIHAVRLVAELGDLTRFATPRHLMGFLGLVPSENSTGNRRRQGAITKTGNSSARRALVEAAWAYRYGARVSVGIAKRQSGLPKSVTDLAWKAQLRLCSRYRRLSARGLNRNKIIVAVARELSGFVWALGRQVKPL

SEQ ID NO: 318404 - protein, 412 aa, unidentified
MDVYCGIDWAEDHHDIALADRDGNLLARRRISDDAAGLAMLLALLAEHGDTPDDPIPVAIETPRGLLVACLRATGRQVYPINPMPVARYRDRHSVAGRKSDHGDSFVLASVLRTDMHAHRPLPAGSELAQAVAVLARAQQDAVWDRTTAHNKLRSHLREYYPGFLAAFADARGGILRPEARAILAAAPTPADAATLTLTQLRALLKKAGRSRGIDTEATRLREAFRAPQMRQLPLVEAAMGRQALALLGKLNAACAAASDLEHAAAESFNLHPDAGIITSFPGLGPLTGARVLAEIGDDRSRFQDAKGLKAYAGAAPITRASGKTKSVTRRRIKNNRLNAAGYTWAFSALTASPGARAHYDRRRDDGDRHAAAQRNLFGRLLGCLHRCLTTGQHYDENIAFPASTKQSRRAA

SEQ ID NO: 318405 - protein, 412 aa, unidentified
MKKHTYRSKNVNKINFTQVKERLANEPVVFAIDIAKEKQYGLLSNASGTVSELIWWTHTEQTVELLSALKELECPLDIVIESTGTYGDALRFQFRDCGFEIYQMNAKRVKDASEIYDGVPSMHDAKSATIITRLHRDGLSKLWVELNDDERTMNALRREYDMHQSQYQRNQGRLEAYLSRHWPEVCYLLSLDSVTLEKLLIEYGSPASIAADAKNAANNMRLWGKHLLSDGKIEAVISSACNSLGQPCIESELRYLQALAKELQHSRLQQKQAKQALEESIKSKDDLRELGALIGMVTTAVLFSCHLDPRKYDCARSYQKALGLNLKEKSSGRHVGQLKITKRGSSVARSYLYFAALRLIKNNSVVKAWYLNKVDPRAKNKTVIAVMRKLSKSLWYVGRGDKFDATKLFTVA

SEQ ID NO: 318406 - protein, 338 aa, unidentified
MRVYIGVDLHSNNSMIVVIDETGKVLYEKRLRNDLGLIVSELERYRKRCAGVVVESTFNWYWLVDGLMEAGYEVHLANTAAIQQYKGIKHTDDKSDARWLAEMLRIKVLPEGHIYPKEDRAVRDLFRKRHQLVRQKTSQMLSIEDIVSRNAGVGISGNDVKTITESGLDQLLPDPLVARAAKSNLRVYKCLAKEVIDLERTVLSRAKAVPGFEELLGVSGIGKTLGLTVLLEAGDMERFPGVGNFASYCRCAGSQKLSNGKRKGKGNTKNGNRYLAWAFVEAATFAIRYNPRVKRYYERKKAKTNGVVAVKAVANKLSRACYHVLKEGVPFQVERAFA

SEQ ID NO: 318407 - protein, 345 aa, unidentified
MDHFAGLDVSVKETSVCIVDDVGKIVREVKVASEPEALLAVLKNPAYHFKRIGLEAGPLSQWLYSALAGAELPVICVETRHMRAVLKAQINKTDRNDARGIAQMMRAGLYRPVHVKTLRSQKLRMLLTHRKLLQAKAIAVENDLRATLRNFGLKVGVVGTVKFEARIKELVEDVPDLAVLVEPLLVVRRVLREQISVLHRRLLAIVRDDDVCRRLMTVPGVGPVVALTYRVTVDVPVRFRKSKSVGAVFGLTPSRHQSGKSDRPGAISRCGDEMMRSMLYEAAQILLVRSTKWSWLKAWAMKIARHRGMKKAIVALARRLAVIMHRIWVNGTAFRWTQEQAAAAT

SEQ ID NO: 318408 - protein, 375 aa, unidentified
MKEKLRFLGLDVHAETIAVAIAEPDGEVRSLGPITNRAESIRKLIRKLGPAEKLRACYEAGPTGYVVYWQLAELGVQCEVVAPTLVPVKAGDRVKTDRRDAEKLARCYRSGDLTAVWVPDEGSEALRDLVRAREAAKQDQMRARHRLSKFLLRSGQRPPAGVRPWTRPYLIWVAQLRFTQLAQESTRQDYLHEVEHMRARVTRLEQAITEAVKLVSPALQKVINDLQALRGIADISAVTIAAELGQVSRFGSARELMGYCGTVPSEDSSGKRIRRGGITKTGNAHLRRIVGEAAWSYRRPLCIWYGLRRRQESISEEAKEIAWKAQHRLHKRYMKLGAAGKPQGKIITAVARELLGFIWAIGIRAETIASQQAVA

SEQ ID NO: 318409 - protein, 409 aa, unidentified
MEVLYPRCCGIDVHDDFVVACFSRVEQGQRKKEVQRFRAVTGDLIALRNWLLERGCTHVAMESTGVYWRPVYDRLFGFFELTVANAQHMKAVPGRKTDKQDAEWIADLLQHGLLKKSFVPHREQQDLRGLTRLRTTLVQERARLVNRLHKTLQEANIKLSGVLSDIVGVSGKAILHALAAGETDGHRLARLAHPSVRCTHDQLADALESEIGAHHQFLIHELLTLIDGLDHSITHLEHKIEEQLQPFEKTLERLEEITGVSRRILHVLLAEVGTDMSRFPDDAHLASWAGMCPGQHESAGKRLSGRTRKGNRWLRAALIQAAHAAGRTQTYLGEQYRRIAKRRGKKRAAVAVGHSILVIYYHMMLTGEHYQEKGVEFFQQRDKQRHERRLIQRLERMGYQVTLRSGPAA

SEQ ID NO: 318410 - protein, 416 aa, unidentified
MSLSLSAAVPAAAFFTGIDWAAASHAVCVVDNAGHVKCQFIIEHSAAGFAGLIRRLAALGEPAGVPVAIERPDGRLVDALLQAGHPVVPVKPTAIKAWRDGEVVSGAKSDPGDALVIAEYLRLRQHKLRVAVPYSAQTLALRTVTRTRGDLVEARVAATNQLSALLDSHWPGAKAIFADVQSPIALAFLTRWPTAASAAKVGEKHIAAFCSRHRYSGRRPAAELLARLRAAPAGTAGDVLSQAVRSAVLAQVSLLQALNTGIKDLDQSVRARLGEHPDGKIFTSLPRSGQINAAQVLAEWGDCREAYDSPDAVAALAGLSPVTKESGKHRAVSFRWACNTRFRAAFTTFADNSRHASPWAADIYNSARTSGKDHPHAIRILARAWIRVIYRCWLDGVPYNPEQHGNASKLTNQMAA

SEQ ID NO: 318411 - protein, 357 aa, unidentified
MKKGYQKDKTLARGKDVYIGIDVHKANWHVAVRVDGEEVFHGSMASEYHSLRKLLDRFKECRIKVAYEAGPFGFWLYDKLIVDGIETIVVPPSLIPMESGNRVKTDKRDSRKLARLLESNMLKKVYVLTEEDRADRELTRTRRQLLEHRGDVMRQIKSKLLFYGIKSPFSNRREYWSKLYVKWLRELTFEHEVLKAPFESLIDLYEYLTLQVKKISKQVVKLSRSDKYNHKMNLIRSVPGIGILIGMELLVELADIERFKTAEEIASYMGLTPSEYSTGQHVRQGRITRCGNKRARTCLVESSWHLIVKDSLMRSKYMKLKSRKGAKKAIIAIARNLIIRIRRIFLNDEPYVVGMAA

SEQ ID NO: 318412 - protein, 366 aa, unidentified
MKNVTTYVGIDAHKKDLFVAMLMGNEKTPVTWQLANEPRAVQRLVRKLERETPGPIRVFYEAGPCGYALQRQVTTSRVSCDVVAPALIPRKPGERVKTNRRDARKLAELGRAGLLTVVQPPTPADEAVRDLARARDDAREDLQRCRHRLGKLLLRRGLHYAGRNWTQAHRGWVDSLTWSHAAERAVVEDYQLAIDHTAARLVELDARLAELAEQAPYREPVGWLRCFRGIDTLTAMLILAELHDFRRFGSARALMAFLGLVPGEDSSGEKHRRGRITKMGNALVRRILVEASWHYQHRPGVGRALKARRTDQPARVIAIADKAQQRLCRRFRRMLAEHKPPAKVAVAVARELAGFIWAALQSPVVA

SEQ ID NO: 318413 - protein, 355 aa, unidentified
MLADRVDYIIGVDTHTATHTAAVVAPTGAALAHRTVPADADGYLHVYRFAIEQAPGRRVWAIEGTGSYGAGLTTHLLEQGEWVVEVDRPARPARRNGTKTDDLDAVRAAREALGREHLAQPRQRGDREAIRVLVTTRQSAMQARTCAINHLKALVVNAPERLRQQLRALATDQLLARCARLRSHPTQPIEYRATIAALRRTAQRSLALAAEADDLHAELDTLIRQRARWLLAEPGIGVICAAQLLNAWSHAGRLRSEAAFAMLGGAAPIEASSGKVVRHRLNRSGDRQLNRALHTIVLSRMAYHAETRAYVARRIAEGKTAREIQRCLKRYLARRLFKLLEAPPAHAQKEKIATT

SEQ ID NO: 318414 - protein, 413 aa, unidentified
MIKREKIELVKKQGIFAGIDIASKRHRVRFIDNYGEEKVKPVSFFNDRGGIQKLEENIRKITDIDHNIIFGMEPSGDYWKPLAYYLRGKGYPVVLVNPYHIKRTKEIIDNTQDKTDNKDAYLVADLTKQGKYFYPVFPEGIYAELREVSIAWERTSQQLTRAKCYLANFLAKYFPEYRGIFSDILGKTSLYILTHFPLPGDIKKLGPKRLSRIIKKVSKGKIKEGKIDLFYQKAKESIGLKDGSQTAKIFLKEVLSDIKRFLERKLELKKIMKELLRQTGYGEYLLSIPGVGVVTGSLFLGEIEDPCNFQKASQIEKLAGLNLVENSSGKKRGEKKISKRGRNTLRYVGYLVATVAVSKNPEIKELYQYKVKECKKEKMKALTGISAKMLRIMFIVCKKKTLYNPEEIKKFFS

SEQ ID NO: 318415 - protein, 337 aa, unidentified
MSIIRIGLDTAKHVFQLHGVDETEQPVLRRRLSRKEVEPFFAKLPATRIGLEACGAAHYWARVLRALGHEAVLLPPQYIKPYVKRGKNDALDAEAICEAMSRPGMRFVPVKSAEQQAALMLLRTRELLVKQRTMLINAMRGHAAEFGVVAAKGLGKVSELLQRAHAEGASVPTLALEMLNLLASQFDALELRLKTIEAKLMAWHKADPVSQCLATQPGIGPIGAVSFALKVTDPKAFRSSRHFAAWLGLTPKENATGGRSRPGRISRQGDESLRRALVLGATTVIQFAKPGRASPWLIQLLARRPKKLAAVALANKMARILWAMMVSGELYRRPQPV

SEQ ID NO: 318416 - protein, 372 aa, unidentified
MNSIVYVGMDVHASNYTLSCYTLTSDECFATVQMEPDVKNILTYLKKVQRNLGTPCEFRCGYEAGALGFSLYYQLQKHGIPCTILAPSTMPTFHRNEIKTDRRDAMKIARCLAFGAFRPVHIPTKEDAAVKDFIRMRDDHKIALKKIKQQIQAFCMRYDLHFTEGRSYWTQRHLAWLKALALDDLLREVLDEYLVTLHQLADKIEHFDARIEELAQGERYAENVKKLSCLIGVRTHTALALVAETGDFRRFAKAEQYAAFLGLVPGERSSGDKQSRIGITKAGNTHLRRLLIEASQCYGRGKPGYKSRLLKERQQGNTSEDIAYADKANERLRRKFYRMVLRHNKKHNVAVTAVARELSCFIWGMMTGHTAI

SEQ ID NO: 318417 - protein, 308 aa, unidentified
MTSNRQYIAIDIAKQTLQVQSDLKSLSLNYDEVGLKQLRAFIKQHERPMIIAEATGGYERPLMSMLFKYNISVALINPRLARAFAVSEGIKAKSDPIDADMLLRFAKEKNPRPTEYIGAEREELGALMDRRSQLTEHIAKEKNRLDKSSKSICGSIKKMIRLLDKELALIEARITKLIDSNEQMKAQSKLMQEVCGVGANTAWSILAYLSEITSLNRNQLVALAGLAPYNRDSGKYKGKRSIQGGRAKVRATLYMAATSASQHNAVIKDYYQGLKARGKPSKMALVAVMRKLLIHLQSILKKQQLLLD

SEQ ID NO: 318418 - protein, 347 aa, unidentified
MVHVGLDLSRTRLDVHVMDESGAPLAVTTALPEAGGLAALVSRIGAEFGGPVYAAIESMNGARFVHDQLELAGWQVEIADAQKVKGLAPLACKTDKIDSWVLAELSRRDLVPAIWLPTPAVRAERERARWRLHLVRHRTALKNRIHATLLAFGHPCPVSDLFGTGGRELLARLALPEPWAADTTAALHLIDELDHEVAECERVLRQVGADHRYVPLLMTTPGIGWVLGYTIAAEIGDIARFASPTKLAGYTGLCPRVYQSGGKDHRGPLSKNGPKYLRWALIEAAVHAARHPVYAERYRRTKARLGRQRGPKVAQVDLARRLSEAIWHMLSTNKPFAPAGAALSLAS

SEQ ID NO: 318419 - protein, 339 aa, unidentified
MELHAVGIDLAKTVFQLHGANAHGKTVLQKRVSRAKLMETVAQLPSCLIGIEACQGAHQWARRFEALGHTVRLINPQFVTPYRRGNKNDGNDAAAICEAVTRADMRFVPVKQAQQLDVQAVHRARERIVKARTALINQIRGCLAEHGIVMPQGANKVRQRLPEILEDGENGLSGLARQTYHLLFEELQALDARQAQFDALLKQAFKSDEACQRLETVPGVGILTATAIVAAVGGAKAFKNGRQMAAFLGLVPRQHSSGEKQRLGGISKRGNTPLRTLLIHGARAVLRFAGTKTDARSRWLQALVARRGMNIAAVALANKMARTCWALLAKGECYRPALA

SEQ ID NO: 318420 - protein, 397 aa, unidentified
MNSVGIDISKGRSTIAVMRPFGEIVISPFEVRHTDSELSELARRLKSLNGETRVVMEATGNYHAPVAKLLHDAGLYVSVVNAKLVHGYGNNDLRRVKTDRKDAVKLANYGLDRWLTLPRYVPEENTRLLLKNCYRQYRQYSKVQTVLKNNLISLLDMTFPNANRLFVSPARADGSEKWVDFVAEFWHCECVSERSLKSFVNKYWRWCRKHGYNFSEEKAHAIYDEASGHIGVMPKSETTKLLVEQAVSQLSATSAALAALKQEMQSLSSQLPEYPVVMGMFGVGPILGPQLIAEIGDVRRFYSKKALVAYAGIDAPPNDSGDVIGRHKSMSKVGASSLRRTLFLIMSAYLQNSPPNEPVYQFMDRKRAEGKPFRVYMMASANKFLRIYYARAMELYK

SEQ ID NO: 318421 - protein, 457 aa, unidentified
MYGPFTVASSTRIRFAVSLQLLRVTAPSLVRRVEVVRVQVAQDDQEIIARVAALDIGKAEVVCCVRVPGQGPRARRMQEVRTYTTMTRSLLAMSDWLTGLGVTRVVMEATSDYWKPPFYLLENSFETWLVNARDVKHLPGRPKTDRLDAVWLCKVAERQMLRPSFVPPPAFRELRDLTRYRVDLITTRTSEKQRVEKLLEDSQIKLSVVASDIFGVSGRAMMAALVAGERDPKVLADLARGSMRGKTARLEEAFTGRFTDHHAFLLRTMLARVDGIDADVDRVQGRIDEQIAPFAAAVTRLDEIPGIGVTTAQVIIAEVGLDMTRFPTPDHLASWARFAPGISESAGRKKGGSATGKGNRYLARALGEAAVGAGRTKTFLGERYRRIAKRRGKKRAIVAVGRSILMIVWELLNDEEKRFVDLGPGYYDSRVNRNRSTRNHVRELQALGYKVTLEPAA

SEQ ID NO: 318422 - protein, 347 aa, unidentified
MRQQPCYVGLDVSLEQTSICVLNDAGAVVWRGKCASAPDSIAAILRKHAPGAVRVGLETGLLSTWLFHELKKQDLPVICIDARHAKAALSLRVNKTDTNDAHGISQIVRVGWYREVVVKSMDNHALRAMLSARAHLVAQSVTLANSIRGLLKVFGLVIRRAKGGRFDDLVRAAIADQPAMVVAIIEPLLAVLMATREQLAGYERIVRRRARADQVARRLMTVPGVGTVVALAFVSTIEDPDRFKRSSSGGAYLGLTPRRYQSGDVDRAGRISRCGDGMMRSYLFEAANVLLRRSARPCRLHSWGRALIERIGGRKAVVAVARKLAVLLHGMWRDGSEFRFGDVVTVK

SEQ ID NO: 318423 - protein, 328 aa, unidentified
MNSICLSTEQVILPVLGLDVAKKSIQAELRIAGKNVRFGFANNPKGFAQLARILDQHNAPKIWAGLEATGPYSHALALWLHARAHRVSVLNPRRVKQYARSAGNRNKSDRLDAAVVADFLCAHRPAAWRPPLQELVQLRALVRRREELSLMLQAEKNRLEGVASQVRSSLERTIVTLCAEKARVEKLIGQQIRSHKQLCRDHQLLCTIKGIGSLTAAILLAEMAGPGQVQRARQAAAHAGLVPRHEESGTSVRRNRGIGKEGNRYLRKALYMPALVAIKYNAPLRYFASRLRAAGKPKMKIICAVMRKLIHIAFGILKHQQPFNPSLA

SEQ ID NO: 318424 - protein, 347 aa, unidentified
MVVVGVDVHKRTHTFVAADQAGRQLAELTTRTDPKGLARAIAWASREFAGQDLVWGIEDARHLSTRLEIALLDAGQQVVRVPSKLMAERRRVARSQGKSDPIDALAVARVVLREPDLQPATLPDQSRELRLLTNHRDDQVKHRTALINKLRDHLHLIDPTLDPSPRSLARAKTRRELADFLADRPGIDARLARELLTDIETLTGRIDELEEELAALVADQAPQLLEIPGCAALSAAKIIGQTAGITRFATEAKYARYAGIAPIPVWSGSTNGKVRLSRAGDRQLNAAIHRIALTQIRRPSPGRTYYDQRRAAGDTKAAALRALKRRLIRVVYTTLNQPHERQLPAAA

SEQ ID NO: 318425 - protein, 432 aa, unidentified
MKAVVERCAGIDVAKKMLNVCVLNGPADQDPEAELGLFGTFNVELDRLRNWLLEKGCQQVVMESTGSYWKPVYAALEGSGIEVKLANGEDVKARRGHKTDWDDCQFLANLLRHGMIRASFIPPQAIRDLRDLTRRRRQLSGAAVSERNRVQKVLEEANVKLGSVLSDVFGVSGQLMLEKLLDGEPDVPVIAELAHGKARQKIPEIRQALEGHRLRDHHRTMLRLSLEHIAFLERQISAIDEAVGKLIEREGYQESFELVRSVPGVQEITAAALLAETGAEMNVFPSAGQLSSWIGVAPGNRISAGKNKSGATTRGNRWARTTLVECAWAAAAQKDSVLKERFRRLSVKGRKVALIAVAHQLAIILHRTLSSKLPYQEPTEPFPDERTRQRLIRHYVRRLGKLGVTVHSLRPDSGSHRKTKTGTKIHGQREEP

SEQ ID NO: 318426 - protein, 338 aa, unidentified
MSAIKTIGIDLGKSTFHVVGHDYTGQQRYRHKFSRSKLLPFISVHEPVLIAMEACCGAHWLARKCQDYGHQVKLIPPQYVKPYVKSHKNDFIDADAIAEAATQPRMRFVSPKTEQAQLGVVIRRIRTGYIRERTAIMNRIGSILTEFGFSFPRGHANMKRLFQWLADTGQQVPPLLIFELRNQLDHYNELNNKIKEQDKKLETLNSGNELFTILQTVPGVGPMTAACCISSVSDPEDFSNGRNFAAWLGLVPFQYSTGGKPRMLGISKRGNKELRELFIHAARAVLWRDGTAEKYFGKWLIELKHRKPFNVALVALANKLARIAWSVMATKKPFEIRI

SEQ ID NO: 318427 - protein, 381 aa, unidentified
MTTAVTHKTNVHTTEATLFVAFELSEKTWKLGLTMGHGQKTRERNVTARHQERVLDEISLAKHRLGLPETAPVVSCYEAGREGFWLHRFLLAHGITNHVVDSSAIEVSRRQRRAKSDGLDVRKLLSMLIRYEQGEHQVWQVVKVPSVEAEDQRHLHRDLETLKRERASTTTRIQGLLSSQGIQVSTLAKLPEQLDTLRLWDGTPIPPGLRRRVLRVYAHHTFLNEQIAAIEAERRAQLQTSSDASIDQIRQLMMLKGIGINGSWLLVMEFFGWRAFKNRREVGGLAGLTPTPYQSGESAREQGITKSGNPHVRWMITELAWSWLRFQPESALSVWFRERFGDGGKRLRRIGIVAVSRKLLIALWRFLETGVLPEGAVLKEG

SEQ ID NO: 318428 - protein, 384 aa, unidentified
MLKPNDLNQSRIVLKQDSTLIAVIEMSLSSWLVAGIVPGVERQPLKKLAVDESALLKRLNRWREEAEKAGRRIERIAVAFEAGRDGFWLARWLRARGIEAHVIHASSVAVSREHRRAKTDRLDTELLKRAFIGWLRGERDHCKMVAIPTTKDEDAKRPNRERQSLVGEQTRIVNRMKAALIRLGIRGFNPKLKKAAGRLEDLRTPEGEPIPPNTLAELRRDMERRRLVSSQIRQIEEARLERMEQAPGDGPHAMVRLIARVIGVGIETADMLVHEVLSRKLRDRRAVARYAGLTGAPDESGSKRREKGLAKAGNARVRGGMIQLAWRFLLFQRDSALAQWYRTRTEGGRNRKKIVVALARKLLIALWRLATTGEVPAGVVLRAA

SEQ ID NO: 318429 - protein, 412 aa, unidentified
MEVVHERCAGMDISKGDAKVCVRTPSTRAGFYHNEVTTYGATTNEVLRLRADLLAARVSVVVMEATGDYWKPFFFVLQEQLNVELVNAKQAKNIPGRKSDVSDARWLAELAAHGLLRASFVPEETQRQLRDLTRTRKHYAEEQNREYSRLEKNLEDAGIKLSSVASSLTLVSVRSILEAMVTGQRDPQVLASLVHPSMRKKTLPLVEALTGRFTDHHAFMVKTHLGTIDYLGEAITGLETRIEELMTPFRGARDAIMDIPGIAATVADGIIAEIGADMDVFPSPGQLASWAGVAPGQNESAGRIKSTKTTHGNHYLRGYLGIAVLSISRTKNTYLGVKYRRIASRRGKLKAVVAIERTLLVIIWNMLHNGVAYTELGADYYQKLNPQRTIDRAIKQLTKLGLNVSITPTAAA

SEQ ID NO: 318430 - protein, 391 aa, unidentified
MFYIGIDIAKKNHEASIIDSSGKSLSKSISFPNSTKGIEKFNNFIAEFGVTTNNCIIGMEATGHYWISLFSYIIDLGFTCYVINPIQSDAFRKMYVRQTKNDSVDSFIIAQIMRFGEFSISNFSDENTFALRNLTRYRFALVDECSDWKRKLIAILDQVFPEYSSLFSNIYGVASKELLSKYPLPEDMLSIPAEELGNLLCKCSKGRLGINKAEEIQSCARETFGIKFAKRSFSFQIKQIISQISFLEEQLKEIEIEISYLLEDICPIITTITGIGSVLGASIVSEIGNISRFERANQLVAYAGLDTRVKQSGDFSATNTKLSKRGSPYLRRSIWLAATVAAFKDPALSIYYQGLRARGKAHGTAIGAVARKLTNIIFAVLRDQKPYTPNI

SEQ ID NO: 318431 - protein, 366 aa, unidentified
MKKISTVQVFGNEIFKEQKLTIGLDLGDCWSFYCVRDEAGQVIFEQKLPTTPEAMKQTFGKIPRSLIALETGTHSPWVSRLLTELGYEVLVAHAQKVQLITKSSRKDDRHDARTLARLARVDPELLGAVRHRSAQAQIHLTVIRARAELVSARTALVNAARGLVKSYGERLPKCGTYQVSGKLAEGLSAELREVLVPLLKEIESLNERIQEYDERMEKIAKEEYPEVSLLQQVKGVGTQIALTYVLTIEDPYRFAKSREVACFLGLRPGRRNSGKSEPQKGISKEGDRYLRTMMVQGAHYILGPFGEDSDLRRWGLKLAERGGKNAKKRAVVAVARKLAILLHRLWVSGEVYEPLRNSQKAMRAVA

SEQ ID NO: 318432 - protein, 358 aa, unidentified
MVTGPKHQKEKRSMEHFAGLDVSVNETSVCIVDDTGRIVSEAKVASEPEALLAALKNRAYHFKRIGLEAGPLSQWLFSALAEAGLPVICVETRHMKAVLKAQINKTDRNDARGIAQMMRAGLYRPVHVKTLRSQKLRMLLTHRKLLQSKAIAIENDLRGTLRNFGLKVGVVGTVKFEARVHELVENLPDLAVLVEPMLTVRRVLREQIVILHRRVLAIVRDDEVCRRLMTTPGVGPVVALTYRATVDVPARFRKSKSVGAVFGLTCAKYQSGELDWSGRISRCGDEMMRSMLYEAAQSMLVHSKKWSWLKAWAMQIARRRGMKKAIVALARRLAVIMHRIWVDGTEFRWTREQAAAAA

SEQ ID NO: 318433 - protein, 343 aa, unidentified
MQVVRTVGLDIAKSVFQVHGVDADGQVVIGRQLKRRYVLAFFEKLPACLVGIEACASSHHWSRELKALGHTVRLMPPAYVKPYVKRQKNDATDAEAICEAVTRANMRFVATKTPEQQSGLTLHRTRHLFIRQQTAVINVIRAHLAEFGIVAPVGRKGVEALLDVVANPTDKRVPAIARACLAALGAQLCRLKEQILEFDRMIIAWHRSHEASKRLAAIPGVGPILATALVASVADPKAFRSGRSFSAWIGLVPKQHSSGGKDRLGSINKQGDRYLRSLFMAGALAVIRYAKIHGSRHRPWLTALLARRPSKVAAIALANKIARMVWAMMARGERYKEPVALAA

SEQ ID NO: 318434 - protein, 357 aa, unidentified
MLSSNVKYIGLDVHKEAITVAVRNGAGKLVVESIVETKASTLLDFLHGQRGELHVTLEEGTWANWLYDVLKPHVREIVVCNPRRNALLKEGNKNDKVDARKLSELLRAGLLRAVYHGENGLRTLRELARSYEVVSKDLKRVMNRVKSLYRSWGIPCTGTEVYSRRHREQWLKKIKEAGVRRRAELFYQQLDALQALRHTVRGEFLAESRRHQAVKVLRQIPFIGPLRAAQLVALMQTPHRFRSKRQLWTYSGLAVETHDSGQYRYVDGQLQRSKKPQQVRGLNQNHNHAMKEIFKSAALNATLRAGPFQDFYQGLLARGMKPELARVTLARKIAAITLTLWKKGECFDAKYLKPQAT

SEQ ID NO: 318435 - protein, 324 aa, unidentified
MNITTIGIDLAKTSFSLVGSDKHGKIVLRKTLSRNKLLPFIAQCPSCLIGLEACSGAHYWDREFEKLGHQVRIIAVKFIEPYRKGSKNDNNDAEAICEAVRRPNIWFVPVKSADQQAALCVHRVRQGVVRDRTSWVNRLRGLLSEFGIVIPKGRYSVQSAIPAILGDPDNGLPELARQMIHDLWLCIQHANDQILGYDRALSRLSREDETAKRLLTIPGVGEQIATGVVASVPDPRLFKNSRQFAAWLGLVPRQYTTGGKIRLGRITKRGDKYLRMCLVHGARAVVANLGDKQDHVSCWVRDLIERRGYLRAVVALAARNARLI

SEQ ID NO: 318436 - protein, 344 aa, unidentified
MRRHARTSNLQGWDMTDAPELIFVGIDVSQATLEVALNDKDKTQTLTNDEPGLKSLLALLTAIRERVGVVLLEATGGRERPAAATLCAHGLAVMVVNPRQAHDFAKAMGYLAKTDRTDAKMLSQFARTLHASDRRERLLYKLPTQEQETLLAMVTRRSQLVAMRVAESNRLASMHASQRKSIRAMLKMLDQQIGRIDDDAGGFLKEHFKDKLDLLKGLKGVGPGTQAMLMAALPELGQLKRREIAKLVGVAPLNNDSGTFKGRRCTWGGRANVRSALYMASLSAVRHDPVIKGFYERLVQAGKRKKVALTACMHKLLTIINAVIKSGTAWQPSYPQPAPALISA

SEQ ID NO: 318437 - protein, 331 aa, unidentified
MKKIIIGIDVSKLKLDVGHYTSEGRVKSNCVVIENNTTGYNDMLTWFKKKKFKLKDVLICMEHTGIYTDQLTKFLEKKKIPYTLQSPLHLSKSLGIVRGKDDAIDAFRLSEYADEKKGKIKVSKRAPENQIRLKQLASERKQAVYALAKVRQIKTEIAVHQKASSRNRKEKQIVLLKKIISDIENEIQSVIESDNELLKNYKLMLSINGIGPVNAYSTIIFTRNFTLFPDARSYACYVAVAPFPHQSGSSIHKKTSVSKIGNHYLKAILGQAARSAIIHDPQIRKYFNRKFNGKKGPDSNYGQVLNAIKFKLICRMFAVIKRQTPYISLDF

SEQ ID NO: 318438 - protein, 384 aa, unidentified
MKKDNILFIGLDTHKEETQVTYTLDHRTAETIDLGRIQTTKAAFIKLARQLQSKYPHATLHFVYEAGPCGYWIYRLLTSLGHCCFLVAPSLIPKKPGDRVKTDKRDAQNLARLLKCNELDPIYVPEPEDEAVRDLSRAREVAMRDLNDAKYQLKSMFLRNNIRYKGSDSWSLKHLRWLTEIVLPHPCQQIVLQEMIQTISERMARLKRLDNELTHQVKQWRYYPVVKAIQALRGVRLIIATGLITELGDLSRFDTPRKLMKYVGLTPSEHSSGDKRKLGGITKCGNGRARRLLVEGAHSYRHAAKISKEMQVRQEGLPKEIIDKAWEAQLRLCRRYQRLIQRGKPRNVVITAIAREMIAFIWSISREVVLPRVDPKTRLSRVPA

SEQ ID NO: 318439 - protein, 339 aa, unidentified
MREVSTIGLDLAKKVFQVHGVDAAGETVVRRVLRRARVLVYFAQLPPCLIGMEACSTAYYWARELSKLGHRVKLIPPAYAKAYLRRNKNDAADAAAICEAVSRPSMRFVEIKSEAQQAAAGIHKVRDMLMKQRTMLINALRGLMAEFGIVVGAGTRHVGELTALLADPEEHRIPALLKDGLRRMAEMLRALERQLEGIDKQIVDWGRGNATCRHLITAPGYGPILSSAMAAIVVNPAAFRSGRDFSASLGLVPRQDSTGGKVKLGPISKRGNGYLRRLLVNGAMSVLNSKRAKQDPWLVKLLASKERKVAAVALANKMARIGWALMTRQEDFRATPAAA

SEQ ID NO: 318440 - protein, 344 aa, unidentified
MEHFGGLDVSVKETSICIVDDTGRIVKEVKVASEPAALLKVLGNSTYRFKRIGLEAGPLSQWLFSALAEAELPVICVETRHMQAVLKAQINKTDRNDARGIAQMMRAGLYRPVHVKTLRSQKLRMLLTHRKLLQSKAIAIENDLRGTLRNFGLKVGMVGKVRFEARIQELVKNQPDLAVLVEPLLIVRRALREQIVILHRRLLAIVRDDEVCRRLMTTPGVGPVVALTYRATVDVPARFHKSKSVGAVFGLTSSRYQSGEIDWNGKISRCGDEMMRVMLYEAAQSMMHSRKWSWLKAWAMQIARRRGMKKAIVALARRLAVIMHRIWVDGTEFRWTREQAAAAA

SEQ ID NO: 318441 - protein, 418 aa, unidentified
MQVWAERCAGLDVHKKTIVARRITPDAEGHELVEKLTFGSMTRDLLDLADWLADAGCSHVAMESTGIYWRPVYNILEARECFDIIVANAAHIKSVPGRKTDVRDAHWIADLLRYGLLKKSFVPSPEQRDLRELTRLRTKFVQERTSMINRVHKTLETANIKLASVASEVHGVSGRSMLAAMIAGQTDPAVLAELAKGRLRNKRSELEAALSGHVRAHHRIILSELLTQIDNLDESIERLTEAIDAALQEATGPFMTAVKLLMTAPGVQRTAAEKVLGEIGPDMDRFNGPRQLAALCRLAPGNNQSGGKNRSGRIRQGSVPPRQAMLEIAMSAVKAKGTYPAALYQRLAARIGKGRAIVAVAHSLLQAIYWMLKNQVPYKDLGGDYFTKGREKYIVQSMTKRLTQMGYAVTLEQIPIAA

SEQ ID NO: 318442 - protein, 409 aa, unidentified
MDVVFERCCGLDIHKRTVVACLVVPGSTGAPIKEVRSFGTMTDELLQLADWLSAAGCTHVAMESTGVYWKPIWNLLEDQFELLLVNARHVKAVPGRKTDAKDCEWLADLLRHGLLRGSFVPDRDQRELRELTRYRTSLIQERSAEVNRLQKTLEGANIKLGDVATDIMGLSSRQMLAALAGGETNAAAMAQLAQGRLRDKLPALERALAGCVGSHQRFLLAQQLAHVDFLDASIAEVSAEIAARLRPVEGELERLATIPGIGRRTAEVLVAELGTDMNRFPTPGHLASWAGMCPGNDESAGKRRSGKTRKGSPWLRSTLIEAARAAGRSKHTYLAAQYHRLAARRGTKRAAVAVGHTILLIVHRILSQDDVYRDLGERYFDERHRHAVERRLVSRLEGLGYKVALEPAA

SEQ ID NO: 318443 - protein, 341 aa, unidentified
MSQVSIIGLDIAKSVFQVHGADASGRALLRKKVSRAKLLPFFALQPRCQVVLEACGGAHHWARELAKLGHDVRLIAPAYVKPFVKRQKNDAADAEAICEAAQRPSMRFVPVKTEAQQAAALVFRARDLLVKQRTQISNAIRGHMTEHGWIAPQGLAHMKKLAALLDDPDAVPQAARPVLRTLLDQMTVLNERIAELDREIARRAREDETARRLMTIPGIGPITATAITALAPPPGTFAKGRDFAAWVGLTPRQHSTGGKQKLGAISKMGERTLRRLLIIGSSAVVLQASKRGAPEGSWLEQMLARKPRMLVTVALANKTARIVWAVLTKNEDYRAPVAVAA

SEQ ID NO: 318444 - protein, 347 aa, unidentified
MLHLGLDLSRKRLDVCALDERGERVAVTAVPPDTDGLGALVRDFAPYRAPVHAVIESMTGARFVHDTLELHGWDVDIADAQKVKGFAPLACKTDKIDAWVLAELSRRDLVPAIWLPDPTVRAERERARFRLHLVRHRVMLKNRIHASLMSFGKPCSVSDLFGRQGRMILAGLDLPDPWTQNITTALRMIDDLGDEISAIEHDLRVLGADHPYVSLLQSVPGVAWILGYTIASEIGDISRFTSPKSLVGYSGLCPIVDQSGKKDWRGPLAKNGPKYLRWALIEAAIHAAQHPIYAEHYQRTKSRLGRQRGAKVARVEVARKLAEAIWHMLQTGSYFAPARSHRQSGRI

SEQ ID NO: 318445 - protein, 390 aa, unidentified
MTCELIVQGLPSNSFRGFHNRLQAVIFISDMGTKYAIGIDPHAYNIKAVLFDIGNRTKEIKRFNLEPCEDDYKTFFDFTSTFKDVDYCIENAKGLGKSLSDYLLKNNANVFDIHPGYTADYKKKDPNIEKSDWNDCKYIVQAYLIESNIKQLKLNLKEEYYQELDDLSFQRWQLGQEKGDTKKKIGIRLYKRLGANYKKFFTNKFWSKGVIKELEEMFRDKNQPDELIIKMFISDLNRTEGKIAELDEILEKFANDEVKKLREIKGCGFLIASRLISEIKKGKRPKNCKSLAKWAGIAPLQTSTGGKTTHRCNYRGNRHLNYLIHQVCVTKLQLNCKDTQTKDYYNKRIKAGDSKNLAFRKVKNVVSRGILKKIYDFGEYNSDNITHLTN

SEQ ID NO: 318446 - protein, 375 aa, unidentified
MKEKLRFLGLDVHAETIAVAVAEPDGEVRSLGTIPNRAESIRKLIKKLGPAARLRACYEAGPTGYVVYWQLAELGVECEVVAPTLVPVKAGDRVKTDRRDAEKLARCYRSGDLTAVWVPDEGSEALRDLVRAREAAKQDQTRARHRLSKFLLRSGQRPPIGVRPWTRPYLIWVAQLRFTQIAQESTRQDYLHEVEHMRERVARLEQAIMEAVKLASPALQQVINDLQALRGIADISAVTIASELGQVSRFDSARQLMGYCGVVPSEDSSGKRTRRGGITKTGNAHLRRIVVEAAWSYRRPPGIWYGLRRRQESISEEAKEIAWKAQHRLHKRYMKLGAAGKDQRKIVTAVARELLGFIWAIGTRAETVSRQQVAA

SEQ ID NO: 318447 - protein, 359 aa, unidentified
MSSLTKAETFFKTVKLTTDDNLFVGVDVHKRSYHVAFYLNDAPSIDFVMPANKQQLGDKLKPATPALRQVAYETGPTGYGLARRLRKDQLPVSVAATSRIPRPSGGDDKTDKLDSKKLAEYAAKGLLKPVQIPTLKQEADRQLYRMRHRQSRNLAKVKTQIKSFLLMHDMEEPAGLHTWSKKGVDILRTLRLRKTLRLSLDELLSDLDYYASRLKALDKSLVEDLDKGVLARRMALLKTHPGVGAVVSCQFATELFHYREFNSTRQVFKYLGLAPRIHQSGEHSSRGSINKMANSRLRSNLNQAAWRWIAIDVKAKKTYLRLVNNCGGIKQKAITAMARKLSGHLWMMLIKDQPYDPTK

SEQ ID NO: 318448 - protein, 416 aa, unidentified
MEVIVSRCAGLDVHKNTVMACVRVPGPNGGRTSTVRQFRTFTAGLRQLRDWLVAEQVSQVVMEATGVYWKPVWHVLDATPGLELMLVNAYAVKNMPGRKTDVADAVWLAELGECGLLRPSFVPPPVIAQLRDLTRYRKKLIEERARETQRIQKLLEDAGIKLDSVVSDILGVSARQMLEALIAGVRDVAALAELARTRMRPKIPQLRQALEGRFGAHHALMLRMHLEHVDQLSVSIDRLDSEVDRVIRPFSNALQRLITIPGVGRRTAEVIIAETGADMRRFRTAGHLASWAGMCPGNHESGGKRRSGRARKGNAALRAALCEAAWAASHARSGYLPAQYRHLLRTFGKKGQTRAVFAVGHSILVIAWHLMAHDRDYADLGGDHFTRATDAEARERYLVRQLEALGHKVTLEPAAA

SEQ ID NO: 318449 - protein, 371 aa, unidentified
MESIIYVGMDVHKDNYSICCYKASEDRFYYEKSILAESKRVIKYLESIKKEFGEDTILLCGYEAGPTGFGLYRDLQNAGYSCVVMAPTSLKHPASHKVKNDKVDARFLAKTLFTKDYSSVHVTTEHEESIKEFCRMRLNLKTSLKKARQVLAAFLLRQDKKYTEGETWTLRHRAWLKQLHFDEEYLNEVFNEYMISINSYETRLQAIERRLDEISQDKSIKESVDKLVCFCGIDTVSAVTIVSKVGDFKRFSKAYHFSNYLGLTCGENSSGQKEQHLGITKCGDKELRRIITESAKSIKRSNLKGEKSKSLLDRQKNKDPLVIAYADKCRLRLSGKIIHLEMRGKPANVATTAAARELACFIWGMMTNNIA

SEQ ID NO: 318450 - protein, 401 aa, unidentified
MDVHKSFVVACIATTNDHGVTNYKSKRFSTFTGDLRRCADWLSENNCKDVCMESTGKYWIPIYNILEHTCNIVLAHPKYVKAIRGKKTDKRDAKWIADIFKHDLVSGSFIPPADIRQLRDLVRYHWKLTNFNVGEKNRAQNCLTVSNIKLDDVFSDVFGKAASAITTRLLESNEPFDVKPYLTKNIKKPIEQIQAAVDGEMCAEQAEKLRIIRSHMDSLELCKLNLESLILSTAEKYIPQLNLVMTAPGIQSFAAIGIISEIGVDMSVFPTSKHLCSWAGLTPQNNESAGKKKTTRISRAGAYIKPLLVQCALCAIRTKQFPEVRNRYLALKKRRGHKKAIIAIARMLLTAIYNILKWNEVYNSELYRKADRPPAHREVSVEEAVFILQRQGYLVTAPAVT

SEQ ID NO: 318451 - protein, 373 aa, unidentified
MPRYSTAFGMDVHLRSTTVCALDAETGEAVTRRFRGNPWGEVAEWMSGFPGPSLAAYESGYLGFAPQRELSGLGVDCVVAAVSKVPRSAADLSSKNDRNDAARMAKAILSHDVTPVWVPSPEIEGLRDLAAAHDAATARLAAAKQRLLAFLARRGYVYGGTTPAGNPRKYWTYGFLRWLDGIHPADDGGIRALAALRNEVEAADETREALLAEYRAAVAAGPLSAEVEALQSIKGCGFALAAAFASEVGDFSRFLSGRQVTAYFGLAPKQRSSADSVRLGGISGAGNALVRKLAVEGSWCYAQAGHQPKLMPKGSGVPLEIRMHGRKGSERLLRRREEMIARGMPQAKANAATAAELVRWLWALGTMCREAGE

SEQ ID NO: 318452 - protein, 403 aa, unidentified
MNAVGIDVSKGKSTVAVIQPFGVVIAEPFNVFHTDSDLKELVNLIKSLSGETKVVMEYTGTYYEPIANALHNAGIFVSVVNPLLIDDYDTNRVRKVKTDKIDALKIASYALDKWIKLRKYEPAETVRKTLQIMNRQCIKLNKILVMQKNSLIALLDCCFPNANTLFTSPRRASDGHEKWVDFVVKFPHVDSVAKLSFSAFKTKYQSWCKKERYKYSESKAEQIHAYARTIVSTLPMTDAVKKMISDAAELLNSTLETLGTLHSEMDALSSQLPEYETVMNLYGVGKVIGSQLIAEIGDVTNLKSGKSLVALAGIDPPPDQSGKDDPKSRRISKRGSPALRKTLFLIMTIYLQNQPADEPVYQFLDKKRTEGKPYKVYMIAAAHKFLRIYYARVKEVMPAQYIY

SEQ ID NO: 318453 - protein, 445 aa, unidentified
MTFRTIGIDLAIRGDHLAQIYDDGRPNGRAIRFRHDQPSLAAFVQTAVMGLRADDHIQAIMEPTGMSWFPVAHHLADAGVTVARVKGKRVKALRRYLSEHAKTDMADAQILAAIPSFGGPRLDPVHIPDPQSHALQRLTKQRSRFQNEIADARRRLLDLIRWASPRLEAVLPDLGTRLSLALLQKWFHPSDVLKARRTTLAKYVAAHAGGNHPRSGPFVETLITGLREAAQYAQNLHGAHIDFSELQFEIATEIESVLKKIQIVGDLEQHIADLYKHLDPQALLLSIPGVGRHLAPTLIGILQNIERFHSEKHLRGFCGLFPRRADSGGVERAGQTLTQGGNNRIKHALYLAADTARKTDPELAELYWRLMTAKGHHHKQALCAVANRIVNRIFSVLKRGKPYEVRDREGNSITLCEAKAIILERYTVGENIRAGRRSNRIEKNS

SEQ ID NO: 318454 - protein, 383 aa, unidentified
MTEYNTFIGMDVHKNSIDIAIAQDGRNGQVRHYGKIDGSIYALDKVVRKLVSTGNKLHFVYEAGPCGYQIYRHLTAQRLDCTVVAPSRIPKPNGSQIKNDRRDSMMLARLHRAGELTAVYVPRAEDEAIRDLTRAREDAKSDEKRSKQRLLSFLLRSGIRYTGGSPWSKAHMRWLSDINMPHRSQQVVLQEYIGTVNQCKERVQRLTEQIQQLLPEWQLFPVVQALQSMRGVSTIVSATTISEIGDLKRFHTPAKLMSYLGLVPSEHSSGQRTKRGSITKAGNGHVRRVLTEAAWSYRLPARVSRVLLKRQENLPESVCDIAWKAQLRLCSRYRYLWNKGKAKQVIVTAIARELCGFIWAIANEIQASENAIGGVCQRAIKSR

SEQ ID NO: 318455 - protein, 341 aa, unidentified
MKLSMIGLDIAKNVFQVHGVDDAGHVVLRRQLRRRDVSRFFAGLEPCVVAMEACGTAHHWARELASLGHEVRLVPPSYVKAYVKRSKNDAVDAAAICEAASRPSMRFVPVKTLERQAALVPHRVRDLLVRQRTMLINALRSQMAEFGMVAPKGRHKLAELVAMLHEAGEERITPSVRALLLELVGAIEALTPRVDQIEKTIVSAVRADETARRLTTIPGIGPITASALVAMVEDPARFRNGRHFAAWLGLVPRQSSTGGRQRLGRITKMGDRYLRKLLVLGATASLRRAPGTDRLALWTRDLLQRRPARLVSVALANKMARIAWAVMAHGQAYRSATAAAA

SEQ ID NO: 318456 - protein, 428 aa, unidentified
MNILNERITRITPTTIIVGIDAAKEIHWARITDYRGIDLTKPVKVHNSIDGFENLLAKIEKLRIKHGCDQVIVGMEPSGHYWRALGWYLKLHDSDPILVGVNPYHTKQAKELNDNSQTKSDPKDALVVAHLIRDGRYFDTYLPEDEYAELRQLNTERQRIMKQLSRANNVLIALLDEFFPEYATVWGNVTCPTSLELLKIYAFPSDIMSAPRDKLLKDIRMASGGTEGTRLMEKMIKASSRSVGVEEGLRTVRRRMLNLIDELYYFEDKKDAIEAELESVMDTLQLGKVLQSMLGVGPIISAAFLGEVGDISRFTNWKQVRSLAGLNLVENSSGKHKGKTKVSKRGRPYLRHMLYLAGECGCRCNPEMNKFYRYLRDRKNNPLNGHQAFVATGLKIMRILFHLAKTGERYDPSKALGAVRTQQIASLA

SEQ ID NO: 318457 - protein, 310 aa, unidentified
MDVLVERGCGLDVHKETVVATIDGKGIQNETRTFSTMTNDLLQLKRWLKDSGITHVAIESTGIYWKPVFNILEDSFELVLVNARHIKNVPGRKTDVQDSEWLCRLLRNGLVRGSFIPPKEIRELRDLTRYRRKLTGVISAEKNRVQKVLEDANIKLSSVVSDTFGVSGSEIVDALIKGELTIKEMSELVRGKLKKKKDRIIEALMGKFTEHHKFMIEASLQHIKATEELITKIDEQIEEKLKNYKQQYELLQTIPGVKKHAAASIIAEIGVDMERFPTEAHLASWAGMSPGSNESAGKKNTVERLTAISV

SEQ ID NO: 318458 - protein, 315 aa, unidentified
MATSSGKYVGIDVSKDRLDIAVLGETKASQTGNDEKGIAGLIRDMKALEPERIVVEATGGYQRAVVAGLFRKGLAVAVVNPSRVRQFARACGLLAKTDKLDAQILAVFGERVKPRLYEGKDEKERELSGLLVRRRQLEEMIKAEKNRLRTIQPSLQASVERIIHCIQSEKKDVEDQIGVFIAGQEKWQVGRRILASAPGVGPVATATFLADLPELGKMDRKKIAALVGVAPMNHDSGRKRGYRKTKGGRADVRSVLYMATLVACRYNPTIKVQYENLLKRGKEKKVALTACMRKFLTILNAMMRDQVPFRQRVIV

SEQ ID NO: 318459 - protein, 349 aa, unidentified
MGSYAGIDWASAKHDVLIEDPAGEELLAATFAHDEDGVSALCGALACFDVELVAIERPEGLLVDRLLDAGMRVLALHPNQVKAARDRFRASGGKSDRFDRFVLCELARTDSHRFRVLEPDSDQTKALRALTRARENLVGARVALANQLRAELERFWPGPTGLFADLDSPISLAFLARYPSPADARGLGEKRLAAFLKAHRYTNRKTPAQLLERLRSAPAGRAGEIETRTRRMVVVGLTHTLQMMVEQIAELESEIARALGAHPDGAIFRAFFRSPDAVICAATLLSEIGDCRARYPHRDSIAADGGQAPVAIESGKRKGARFGRRLSRVVARAVSERPRTARRCRSRPG

SEQ ID NO: 318460 - protein, 321 aa, unidentified
MKMALFQVFVGIDVSRDWLDVHILPFRHRLRVANTPAGWRELSGALAAHPQASIALEASGGYERNSLHHLATAGWQVHCLDPYKVRQFARAGGRRAKNDRIDAATIARYLATFTLQPTRIDPVVERLAEHVTYRRQLVEERTAVANQARLLRDPALRRLSRQRLARLETLIKRLEQSLAEQIAGNPQIAAKAAVLQTIKGVGPTLAATLLALLPELGTICRRKIAALVGLCPYDFDSGRFAGQRHIAGGRKHVRNALYMPTLVAMQHDHAIKTFYKRCVEGRSDKKPAVIAAMRKLLTILNARMRDHLASPDGHAQNLQPA

SEQ ID NO: 318461 - protein, 346 aa, unidentified
MEHYAGIDVSLELSSVCVVDAQGKIVKETKVSSEPEALVSFFKGLGFPMKRIGLEAGPLSQWLHAGLAQAGFETVLLETRHVKAALSAMTVKTDRKDARGLAQLLRMGWFRPVHAKSIGSQEMRALLVARKQLLGKLIDVELSIRGILRGFGLKVGQVTRKEFEVRIWELVAGQATLERIAGAMLSARATLKAEYEKLHKAVLAIVREDAVCRKLMTVPGVGPLVAVTFKSAVDDPRRITKSKAVGALFGLTPKKYQSGEKDITGGITRAGDGMVRTALYEAANVLLSRTTRFSKLKRWGMDVAKRRGSKRAKVALARKIGVILHRMWVDGTTYRWREAKLIAARA

SEQ ID NO: 318462 - protein, 376 aa, unidentified
MSGIVRIPADGVDGPRRHRKLCQSGVVLNQAREPSVKNASTIGLDLAKNVFQVHGADETGAVVFRKKLRRDKLLAFFAEHPPCIVAMEACASSHHWAREIAKLGHTTRMIAAHYVKPFVKRQKNDAADAEAICEAAQRPSMRFVKMKTEDEQASAIVFRARDLLVRQRTQIINALRGHLTEYGIIAPSGSAHVPRVVALATDPAVSIPDAARPILLMLVEQLQVAGKRIAKLDREVAVRAKRDERARRLMTIPGIGPVTAVAIIALAAPAETFSKGRDFAAWVGLTPSQHSSGGKQRLGKISKMGERTLRRLFIIGAAAIVRWAVRGRGPANPWLMKLLARKPRMLATVALANKMARVVWALMAHGGSYRAQAVAA

SEQ ID NO: 318463 - protein, 438 aa, unidentified
MSNKVIFNLDELFISVGIDVGADFSWMSIALPNQQFVGKPYKILHNSIDSLTTAVSKIKEAEELYSLESRIFLESTGIYHYPLFCYLRDKGFNCSVINPIITKNSTNMNIRKVHNDRFDSKKASLVGLKPDLKVSLMPSDLALNCRNLCREYYDLMDNRSAYVNKLQGELRMAFPQYLGIFSKVTINTSLTLLETYTSPNAFIEADKQEIIDTIKSTARFGLTYAEKKYNAIIQAAHDANEFGYIIDSNIKRIRLYISFIRKYDEEIAGIMDALHNLVDSNKDTDFVKQIHLIETFKGAGFLSAVSLMGEIGDFSAFTKPKQLFAYFGLDPAVKQSGKFEGTKVQMSKRGSAIARRVIHVLTLQSISTSRTGEAKNPVLRDYYLKKCESKPKLVAMGAVSHKVCNMIFAILRDNKPFEIITPQEHIKQYNAAKCDEAA

SEQ ID NO: 318464 - protein, 469 aa, unidentified
MSAREHGEPNQSEATKAAASKVASPRESVGMRRRREHALRIAATLGPAPLIVGLDLASQSHVAWVRTAAQQCIASFEVRHSLEGIEKLRHELEPLVAEHGCERIVVGMEPTSHYWKNMFAAFEPTAMRCVLVSTVSVFHDRKAKHLRRAKGDRRDAEIIAGLVARGDFLRTTLETDPRAIRMRILADEHEDLVDLAGSERQRIRAGLGLVLPELLEVFDDPLGETSRALLRALGLPEPDSALTQQRLLERLGSLVLRSREGRRVYPSKVNALAARLRCGPSFGVESHRAATLGRIGRGVARHEQLDRDRVEIAEKLVALYEELPFARFLDTIPHVGPLQHALVVAYVGDPRRFDRASCLVSCAGTEPQENQSGESAGPTLISRAGPGRLREIVYRIAMGLTLHSSHHRAVLERLRARALAYRQALVVIGNKYLRLLYRLAVEGKPFDVARLEGHRVRSCRKTRTGAERK

SEQ ID NO: 318465 - protein, 343 aa, unidentified
MKVFYLGVDVSKKKLDLCLRSNGKDILYDVIPNDLSSIKSWLTRTFEKFFLSEDSLVVCAEHTGQYTYPLVCATKSIGVYLCLEDAAKIKYCHGIPRGKNDKIDACRIAMYAERYNDCLQPYTASELIIQKLKNLSTERSMLVADRAKYQSQLKDQVDYMEHSIYIAKCNRVEGIINTFTDYIAQIDLEIKELINQAPVIAHQMDLLMSVDGVGERVALKMIMETDAFTSFTDPRKFCCHAGVVPFVYVSGSSQRSKNRVSNRADKSIKHLLHMAALSVSQVKNSPLKKYYDRKVEEGKNKMSVLNAVRAKLVTIMFAVIRADAFFSKINSHLNMSHFNNVNL

SEQ ID NO: 318466 - protein, 350 aa, unidentified
MTMLAESVDAVIGGDTHRDTHALEMTAPNGTTLATLMITNDTAGFANALAWTAEHAPGPRIVVGLEGTRSYGIGLARALSTAGITVVEVECPRRRTRRRGKSDPGDARLAALGVLRMPEHRKALPRSDGDREAIRILLGARHELTVTRTAQINRLRALLLTGTDEDRQWARASMCERTLSAIRRRRGRTGDDVEAQVRRQEARRLALAIGEGTRALAANTQQLARLVETFAPGLQDVLGVGPVSGGQLIASWSHHGRCRHEAAFAALAGVSPVPASSGRTHRHRLNHGGDRQLNRALHDILLTRWRMCPRTHAYITASRARGKSDPEIRRCLKRYIARELFRVLNACAAH

SEQ ID NO: 318467 - protein, 348 aa, unidentified
MTLVGCDLHSRKQQVAVLDTRTGELVEQELVHEGDAVERFYRALPPPVTIGIETTGYTQWFHALMHQLGHTVVVGEAAKIRAMVVRKTKTDRRDARHLLDLLQHDRFPAVWIPDPDTQDRRALIAHRVRLVRMRTVVKNGLQAIAPNQRLALHSALWTQRGITQLKALALPPHTTRRRDDSLALLAWLTTRIDQLDAHIATVASADPRVQLLLTHPGVGPLTALTTVLVLGPLARFPDSKHVVSYVGLAPAVNASADKQRLGKITKQGNALLRWVLGQAAPLAARADDELRRRYFSILHRRGRPKAKVALARKLLVRLYIMLRDQIDYEEFRRRGRAPRPHQLPVAVM

SEQ ID NO: 318468 - protein, 343 aa, unidentified
MNEVITIGVDIAKSVFQVHAVDAAGEPVIRRQLRRRQVLPFFKKLPPCLIGIEACATSHYWAREIAKFGHEVRLMPPRYVKPYVKRNKNDAADAEAICEAVTRPNMRFVPIKTPEQQSVLMLHRTRQLFVRQRTSLINAIRAHMAEFGIVAGIGRNGVEVLLKRIAEGKDDRLPAPALECLMALAMQLDLVKRQILEADRRVLAWHRSSETSKRLEAIPGVGPLIASALVASIPDPSVFRSGRDLSAWIGLVPKQHSTGGKERLGGISKAGNRYLRTLLVIGALSVIKRAKQLGYTHHPWLVSLLGRRSVKIAAVALANKIARIAWAMMARNEKFEPSRLSPV

SEQ ID NO: 318469 - protein, 353 aa, unidentified
MYSYFVGIDIAKNTHWASCLSSDGEIILEPFSFSNDNSGFQKFISKLESLDKTKILIGLESTAHYGENIISYLFNLDYNIGLINPIQTANLRRSNIRKTKNDKVDTKIIIKALTLGNYSLITSRDINNLKLKGLCRSRRNLVTMRSKAKIQLVSYLDQIFPELAQFFKGNLHLNVSYQLLKEYSSPKQISSLHLPKLSNILHDNSHGRYNKQDAIRLRELAKNSVGIDNPSLSLQIKHSILQIELYNEQIAEVEALYKQILDEMNTPILSIPGMSYNQAAVIIGCIGDINRFEHSCQLLAYAGLDPSVIQSGNFQARSTRMSKRGSGMLRYSLVYSAHNVVKNNKTFRDYYEL

SEQ ID NO: 318470 - protein, 331 aa, unidentified
MNTHVGIDIGARTSAMGWRQNGKTSGQWEIQHTPKGRKTAAAKMLGLKPLSVVMEATGIYYLDLALELHAAGLPVSVINPKSFHNFAKLMLQNSKTDQIDSQLLAEYGERMAPRLWVPPTADQMTLRAIGRHINRLIGHRTRAKNELHALQATETRVELLIEDEKEAIAGLDARIDRLKKAARDAIAKCPDLSLQFRCMMAAPGVGEASAIAALAELTTLPVTLKSAQVSRYAGLDVRLTQSGTSVNRPGRMSKCGNAYLRAAMFMPAMTAIRCDENVKAFYEALVARGKKKMQAIGAVMRKYLTGLWACMRSGEEFNTAKLFSEKHLAKA

SEQ ID NO: 318471 - protein, 423 aa, unidentified
MEVMHRRVAGLDVHKETVVACVRVMTGRRPTRECRTFTTTTQGLLELLGWLTASRVTHVAMEATGVYWIPVWKILSEGDFTLIVANAAHIKQVPGRKTDMNDAMWIADLLACGLLKASFVPPEEIQELRSLMRTRKQLVREQTRHVQRIEKTLEEANIKLGAVLSDLMGASGRRMIEAMIGGERDPHRLAALAERSVKASPTALHDALHGRLREHHRFLLQLHLRQWDALDAAIRQIDEQVADQIERVDEEAADGQPPFREPIARLCAIPGVSLLSATAILAEIGRDMSRFPTAGHLIAWAGLCPGQNESAGKRKSSRLRKGAPWLKTMLVQCAWAAKRAKRSYYSAQFHRLCGRRGPQKAICAVAASLLTAIYHMVQSGTSHRDLGADYFDRRTPKAKAKRLVAQLARLGFAAQLQPLAEAA

SEQ ID NO: 318472 - protein, 437 aa, unidentified
MSMTFARLLDPTFEDDHDPFRYYDPAGEPLEDRLYLPCGVDPHSKLCAVAFVHPLPQRQDVLVERQIRNNSLEDVTWLIETGRRLASQFQAYPIYVFEATGPFWKPYRNFLHQAGLATATVCGRQSRHARGTSTRKTKNDLKDAYTIAKVFKQGESHASRIPPEPLASLREYTRLHLFFVEYSVAIQNRMYNIRYQLHPDFDRHFSQPILPTTLALMREELVYPEHLKACPLDTLTQLIHQASHGRLGAGLAQALVQSAHTTFSVPTAGEALSFNLKMLAQAYEQIHQLILPPIRQHIEEGLQRLPFEQHLDELPHFGPIVIGTFLSELGSPAWFRTVDSVVAWFGFDPSVSESADKPSGTTHLTKRGTKYGRRIMWLVARNWAEYTAEGRALVRKEMQQNGLSYDGAICVLAAKLVRIAFAMVRDGSHFDMKRAFA

SEQ ID NO: 318473 - protein, 341 aa, unidentified
MDIDILGIDLAKRVFQLHGADRSGRALHRSKVTRDGFVEAVRSLRPRVVAMEACSSAHHWGRCFRAMGIEVRLISPQYVSPFVKTNKNDRNDAQAIVEAASRPTMNFVTVKSVEQQDMQAVHRVRELLVHQRTALINQARGLLGERGVTMAQSPEAFKRAVPKVLSSCEGEVTSICQAMVLELTEQIQALEDRIKRTEAWINSFMKRSALCKRIAVVSGVGPITATAMVAAVGEAKEFRNGRHLSAWIGLVPRQYSSGGKSQLKGISKRGDTYLRTLLIHGARTVLRYAVAKTDAQSRWLQDLIARRGYNRAAVALANKNARVIQALLSSDTPYRPSAMAR

SEQ ID NO: 318474 - protein, 429 aa, unidentified
MNSCEQTAQDWLAHRAFGGLDWASEKHNVIVVDPRGKVVEDFEIAHSALGWKKFRERMAPYGAIPFAIETSQGAAVEQLLEAGMKVYPINSKSAKSYRERKAPSGVKDDWLDAWSFADACRIDGQDWRALRPEDPLVKELRLLCRDEVELIQQRTSFICQLRHALGEYYLTALEAFEDWGLVSAWMFVQRFPTPQILQAAGKRQWEKFLHARRLWRTESGPRRLELFAHATELCGTVPMANAKSQLALSLISMLFALEKQLGIYRRRIEELFSRHPDHDLFGSLPGAGPKLAPRLLSEIGDDRGRFEDGPQALQCLAGSAPVTRRTGKCKVRANPDHWPCHQRWACDKHLRHAMHLFSEHSLGQCVWSQIYYLHPRQKGSSHADALRRLAQRWLKIIYRMWMDRKPYDAMLHHHNQLKHGSWVFELKTA

SEQ ID NO: 318475 - protein, 391 aa, unidentified
MSQESPRVVIGMDPHKRSVTIELMDGDERVLGGGRFATGTAGYRSMLETVDAWPNRIWAIEGCNGIGRHIAHRLIADGEQVVDVPPKLSARARVFATGQGRKTDATDAHSVALVGTRMTGLRPVVADEQLEVLRLLVDRRRALGEEHTRKVSQLHALLLELLPGGAKVFLSAAQARRLLASVRPRDLVGKTRKRIATELVVDLEKIYARTKAADKELTELVKATGTGLLDLHGIGPSGAARLLVEVGDITRFPDRGHFASWTGTAPIDASSGDHVRHRLSRGGNRQINRVLHVMAVVQLRNPTQGRAYFDRKKSAGKTSMEAMRCLKRRLSDLVYKTMLNDLVEQKTGPGGQPGNDSVSSVTGSQPTTGSSDKSLPGPATKKPKPALPTAS

SEQ ID NO: 318476 - protein, 326 aa, unidentified
MKVVCGLDVHKDSVFCCILCANGEKIQHKFGVLTEELVTLRDLMVSEGVEECAMESTSIYWIPIWRVLEGSVKLHLVNPYFIKQLPGKKSDVNDAEWIATCLSKELIASSFVPDDKIQRLRQYDRRIFDLNVSISRNLVKLDQCIQRCNIRISNYISTTDSKGYRSIVKLISQGVTDAEVLVKELHGRTINRHGRETLVKALTGVVSETDIDIIKQLVEEIELQQRHKDEAQEKMTALCMEWFPQEVENLQTIPGVKERSATSIIAEIGTDMTHFQTPKKLVSWAGLRPRNEESAGKIKARGITHGNRFVRKTMIECSWGAARMKE

SEQ ID NO: 318477 - protein, 279 aa, unidentified
MDEHGTIQLRKRLARAQVMTFIAQLPPTLIGMEACSGAHYWARRVREHGHEVKLMAPQFVTPYRKAHKNDMRDAEAIAEAVTRPTMRFVPVKSVDQQDLQALHRGRERLMKARTALINETRGLLHEYGMIVPQGAATFRTHVQEKVATEDTKLTAHSRALFQQLLEELATLDARVALYDTQLAQVAQAHPVCQRLMTIPGLGELTATALVAAVSDAAQFKNGRQFAAWLGLVPRQHSTGGKPRLLGISKHGDRYLRTLLVHGARSCLRWVGRKYDRRSH

SEQ ID NO: 318478 - protein, 341 aa, unidentified
MTEQPAMTVVLGIDTGKETLECTLVDAKTRQRLWSQAVPNTPAGIAQLLKKAPPEAPWVIEPTGHYSREAVQLATKAGRRVLLAPPRKAKSFLRSLQSRAKTDRLDSYGLALFALSQPLVIFPIKTEQAEQMDQFLLARRGISQAISSLKQQRKVLAHAREALTEAIKALTVQLRVLDKKIAALCSTGSEFKAVAMLLKVPGIGPVTAAAVTSRLRGKQFARADQFVAYVGLDVGVAQSGKHKGELGLTRQGDALLRHLLYLCAQSSLRAKDTLFHQQYDRERAKGLSTTAAVCAVARKLAKLCWSLVHYGTEFDPARVYQAPCRSVPRLSGNPQPAGGTP

SEQ ID NO: 318479 - protein, 458 aa, unidentified
MQRNRSKPKTQRTMPMVHANAAAIDIGATMHMAAVRADRTSEPVRSFGTFTTDLHRLVDWFTECGVETVVMESTSVYWIPIFELLDARGFTVFLVNARDAKHVPGRKTDVSDAQWLQRLHSYGLLRASFRPKGQIAELRAYVRQRERLLEYGASHIQHMQKALTEMNLQLHHVVADITGATGLRIIRAILAGERDPKVLARLRHYQCHASADTIEKALTGSYRSEHLFALEQALALYDVYQEKAAACDIRIEAVLKELSIGRGPRSDPLPSPRRHRATQANGLAFDVRAALFALLGKDLTQINGLGPYLSLKLAAECGDDLSAWPSAKHFTSWLGLAPSNKISGGKVLSSRTRRCGNRASALLRLAAVTVGRTDTALGAFYRRLSARIGKAKAVTATARKIAVLFYNAVRHGMEYVDPGASFYETRYRERVVDNLHRRAKAFGFVLHPAEPTPSVAVS

SEQ ID NO: 318480 - protein, 357 aa, unidentified
MQKNTISFKGQKIFIGIDVHKKNWDVAVAPEVGVIKRHPQKASAHELFVFLKKHYPDGDYLAVYESGFTGFSTYYALKDVGINCIVIHAADVPTTQYEEVMKTDKVDSVKLARTLKAGLLKGVYVRERDNLDDRSVIRIRKTIQKDLSSYRVRIKHLLHNNGVSIPERFEKSGSYWSRAFMRWLKEDVNLLSSSKNSLNLLISQVEAIRSTLLESTLLMRELSQTERYKKNVDLLTTIPGIGVTIAMCILTEVYDVSRFRNEREFASYLGLIPTTHSSGEKTIHGEMTFRGNKQLSTMVIEAAWVAIGQDVGLGSLYQHYRERLKPQEAIVRIARKLSNVIFAVLKNRTEYVPYVDN

SEQ ID NO: 318481 - protein, 350 aa, unidentified
MMIIGCDFHPRYQQIAMMDTETGELTERRLEHENGEAQAFYASLAKPARVGMEATGYGQWFERMLAEQGHELWIGHASEIRAGVVRKQKTDARDAAHLLRLLVEKRFPRIWIPSPAERDARQLLRHRHKLVCFRVSVKNQLHGLAMSQGICRKKKLFTAQGREELEKLSLGPWASRRRQELFGMLDRFNPVIDELDRAVQQQAENHADAARLMTQPGVGPVTALAFVLTLGPVARFPRGKHVVSYLGLNPKERSSGDKQHTYSISKQGNTMMRWLLVEAAQTAVRYDPELLRLYQRLKFRRGASVAKVAVARKLAVKLYWMLRATASVAQRAPMQGSSGGTLIPHVGSKF

SEQ ID NO: 318482 - protein, 355 aa, unidentified
MNDAKYIGMDVHTATISAAVRDSSGNLVMEATLETKAETILEFIHGLRGSLHVSFEEGTCAAWLHDLLKPHVTEVLVCDSRKNALLRVGNKNDREDARKLSELLFLNKLHPVYHGETGIRTLKELARSYLTITRDLTRVMNRLKAIYRGWGIACAGQQVYAPRYRAEWLAKITEAGVRRRAEIYYQQFDALAALRQEVRRQLLAESRRHPAMRLLRQIPSIGPIRAALLIALMQTPHRFRTKRQLWAYCGLALRTYDSGEYRFVGGQLKRSKKAVTIRGLNKNHNHDLKNIFKGAATRAAATAGPLQNFYEARIANGMKPPMARLTLARKIAAITLLVWKKGVRFDAEQLKQQAA

SEQ ID NO: 318483 - protein, 350 aa, unidentified
MMIIGCDYHPGFQQIAFVDTETGELQERRLEHREEAEKFYRDLGAQGVKVRVGMEASGHARWFERLLAELNIELWIGDAAEIHRKRERKQKTDRQDAQHILRLLLKDDFPQIWVPSWENRDLRQLLWHRHRMVQARTRLMNQLQAVALNEGLRCKKRLWREAGRKQLEAFRLAPWASRRRHDLLELLDRLNPTIAELTQAIEREVEKCPEARRLQTHPGVGPLTALAFVLIIGKADRFQCGKQIASYLGLVPLEDSSGNRRRLGHITKQGNSLLRFLLVEAAQVTARSLPEWRSKYVHLTMRRGRKIAKVAMARKLGVRLYWMMRKGWDYEQVTKFGSHAGQPGNRHGVK

SEQ ID NO: 318484 - protein, 418 aa, unidentified
MQIVYPICCGVDVHKRFFIATIIKTEGIMPSYSKKRFSTFNNEILSFKQWLLENDCLDVCMESTGKYWVPIYNLLEDQIRVVVASPKWVKAVKGNKDDTKDSKWIGNLFRLGLVPGSYIPEKPIRILREYTRYRYKLVSCKTSEKNRFQNSFTVCNVALDSVVSDMFGVSASAITDYLINTDEFDPEHCKSLLKRSLKKKGDTVVDSIQGYSIHPAQKERMTMVRNHLEYVVEAISKIDSVLDELVKPYESFISLLCTVPGIDRQSAITIISEIGVDISQFSSSKRLCCWAGLVPSNNQSAGKKKSVHISRAGVYLKPALVQVAHAAVKSNASPYYKNKYERISKRRGKKRAIIAIARMILTAAYKMLETGEVWNPCDLFKVDMPIAIQERQKQKAIKFALKLLLSEGVIKPDIVQSA

SEQ ID NO: 318485 - protein, 349 aa, unidentified
MLADELDYVLGVDTHRDEHVVAVVTAPAGAVVAAAAAPANAHGYRELLRVAEQHAPGRRAWAIEGTGSHGAGLSRYLHARAESVLEVSRIPHSERRLRGKDDALDAARTAPAALASDTLALPRRGERREALRLLLVARRSAIDVRREALTQLRAVIVTAPELLRQELCRLPEGKLLDRCSRFRRTNSAGADELATRIVLRSLARRVRTATVEADELEREILAHVRALAPTLLDEPGVGPIVAAQLIVAWSHHGRLRSEACFARLAGVAPVPASSGQTTRHRLSRGGDRQLNRALHTIVLHRRQHDPATRDYIARRIAEGKSRRDATRLLKRYLARHLYRLLQQQEPIMA

SEQ ID NO: 318486 - protein, 337 aa, unidentified
MKFCGIDLHSNNSVVVVSDEEDRIVCNKRLPNDLAQIRAVLEPHRPDLAGVVVESTYNWYWLVDGLMDTGYQVHLAHPSAIKKYEGLKHSGDFADAAYLAHLLRLGLLAEGYIYPREERGARDLARKRMQLVRYRTAQILAIEGILMRQTGTRMKGEAVKRLTAEQVDGFAFAPDVSLAVEANRAVSQTLSQQIAALEKRLKQRVILRPEYHLLKTVPGIGDVLATTIMLETGTINRFTQVGNFSSYCRCVDSLRESNGKRKGEGNTRNGNKYLAWAFVEAANFALRCCPQAKSFYDRKKSRSNRILALKALAHKLARACYHMLRDQKPFDVHLCFG

SEQ ID NO: 318487 - protein, 356 aa, unidentified
MGKHTTPDWTGHPLYVGIDVHQKSWKVSIHTATTEHHTFGQAPQGAPLSAYLARHFPSATVQAVYEAGPGGFAPYRQLTAAGIPCIVVHPPDVPTTDKQRRRKTDRRDARKLAHLLRAGHLTPITVPSPEREADRSLLRLRQTLTKERTRIKNRIKSWCRIWDIPVPAGCRSPHWSQTAIATFRTLTGPPASALTVLTTLLDTLEALTTQRSAVTQQITTLAQTSRYATEVTLLTSIPGIGVLSAMTWLTEVGPIDRFEHFDRLCSYVGLVPGERSSGESTTVTGLDHRGNPRVRTLLIQNAWTAVRKDPALLHCFEQLQRRMPKQQAIIRIARKLLRRIYRILRTGEPYVLGVVQ

SEQ ID NO: 318488 - protein, 400 aa, unidentified
MRFYTTQHKFYCGIDLHARTMYACILDQHGEIKLHRNLQANPEAFLKAIAPYRDDIVVAVECMFTWYWLADLCAREGIPFVLGHALSMKAIHGGKAKHDTIDAHKIAVLLRGGMLPQAYVYPAAMRATRDLLRRRMHLMRKRAELLAHVHNTNSQYNLPEIGKKIAYKANRHGVADRFPDPAVHKSIEVDLALIDAYDRLLTDLELYILKTARQHHANTLYRLQTVPGIGKILSRVLLYEIHDIHRFPRVQEFVSYCRLVKCAQESAGKRYGTSGKKIGNAYLKWAFSEAAVLFLRQNAAAQKLLARVEKKHGKGKALTILAHKLARVVYYMLTRDTVFELDKFLNGSGSRAGEPAASLDTHGISLNDRPWNSDKALRHGTRSRTLALFPDPARLIGHPL

SEQ ID NO: 318489 - protein, 389 aa, unidentified
MSSMPQSTPSDPAEVVLGVDTHKDVHVAAVLTTLGVLLATSTFPTTAVGYRRLLAWARGFGPVGRAGVECTGSYGAALARYLLSATITVIEVNRGDRGERRRRGKTDTLDAETAARAVLSGRATAIAKSGDGQVEMLRMFKLAKASAIKSRSQAINQLKAVLVRAEPTLRESMTGLGNPALFRRCAQLTVSDPCDPAGAAALTLRLLARRVLTLTSEIDELNVHITAAIKTHAPQLLQRYGVGPDTAATLLLAAGDNPERLTSEASFAALCGVSPIEASSGKTRRRRLNRGGNRQGQLRALHDHHRPPALGQTNPALHPTPRRRRKDPPRGHPLPQALHLPRDLPRHHPRQRPTRTGQLSCLTSIAASNSPSSTEAVPSYEPSHSGSSG

SEQ ID NO: 318490 - protein, 337 aa, unidentified
MKYSGIDLHSNNSVVSVTDEEDRIVAEKRLPNDMAKILGILLPWREELAGVVVESTFNWYWLVDGLQAAGFKVHLANTTAIKKYEGLKHSGDETDARYLAHLLRLGILPTGTILPPEQRALRDLARKRMQLVRSRTSHILAVENITARQYGARISSNQVKRLTVEAIDQMPLLENVALAIKANTAVIGTLSAQIDLLEKRLQESIKGRAEYGLLTSMPGIGQVLATTILLEIGSIDRFASAGNFASYSRCVDSVRTSNGKKKGEGNTKNGNKYLAWAFVEAANFALRYCSEAKRFYERKKAKTNSVVAIKALAHKLARACFHILKERKPFDLTRCFA

SEQ ID NO: 318491 - protein, 326 aa, unidentified
MEQKIVTVGLDLAKNVFQVHAIAADGAVLIRRKLRRTEVIRFFTELPPCLVGMEACASAHHWARELMAIGHEVRLMPPAYVKPYVKRGKTDAADAEAICEAVTRPTMRFVAVKSVEQQAVLMLHKSRDLMVRQRTMLINALRGHLAEYGIVTGLGAGGVVASLKALHEEQDRFPAHARSALHGIAAQLRALASEIERLEAQILDWHRNDETSRRLATIPGIGPITASAIAAAVPDASLFRSGRQFAAWLGLTPRANSSGGKERLGGITKQGDGYLRRLLVVGSTAVMRMTRKSPARQPWMAGLLERKPTKIATVALANKTARIAWP

SEQ ID NO: 318492 - protein, 374 aa, unidentified
MADYSEVFVGIDTSKLRNAVAIAEGGRNGEVRYLGEIENTEAATSKLVKKLAAQHRRLTFCYEAGPTGYGLHRLIKTLGHECVVVAPSLIPKKPGDRVKTNRRDALNLAKLLRAGELTAVWVPDARHEAMRDLVRAREAAVDDLKSKRQQVLSLLLRLGRHFTGKRTWTRAHMNWLVSQKLAHREQRIAFEEMLLAVRQANERVIRLERAIAAAVPDWSLAEVVTALMAVRGLDLISATIFLAEIGDLSRFASPRQLMAYLGLVPGEESTGDRVWRGGITKAGNHRARRILVECSWSYRHPPRVGKKKLAKVEAAPPAVQEIAWKAQARLTARYRALVRRGKRPTLVVTAIARELSGFIWAVSRAVGAPATPAK

SEQ ID NO: 318493 - protein, 408 aa, unidentified
MNPLYVGIDVSSKSNVIYLMLPDGSKHSNFSVANSQDGSAQMVKRILSALTSHSLDTVTIGLEATSVYGDNLVYFLREDASLAPYSRKIHVLNPKQVKKFKEAYNDLPKNDFVDSFIIADCLRFGRINKEVYLGDYRYKALQNLTRARFYAVQNLVREKQRFLNVLFKKYSSMTQEKVFSDTFSTTALAVYQEFESAEALAYMDLHELTDFIMEKGRNRFPDPDAVAKAIQKAARSSYRLPKTVNDSVNQVLSISITSIKALETQIKEFDKAITAQAELLPNVLISILGIGPVISAGIMAEIGDINRFPSQSQLGKYAGLAWKQHQSGDFEAENTRQIQSGNRFLKYYLCEGALSLVRCDTEYSNFYHTKYKEVNRYQHKRALALTARKFVRLVFRMLKDNRLYRAAE

SEQ ID NO: 318494 - protein, 396 aa, unidentified
MNQQLFAGIDWATKTHAVCVVDQHGGIRARFGVPNTGKTFTGLVRRLAKLTVAGVAIERPDGPLVAAMLDAGLRVVVITPRTVKALRSRYSAAGAKSDPGDAYVLADALRTDGHRLAALVPDTDPTIVLRALTRTRKDLVKARVGLVNQLAAQLERCFPGALGLFRRLDSAVAVAFLRRYPTSAAAARLGHAELAAFLRRIRYCGRTPAVELLDRLRTAPPAGISPAEASGRAVCITALLDTIQILTRQEKELAAEIVERLEVHADQHVFTGLPKAGHGVRAARLLAEIGDVRARFPDEEALAALASVAPVTRASGKARSVGFRWACDKQLRDALVDFADTPATPRHGPPISTPKRWPEPAATPTPCASWPAPGSASSGASGKTTPPTTQPSTEGR

SEQ ID NO: 318495 - protein, 383 aa, unidentified
MKNTIVHHEGAASLEAVAIKLEPRAAVIKIGLDVHARQYVAVAQYDHLLPKAARRLSPYEFVPWVEGLLRQGHSVHVVYEACGFGFTLYRQLIALGAHCYVIAPRKLDEECSRVKTDPRDATTLCQRLSRYLEGNTRELAVIRVPSESEERARHVTRQREQLVHHRQKLEAQGRSLLISHSLPAPAHWWKKQTWSRLGKHLPSWITTHLEVARPALLSLQGQIESLTSQLEAAAPPNIPTGLGKLTTVMLTREICDWHRFNNRRAISSYTGLCPGERSSGSKRVPGSVTKRGNPRLRAALVECAWRMVRFQPQYPPVKKRLAVLAKGAKTTGAQRKKAIVAVARRLAVDLWRVHTGRLTAQQLGLNIKISEFEGNSYELTTQR

SEQ ID NO: 318496 - protein, 341 aa, unidentified
MNNVTLIGIDIGKHVFHLHAQDKFGKEVSRKKCSRPQMMRFLANHPLCTVVMEACAGSHCLAREIKAMGHEAKLISPQFVRPFVKSNKNDFVDAQAICEAASRPSMRFVTPKSPEQQTLSVSHRMRESLIRDRTKTVNQMHGFLLEFGVSLPTGLAVIKRLASVLEEHDLPVRLVALLQRLHEHFVYLSEQIKVLDEELASQLADDDLGSRLLTIPCVGPITASLLAVEMGDAQQYGSSRDFAASVGLVPRQYSTGGRPALLGISKRGDKNLRRLLVQCARVYLMRLKYQKGPLADWVCSLLARRHSNVVACALANKLARIAWAITTRHTQYKTEPDAMNA

SEQ ID NO: 318497 - protein, 344 aa, unidentified
MGEVSTIGLDIAKSVFQVHGVDDAGAVTIRKRVSRAKMLEFFAELPPCLVGIEACPSAHHWGRELQALGHTVKLMPPSYVKAYLKRSKNDANDAAAICEAVTRPSMRFVPIKTKEQQTALMLHRTRQLLVRQRTMLSNALRGHLAELGIVSAKGRNGTGELLRIIADGADNRVPPAVRGILDVLAQQYSAIGAEIGSIDKSILVLHRACEASRRLAEIPGIGPIGATALVAEIGDWKTFSSGRSLAAWIGLVPKQHTTGGKDRLGGITKQGNRYLRWLLVVGAMAVIRYAKKHGTKSRPWLARLMERRPTKVAAVALANKIARMAWAIMVRGERYREPKLLLAA

SEQ ID NO: 318498 - protein, 410 aa, unidentified
MEVLYPHCAGLDVHKETMVACVRHMVDGTVKREVRTFDTTTTGLLALADWLAFEDCTHVAMEATGVYWKPVWHVLSDGDFGLLLANAKHVKNVPGRKTDVNDATWLADLLAHGLIRASFVPDADTQVLRNLLRTRKQLVRERSSHVQRLQKTLEDANIKLDSVISDLIGVTGRAMLAALIAGETDPGKLAALAHPRIKALPEQLREALRGRIMKHHRFLLRLHLQQIDALDAAVSEIDREVNERIEPFRTAVELLITIPGISELSAQIITAEIGKDMSRFASAAHLISWAGLCPKNDESAGKRRSTRMRKGAPWLKTTLIQCAWAGARKKGSYIHAQFHRIRSRRGAKKAIAAVAASILTVVYHMLKDGTCYHDLGPDHFDRRAKITQTKRLVARLQNLGYAVQITPLAA

SEQ ID NO: 318499 - protein, 332 aa, unidentified
MNMNPQGGVTGGAQRPNVGIDVSKQHLDVCLGSDAWRLANDAQGCKELAARLLAARVDLVVIEATGGYERSAVCALQVAGLAVARVNPRQTRDFAKAMGVLAKTDQVDARSLRDFANLIASHADRSKYITQVVEIPRQLLAALMGRRRQLVDMRVAESNRLEHADARAERSILIVLKTLDKQLAIIDADIDSHLDTHFKQQAKLLDSVKGVGPVTVLTLTAALPELGKLGRRQIAKLVGVAPLANDSGQRHGKRYTWGGRGDVRAVVYMSALVAIRHNPAIKVFHSRLIAAGKPKKVAIVACMRKLLTILNAMLRDGATWDAARHVQPSAGG

SEQ ID NO: 318500 - protein, 340 aa, unidentified
MSRGTRPRFVTYDRTVARLPVASTRQVIVTHVICGVDVSATTLDARIGRDGEHCRFDVSTEGLDDLVAFCHAHQVSLVVMEATGGYERRPAGHLWAAELPTAIVNPRAVRDFAKAMGWLEKTDRIDCGLIAWYAETKRIQPTPPASATQARLTALVRRLRQLTDLRTQQTNQRRLITEPAVLDSFGPILAAIVTQQRQLETLIAQAIGDDPLWTRLDAAFRTIKGVADRTVARLMAEMPEIGTLSNKAVAKLAGLAPIARDSGQHSGKRRVRGGREPVRSILFVIAEVVRRYDPDFVAFHQRLSRAGKPNKLIRIAIARKILVRLNAKAREVRNNSALPA

SEQ ID NO: 318501 - protein, 459 aa, unidentified
MNRKRSKSKAERTLPVMHPNAAAIDVGATMHMAAVRADRATEPVRSFGTFTADLHRLVDWFTECGVETVVMESTSVYWIPIFELLDARGFAVFLVNARDAKHVPGRKTDVSDAQWLQRLHSHGLLRASFRPKGQIAELRAYVRQRERLLEYAASHIQHMQKALTEMNLQLHHVVADITGTTGLRIIRAIIAGERDPEVLARLRHYSCHSSAETIAKALTGSYRTEHLFALEQALALYDVYHEKASACDGRIEAVLKGLSIDRARSGSKELPTPRRHRTDQPNALAFDVRAALFRLLGKDITMIDGLGPYLSLKLIAECGDDLSSWPSAKHFTSWLGLAPSNKISGGKILSSRTRRSGGRAAALLRLAAVTVGRTDTALGAFYRRLSARIGKAKAVTATARKVAVLFYNAVRHGMEYVDPGASAYETRYRARIVNNLHRRAKASGFVLQPMEPTPNIVVS

SEQ ID NO: 318502 - protein, 455 aa, unidentified
MGYELVRQIEMRFRDVPRIVYAAQVAKGRIVKCDKCEGARRNCKGECLMKVIYGVCCGLDVHKKVITASLMSRTGDTVIKTFNTTTNELKAMVEWLKVTDCEQVAMESTGVYWKPVYNILELAGIPAMVVNASHMKAIPGRKTDIKDAEWIADLLRHGLLRGSFIPEKNQREYRELVRYRNSRTEERAREINRLQKMLEGMNIKLGDFVSDIMGKSASKMLGLVLAHDELTDEQISQASHGGLKASLDELKEALIGIITPLQRELVTIVLDVIAEQSSQIAKVEALIRKYTKEAYDEAAKKLEAMPGIGTISAQAIIAEIGIDMSRFPTANHLCAWAGVVPGNNESAGKRKNAKSRKGNKHLKKTLIQCATSAVKNKNSFFHAQHQRLVVRKGSNKATTAVAHTMLIAIYHVLSGDEFKDLGADYYTKFNKEKKIKSHLKQLQKLGWTPLDAKSA

SEQ ID NO: 318503 - protein, 353 aa, unidentified
MTDFGGSVVAGVDAHTDEHHVAVVDAQGRLLGAAAFPTTAEGYAGLISWVRGYGEVDRVGVESTGAYAAGLVRALQTGGIRVVEVNQPHPHARQRRGKSDPLDAELAARAALSGTATAVPKQTSGIVEAIRQLRVVRVGALKARTAALQQLDDLVITAPEQLRRELRHGRTLKAKAALCLKLRPDIERIHEPAQAAKLALRSLARRIRELDTEILELDRQLEQLVNAAAPRTLQLFGVGTQGASQLLVTAGQNIQRLRNQAAFAKICGAAPIQASSGRTKRHRLDFGGDRQANRALHMIAVCRLRHCKRTRAYATKRTADGLNRREILRCLKRYIARETYHTLRADLEALNST

SEQ ID NO: 318504 - protein, 355 aa, unidentified
MSSKVDTAIARTIGIDTDKNTLHLIGLDEKGAIVLREKVSRTRMTARFVNVPPCLIGIEAGMASHHIARELVALGHDVKQVPPAYSKPFRQGHKNDFRDAHAVAEAVERPSTRCVPIKTDAQLDLQALHRVRSRLISNRTAVTNQIRGFLLEHGIPVRQGHHFLRRQLPQLLATRVDVLSPRMIRIIGDLMADWSYLGERIERVTDEIEALARADEACQQLITVPGIGPIISSAMVAAIGNGAAFCKGRDFAAWLGLVPKQMSTGDRTILGHITKRGNRYLRTLFIQGARAILLRPTGWAKHSFGSWLAAAARRMHRNVLTVALANKLARIAWTILAQGRCYEARVEPRVEPAAV

SEQ ID NO: 318505 - protein, 461 aa, unidentified
MSRNKPVGKQKGSVQKKVDWKALEIVHLDAAGIDVGGSEHWVAVSPDRDPEPVRRFGCFTADLREMGQWLVEKGVRSVALQSTGVYWMPVFEVLEQHGLEVYLVNAQHTKNVPGRKSDVQECQWLLKLHAFGLLNNSFQPTDEIRIARTLWRHRGNLVAEASSVIQRMQKVLTEMNVQLSNVLSDLSGMSGMTIIGAILEGERDPWALAALVQPEVKASPGDIAKSLEGNWRQELLFVLRQHVELYRIYQEKITDCDLQLRKHLESLGSKLDLKTQPIGSRPKGKKSSRNAPSFDLRTELYRITGIDWAQINGIDVLTAQTVIAEAGADLSAFPSEKQFASWLGLCPTNEQSGGKILNRRTRKVVNRATVAFRGAAMTLLRSQSYLGAQYRRLRTRLGAPKAITAMARKLACLFYRLIKHGQQYVDKGTEYYEARYREQQIRSLAKRAQKFGLQLVIPTTA

SEQ ID NO: 318506 - protein, 346 aa, unidentified
MGNLTTIAVDLAKSVFEVAVSEVPGRVSERKRLNRGGLVAFFSNRPPAVVLMEACGSAHHWGRELERLGHEVRLLPPARTARYRIGNKTDRADADAILEANRNEKIHPVPVKTIPQQSLSTVHHLRHAWMETRTARLNALRGVMRELGVAIPVGAKAVLPRVTESMAEGRVPEDLAEIRKLEENVKESDLLLARLARSIPVARALQEIPGIGPLGSTALIPAVGDPNRFRSGRKMSAFFGLVPREFSSGNKRRLGSITKRGNTYVRTLAIHGGRSVLVAAHRRKNPDRLHRWALEVERRQGRNRAAVALANKIIRMAWAVWARGTRYDGALAGPSAETRARTTGAF

SEQ ID NO: 318507 - protein, 339 aa, unidentified
MALYGGIDLHSSSSHLGIIDGQDRRVFKKKLRNDPQLILRTLERFKDELVGVVVESTFNWYWLVDLLTDTGYRVHLANPSAVKRYEGLKHSDDNHDAFWLAHLLRLGILPEGYIYPKEERPIRDLLRKRGHLVKLRTSLILSLQGIIQRNCGVAISGNNIKRVKANHVAPLLSGQEDLELSGSVSKEAIDFLTRKIRQIENVIEAKVKLKEQFIYLQTICGIGKILSLTIMLETGSIERFPTVGDYVSYCRKVPSTWTSAGKTKGKGNKKNGNKYLAWAFSEAAELARRYDSNARAYYQRKTARTNFMVAHSALAHKLARAAYYVMRDRVPFDPEKLFA

SEQ ID NO: 318508 - protein, 370 aa, unidentified
MAQGSTLFIGLDVHKESIAVAYVAEEREAEVVFLGTIGTRQGDIDKLIRKLQSKGKPLHLVYEAGPCGYWLYRYLTKKGLQCWVVAPAQIPKKAGDRVKTDRRDAVQLARLLRSGDLTPIYVPGVEDEAIRDLVRAREDTLKDGKAAKVRLKAFLLRQDIRYEGRATWGPAHLRWLAEVVCPTPAQQIVFQEYVRAVSEHTERLQRLEAELQTLVQTWRWLPVVEAIQALRGVQFTAAVILIAELGDLTRFENPRQLMSYLGLIPSEHTTGEHRRQGGITKTGNSHARRALIEGAWAYRYPAKVSRHLQLRLEKVPKVIQDISWKAQVRLCKRYRRLMARGKNANQVVVAIAREMAAFVWAIARTVTGTH

SEQ ID NO: 318509 - protein, 346 aa, unidentified
MKPDSQIVLGKYFRQCVGIDVSKEKFVACLEMYDIASDVGCNTACIEFKNTKTGFNQLVKWSRKECLKDYPLTFLMEFTGIYHEPLTYHLHKLGMTIFVVVPNKARDFARYEGIRTKTDEMDARSLALLGCYCRKLRPWFPPKPIYKELRQMTRFAVDITKIRTQIVNHIEALNHGQTPQKSVVGFYERFIADIDRRLKENEKNIIAKVDTDKELSETVSRLETIKGVRFLTIVSILAETDGFSMITNRKQLTSYAGLDVVAKQSGPQDPKHRISKAGNARIRAALYWPAITACHYNKQIQLSYGRICERNPNVKMIGVTAAMRRLLLLIYTLWKNGETYDPEKMK

SEQ ID NO: 318510 - protein, 487 aa, unidentified
MDENGGGAGRFVGAFATGDRAEADETAVACDPDRQSGPRCIEVPFFVAPGNGEHAWQCLDYTCGVTVAFTWMEAKMEVIIERCCGLDVHQETVVACVLIGAPGERPRKEIRTFRTMTRDLEALRDWLQELGVTQVGMESTGVYWRPVHAVLEGRFDLIVANARHVRNVPGRKTDVKDAEWIADLVRHGLIAKSFVPPAPQRELRELLRYRRKLVESQTAERNRLLKLLETANIKLASVASDVFGVSGRAMLKALIEGSASPEAMADLARGQLRRKRDDLVLALEGRMEEHHRFLLATQLRRLEAAEQDIAALDDRIEAKLKPYCVQHALLMQIPGVDWVVAAALIAEIGVDMSVFLSVYHLAAWAGVAPGNHESAGKQKSGRARKGNVHLRTMLVGAAISAARTKGSYLKDKYHRLKARRGALRAALAIAHKILVSAYHMLAKNLPYRDLGEAYLDQISQTRTVANLKRRLERLGYNVTLEPKAVPA

SEQ ID NO: 318511 - protein, 353 aa, unidentified
MKCDKYIGCDLHQATTVVTVLDAEGKVAMETIIATEAAAMIRFLKSLSGPLHITFEETTQARWMYDVVRGYVSEAIVCDPRRNKLLAEGSKADKPDARKLAELLRAGLLRPVYHGHEATRQLKELVRGYETLSADTQRIMVRIKSIYRAHGIRTSGTAVYQQKQREQWLPLLSEPGTRQRVSWLYEELDHLRPLRKQAKMAMVTEGRKHQAFRLLRTIPQLGPIRCAMLVATVDTPYRFRTKRQLWAYSGLAIVTYMSSGYEIKAGRVVRSRKPVATRGLNRNCNRRLKDLFIGAAVAGSRSEPYRSYVEGLQQKGIRAEMARLTLARKIAAVALRVWKKGEAFDPKKLNSTT

SEQ ID NO: 318512 - protein, 403 aa, unidentified
MISVGIDVSKGKSTICILKPYGEVLMSPRDFKHTQSDLKTLVEKLKEFNEETHIVLEATGAYHLPVVQFLEQFKYKVIVVNPLEMKRYRCQGIRNPKTDSIDAYQIAQYGLDTWFRPVRNVDTEAIRSELKLLGSQYRSFMSVRTERCLALGNVTDRVLPGIYGVLRDFNVRTGKDKQSDFIYDFYHRDLITKYSENKFCEKYKSWAKKKGYNFSDCEARQLYSIAKDSIPTLNLSDNTKLIVRECVNVLREVDASLYDILTQMTILAKQMPEYSTVMSMKGVGDSIGPRLIAEIGDPRRFHSAKALIAYAGIDAPPYQSGKFIGTERHMSKRGSKIMRKLGFELMDSINKHQTSYAGDSVCEYFLKKRAEGKAYRVAMFAAYNKFLRIYHSRVSEVLNTFEA

SEQ ID NO: 318513 - protein, 325 aa, unidentified
MEKLYGGLDIHKENLAGCIMDRDGNITREHIFPSSKKAVERFLCDIPSSGITIAIEACGMWRGTYKILTDMGYEVKLANPKKTHDIACKKKTDRVDAKILADLLRTKYLPEVWIPDEQTLKFRDLARHKSNLTRLKTQVQCKIKSYLLRKGVKYGKLWNEKTLSTIAKEDQDIQNLINVYNSLKKEEKEIMKRIKQIARNRKETTLLMSMPGIAEFSSLMILAEIGDIQRFRSPKELVSYAGLCRGIYQSASTERSVHNTAVNKWLKWIIYECSGRAIMLDQRFQQYFYPIQKRKGANTARRATARKMLTIIWYMLTNKETYRAS

SEQ ID NO: 318514 - protein, 478 aa, unidentified
MTPPKDYCLEAPCPPTPLLPPLPVLSDALQVCNPHAAGIDIGEAEHWVAVPPGRDPQPVRRFGTFTVDLDALADWLIDCGVITVAMESTGVYWIPLFELLEARGLQVFLIDPRQTKRAPGRPKTDRLDCQWLQRLHAYGLLAAAFRPADQICVLRSYLRHRQMLLTYGAHHIQHMHKALQQMNLKLSQVVSDLTGATGLAILKAIIAGQRDPLTLAKLRNPHCQHSEDDIAKALQGTWRAEHLFALQQAVELYQFSHQQLTVCDQHIQTHLGTFADKSHGRPLPPKARRHKKANEPRFDARTPLYRLAGVDLTTIEGIEEGTALVILSEIGTDMSRWPSVKHFCSWLGLSPPHKISGGKVLSRRVRPGAQRVALALRLAARTVYKAHTALGAFFRRLRSRLGAPKAITATAHKLARLVYSLLKHGSAYVQQGLDAYESQYRERKVKAMARQAQALGYTLVALGTPEVPNFNALAAPTP

SEQ ID NO: 318515 - protein, 341 aa, unidentified
MGIITIGIDLAKNVFAVHGVNEAGRAELVKPKVARDQLLPLIAQLPPCLIGMEACSGAHHWARQFRQYGHTVKLMAPKFVTPYRMSGKRGKNDAADAAAICEAVTRPNMLFVPVKEEHQQIILCLHRTRNGFVEERTACYNRLRGLIAEFGIVLPQKVICLRREIGAHLEDLPGYANLCVGDLLSHTADLDVKIAEYDRAIAQAARDDARSKRLMKLPGIGPVTASALLASLGGGHDFKSGRQVAAWIGLVPGQYSSGGKARLGRITKAGDNYLRSLLVLGARAVLNSLGDKQDRFSRWARSLQERRGYWRAVIAIAAKNARLAWAVLRYGEDFKLELGKA

SEQ ID NO: 318516 - protein, 354 aa, unidentified
MNTTQVFEKRKIAVAIGIDLAKDHCDVVAYNADNKICFTKANWAYPHLMEWLANAQPAVVLMESCKGCHVRARDIADLGHDTRLVKGADVTALRNVCQKNDIRDADYIARLLYVPGTKFVFVKNQRQQSLQFLQNEYKSIQELRIQVGNQIHAGLEEFGCPGPKSKKFIQSRMMAHLEKNAEPIPDEVMSSFLRRREMWLNLFEQEEEAKKRMEEIAKTDDDAQRIMTVPGVGAQTAVGMLVHIGGDIGRFKNSGQFAASIGLVPKQNSTGGNTTLNGITKCGPKRLRANLVQCGQVILMHADKLKGNFGDWVRKLRDSGKKRGVIVCAIAAKIARIVYRLMKDKVDYTPVPSR

SEQ ID NO: 318517 - protein, 388 aa, unidentified
MIRVDDLSRSLIAFEQISTLVIVVELSQSSWLAAGVVPGIERRPLKKLDPDPTALLHVVEGWRDRATKAGRAITRTVLAFESGRDGFWLARWLRVRGVETFVMHSTSVAVSREPRRAKTDRLDTEMLIRVFLGWLRGEPRHCKMVAIPTLEEEDARRPSREREILVGERTRIINRMKAALVRLGIRGFKPGLLTAPQKLDALRTPEETPIPPNMLDEMRRDMARLAWVREQINAIEQARLERLERAPATGRHAMVRMLARVIGVGVETADMLVQEVLSRNLRDRRAVARYAGLTGSPDESGSKRREQGLSKAGNARVRRGLIQLAWRFLRFQKDSALAQWCRGRTEDVAGKRKRTMIVALARKLLIALWRLATIGEIPVGVALRTAVA

SEQ ID NO: 318518 - protein, 342 aa, unidentified
MKSATTIGIDLAKNSFSVYGVDDKGKTVLSRTLPRAGVVRFFANLPSCLVGMEACASSDYWARTIESLGHEVRRIHPQYVKAYLLGAKNDTNDAAAICEAVQRPNMRFVPHKSPEQIDIQCIHRTRQGYIKSRTALVNQARGLLAEYGIIIRQGISAIRNQLPLIIADEENALSGLMRRNIASLYESICFFDSQILEQDKLLKTVAKENEACQQLMQVPGIGIMTATILLTVAGVASNFKNGREFAAFLGLVPRQNATGGKTRLLSISKRGDCYIRTLFIHGARSAITRILAGQTPKYRPNPWVIELIARRGRNKACVAMANKTARIAWSMLAQGTEYRHAA

SEQ ID NO: 318519 - protein, 336 aa, unidentified
MGLDLHRRRTVMVRMTEAGERLEAVRFVSDPAVLAKQIAKAGPAPRVVVEATYAWYWVADVLDAAGAQLHLAHPLGVRGFAYRRVKNDFRDAADLADLLRMGRLPEAWIAPPPVRAQRELVRHRHKLRQLCSGIKAGAHAVGAKNALFIPRSDMFGLDGRRRLSALNLPEVFRLRLDSQLRLIDTIEQEIDELDKRIRVMFADDLGYRALLRLPGVGPVFAAILRAEIGEITRFPSPGQLSSWAGLTPRHRESDTTIHRGRITKQGSRLVRWACVEAVQRARPGTPMRNRYDQIVARRGGNAKHLAKVAAARELCECVFYALRDGHVRRLGEHGAA

SEQ ID NO: 318520 - protein, 316 aa, unidentified
MDTPVRYVGIDIAKATLDIAVRPTREHWKVSHTEREVTRLVQRLATLAPALIVLEPTGGLEIPLTAALAEAPLPVAVINPRQIRAFATATGGRAKTDAVDAQVLAHFGEAVRPTPRPLPDAATQHVAALVTRRRQLWDMLTAERNRLASAPRPLPKDLQAHIRWLARRLADRDTDLTAAIQASPAWRTQDDLLRSVPGVGPVFTVTVCGHLPELGTLSRQAIAALVGVAPRTRDSGSWHGSRHIGGGRAAVRAALYMATLVGVRYNPVLRAFYTRLRAAGKLPKVALPACMRKLLTILNAMVKHQTPWCPRLVPGA

SEQ ID NO: 318521 - protein, 367 aa, unidentified
MKQYVGLDVAQKETAICVIDEQGRIVHEGKAPTEPGALARLIRKRAPSAELVGFETGAMASWLWHELKRLDVPVVCVDARHAHAVLSVRMNKSDENDARGLAELMRVGWYRQVKVKSQVSQFVRSVLIARARLVSIRRDLENQVRSMLKESGLQFPRAINGRFRIQVINLLGDSHPLRSVIDGLLAVHERVGDEQAILDKQVRQAAKADETTKRLMTVPGVGVVTALAFQHTIDDPARFKSAQSVGAYLGLTPRRMQSGETDRQGHVSKWGDRLLRTYLYEAASVLIHRTQRWSALKAWGVRLMKRMGARKAKVAIARKIAVILHCIWTDGTEFVWGSERKPPDRLRNRIPARSESRAGASLPGRRC

SEQ ID NO: 318522 - protein, 360 aa, unidentified
MYSIGVDFHKAYSHMTVLDAQGQLLKAGKVPNTAEAVRAFVAPYREGGEAVLEATRNWTVMYDLLETELTAVHLAHPLKVRAIAEARIKTDRIDSRILAHLLRCDLLPTAYVRPREQRLSQQALRQRLFLVRVRTMVKNRIHVLIDRQAHVRETAPQFSDLFGQAGLAWLRRVELPPMERQLLNSELALFDALRERITSSDALVRSLATGDPRVRWARTIPGLGKFFAVLVVHEIGTIQRFATAEKLCAYAGLVPSFHASGGKVFHGRLTKQGNKRLRWAMVEAVRPAVMTDPELRAYYDRLRQRKGSNPAKVATARRLLTLVHHVLTQERPYRKPASQGMSRVKRRPRTALISPLPALG

SEQ ID NO: 318523 - protein, 429 aa, unidentified
MNYIQNKKIAQVKESTLVIGIDVGSEFHYARAFDWRGYEYSKKAFKFSNTEAGFTEFMAWMLHIKDSFAKEEILPGMEPTGHYWFNLGKYLMNNEISPVLVNPHHVKKSKELDDNNPTKTDHKDPKVIAKLIIEGRYSYPYLPEGVYADLRTASNLRFQIQSELTRASNRIQRWFSIYFPEYKDIYGSFNAISSMMILKKAALPDDIITIGVEKVNQIWRDAKLRSVGMKRAEALVAAAKRSIGNKEGLTAARMEISILIEDYEAKQNRLQQVIDFVEELCKQIPMADKLLEIKGVGIKTISGFLAEVGDISRFDNPKQLQKLAGLALVEDSSGKHRGETRISKRGRKRLRYLLFEVSMSLVAKNQEFRKLHHYYTTRDENPLKKIQSLMAVASKVIRVFYAILTKGVDYDALKMLSDIKRPPKYEHAA

SEQ ID NO: 318524 - protein, 386 aa, unidentified
MQADANQTESSVAVRTDLAAIFVSLELSRSKWLITSLSPGAGEKMSKFVVPGGDVSALLERFEHLQRKASARSGRSFRIISIQEAGLDGFWIHRVLEDSGIESYVVDPASIAISRRRRRAKTDRIDGETLVRALLAHKRGEPRVCAMLHVPTPDAEDSRRLVRERKALINERIRHVNRIKGLLFSQGVSGYEPLNRDRRERLEALMTGEGRPLPKALKAQISRELARLELLIEQIGDVEEARDAVLAEAEHSTRGPALLLNLRGIGPEFAAVLWSEGLSRRFDNRRQVAAYAGLAPTPWQSGQISQDQGVSKSGNPRLRATLIQVAWLWVRHQPTSALAAWFKARVSQNGGHRKKSTIVALARKLLVALWKYVNAGVVIEGAVVRT

SEQ ID NO: 318525 - protein, 386 aa, unidentified
MRRVCGLDVHKDSIYMCILYENGSKIESVFGVLTPELDKLRDLLVSHHVCEVALESTSIYWIPIWNILSVDFSLKLVNPYFIKQLPGRKSDVKDAEWIATVLQKGLIRGSYVPDRMIQCLRQYERRNHELSKNIVHAEQRMDMILQRCNIRISNYVSCISCKGYQKVVNAIISGESNPKVLVTLIHKRTLNKHGRQVVEDSLNGFVSDTDRDILRQYRDERMQMEQHKSENKAKMQAICEAHYCEELELLQTLPGIKEESAANIIAEIGVDMKMFLTASAIVGWAGLKPRNDQSAGKIKSRKITHGNKYLRKILVEAAWSAARTKDSRFMKMYQRLLARGKSKQKALIAVARKLLVLIWNMLSKKEAFNPVFITIEQPKLIRNIRV

SEQ ID NO: 318526 - protein, 463 aa, unidentified
MYTIGIDLAVTGKHKAVIVDHERHAVGGVVRFKTSAHEMSRLLTRAGVPVAEIQVTMEPTGMAWYPVAVYLMRCGVTVYLVNTRQVADLRRYFKRHSKSDRIDARVLAAVPYLNPDKLHPLTLPGARHLACQRACREVNNLQTWMTAIKNRLHVIDRFAWPGLEHVFPDPFGGDARWMRDHWYDPFQVLAAGAQAIRSQWQETASAPHEEPEWIDSLLHLAKDVVAIYGLPDDSLSYSLLQAEVQRYQCWLDEFEQVEREIKLETLRPLYRQLHPTRNLETIYGVGQDSAATYTSFIGPMQRFGSAKAFRGWSGMVPQSRQSSDTDTKGLHITRAGPNLIKRAAYMNAEVARRWDPQLAAIYHDQIVNKGKHHRQAVCTCATHLLDRVRVILTQDRPYQLQDVDGIPVTPEQARQIIAEHYTVSAADRQRTNKGTRRRRAERRAERKQLKQQRRESHVSCIRG

SEQ ID NO: 318527 - protein, 320 aa, unidentified
MMAQNEVVVVGIDVAKDKVDACIRAFKLRQTWLSTAQGHRKLVAWLRKYQVNKAVMEASGGYERAWARVLREAGIEVRLVDPKRVRSFALSAGRLAKNDAIDAEMIAWFAETFSEAPSQLHDAAREELQALVKARLDLIDFRMRLVSQSEHAAPGLVQKAHAHILKSLASEIAKLEAAISAKIKSTPDFAERAEIIESVPGFAQTSSANLVAGMPELGQVSDEIAAALIGVAPYDDDSGKRRGERHIKGGRRWVRNAIYMPCVGAATQNNPVLKAYYQRLLAKGKEPKVAIIACMRKLIVILNTMIARRQKWDPSRYVLS

SEQ ID NO: 318528 - protein, 422 aa, unidentified
MLEETQDEQEIIARVAALDIGKAELVCCVRVPDPRGGSWRVQEVKSYSTMTGSLQVMADRLMDLGVSRIVMEATSDYWKPPFYLLEAHGFEVWLVNAKDVKNLPGRPKTDRLDAVWLCKVAERQMLRPSFIPPVPIRRLRDLTRYRIGLVSDQGREKNRVEKLLEDSQIKLSVVASDIFGVSGRQMMAALIAGERNPQVLAQMARTSMRTKIPQLEEAFVGHFTDHHRFLLTKMLARVDALDSDIADLDTQIEAHLAPFADAVAGLDQIPGVGATAAAVIIAEVGLDMTRFPTPAHLSSWARFAPGVKESAGRKKGRGSTGHGDRYLARVLGEAAVGASKTNTFLGERYRRIARRRGKKKAIVAVGRSILIIVWYLLSDPEIDFHDLGSGYYDSRINPERRKRNHIRELEALGYKVTLEPAA

SEQ ID NO: 318529 - protein, 370 aa, unidentified
MPKPTPVFVGLDVHKETISVAYATGDAAEPPHFVGQIGTRQCDIDKLVRRLQSLSSQLVFAYEAGPCGYVLQRYLTGKGLDCRVVAPSLIPKKPGDRVKTDRRDAVELARLLRSGDLTGVYVPSVEDEAVRDVSRARDATRVTLKAAKLRLKSFLLRLGMNYVGRADWNDAHRRYLAKVVCPTPAQQIVFQESLRAVDEQVERLARLEHELLDLAPTWRLFPVVEALQALRGVQWLVALTVVAELGDLTRFDNPRQLAAFVGWTPSEHTSGEKRRQGGITKTGNGRARRVLIEGAWAYRYPAKISAHIQRRIEKLPKVAQDIGWKAQVRLCKRYRRLIARGKHANIVTTAIARELLAFMWAIAKEVKITA

SEQ ID NO: 318530 - protein, 344 aa, unidentified
MKDVRILGVDLGKNSCSIVGLDGAGRVLLRRRTRREGVIALAAKLPGCVVAMEACCGAHHLGRLLVEQGHEVRLMSPEYVRPYVKAQKNDDRDAEAIAEAATRPTMRFVALKSEAQLDVQVLHRVRDRLVGQRTSLTNQIRSILLERGIVVPQGRRSLLEALAVLSSEPDGSRVGTRVQRLLDDMLDQWRALDARIKALDDEFAEMARNDPAARRLATIPGIGVLNATALVAAIGDGRTFSRGRDLSAWLGLVPHQATTGGRPKLLGITKRGSRYLRKLVIQGARAALPSLARTATPLGGWLRGLLARAHGNTVVVALASKLIRIAWALLRNETTFVAGGAAVA

SEQ ID NO: 318531 - protein, 340 aa, unidentified
MQITTIGLDIAKNVFQVHGIDADEKVVVRKQLRRSQVIGFFRDLAPCLVGLEACATAHHWARELTKLGHEVRLMPAKDVKAYVKRNKNDAADAAAICEAVRRPTMRFVRAKSAEQQAQLMQHRARDLLLRQRTQLINAMRAHMAELGIAAPQGRDGIKQLLAIIAKDEDVRLPVDARASLIVLAAQLQAMQTTIGALEKRIVARHRANPDSKRLQTIPGIGVIGATAIRATVTDPAAFRSGRDFAAWVGLVPREDSTGGKPRLGPISKQGDRYLRRILVVGAVSMLRRAKLNPERYPWVTRLLARRPFKVVAVALANKMARVAWALLAKGGTYRPRLVAA

SEQ ID NO: 318532 - protein, 387 aa, unidentified
MTHFVGIDVAKFEHVASVFNSVTGELVIDSLHFDNNVKGFNSLLSHISKLDDCVVGFESTAHYHQSLFNFLTEKDFQCYLLNPIQTSRFRKISIRDAKNDNIDSKSIARFLMISYHDLIQEEFYINDLKELCSQRDSLISESSRLKIKLLTYLDRVFPELESVISKSSIHSKAIRAILKVYPTASRISKVRIDHLIKIASDASGKKFNSDKIIKMKETSKSSIGFDSSALALKIKQTIETLEHLKKQIDEVNSEIENHPIPRQSPLHKIDGLNSIEIAYIMSAIINISRFDSIKKVVAYAGLDPVVRQSGTFMASKTRMSKRGNKMLRYALIWAANNVRLHNKNLNTYYLKKRAQGKSHYNALGHCAVKLIRYIWFVLHNPDKEFIN

SEQ ID NO: 318533 - protein, 338 aa, unidentified
MALELLAIDLGKRSFHLYGIDTNGEILSRKVSRTKLAEVVNNLAPKAIAMEACASAHYWARCWLAAGREVRLINPRFVKPFVKGSKNDAVDAEAIFEAAMRPTMRFVPVKSRDQQDLQSLHRARDRLICQRTALINHTRGLLAEYGVVLPQGPWRFTAQAPAAVAGAELSDLARSIFGELMDQLDELDRRVKKLDATMVALCRTNETCRRLAKLPGVGPVIATAIVAAVNDGRQFRSGREMAAWIGLVPRQYTTGGKPRLGGIGRRANHYLRRQLIHGARAVVSRLPRHDARHDARRSTWLKALVARRGFNRTIVALANKTARIAWALLNRKEDYAIA

SEQ ID NO: 318534 - protein, 437 aa, unidentified
MIPVTFSELVIRNQQRSIAVSKIRSQKIKSVNDQTMIVTLDIGKGLHYGYFRTPDGQDVEPFAFYNTYDSFHRFWKKLSRFKKAHGCRHVLVGFESTGPYAEPITHFLKQQPVTLVQINPMHSKRVRELTGNSPNKTDRKDPRVIADVIMLGHALRVVIPQGASAHLRRLTQARERAIRDRTAIVNQLQHLLFVIFPEFLKVIKKISCKTGLYLLRHYPSRQAIAALGEQQLSRIIKRVSRAKMGQRHAEQLCQAAQASVGINEGQESIVEEIGHLVDKIKRENDFIDRVECQMRVHLEQIPYSRYLLSLPGVGLITVAGLIGEVGDFRQYGTVAEITKLAGLDLFEVSSGKHKGRRRISKRGRPLMRKLLYFAAINAVKSTGTMHQPYTQMLARGMPKIKALVAISRKLLRVMYALARNQSMYVENFASHRYHLAA

SEQ ID NO: 318535 - protein, 346 aa, unidentified
MKVLLKQTVGIDVAQNELVVSLGRMDQQISIEVYAYKVFPNTQKGFSSLVSWVNKQTLTNVEVRYVMEATGVYHESLAYYLCTNQKQVSIVLPNKISNYVRTLDIKTITDKSASQAIARFGLERQLEVWQPPLKIFNDLRQLCREREQLVQERTMLKNQLHAERTSATSSEKSIKRTKKRIAMIDKQEKEIMEEIAALIKGDEAIAKKMKVITSIPGIGNLTAVTIIAETNGFELIKNKRQLVSYAGLDVREKTSGTSVKSKPRISKRGNRNLRKVMHFPALAAIRTDENFKCIFLRLASRHGIKMIAIVAIQRKLLELTYILWKSNTSYCPNYHNQSTTTETITM

SEQ ID NO: 318536 - protein, 402 aa, unidentified
MSSVFVGIDIGKKKHQSALMGEKGETLARTLSFTNSLAGFQSLLKQLDPWSKEDILIGLEATGHYWLDLYTRLVDTGYSVVVINPLQTDGIRNMYVRKTKNDRCDAVIIADVLRFGRFRKSSVPEEDIAQMKALSRLRTGMVQSMSNVKRQIVAILDRLFPEFEACFNDIFSKSSMAVLDEFADPEELARCPLEELADLLFEKSNGRLGAAKAEHLKETASRSFGTGYAKRSMKFELKLLLEQVRFTQEQILEIEVKLKELMKDHQLITTIPGISDILGSAILGEIGDISRFENPKQLVAFAGLDPSVHQSGNFNATSMHLSKRGSPHLRRALYIAAHVARIHDPVLKEHYEKLINRGKHHRQAQNAVAAKLARIVFSVLYSKEPYDIEKLRSKPKLEEMSA

SEQ ID NO: 318537 - protein, 353 aa, unidentified
MPSKADTAVARTIGIDTGKNTLHMIGLDEKGAIVLREKVSRVRITKRFVNVPPCLIGIEAGMASHHIARELVALGHEVKQVPPGYSKPFRQGHKNDFRDAHAVAEAVERPSTRCVPIKTDEQLDLQALHRVRSRLISNRTAVTNQIRGFLLEHGIPVRQGHHFLRRQLPQLLGTRTDVLSPRMIRVIGDLMSDWNYLDERIERVTDEIESLARADEGCQQLITVPGIGPIISSAMVAAIGTGAAFCKGRDFAAWLGLVPKQMSTGDRTILGRITRRGNRYLRTLFIQGARAILLRPTGWAKHSFGSWLAAAARRMHRNVLAVALANKLARIAWTVLAQARCYEARVEPRVEPA

SEQ ID NO: 318538 - protein, 335 aa, unidentified
MDKITTVGLDLAKSVFSVHGVDANGRTVVRKTIRRDKVIEFFAALPPCLIGMEACGGAHDWARQFERLGHRVGIMMARFVAPYRKSSKNDGNDAEAICEAVGRPNMRFVPVKSAEQQAILSLHRVRQGYVEECTATINRIRGLLTEFGMVLPQRALEVRRAATILAEKLPLLAREAIADLRAHLTYLDARIDHYEQQLTAMNRHCAPAQRIMTMPGVGPLTASAITASVASGHEFRNGRQFAAWLGLVPRQHSTGGKTRLGRITKRGDAYLRTLLMLGARAVLQNATAKSDRLSRWAMSLRERRGYHRAIIAIAAKNARIIWALLAKERTFVPVG

SEQ ID NO: 318539 - protein, 334 aa, unidentified
MHKADRREDAAEDPVTHEPLGIDIAKASFDVSLHRRDGKRRNKQFANTSAGQAALVAWIGRYAAGAVHACLEATGTYGEALATALVDAGHVVSVINPAAVKAYAQSQLRRTKTDAVDADVLADFCAAHQPPPWTPWPVEVRELQGLIRRREALLDMLTQEKNRYAAGGLTPAVRASLERHIVMLEAELAALDLAISQHVDTHPGLRQQRDLLVTIPGIGDTTAARLLAECRAITDFDSARAYAAFAGLVPREHTSGTLRGRARLSKLGSSRLRLALYFPALVAMRFNPPLAAFAARLRAGGKHNMVVVAAVMRKLLHMAYGVLKHQRPFDPQLA

SEQ ID NO: 318540 - protein, 363 aa, unidentified
MEHVNNTELSSHEGTRCQFNGSSGVIKLGIDVHQQFYTVVMQEGGSNPKPPQRFSKQGLVHWAARIKNQGGEMHAVYEACGFGFGLQRALSGLGIKCYVVCPQKLDEHNRRVKTDSLDAKALCLKLDRFVQGNRDALALVRVPSEKEEQLRAIHRQREQLVKARKQLEAQGRSLMVNHGVEPVKSWWKSRTFAALQVASWLKELLRNSQPILVALQEKIRALTVELQNAADPDQARGLGAMSSVIIDREIGNWHRFNNRRQVGSYTGLCPGEYSSGNTRLQSCVTKHGNPRLRAALVELAWRLVRFQPNYKPVLKWRETLRQGALSTGAARKKAIVAVARQLAVDLWRIRTGRVSAESLGLSN

SEQ ID NO: 318541 - protein, 464 aa, unidentified
MYLGGFSPRLFNVDELPKRTAVCCITQVKSTSSKVRIPTRAIPSLHISGRDLMQDILTCAMGLDVHRDVIVACLARGELGTEPEIEIRSFSTLIPEMRKLRDWVLEVECRHVAMESTGIYWQPIYEMLEPCFDGQINILVVNARHMKNVPGRKTDMRDAQWIATLLRAGLLNGSFIPDKTFRELRHLTRYRKSIVHDITAQKNRIDKFLQSSGFRFTAFLSDAFGASGRNIIRHLMEYGDISREALDKCLKTQTRKRIDEILVALNGSLSEHQRSFLRMIFEHLESLERHRHTVEDAISEEIVKHEAALSLLCSIPGIDVTAAASIIAEIGTDMSAFPDSQHICSWAGLSPGNNESAGKRKSAHINKGDPYLKSMLCEVGWVISGKRTLYLSGWYWRVKQRKGAKRATIALARKLLTLIYTMLKTGTPYNEECFEIRRKQSERKRAGRMVNELQKLGYFVVAPD

SEQ ID NO: 318542 - protein, 361 aa, unidentified
MKKPAHHLIAEVPRKRAKVELTIGIDLGDVWSHYCTLNQQGEVIDRGRFRTTPKAIDKWFTDVPHARVAMEAGVHSIWISEQLEQLGHEVIVANVRELRAISHSDRKSDDVDAEKLARYARLDPEILRPISHRTVQQQEALTLIRARELLVRLRTAAINAVRGLTKACGHRMPASSTKCFAQRGHAALPPGLKLALDPILAQIADMTLKIKQYDREIQRLTQTEYAETQAMMTIHGVGHITALTFVLTLGDKTRFDRSRDVGWYLGLRPKRSQSGERDPQLGITKAGNAYLRSLLIECANHILRPHGRDSTLRQWGLHLAARGGKQAKNKSVVAVARKLAVLLHHLWTTQQPYIPFFQQAA

SEQ ID NO: 318543 - protein, 345 aa, unidentified
MNVTAVGIDLAKNVLQVHGADARGKAVLRKQLRREQVRVFFAKLPPCLIGMEACASAHHWGRTLERFGHKVRLMAPQFVKPYVKTNKNDVADAEAICEAVTRPNMRFVPIKSIEQQAVLSLHRVRQGFVKARTAQANQIRGLLGEFGLILPKGIWHIAQRVPELLEDASNELPLALRQLIDRLSCHLKELDLQVRELEREILAWHRNSDLSRKLEQIPGIGPLVATALVASIADARSFDNGRQVSAWLGLVPRQNSSGGKPTLLGISKRGDAYLRTLLIHGARSAILAARRRNDSKNGWLANLLTRRHPNIAAVALANKNVRTVWALLAHGRNFKPDYVPVRAAA

SEQ ID NO: 318544 - protein, 328 aa, unidentified
MQAGEGIVGIDISKESFDVVLRGTGGEQHRVFSNDQKGFKALVGWAEKQPERVVHICMEATGSYWEGLAEALYQGGYRVSVVNPYQIKRYGDHLLNRNKTDKADASLIAEFCEKDRERLRAWKPFSPEIKALRSMGRRLDELQGMKQQEQNRLKSGVTDLVVIESLQENLKQLDAQIKALWKKIKEHVNQHPDLREKQRLLTSIPGIGKLTAIKLIAEIGEIKDFTSASQLAAYAGLAPKQFQSGSSVHKQTRISKQGRTELRRCLYMPAVVASEHNPIVMDLKRRMLASGHVMMEVIVAAMKKLLHLVYGVLKSGKPFDPDYGNLFC

SEQ ID NO: 318545 - protein, 356 aa, unidentified
MEYIAFDAHKRYTRASVIRPDGQRVREQRIAHERGALREFLERCDRGSPVAVETIGNWYWIVDEIEAAGCVPRLVHARKAKLMMGAINKTDKLDARGLNRLQQAGTRPTVWIPPGELRDQRDLPRTRMVRVRQRTRLKNRIHATLAKYALHDVEVSDLFGVQGRALVRQRLTLLPPHTAYATQQLLEQIEGLDGQVRGFEQRIQAVFTPTPAIQPRLTLPGVGLTLAGVIALEVGDVARCATAEKLAGYAGTTPRVHASGGTTRVGPARPDVNRYRKWAFVEAANAICLTRGRTPRRHVSRLYERVARRQGHAKAIGAVARHVAEATYWMLSKGEAYREPKASGRVRPRGISAEAP

SEQ ID NO: 318546 - protein, 427 aa, unidentified
MKTYILRDPKTVEPQTPHHHARRDDPALTATVDVICGPARPVPPVLGCRVLFVGLDVHNDTIAVSLAPSDSPEVRRYGIIGGQHDDVLKLIKKLSAAHPGALLKFCYEAGPRGYPLCRFIRSHGAECLIVAPSKVPRQPGDRVKTDRRDADQLARLLRAGELTGIYVPDPQDEAVRDLIRARYQVQKQQHRARQQLKMFLLRLNIRYAGTKPWTQKHLNFLATVKLPFAEQQFVFQEMVNVITEAGQRLERYEKQIAAVVESWRWQPVVAALMSLRGVALLTGATLVAELGDLHRFASAPQLMSYLGLCPGEHTSGTTRQQGGITKLGNGIARKAMIEAAWNNSRAPRLSRTVLARQEGLPKAVIEAAWAAQTRLHQRYQHLTGVGRKKSQVAAAALGRELAGFVWAIGRMVQPHPVKPELPKAKAA

SEQ ID NO: 318547 - protein, 448 aa, unidentified
MSERTIAPEAPSIRMTTDSAAVRATKGKHMKPWTEITHYAGFDWARDHHDVVIVDRQGQIVADFRLEHTLEGWQQFQRQIKPYPAVAVALETSQGAAVDQLLQQDCSVYPVNPLSAKSYRERKAPSGNKTDRLDAWSLAEALRLDGQHWKALQPLDSLTQQIQLLCRDEIRLIEQRTALVNQLQQALVEYYPAALQAFEDWTQPACWDFIIQFPTPEKLAAAGQQRWEKFLHTQKLWRRETASKRMEIFQTARQFCGSPAVTAAKSLLAVSLAKLLNALQLQLDLYRQQIEALFQQHPDHDLFGSLPGAAKTLAPRLLGEIGGSAQRFEDTQALQCIAGTAPVSFQSGQIHRVRVRYQCNKVLRHTIHLWAQCCLRVCPWAEVYYRQKRAEGKSHACALRCLGQRLLKILWAMVQTRKPYDADLHARNQKQHGSWVLALIKPVAKSAE

SEQ ID NO: 318548 - protein, 335 aa, unidentified
MKNYECIIGIDVSKLKLDVVFLLKPEEKHHKHFIVKNEAKGIKEIVSHLKKGGVSPERTLFCFEDTGVYSSPLSYYLSKNNFNYWMIPALEIKRSKGISRGKSDKTDALDIAFYAHTHLHKLRLGDVAEKDIAELKLLLSERDKLIKAIRLFECNKENEDFLPTEITRNMLKINNETVKNLKKSLQKIDAKMLEIISANQTLTEQKNLLTSITGIGIQTAICLMVVTKGFANFDNWRQLACYAGVAPFEYSSGSSIRGKTKVSHLADKKLKSLLNMCAMTAVKLDAELRLYYEKKVSEGKPKMLVLNNVRGKLLARAFAVINRGEPYVNTRKYAS

SEQ ID NO: 318549 - protein, 350 aa, unidentified
MRSIGIDLHKRSMTACVIDKRTGETFTRSFRCQDEARILEFFSRLEPFEAVVEASATYEWLWLLLEPVAERLVLAHPKKLRIIAESKKKTDRSDAFVLAQLLARDEIPEAYRPTPQEREYQHLVKHRHCLVRDRSRVRTRVRSILAARNVDVPGLFSRDDEDWIEPLSLPPAESFRLREFWGQLAEIDQRIVTAEEELERFREAAPESQKRKHEIVRSVPGVGTVVADVVVSTLGDVNRFPSIKKVTSYAGVVPGFRESDRKRKELPITKEGPTILRWALIQAAWRAVRHSPYWRDTFELLAARRGRKKAIVAIARRLLGVIYTLLKKGEKYVTKQEGRGGKLAPAASRT

SEQ ID NO: 318550 - protein, 343 aa, unidentified
MNEISMIGFDVAKNVFQVHGVDGSGKEVLRKQLRRNAVEKFFAKLPPCTVGMEACGSAHHWARVIGRHGHDVKLMPPAYVKPYVKRNKNDGRDAEAICEAVSRPTMRFVVVKSVEQQAMLSVHTTRALLVKQRTMVANALRAQLSELGIVAAQGHEGLHELMTRLEAPSEEIPEMMRGALLMLVEQWQALDAKERVLEKQIVKAVRCDQEARRLMAAPGVGPIIASAVLAKVPDAKVFRSGRDFAAWVGITGRDHGTGGKHCPGRISKQGDRALRTLLINGASAYLRQQKRRGVSDPWLRELLARRPYKVAMVAFAAKTARIIWAMLAKGEAYRDRTSAPAAA

SEQ ID NO: 318551 - protein, 480 aa, unidentified
MAKRATQRADLKAVPLLLNESLYVGIDIGKGRHLAGFLSKTLLERHERFEACPALVFENAREGFRLLIERIRGLAPLEHVFVLMERTGHYHRALEQYLQELDIPVYMMHVQSRPGGMLKTDKRDALTLANQLYSQLELGVQVANKLQLVRRVVPPTEAAAQLKGLIRHRYELIRESTQRKNKLTAICDEVFPELTRVVKDPNSLFALALRERFPTPQALAPVSFTTLQEIRGGARSLSDAKLLELQGLAAQSIGIKDVARLRGLVLEQGQLIKELRLLREHVEQLDSEIGNIVEHAREGQILLSFPGFGAITAATIIAAIGSIHNFPSASALKSYFGWAPVVVQSGSTLDHSRLTRGGTRTMKQILFLAVFQAIRLQDNEWAKLYERLVKTRCPYDEKTQSRVGKKRVIGRVAGQMTEAIYALLKRDAELLAKILPGQDPPPPMLYDPEVHQRHRQGHYRPLKSTPLPNTITVLHPLPSE

SEQ ID NO: 318552 - protein, 405 aa, unidentified
MSELEKDLVFAGVDTHKDTHTLCLLDHMGRAIGTFRFAADAKGYDALAGKIGGPATCVGVGIEGTGSYGAGLTRRLLELGYCVYEVMVPGRARRKPGRPKSDPADAEVAARQVLARVNLSKPKDQSGWTEELRQLMIARDRLVQATSAMINAAKSLIVTAPEDLRRSLEGLSRKNLRSALSTLDPAAGGIILALGSLGKAWDLQDREADAIEERMKRVLEANAPALLTIYGCGTVSAAALAVAGGGNPERLKSEAEFASLCGVAPLLASSGKTERHRLNRGGDRRANRALYQIAVTRMSYNQRTKDYVGKRKRDGKSKKEAIRCLKRYIAREVFRALRNPLEIKGPSWKDLRPARQALGITLVEVGKALNVGFQRVSYAETGRLMNVRFLEEYDAWLKSQAKRES

SEQ ID NO: 318553 - protein, 418 aa, unidentified
MGKINERCGGIDVGKRFLLCCVLTGAAHEEPRSQTRRFEATVSDLVRLREWLAAERITHVVMESTGSYWVPVFNILEGHFIIVLANPEEVKNRKGHKTDRKDAEHLADLLRHDHIRASFIPPKPIRDLRDLTRRRLQLIQDATRERNRVEKLLEHVNVKIGNVLSDVFGVSGQSMLLALLDGKTTAEQIAHLARGQAKRKIPQLTEALEGHGMRDHERFLIRSCLRHLACLEEEVEQIDGEILQRMQEPPFQGAFQRLQTIPGVGQLAAASILAETGVDLTTFPTAEKMASWAGLCPGNRESAGIKKGSQTTQGNSYLRTTLVQCAWSATRKTGCIFQTRFRELSPRRGQKRAIVAIAHQMLTVLHFMLKNDVPFNGAANAPTQRRRQRRAHHHLRCLRRLGISVQIVEPTESAPQTG

SEQ ID NO: 318554 - protein, 353 aa, unidentified
MARIKVSSVYRFVEAFIGQRVFIGVDVHKQSFSVALLRPDGAIKDWTCPADVAAFTELIASLPVHIGAVCYESGPTGFGLARSLEAVDIKVIVAAPSRIPRPVAATNKTDSLDCRKLAELAASGLLTPIAIPTVEEEAYRALERRRHQLTDSLRRAKQRIRSLLLNLGKPEPHAIDHWGKPAIAALRAMDLLPGAKNTLDSLLNELEYLVGAQREVDQQLRTISREQDEARRIAAMRSVPGVGEVVATSFAAEIYRPERFNRSEEVTAYLGLAPVIRQSGGSKGKASLRPVGQKRLRSLLIEAAWIWKQKDEWARNFYNRIYSRSGVAQKAIAALARKLAALLWKLSLPVAQP

SEQ ID NO: 318555 - protein, 344 aa, unidentified
MEHYAGLDVSLEQTSVCIVDARGTIISEAKVASEPEALVGFLRGQGLDIGRVGLEAGPLSQWLHAGLVAAGFEAVLLETRHVKAALSAMTVKTDRRDARGIAQLLRLGWYRPVHAKSASAQEVRSLLTARKLIQGKLLDIESGIRGVLRGFGLKVGPISRGRFEARIRELVEGQAMLATVLDSMLAARAALQAEFARLHRTLLVLARADPVCRQLMSVPGVGAVVAITFKSGVDDPTRFRRSRDVGPHFGLTPRKYQSGEIDVTGSISKVGDRMVRTALYEAASVMLTRTVRMSPLKSWAMGVAKRRGGKKARVARARKLGVVLHRMWVDGTSFRWTSETAAIA

SEQ ID NO: 318556 - protein, 393 aa, unidentified
MTTIIGVDIGKDFHQATILDPGGEVLGGTIKFDNTALGFTKFLSHLQRLIPEKDDCLVSLEATGHYWLPLYLYLLDKGYKVQVFNPYQSDALRKVFLGRAKTDKLDAELVARLARVGTQKATPLPGEELLSLRNLCRFRSELVFQSSDTKRRLIFLLDLIFPEFEKLFSNVFGKTALKLLSDYPTPEEILELNEEKLIKLLKDSSKGRLGEKTAKELREKAASSVGISFGQKSLVFELKLLLEQLKFLKEQLKDLEKEITQILSKTDQKLTTIPGVGPMIASSILGEIGDIKRFPNVPSLIAYAGLDPTTFESGNSIKKTGKLSKKGSKYLRTALWQGAVYSLVHNPFLRAYYDKKLSEGKPKQVALGAVTNKLTRIIYGILRSGLDYQPDFS

SEQ ID NO: 318557 - protein, 450 aa, unidentified
MGSNYAGVDWASEKHDVLVSDEAGEELLSTTFAHDEAGLRSLCRTLVRMKVQLVAIERPEGVLVERLLDAGLRVIALHPNQVAATRARFRVSGGKSDRFDAFVLCELARTDSHRFRILEPDCDQTKALRALTRGREDLVQTRVALTNQLRAELERFWPGAVKIFARLDSPIALAFLQKYPSPFEARTLGEQRLAAFLRQHGYSGRKPAHELLAKLRQAPEGRAGEQEITMRRQLVLALLAALVPLVEQVKTLERQIAQAVREHPDGEIFLSLFRDPKSVLTAATLLAEIGDCRARYPTRDTLAGDAGQAPVAVESGKRKVACFRWACNKRLRDAFCTLADSTRHWHPWAAHRYARAIADGHDHPRATRTLGRAWCRIIWRCWQDHTPYDPARHRALQHHYTVTIPTPSRPRPDLAATQRMHGATVTDRRPEGPSAQALDGKPTSANALGG

SEQ ID NO: 318558 - protein, 351 aa, unidentified
MAIVDEFNECITGGVDTHLDSHVAAALDAKGGLLGVEHFDAGRAGETRLIAWLHELGPIDRVGVEGTGSYGAGLARRLRAAGVSVVEVDRPNRQTRHRKGKSDPVDAIEAARAAQGGRATGLAKSRDGNVEAMRALLVARRSARSSRIKAMTQIRHLGFCGPDELREHLDGVSAIMLGRTAAGVRPAEGSRSLVMHATATSIRILGRRVESLEAEIEMLEHVLEQLVRETAPSLLALYGVGVDTAASLLVAAGDNPERLRSEAAWANLCGVAPLEASSGKVTRHRLNRGGDRNANQALWRITLCRMAGDDRTKAYVERRTAEGKSKREIMRILKRYIAREVYPHLRSMTVN

SEQ ID NO: 318559 - protein, 476 aa, unidentified
MKNDNTKKKWTGNKKNVNQDTSKTFMEMPIVNLKAAGIDVGSRSFFVCVGQGANDVREFGIFTCDLHEIAKYLKNLGVQTVAMESTGFYWKQLFVLLQDYGFEVILVNARHIKNVKGRKTDVVDSRWIQLLHSLGLLSASFQPDLMTEELRTYTRQRQNLIQHASQQVLKMNKNLTLMNLQLKPVLRDLVGLSGRRLIEAILNGKRDPQDLATLIHPSCKHPASDFIKALDGNYREEYLFELQQSYDSYNHFQHQVEACDRKINLLLQRSVEIKDNYPPTKYSSAGKQASKYKPPKNINYKNCPPTQMAEHVYHLCGVELLNIPGVNTSTILALISEVGLDLSKFKTAKHFTSWLGLSPNNRITGGKIISSHTDSKKNRIALAFRDAANSLERIVMDNQLKSFFKRISAKKSRLVAITATARKIAIIVWNMLTKKEEYNPLATAKNEEFFRKRKMKNIQRIINEYGIKQHELAFAL

SEQ ID NO: 318560 - protein, 339 aa, unidentified
MDKRDYASVEVSKDKLLVLVNRDEKTLSEKVFSNTRSGHRAIARHLGGRPTRVIMEATGVYYLDLAIFLCEQEEVEVTVLNPKVSRHYAIATLKRAKNDSVDAKVLLDYVMTRPFVPFNPPSEAAYKLRAISRKIRSITGDCARTRSQLHAEKSTIETPKSVIRASERSIRNDEKTIKMLTDEALKIVTGDPKLKRELEILDSVPGVASGGAVQILGELKTLPAHLSTRQVVAFAGLDPVEYKSGSSVNKRKGISKRGSKNLRVALYMAALAAVRHDPHVRAFHEHLKARGKVPIVALIAVCRKLLHSIWGMLKNNETFDSEKFYRLPVISPSTVISAP

SEQ ID NO: 318561 - protein, 355 aa, unidentified
MTSVKYIGLDVHQATIAAAVLDGNGKLVMESVVETRGSTIVEFLRGLRGELVVTFEEGASAAWLHDLLKPHVSKLMVCDPRKNALLKSGSKSDRIDARKLAELLRGGQLSGVYHGEAGIRTLKELARSYLTLTQDATRVMNRIKAVYRSQAIPCRGRSVYAVRDRSEWLKKLVEPGMRRRAESLHQQLDLLEPLRQQARREFLAESRKYPARRRLQQIPCIGALRAALLIAFIQTPHRFRTKRLLWSYSGLGLETRSSADYGVKDGRMQRLRKQISVRGLNQNHNHDLKNLFKSTAISASTRKGPLQEYYVELLARGIKPAMARLTLARKIAAITLRLWKKGENFDPAKLKTQAA

SEQ ID NO: 318562 - protein, 438 aa, unidentified
MSNKVIFNLDELFISVGIDVGADFSWMSIALPNQQFVGKPYKILHNSIDSLTTAVSKIKEAEELYSLESRIFLESTGIYHYPLFCYLRDKGFNCSVINPIITKNSTNINIRKVHNDRFDSKKAALVGLKPDLKVSLMPSDLALNCRNLCREYFDLMDNRSAYVNKLQGELRMAFPQYLGIFSKVTINTSLTLLETYTSPSAFLEADKQEIIDIIRSTARFGLTYAQNKYNAIIQAATDANQFGYIIASNIKRIHLYISFIRKYDEEINSILELLHELVDANEDADFVKQIHLIETFKGAGFLSAVSIMGEIGDFSAFSKPKQLFAYFGLDPAVKQSGKFEGTKVQMSKRGSAIARRVIHTLTLQSISISRNGEAKNSVLREYYLKKCDSKPKLVAMGAVSHKVCNMIFAILRDNKPFKIIAPQEHIKQYNAAKCDIAA

SEQ ID NO: 318563 - protein, 422 aa, unidentified
MLTESHDEEQVIARVAALDIGKAEVVCCVRVPAGANAKKRLQEVSTHSTMTRALTELANHLVDRGVERVVMEATSDYWKPLFYLLEAHGLDPWLVNARDVKHLPGRPKSDALDAVWLCKVAERQMLRPSFVPPKPIRQLRDLTRYRIDLIGARTAEKNRVEKLLEDACIKLSVVASDIFGVSGRQMMVALIGGERDPKVLAQLAHSRMRAKIGLLEEAFNGHFDNHHAFLLATMLGRIDAIDADVAAVDAQIEAQLTPFASAAARLDDIPGIGPVAAAIILAEVGVDMSRFPTAGHLCSWAKFSPAICSSAGKSKGNGSTGHGNRYLARVLGESAVVAGRTDSFLGERYRRIAKRRGKKRAIVAVGRSILVIVWHLLSDEQAVFNDLGADHFTRRVNSETKKRNHIRQLEALGYNVTLTPAA

SEQ ID NO: 318564 - protein, 427 aa, unidentified
MLGVGIDWAEEFHDVALGRPGDGVFDEIHVDHTPAALDALIARIVALEPDAAEVRVVIETRHGLLVERLVDAGFTVLPVNPDLIARRRGPAKKKDDAADARIACRLALDRFTDLRALVPHGEQAGQLRAIARDDLRAQRDARRLLNRLRADLIATFPAALAIAGDDMAAPTFLKLLQRWPTADALASAARDELEAFARSCRHGWPDRFTDKVTAALAADQLAAKPYLVRAKADTIRLAAAQLLLIHTQRHAWEKRMGALLLGAPREGRAHQPGDDRGPAVPGGEIYLSFPGLGDRLAARIAAEIGDITTFTTANARQCYAGKAPVTRRSGKSELTVATRLACNRFLADAVQQWAFTSLLRSGWAREFYDAKTAIGNNHHKALRALGNRWPEVLWHCLTHGVAYDEAVHVANRNRALGRLNQPRKQAA

SEQ ID NO: 318565 - protein, 341 aa, unidentified
MNAITIGLDIAKSVFQVHGEDQTGKVVIQKRLRRHQVEAFFSKQLRCLIGIEACGTAHHWARTLVALGHDVRLIPAGYVKPFVRRNKNDARDAAAICTALSRPDMRFVTIKSVDQQASRGLERSRDLLVKQHTQLMNCTRSLLAELGIIAAVGWRGFAELIARVKHNEAAIPPVLLAALLPLIQQIEGLHTAIAALEDRIIAEARDNPMMRRLAGIPGIGGLTAHAIVTAIGDGRQFGSARDFAAWCGLTPQQHSSANKRHDKGISRQGDIRLRKLLALGASTIMRNARSRSDRATLWQRGILARRPVKVAVLAQAAKNARIAWALLVSGETYRNTTATTA

SEQ ID NO: 318566 - protein, 389 aa, unidentified
MYFVGIDISKYKHDCFITTETGDVILNDLTFSNNRDGFNELLSVLTSLDHNQGIRIGFEATGHYALNLKLFLEETHYSFMEFNAVLLSKFNHSQTLRKTKTDAIDCASIARWLMTVEYKPYPIGFYHMYSLKSLTRLRDSLVRQRSFYLVKMTNVLDHVFPEFKPFFKNRLGKTALLLLTKYGSAAKIASMNSRSYDELRRVSRGKFSMYQFLELRTLAKNTVGESNTIFDLELSTLLNLYQNLCSQVNVIESEITILVTDLNRPIQTIPGIGPLSAAVILSEFGDVSRFKSPAGMLSFAGLEPAYYQSGTSEYTGHMVKRGSSHLRYTLMTVCLPIINHNIVFAEYYHKKRLEGKPHRVALSHVAKKLLRVIFTLETRNIKFDPEKIR

SEQ ID NO: 318567 - protein, 328 aa, unidentified
MCTLGIDVSKNKIDLCLLTAGHGGKKKHKVLTNEPAVARKVIDWLNAQKCVPESVTVVLEATGIYHENLAYGLHEAGVSVCMANPCRVREFAHGMDILNKNDAVDAFVLACYGELKSPAVWVPPSPEVRKLRALLRQRDALREDVQRTVNRLEKANSTSTPQEVIRSLERTKSWLNEELARIEKLITDHTDNDPGLKADLDLLKSIKGVKDQVGREMLALLKDGMFKSASQVAAYLGLTPVEKTSGSSVRGRTHMSKTGPSGVRAKLYVAALTASRWNKQAKAIYERLVAKGKAKKAALGAVMRKLVHLCFGVLKTRLPWDENYVATA

SEQ ID NO: 318568 - protein, 426 aa, unidentified
MKRIGLDHLAKAPDTAVLAGDVCRDRIDAYSELGGVGLEWDFENTPRELRAALVAFGERARLAGKARILVVVESTGAYSELVLRIAQELDFHTAWVSTEAVCKMRGIESNDSSKTDPKDARCIYRLAAVMGKTLRHRALTEEYGVLRELHLVYASAEEAVVVARNAAQDVLRRLFPGFGFKSGFLFGKSGHALVSCYGADPARILATDEAEFTATMRAAAKGIHGVSLRRLRSQAEACSTSFLSEELASVLVLRMRQLFEDLERHDARKAAIKARMVALYEALRLRDPALPAATQGVVSAFHLARIVAETGPLSDFESWRQVMRLAGLNLTERKSGTWKGRTKLSKKGRPLLRKVLSHCVLPLVKTGALFGEDHRRNREQRKVAGTASMASISRRFLKMLFGWYRSGAAFDAARMRTCASAYRKAA

SEQ ID NO: 318569 - protein, 376 aa, unidentified
MTRHGEAFIGVDTAKARNAVAIAEGDRNGEVRYLGEFDNTPDGVAKLIRKLADRYEILHVCYEAGPTGYGLYRQILGLGHACIVVAPSLIPRRPGDRVKTNRRDAQGLARLLRAGELTAVWVPDETHEAVRDLVRTRAMTIEDRRRKRQHVTSFLLRHGRAYESSATWKGRHVRWLDGQNFPHPAQRLAYQEMLNAARTAAERIVRLEAALIEIVPAWTMAPVVSAFQAMRGIQFLTAVTMVAEAGDLRRFDHPRQLMAFPGLVPSERSTGETKRQGGITKAGNVSARKALVEAAWTYRHSAGAGKDHQQRQQSLSQQVRDIAWKAQTRLCARFRRLAAKGKRNTVVVVAIARETAAFLWAIARHVEPAPLQAAKA

SEQ ID NO: 318570 - protein, 386 aa, unidentified
MPQPKDDLSRSLVALDQHSALIAVVELSLSTWLVGGMVPGIERDPLKKLVPDEDGLLKLLHRWRDEAVKAGHQINRMVVAFEAGRDGFWLARWLRCRGIEAYVIHPTSVAVSREHRRAKTDRLDIALLKRSLLGWLRGEKKHCSMAAIPTLEEEDAKRPNREREQLVGKRTGIVNRMKAALVRLGIRGFNPKLRKAPQQLATLRTPEGGTIPPNTLAELQREMAHLSFINEHIKQIEDARLIQLKQAPQHGSNAKVVQLGRINGIGIETADMLANEVFSRDLRDQRAVARYAGLTGSPDESGRRRREKGLAKAGNARVRRGMIQLAWRFLFHQRNSALTQWYRQSVAAGKKRTTVIVALARKLLIALWRFVTIGDVPQGVILRTAS

SEQ ID NO: 318571 - protein, 347 aa, unidentified
MKRILKQAVGIDVAQKELVVCLGRMYDDLDTELYASKIFANTANGFSALTQWVKKLTEESRSVRYVMEATGVYHESLAYFLEGKGFEVSIVLPNKISNYFRTLEVKTITDKTASEAIARFGLERKLDRWKRPAEIFRKLKQKTRERDQLVGERTLVKNQLHAEQTEAYPGKESMARMKTRINLLNKQVTQIKEEINVLVKGDKEVKKSVEIIISIQGVGILTAVTALGETNGFELIRNKRQLTSYAGFDVKEKLSGTSVKGKPRISKKGNRHLRKAMYMPALAAIRCDGKFKDLFTRLVSRHGIKMKAAVAVQRKLLEMIYTVYKTNTAFDKDYLKENIIAFSTQQA

SEQ ID NO: 318572 - protein, 416 aa, unidentified
MSLSVPAAVLFTGIDWAAEAHAVCVIDPAGELADRFTVTHSAEGLSQLVRRLARLGDPADMPVAIERPDGRLVDALLEAGHPVVPVKPNAIKTWRDGEVLSGAKSDAADAAVIADYLRIRHRKLRTAAPYCEQTRALRTVVRTRDDLVDLRVAAVNQLAALLDAHWPGGKAIFARLDSRVALEFLTRYPTASSAAQLDQAGIADFCAELGYSGKRPAAVLLDRLRSAPAGTTGQALTAAVHDAVLALVAVLKAITAATKDLDRGTAARLGEHPDGKIFTSLPRSGQINAAQMLAEWGDCRQAYDGPDSIAALAGCTPVTKQSGKHRAVHFRWACNKRFRRAVTIYADNSRHASPWAAKIYNDARAAGKDHPHAVRILTRAWIRVIWRCWTDGIPYNPDLHGAAAALALVSANQSAA

SEQ ID NO: 318573 - protein, 347 aa, unidentified
MLHAGLDLSRRRLDVCLLSDQGEYLDQLVSPPDVDALRTLARRIDEVHGEPVCAVIESMTGARLVHDTLEREGWSVEIADAQKVKGLAPLACKTDETDSLVLATLSQRDLVPAIWLPDPRVREQRELARFRMHLVKHKSALKCRIHSTLINFGRPCPVTDLFGAEGRRLLGKLDVPEPWRSNVSASIKLIDHLEDQIDEINRRLKAGHADHPYVPLLLSVPGIRWVLAFTIAAEIGDIGRFASPEKLTGYTGLCPRVVQSGDSDRRGPLTKHGPTYLRWALLEATMHALRHPAYSARYQRTKKRLGKQRGAKVAQVDIARRLARAIWHMLTRNEEFAPRGAAFRLAA

SEQ ID NO: 318574 - protein, 345 aa, unidentified
MELHTIGIDLGKTVFHLVGVNLRGEVVVRKKFSRKQLLHFTANLQVELIGMEACGGAHFLGRALREQGHEVRLMPAQYVKPYVKTNKSDYIDAEAIAEAVGRPKMRFVPIKSDDQLDLQSLHRVRERWVMRRTAVINQIRGLLLERGITLRKGRCHVDAALPGILEDAGAKLSGALRVLLAQLKLELDHLQVRIDEADTVIKKMAGENEACRRLVAIPGIGPITATAIIAAIGNGAAFKKGREFAAWLGIVPGEYTTGGKQKLLGISKRGNSYLRRLFVHGARAVLQQSAKQSSGLSAWLAQLTTRTHSNVAAVALANKLARMAWAVLAKNEPYRPPMLAGAATA

SEQ ID NO: 318575 - protein, 355 aa, unidentified
MAASSLTHRRASGVVVGVDTHKDLHVARAKDELGRGLGEITIPASAKGYRALLSWSRGLGEVRAFGVEGSGCYGAGLARHLRAHGEVVIEVIRPDRQARRLRGKSDPADAEAAASAVLSGEASGTPKASDAAVEMIRALRVARSTANRARTQAINALHALVVTAPEELRADLRGLPGPRLVRTCARLRPGPLTDPVGATKAALRSLARRHQALSVEVRELDGELCRLTAKACPALLGIFGAGSDTAGALLLAAGDNPERLRSEAAFAKLTGVSPVQASSGKTTRHRLNRGGDRHANAALHRIVLVRLRWRHPPTIDYVARRTAEGRSKREIIRCLKRYVAREVYRALTDVPSDAS

SEQ ID NO: 318576 - protein, 337 aa, unidentified
MNFVGIDLHKKTISVCVVDQNRQVLDRERFCCADVKGIQAFFEPLDPFQAVIEATAGYEWLFRLLEPLAEEVVLAHPQKLRIIAESTRKSDKLDAQVLAEFLALDMIPEAYRPTPRERAHRRLVRQRVHLQKRIKAVRCKIRAILTDYNADRKDLFTIDGLKYLGQAKVSEQDRFVVDQLTSEWQFYVDQCGVLEKRLREFAKLAKAKEAEARAVLDSIPGVGPVTAEVVISELGLLTRFRSQKRVCAYAGLVPGQRESAGRRRDLGITKQGSPLLRWALTEAAWRLVRRSRYWQTVFEALAKRRGRKRAIIAVARRLLCVMVSMLQSGRRYQAARA

SEQ ID NO: 318577 - protein, 334 aa, unidentified
MKTTILLTGIDVSARSLTIAVEHPDGARERLEFANDAAGHRQLIRRLTKQGRHARVALEASGIYSLDLALALHRAPRIEVMVINPRAARDFAKAFLHRSKTDALDAEVLLEFVRRMPFLPWQPPPTEALELRAVTRRMAALIKTRSQEKNRLHAARHCHTLSDLVRHDIEVNIRHLDRRIALLEEQAVDLIWEHPELRLDLLHLTSVRGIARTSAVQILAEFSVLPPDLSARQLVAHAGIDPRSFESGESVAKPARISRVGNRYLRAALYMPALVASRYEPHVKAFYDMLIARGKKPKQALVAVMRKLLHSIYGMRKHGCDFEGQKFFAMPQEA

SEQ ID NO: 318578 - protein, 370 aa, unidentified
MSNATTFVGLDVHARSVKACAFVPETGETVRRSFGYEPCEIASWASSLPQHAKCVYESGVTGFHLCRELRSMGVDCVVGAVSKMHKPAADRGRKTDRRDAQFLAVQLALGVVTEVHVPDAECEGARDLARALADARDDAVRAKQRLSKFLLRHGFVYDERNSAGQRRNRWTRDFWAWVGRIDLGDVAAMATLDRYCVRVREADAAKAALEAKVKSLAQQPRWKPTCDALKCLKGVDAVTAVSIACEADGFARFAAASGFAAWVGLVPSEHSSGESQFRGGITKAGNKHLRKLLVEAAWHYKGASRSPKGLAKGQIVDEATRRHANAGVRRLVDRRRAMDDAGKQSSVANVAVARELACWCWAVGRMAEGA

SEQ ID NO: 318579 - protein, 319 aa, unidentified
MKTTSSARIANTERNVGIDVGKSTLDVLILEPDIYLQEPNSPDGIKRLVSKLSRYKLSRIVVEATGGYERHLVEACAEKALPIIIVQPMQVRQFARAQGLQAKTDKLDARLIAQFGAIMKPEPRPIASKKVRYIKDLLSRKRQLNETRTQELNRYHKAPTTLMPSHNRLLKLVDKEIAWNNDKLAKEVAEVSEWQRTYEILSSVPGIGDGVAFTLLGELPELGALSSREVGALCGLAPYNRDSGSMKGRRRIKGGRAPIRTVLYMAMLSAIQHNKIMKTFYQKLVAQGKHKKVALTACMRKMMIMLNARVRDKQEWQTH

SEQ ID NO: 318580 - protein, 355 aa, unidentified
MTETTALPVTLTTGLDLGDRKTDYCTLDAQRQVVGRGKFPTTRDALIREFAGVPRRRIVIEAGSQSLWVSHLLRELGHEVMVVDPRRVQKLVAGNRKTDRRDAESLARLAMGVPELLGAAHHRSFETQADLSMLRSRDILVRMRTKLVCHVRGILKAFGIKLPAASASCFHRRATEQIPANLQPALQPVLAALAELERRIDELDASLAVVAKTRHPEVAVLRQVSGIGPVVSMAYALTVGDPKRFKRSRDVGAWVGLTPDKRASGDSDPQLSIHRRGDGYLRRLLVVAAHYILGPFGKDSDLRRYGLRLCEHGGRNAKKRAVCAVARKLAVLLHRLWVSGVPYEPLRNSKKAEVA

SEQ ID NO: 318581 - protein, 420 aa, unidentified
MNYRRIAEKRRAIKSNMMVVGVDVAKFKHVARALLPDHTFTNPCYFTNDIHGFNRFLAKTSEWRRKYGFTEIIVGMEPTGHYFKPLARWLIRQDVQVVLVMPRDVSHRKADFNNNPTKCDPKDAILIADLVAGGCYFPARLAQGNLAVLQRLVHYRWQLVKDRTRMLNRLQADLDERFPEFAAVYRDVTTRTAQYLIEHYSSPGTLASRTVAQLSREIKQHCAHTVDETRLTALLSKAAETIGSEDGWNGLSTFVIPGKLKTLKLLKEQLEEVEAAIGRLVWTFADTHYMTSVGGIGPLSAAVYIAETGGLGNYAAGDAVVKMAGLDLCEQSTGETHGQRHISHYGRSLLRTTAYFDALVQSRRGMPLHDLYEQLVKRGKPKVEALVAVGCALLRLLHALVRDQRTYTPKPPARSVQPAA

SEQ ID NO: 318582 - protein, 343 aa, unidentified
MEGYAGKQFVGIDLHRRRSVIVRTTERGDPLETVRITNDVDSLTKVMARAGVSPEVVLEATYGWYWAADALADVGASVHLAHPLGVKAFAYRRVKNDVRDATDLADLLRMGRLPEAWIAPPVTRELRELVRHRAKLVGIRSGCKCEVHAVLAKCGVQVLMSDLFAPTGIGLLERLDAPAPYLARVGSLRRLIDDLDVEIDLFARLIRGRLVTDPGYRAVQTIPGIGPVLAAVFVAEIGDVHRFPGPAQLASWAGLTPKHHESDTHVHRGRITKQGSRLVRWAAIESVQALGPGTGAGRLKRRVGDRRGRNIGKTAAARQQLTYVYYAMRDGHVRSLHRSRVAA

SEQ ID NO: 318583 - protein, 340 aa, unidentified
MLYIGLDVHKEFCQACVIDESGRALSNERFSSTSEELDRFLGRFQDAKFVLESTGIWEFIYEGIEKRGFEAVLAHPLRVRAIAEARVKTDKVDAETLAQLLRADLIPKSWVPPKDIRDLRQLVRQRAYLVRQASRFKNRIHAEILRRGVRRPENLKTPFAQRSIRWMRSLDIPTVTSCLNCLENIQAQVEEMNIQLLEEYNRRPDAQLISTVPGIGFYGALLILAEIDDVSRFRHPEKLCAYAGLVPTVSQSASSVKYGSISKDGSAYLRWILTESVHVHTRYEPGSQLSRFHARLAKRRGRRVATVATSRKLLRIIYWMLVRHEPFHSHGFNPVKRVHC

SEQ ID NO: 318584 - protein, 392 aa, unidentified
MFIVGIDIAKRFHEASVIAQDGSLVRKALRFANSQAGYNKLMNMVRGLNEPVVFGMEATGHYWLTLFTHLRNDGFTVHVINPIQSDALRGMYIRKTKNDAIDNMIIADVIRFGRYCETSVQPGDLQAMRELCRQRFYIIDMASDLKRKVLALLDQVFPEYEKLFSDTFGASSMELLSQYTTPEEMLSVSTEKLAELLETASRGRLGLAKAEEIQEAAKNSFGIVLASGSFALIIRQYIEQIRSLESSIAVFDTEIARLLAGFDTQLTTITGIGTTLAAVILSEIGGDIKRFSSPAKLAAYAGVDPTVKQSGDFTGTRMKMSKRGSPYLRRAIWLASTVAAFKDPAIHALYERKRSEGKDHMTVIGHVCRKMVSIIFAVLRDNTPYSPAVISD

SEQ ID NO: 318585 - protein, 386 aa, unidentified
MNFVPVAGIDVGKRFSEMAILSPLNEGYARIRINHDSYTNFVRALELLKKAEKEFAVKPVIVMESTGHYHKILFHSLTKVGYTVHIINPIQSDSIKNIGVRKVKNDKVDARKIALLYRFEQLNTTNIPDEDIDCLRSLCRHYYKLSDQLTVYKNRLLGTVDQLFLSFTDVFKDISSVTALAILEKYPSPEDILKADRDELVSLIRQTSRKNLKWAISKYELLCAKAGDFSPLSVNSIANIAMLKANISMIRTLMQALKDALNAIYMLLEKDLKKDMPTLALTIDILCSIPGIGLLTAATIVAEVGDFSAFSKPDKLVAYFGIDPSVKQSGQFEGTKNKMSKRGSRLLRRVLFTTALANVRKNVTAKNIIQYYTITIEKSASVSRKK

SEQ ID NO: 318586 - protein, 338 aa, unidentified
MSLYAAIDLHSSNSVLAVMDGDGKAVLRCRRPNDLPRLLADLAPYRDELVGVAVESTYNWYWLVDGLMDHGYAVHLVNTTAIPQYDGLKHGDDDSDALHLAQLMRLGLLPEGYIYPREQRGTRDLLRRRFSLVRQAVRLMLSIQSSFSRSTGKQLSANALRRLTPSQLVDLFPELSIRYGVLIQFKLWLTLQDQITALGQWIRKDLARPDLLAWLQSVPGIGPILGMTILLESGAIERFDSVGDYASYCRMVESVRLSNGKRKGHGNRKCGNRYLCWAFMEAANYAVRYDPLIRRWYERKRARKHRVVAIKAVAHKLARACYHMLHEGTPFDLTRAFG

SEQ ID NO: 318587 - protein, 412 aa, unidentified
MSHGHVMWVSREAAFRSTDDWKDTTMPSAISPPKAVLGIDVGKSSHWACLVTREGEVALNRRVRNSEGDLDGLFSQVACDTIVVVDQCRNIGLLAISRARLAGLGVAYLPGLAAHQAARLFAGDAKTDERDALVIAKTALGIPDALLPVPEPDEALEAARSLAAQRSHMVTCATRDKNRLRSILLESCPAFEALADLGDRHWLNMLEKLGGPWGCIDAGKPAFGAVTKGANRARMDAAWNAAMASTRPSKRRVDAENPQVRMLARRIREALEEADGIDREIAALLAGDGTYECLVTIPGIGPRTASELVIGINIEDFPDHDHLASYCGIAPRNRRSGTSISSVSASRQGNRRLKNLLIFSCNSLVRSENRFGEYYRACRGRGMCHGEALKAVARKRLKVIYAIMRDKVPYSA

SEQ ID NO: 318588 - protein, 352 aa, unidentified
MREYIALDVHKYYSLLEREAIDDRQYRQIRVNHKRGAIRSSLNRIEPGTAVAVEATGNWYWIVEEIEQAGGMPQLVHPRKAKLMMGLINKTDKLDVHGLNRLQRNGTLPTVWIPPGPLRDLRELTRTRMVLVGIRTRLKNRILSTLSKYALGLDEEASDPFGVKARRRMRELIKRLPEQTQRVTEELLGLLEEVEQQTAQEESRLGALLKVTPEMELIKTMPGVGLILAAVIALEIGDIGRFASAERLASYSGTVPRIKASGDKVRYGQLRSDVNRYLKWAFMEAANIICIQRRREPQRHVSQLYERIAGRKGHPKAIGAVARHLAEACFYVLSRRESYRDPSLRLRQSIGT

SEQ ID NO: 318589 - protein, 351 aa, unidentified
MMLIGVDYHPSFQTIAFFLEETGECGEQELNHSDGQAEKFYRDLKQRGISVRVGMEATGYSRWFERLLAELGFELWIGDPAEIKAKRVKKQKFDREDARLLLRLLRENNFPQIWVPGPENRDLRQLLWHRHRLVQMRTRIMNQLHALAMNEGYRCKKKLFSEAGRAQLEKLALAPWASRRRRELLELLDRLNPTIEELSTAVEREVRKRPEAMRLMTHPGVGPLTALAYVLIIGTPTRFQRGKQIGTYVGMIPCEESSARKQRLGHISKQGNSLLRFLLVEAAQAAARKQPDWRRRYIHLAMRRSKSIAKVAMGRRLAVRLYWMWRNGCEYSPSLEFGSYAGQLGIGNGVK

SEQ ID NO: 318590 - protein, 368 aa, unidentified
MKMNAIKTAPAASAIALKNEKSAKAKRILIGTDVHLRGYQAARKIDNGVIGVVENFRSEEALLLHVEKQCERAEQVVVVYEAGPLGYTLYRKLTARGALCYVCAPDSSEQKRKRRKNNKIDARNLTSKLFNYLNGDEGALQLARVPTEAQEQLRLASREHDQMVEERKRLGAKGNALLLSQGFGSWSNWWRPKAWAQLSSLVPQWLLERLKIWVDVLKMLDEKICLAKVALARACSGPRPKGVGALSQIQLQSEVLDWSLYPNRRKIACLAGMVPSEWSTGDTERRGSITKVGVPAIRRIIVEMVWRMVLFQPQYKPVQKWQKVLQGTNPALKKKAVVAIGRQLIVDLWRLQTGRVTAQELNLLMVGA

SEQ ID NO: 318591 - protein, 364 aa, unidentified
MQCVITNTELSSHEGTRCQFNGGTGAIKLGIDVHQDFYVVVEQVDGSNPKPPQRFAKAAFLHWATKLKNGKGEVYAVYEACGFGFSLQRQLSSLGVQCHVVCPQKLDEQNRRVKTDGLDAKALVLKLDRFVQGNRSALALVRVPTEEEEQKRAIHRQREQLVKARMQLEAQGRSLMVNHGLEPVKSWWKGRTFAALQVPEWMKELLGNSQSLLLALQEKIGALTLQLQAAALAQQPRGLGKMTSVIIDREIGDWKRFNNRRQIASYTGLCPGEYSSGNTRLQSCVTKHGNPRLRAALVELAWRLVRFQPNYKPIKKCKRLLGKGALATGAARKKAIVAVARQLAVDLWRIKTGRLRAEELGLIN

SEQ ID NO: 318592 - protein, 347 aa, unidentified
MDQYVGLDVSQDETHICVVDRDGNKIWEGNCSSTPEGIGEAVKRHAPDAVKIGLESGHLSTWHWHGLTDMGLPAICIDAYHAHGVLRLQMNKTDKNDAHGIAQIMRCNWYKEVTIKSFENHESRALFRTRSNLVSMRTDVVNQIRGMLKTFGILIKGIAGVSFESRIQEIIDEGTAIAPPLQIQLEMLRMIKQKIDELDELVLDHAYACQKCRILMSIPGVGPMTAANFVLAVYDADRFKQSKSVGAYFGLTPRRRQSGEMDYNGRISKRGDRVIRHQLYEAANSILTRVKKPSALQAWGLRIAKRSGMKKARIAVARKLAVIMHQMLQTGELFCFNPATGERALYA

SEQ ID NO: 318593 - protein, 441 aa, unidentified
MPRYVGLDLHKELIEACFIDEQGKHLHRCRVAVTRESIEMFAAKWLQPSDQVVMEATTNTWEVAELIRPRVAKVAIANPLKVKVIAEAKTKTDKVDAEVLAQLFRCNFLPEVWIPDQPIRLLREMCAHRAALTADQTRIKNRIQSLLAQRLIPVPLRVLFNGSGRNWLSKLELATQDRARIDSYLRVLDQIESEETSLRKASTQLSYDKEQIRLLMTLPGLGAAGAQALYAALGDWHRFKDGAHAASYLGLTPSTRQSADHCYHGSITKAGNSLARWLLTQAARQVAQHPGPLGVFFRRIEKRKSYNVAVVATARKLVMIGFLMLKNNEPYRYSLPGPTQRKLSAFRIEATGNRRPKSRHRLPMQRRQPGTRVQSIPPLDEVYQSENLPPITKADALPAAERRMLQRMGIADLPETLQVVQTRTYRSRKTAQCSSPEKADK

SEQ ID NO: 318594 - protein, 413 aa, unidentified
MDMVYERCAGLDVHKASVLACVRTPGARRGERRGETQTFETTTQALRALSAWLTGHQVTHVAMESTGVYWRPVWTVLEGTVELLLVNARHVKMVPGRKTDVRDCEWLAQLLECGLLRGSFVPPPAVRDLRDLTRTRKALIRERGHHVNRVAKTLELANIKLGCVVTDLLGKTGRAILEALIAGVTDPDALAALAQGSLKQKRAALREAVVGRMTPHYAFLLQQQLALIDTLAAHIAAFDARIEASMGPFAAAAALVQTMPGVAARAAQAILAETGVDMSRFPTAGQFASWARLCPGTHESAGKRRAAGTGRGPAWLRATFQEVAWAAVRTKTSYYRGLFHRLKARSGANKAIVAVQHAMLVALWHMLRRGLPHQDLGADYVDRRHTARTRRHHVRRLEQLGYKVLLVEEEPAA

SEQ ID NO: 318595 - protein, 335 aa, unidentified
MQSYGIDLAKEKFDVSFFDLTSKKVSNQPSHKVVKNNLKSIGRFLETLPSDAVLVAEHTGVYGDTLLKCCMDSNVKIAFVGGYVIHRYRATPDRAKTDVLDCALLREFGERYPDKLKYKTFPEEALYELRQLARHREMLVEQRKQLITADKSEDCRPVRSLAVKRSMDRIKEMLDTEIAETEKEMLKVINGHDSIHHNYELVKSVDGVGLITAVELLVKTENFTKITTARQYAAYAGTAPYEKSSGKMDKGAHISKIGNRRSKTLLYICAESARLHNKEIKLYYERRTLIDKKPRHYVLNAIANKLLRIIFTLVEKGEYYDANFIRQDPRVVKYN

SEQ ID NO: 318596 - protein, 435 aa, unidentified
MSSLHKLNPHCAGIDIGSEFIFIGIEEAEVASFGTFTDDYLTAIAYLKEHAITAVAMEATGVYWITLFDMLEAAGMTVTLVNGKQVKYVPGRKSDVADCQWLQQLHSFGLLRPCFIPDEVTRQLRTYTRLRTDHLSMASSHIQHMHKALTLMNIKVQNVISQIHGASGMRMMHAIVQGERNPERLADLCERSILNTKRNRVIASLKGNFKAEHLFALKQALCAYKFYQKQITECDKQIEALLNDHTNDLPTPPQITPPKDIRHNPPQIDGLHTKLMKMTGGNDPSRITGLTDKTLLELLGETGTNLQEHWATEKHFASWVALAPAIHQSGKSNRRKRIKKHSRAGQIFREAALSIAASKHAALSAFYKRMKARKGFLHALKATARKIAVLYYRIMTKGLAFVEYGIERYQLKFKEQQLRLLQKRAKTLGMMLVST

SEQ ID NO: 318597 - protein, 363 aa, unidentified
MSDGSSENHKMTAGLDLGDKHSYLCLLETESGETIEEGRLRTTPEALRRRFEAEPERIKIAIEVGTHSPWVSRVLEECGHEVLVANARKIRLIYGSGRKSDKLDAQKLARLARLDPELLYPVEHRGADSQAHLALIHSREALVRSRTQLINHVRGTVKSFGARLPRCSAQSFHKKVTESLPAQLEESLGAVVQTIASLTEKIRDYGRKIEKLAEERYPETQLLRQVSGVGALTALTFVLTLEDPERFGRSRAVGAYLGLVPDNDQSGESNPQRRISGAGDQMLRRLMVSASHHVLGPFAPDSDLKRHGEKIAQRGGKNAKKRAVVAVARKLAVLLHHLWSSGEVYEPLYNAHRSEPRTGEEVA

SEQ ID NO: 318598 - protein, 420 aa, unidentified
MTPDQKAAFARTFPVHVGVDTGKRFHVLVARGPDGLRRKPMKVLVSREGFGRADAELQALFPDIERSRMLIGLEFAGHHGFTFAHFLASRGYPIMNVLPAHTKRTKELEDNSPLKTDAKDAGVICKLVGDGTFVRFPFLETPYAELRVLVSYRHRLAVEATRFKNRLQGLLDLAWPEFVAQFSTLAKHTPIGLLERWPLPQDLLAAHKATVRAYARKISKGKFVAERFERLYASAQETIALPQATTERRMEIQGTLARWRLVRKQMAEAEARISELMGRLPSAQSLLTVPEVSAVCAATILAELGTPHDYAHPRQVLKLAGMNLIEKSSGSSQGRRRQSKRGRPMLRRQLFLLAGRWCQRRGLYRSYYEAILARNGGLKTKAVCAIARKLVPLLLAVLQRGEPFDRARWEVARHQPALTH

SEQ ID NO: 318599 - protein, 358 aa, unidentified
MMYVGVDVHKRVCRAAVVNDEGELVDEFSFRNSEKGIEDFMMKIEAFKDEALVAVESTANLWVRLYDSLEEHGVRVVLSNPSKTRLIAEARVKTDKVDARILAQLLRADMLPLCFVPTKRQRDRRQFIRHRIHLVKMRTEVKNRIHALLDKHGLKCPYPTLFSRKGVRWLHSLKLGFTDDAVLRSLLALLEALDGQIGFMDAKIAAVAVNDERVKLLMTMPGLDYFSASLLVAEICDVNRFSSDKKLVAWAGLAPGIHQSGDKTVHKRITRQGNRLVRWVMVQAAQTARLHDERFREFYERYSRRKGHQKAIIAVAHEMLRIVYFMLKRNEAYRGERCDLSRRKLKRLERFSLSGLQV

SEQ ID NO: 318600 - protein, 453 aa, unidentified
MSRKRKREGKANQAMLPVMRPDAAGIDIGATEIFVAVPADRAVENVRSFPTFTQDLYALADWLAECGVKTVAMESTGVYWIPLFQILEERGLEVCLVNARHVKNVPGRRTDVSDCQWLQFLHSVGLLRASYRPEQEVGAVRSRLRHRESLVQMAATHVHHMQKALDQMNLQLHHVISDITGQTGIAIVEAMLAGERDPRVLARRRQERIHASEEVIAKSLVGDYRPEHLFTLRQSLAAYRSYQKLIDDCDREIRRCLEEMKSAPPPQSPIGDNPTPERPKLSHEGILRLQLKRVFGIDLTKIPGIRVGIAQTLFGEIGADFSKFRSASAFASWMGLCPDNEISGGKVLWVGTRKVNCRAATALRMAAQSLHHSKSALGDFYRRMRAKLGAPKAITAAAHKLARIIFHLIMNRQEFDDSHFAADQLRHQKRQEIKLRAKAKAMGFELIPLQQAA

SEQ ID NO: 318601 - protein, 451 aa, unidentified
MSARKLSQEKRMKLPKHLKHINLHAAGIDVGSRSHFVAVPEGATEEPVREFSSFTDDLHLMADWLIACDITTVAMESTGIYWIPVFEILENHGLDVKLVNARHVKNVPGRKSDVLDCQWLQQLHSYGLLAGAFRPAEQICTLRAYVRQRMNLVRYAASHIQHMQKALAQMNLQLANVVSDITGMTGMRIINAILNGERDPLVLARMRDPRCKNSTETIARSLFGNYRPEHLFSLKQAVDLYAFYQRQIDECDHQILAQLSSFDADDSGSDPKSELPVTIGEALQQMTGVDLTRIDGIDSNSALKIIAEIGTDMSRWKSAKHFASWLGLCPGTKISGGKVLSSKTKPVANRAAMTFRMAAFTLFRSKSALGAYLRRQRSRLGAPKAITATAHKLARLVYAMLKYGTDYVDAGQEYYEERYRTRVVQNLKRKAQEFGFELIEISGLEPKTATT

SEQ ID NO: 318602 - protein, 363 aa, unidentified
MMKQNIIFGIDVSSKSSTVCVVIDRIKQGETFKITNDSFGYQDLLDRLNQYLITPLVVFEATGVYSLSLQAFLEDYHIKYLKLNPLKAKKLMDNNLRHNKTDKVDAYRLALIQFNAPQKLRAPQPKEYHELQNASRYYEELAQALIINKNQLHRNLQSAFPQIESILSTSSGRVYWTIVSLFPHAQYVLNHNENQVFQSLLAISGIGRQRAHYLTTRLYALARQAYPYDNESSITIRAIQRNIANLLSLSAERDNVINYMEKLAMQANARSLNIYESIPGIAKTTAVRLVAELGDLRRFDTSAQIDAFVGIDPGRYQSGEKDSHLGITKHGNHLARKILYRTITQMETVKATQPCHITVSVQN

SEQ ID NO: 318603 - protein, 412 aa, unidentified
MRRVIGIDIHRTFGEVVFWEDGRLRHGGRVDMTRTALEGFGKSLTSADDVIIEATGNCMAVSRVLSPFVRRVVIANPLQVKAIAQAHVKTDKIDAGTLANLYAAGYLPEIWTPDAATECMRRLVARRYQVVRHRTRIKNEVHSILNAHLIPKCPHADLFNGRGREWLKHQPLPEDEQMAVQRHVRELDRLGEDLALLDRQIAEGTMDDPAVKRLLTITGVDLTVATGLMAAIGNIDRFESPQKLVSYFGLNPRVRQSGLGAAHHGRISKIGRSHARAMLVEAAWAAAKAPGPLHAFFVRIRAKRGHQVAAVAVARKLAVLVWHMLTKQADYLWARPSLVAHKLRALELLAGKPQKKGNKPGPAYAYNVKKLRDQEMRVAEQAQKSYERFVETWRPRPPDEKARGRLNPARLE

SEQ ID NO: 318604 - protein, 347 aa, unidentified
MNHYAGLDVSLEETAICVVDSTGQIVKEARAASEPETLIAALREIDLPLERVGLEACSLTAWLHDELHSAGLPAVCIETRHANAAMKTMPNKTDRNDARALAQIMRTGWYRQVHVKSRQCRLWRSLLVARRTVLNEMRSIENVVRAVLRDGGLKLGTPSRAAFAERVRDLVAEDASVKPLVDPLLTILVTMLDQFARLTKQVLDIVRREKVCRRLMSVPGVGPITALAFRATIDRPDRFRRSRDVGAHLGLTPARYQSGETDVSGRISRCGDELARTALYEAAHTLLVRSRKWSSLRAWGMKVAKTRGMARARVAVARKLAVILHRMWSDETEFRFGRNPAAALAAA

SEQ ID NO: 318605 - protein, 348 aa, unidentified
MQISTIGIDLAKNVFQVHGVDASDKPVLKKQFRRGQVIEFFGKLPPCLVGMEACATSHQWARELKKLGHDVRLMPPSYVKAYVKRGKNDAADAAAICEAVRRPSMRYVPIKSTEQQSALMLHRARDLLIRQRTQLINAIRAHLAELGLVAQKGREGLQQLMRTAADADDEALPSDARFACQAIAAQLQAVQMQIAGLDKRMHQAHRANPASKRLETIPGFGVIVSTAVVATMTDPKAFKTGREFAAWIGLVPRQNSTGGKDRLGSISKQGDRYLRRLLVLGALSVVRRARTRPDKYPWVVAMLGRRPAKVVAVALANKMARIAWAILAKGDTYRAPVHTSSGAIAASA

SEQ ID NO: 318606 - protein, 343 aa, unidentified
MDHFAGLDVSVKDTSICIVDETGKIVREVKVASEPEVLLTVLKKGGYQLKRIGLEAGPLSQWLFSALGETGLAVICVETRHMRAVLRAQINKTDRNDARGIAQMMRVGLYRPVHVKTLRSQKLRMLLTHRKLLQSKAIAIENDLRGTLRNFGLKVGIVGSSRFETRIKELVEGLPDLALLVEPMLTVRRVLREQIAILHRRLLAVVRDDEVCRRLMTVPGVGPVVALTYRATIDIPARFPKSKSVGAVFGLTCAKYQSGEIVRSGRISRCGDEMMRTMLYEAAHRMLCLAKWSWLKAWAMQIARRCGMKKAIVALARRLAVIMHRIWVDGTEFRWTREATAAA

SEQ ID NO: 318607 - protein, 353 aa, unidentified
MAVKYVALDLHQASTSISIRDAKGRVIRREVVPTSTARILEVLDSAGGTIHVTFEEGTLSQWIYDQVVSHVAKVIVCDPRHNRLLAAGNKSDRIDADKLSDLLRLGALRPVYHERSEVAALRELVRSYNTLVEDSTRVMLRIKAIFRGRGVDCSGIAVYHPRNRSRFLATLSDRGAQARAEHFYTALDALLEVRARARHQMLEEAKRHPAVRLLRSIPFIGPVRAAEIVAIMVTPERFRTRRQLWPYAGLAVTTRSSADHRFDHGTAIRNGKAINRGLNRNFNRTLKKVFKEAAASAVCSPGPLQVCYERLLARGMRPELARLTIARKIASIVLAIWKKGVLFDPTILNAQNA

SEQ ID NO: 318608 - protein, 360 aa, unidentified
MTEHYAGLDVGVAETAICVIDLQGEVRLEATVATEPEAIARALAPWRATLRRAGHEAGALSPWLQPALKALGVPATCLETRHVRAALSAQRNKTDATDALGLAHLMRTGWYRTAHVKTEAAYRLRLLLIQRRNLKRKFLDLENSIRHSLKSFGVKLAKVGRGAFDRAVRDACADDPLTAELMDCMLIARAALWTQYLKLHALTVRAVAQDDVCRRFMAIPGVGPIAALTFRTAVDDPMRFKRSRDVGAYFGLTSKRWQSGTSIDIQGRISKAGDPDVRRALYEAASAMLTRYKGRSALKTWGETLAKRCHKKAVVAVARKLAVIMHAMWRDGTVYADAATTGAADGGATAKDRKLLGAYA

SEQ ID NO: 318609 - protein, 399 aa, unidentified
MRKVAGIDVHKDFLEVAYRLPSGRIETKQVEYTLEGISRLIRLLRRHGITDVYMESTGDYYLPLYYALKGAGIRPHVMNAYKIRRPEPNKTDKKDAIWLLEIGESELFSDSYVPDEDIQALRFLIRKRMKLVDRISDIKREINSILWRLGLQAAHYAKKLRSKKKRMLLLALLEGRLRPDSISDSDVRHLYDILSRPEFRAYVFVLRSRLADLAHLESQLEEFDREIAALARKFEDAIRILMSVPGISFILAVGILAEIGDISRFPSPAHLASYAGLVPTARNSGGKRRSGRPSKKSNKYLRRYMFLAGMAAVRSNSRVVREFFMRLLGRGKHYKVAVVAVARKLLCVIWYLLRRGEFWCEDGYFKRPRRLPRGRRVRISVREAIAILVRAGYEVRRKV

SEQ ID NO: 318610 - protein, 346 aa, unidentified
MKRTTIGLDLAKRIFQVHAVDPDSGEISRQTLKRSQVLRYFANRAASVVAMEACGSSQYWARELVKLGHEVRLISAQFVRPFVKTNKTDAADAEAIWEAAQRPGMRFVALKSEEQQAVLGLHRLREQRVGMRSALVNQLHGLMAEFGIALSPGWREMLHQAGELLAEECAVPELLRGALREQIEQIRALSEQIKALERQISSWQRRAEDCQRIGEIPGVGLLTATATVATIGDARSFRSGREFAAFLGLVPRQSGTGGKIRLLGISKRGDRYLRTLLIHGARAVLRWQSRPGRELDPWLKNLMSRRARNVVIVALANKMARMIWALLAHGRTYQRGYGGRIAATVA

SEQ ID NO: 318611 - protein, 336 aa, unidentified
MGSYVGIDLHRRRSVVVVLNDDGDRVSWSRIDNTAANLAAEVVAAGEGAEVAMEACWGWYWAADVIAECGARLHLAHPLGIAGYGNRRVKNDVRDATLLADLLRLGRLPEAWVAPREVRELREMVRYRAKLGRLRSGLKQQVHQTLGKEGVIPEHDSIWRGGGQRWLDDLALADAYVDRIESLRDLIELYDREIRQCDARIHRRLKGHPGYEAIQALRGVGPVLAAVFVAEIGDVTRFDNPRRLCSWAGLTPRLRESDTHTHRGHITKQGSRLLRWAAVEAVSGAVRDPQIASVKHRVGDRRGRNIGRVAAARHLLTLVYYGLRDGEIRCLTADVA

SEQ ID NO: 318612 - protein, 345 aa, unidentified
MPIVGGLDIHRKQITFDYLDTVTGQVQRGQISPADREHLRAWLARFAGCGDAAFAVEGCTGWRYVAEELAAAGIAPHLAEPADTAFARGRKRHAKTDKTDSRHLRMLLAEGRLPECWIPPGRILECRALLELYHDLRAEHTAWVQRIHAVLFHHGAPALGSGTLRTRQGAAALQAVAASSLSPAGQLQVATALEVLEALETRMHAVRHQLLAAARHLTGAKVLAARLYGVGPVTALAITCWLAGADRFSSSRQAVRFAGLDVTVWSSDRKGPPGRLSRQGPPVLRWAVYEAGKTHARSSAPDYRYYAQVKDRCNGKRAALSEARKILRQAHHILAELGDDALTAA

SEQ ID NO: 318613 - protein, 332 aa, unidentified
MYLGIDVHKRYAQVAVMDEAGKIVEEVRVENANLDDLAQRYAGAQAVLEATSNYYHIHDTLSEHLDVTVAHPKKINQIADTDKKTDRVDAKELARMLRLNSVPESYVPSEEVREARALVRGRQTLVENRTKYANKVHGLLSDHGITEDVKPLSVEGREFLRELSIPTPWDELLDSYLDLIESLTEEIQKLEETIEERAGSLKETQLLMSIPGVSYFTALTIYAEVGDIRRFDRDKEVVSYVGLNPVIRESGDSRIEGSISKRGSGRVRWLLVQAANTAVHTCNDEYLSRFYDRLASRKNSQKAIVATARKMLVSIYHMLDRGEVYDPPGVSA

SEQ ID NO: 318614 - protein, 400 aa, unidentified
MLLFFEVITMIFVGIDVAKDTHYAAVSDDSGAVLVKPFAFQNNAEGFCLLLKKLSEFDRSKLLIGLESTGIYSENLICFLYESGFRLAVINPIQTATLRKTAIRKTKTDKVDTMLIIKSLMVNSYRLYSQRDADSLKLRTLCRFRQNLKKSKARLKIQLAGYVNLVFPEFGKFFKSGIHIAASYALLKKYSSPKEIAALRTSTLCILLSKASHGRFGKDTAEALKSLALSSVGVKNPYISIQIAQTIAQIELLEQQIKDLNSAIEEAMESINSVLMTVPGIGAVNAACILGEIGDIKRFSKPCKLLAYAGLDPTVRQSGQFSAKSTRMSKRGSALLRFALINSAWQLTLNDTTFKAYYDLKRSQGLNHYGALGHVAHKLTRVIFKLLTSDTPFNPAKLLA

SEQ ID NO: 318615 - protein, 415 aa, unidentified
MAVEGAVAVVGIDWASEEHAVCLMEPGGRVLASFAVKHSAEGFDRLVARLGKLGQAQAVWVAIERPDGRLVDRLLEAGHPVVPVSPNAIKAWRESEVVSGAKSDPGDAEVIAEYLRLRGHRLDRLQPFSDETRALRAVSRARDDLVEQRVAAHNQLEACLDAFWPGAKMIFADVTSEIALAFLERYPTPTAARGLGEKRLAAFLIKHGYSGRRPAAELLTRLRDAPVGLPAGAESEARRDAVLGYVRVIRALNASIKALTRSVVAHLGEHPDNEIFTSLPRSGQVNAAQMLAEWGDCRPAYDSPEAVAALAGLTPVTKKSGKHHAVHFRWAGNKRFRQAMTTFADNSRHASPWAADVYQRAIDRGCDHPHAIRVLARAWTRVIYACWLSHTPYDAAQHKAASSLKKKRPARKCAA

SEQ ID NO: 318616 - protein, 349 aa, unidentified
MSQQCSTAIARMGIDIGKSVFHVVGLDAKGKPVFRNRFTRERLLEFLARASPTIIGMEACPGSNWLARKAMGQGHQVRIVPAQFVKPFVKSNKTDIVDAEAIAEAISRPTMRFTQPKTEAQLDLQALHRVRQRLVSSKTAIVNQARAFLLEYGLTIGVGPAYFVRDMPSILADDGNGLTPAMRKLLQEQWQEYRSIEARLLQLRRQIEAIAGADDVATRLISVPGIAHLTATAITAFAGTGTQFKSGRHFAAWLGLVPGEFSTGGKQHLLGITKRGNPYLRKLLIHGARACVLHLDRTKDHLGLWISQMEAKGIHRNKVIVALANKLARIAWTILTRRGTFYLRQPQAQ

SEQ ID NO: 318617 - protein, 403 aa, unidentified
MNPSAIIGLDTSQAGVCYHLQDRAGNTLATGTAAKTQAGWAQLNQVLASHCLDPRDCLVAIEATGNHHLPWCEAFTAAGAVVLALNPLIAKRTTPVRNAIRDYKSDPIDAEGLARAAERDGAALTRFTYHSDPPGFGLRTLLAARRAVRTALTNIKKHTGALQELLFPSLRALELPDSRAATLWEKAPTPALMIQLGASELARIAGAHARAVRRATAQAFTAPALAQAAVPTLQTLLATQQSLIGQLKNLDRQIAEQCLVAIPEAQLALARTLPGFGAITTPMVLAAIPPDLWTRAQPRKRKAACLQALFGLDPRLRQSGKWTGRTKLSKRGDPGARCALYQIAFCSLTHDPQMRAYYQRLRKVKKKSHKAALIDLTRKHLRRLVAVIESGKEYQPQGASATA

SEQ ID NO: 318618 - protein, 335 aa, unidentified
MQIYGIDLAKEKFDVSFFDLTSKKVSNQPSHKVVTNNLKGIGKFFKGLPSDAVLVAEHTGVYGDTLLKCCMDSNVKIAFVGGYVIHRYRTTPDRAKTDVLDCALLRDFGERYPDKLKYKTFPEEALYELRQLARHREMLVEQRKQLITADRSEDCRPIRSLAVKRSMDRIKEMLDTEIAETEKEMLKVINGHESIHHNYELVKSVDGVGLITAVELLVKTENFTKITTARQYAAYAGTAPYEKSSGKMDKGAHISKIGNRRSKTLLYICAESARLHNKEIKLYYERRTLIDKKPRHYVLNAIANKLLRIIFTLVEKGEYYDANFIRQDPRVVKYN

SEQ ID NO: 318619 - protein, 458 aa, unidentified
MSTRIIGIDLALAAQHKAVVLDQDSNEFVSSVLSFHTDPADLAHVLTVARRGAPASVQLLAVLEATGMAWFAVGAYLASQGVTVYRVNGQQVAELRRVYQRRAKSDRIDARVLARLPLLCPERLHRLPLPVGPQLALQRALREAARLTATIIAIKNRLWATDQFAWPGLSDFIPPYSARALWLRAHWYHPWQVVSAGAETLAHAWTAASPTQPADTSWLAALVQHAQRVVALYHTPTTLDYAQLQAQLQREQQRLLLCQQQRHDLRLHTIRPLYRHLHPQRHLETIRGIGQDSAAVYVAFIGDIRRFPTIPDFRGWSGMLPYSTQSANAQAQGLHITKAGPDLLKAAAFLNANVARQWDPQLAAIYYRQVVEFGKHHNQAVCACATHLLNRIYAILNEARPYQLRDVDGTPLTARQAHDICRERYHVPPTVRQRNNYRIRRMRAEQRTEARYLKRHEK

SEQ ID NO: 318620 - protein, 439 aa, unidentified
MTTSNVRYVGLDVHKRVVEACIVDHRGKVVHRERFALNRRTLNLFTTKILRPTDHVALEATTNCWAVADVLRPHVARVLVSNPMATKAIAQAKVKTDKVDAHVLAQLLRCDFLPEVWQPDEATRRLRELTGRRSALVGQRTAMRNRIHSVLAMRLIEAPLRLFNAAGLDWLAAVELDDQARMLVDSDLRQLAFLQKEIDLLDAELARRGHKSEPVKLLMTLPGVDVATAEAILAAWGDAKRFPDGDHAASYLGLVPSTKQSAFNCYHGPITKRGNAQARWMLIEAAQHLDKHPGPLGHFFRRLAKKKNRNVAVVAGARKLAMIGWLMLTTNEPYRYAIPRSTEAKLARLRVKATGQRRKGGSPKGRKCAAKLPGGSRTIKPLTAVCQIEGLPAPQPLSSGERRTVKRADCEAFIAEIATAHLVPRPPKRRKAQEVATHE

SEQ ID NO: 318621 - protein, 412 aa, unidentified
MQTLVERGCGLDVHQATVVACLLIVLQNGKVQKQVRTFGTTTRALLTLREWLLSEGCTHVAMESTGVYWKPVYAILEGGLEIVVANAQHVKKVPGRKTDVKDAEWIADLLCHGLLRSSFVPPQPIRELRDLTRYRRKLVESQSAERNRLLKLLETANIKLSSVASDVFGVSGRLMLKALAKGEATPQAMAELAKRRLRSKIPQLELALEGKMEEHHRFLLELQLQRLEAVEHDLTVLEQRLQEKLKPYAAQLALLQEIPGVDWTLSAVIIAELGVDMSVFQNVSQLASWAGVCPGNNESAGKRKSSRIPKGNVYLKTALVEAANSAAKAKGTYLRDKFYRLKARRGYKRAAVAIAHKILVSVYHMLSQQVSYNDLGDLYLDKLNKHHLTRNLVHRLERLGYAVTLTLQQKAA

SEQ ID NO: 318622 - protein, 388 aa, unidentified
MYRIIKIGMDVHSTNYTLCAMEPTIGAEDRVFGEIQVAPDYKEILLFIESLKMKLGILDDYSIECGYEAGCLGYTLYHQLTNAGIKCVILAPTTMLSTKGKRIKTDKRDAHLIAQCLCYGGYHPVYIPTKEDDAVKEYIRMRDDHKQMLKSLKQQINAFVLRHGYQYSGTKWTIKHVIWLRTLELDPMYRETLDEYMASHEEQEAKIERYDKRIEEIAAEERYQKNARKLGCFLGISTHTALSLIVETGDFIRFAKGNIYAAYLGLTPGEHSSSTSVNRLGLSKAGNTHLRCLLVEAARSICKGAVGHKSKRLRARQIGQSAEVIAYADKANTRLRSKYYRMIRHGKAKNVAVAAVARELACFIWGMMSGNISTVSGADTSVPAVSQG

SEQ ID NO: 318623 - protein, 397 aa, unidentified
MISVGIDVSKGKSTICILKPGGEVLQPPFEINHTADGLESLVALIKSFDEEVRVVLEDTGHYHLPVVIPLVESGIFVCCVNALRMKKFCSQSLRRAKTDKIDSIKIANFGLTYWSELTPTLPKGEVYQELKLLARQYYQTVSLLIKAKVNLSNLLDQSMPNIQTVLADNKSNCKLTDFVARYYHCSHILEMGEQGFTIDYCAWAKEKGYRLNERKAAQILAIAQNGIPTLPNSVSTQIAVSEAVKLIQSITESRNTILAQMQEFCKSLPEYFIVKDMPCIGDTLAPRIIAEIGDVRRFKNKRSLVAYAGIDAPPYQSGTFNASERHISKRGNSYLRKTAFEIMQSLIQHKPNGDPVYDFIQKKRSEGKSAKEAMVAGINKFLRVYYGMVMELYSNAV

SEQ ID NO: 318624 - protein, 412 aa, unidentified
MDEVVEFCAGLDVHRDTVVATVRFPQGRQRGSETKTFGTDTAELVALGDWLISHRVTRVGLESTGVYWKPVFYLLEDRIEQLWLLNAQHLKNVPGRKTDVVDSAWIAQLVEHGLVRPSFVPSPPIRELRDFTRHRRALSEERTRMVQRLEKVLQDAGIKLTSVASTVLSKSARAMLEAMLAGESDPVVLAELAKGRMRSKIPALTDALRGSFRVCHHGVLVRQILAHVDFLDAQLAEIDEQITTRVATFEPIIERVQTIPGVARKCAIGMIAEIGVDMSVFATPAHLASWAGICPGNNASGGKARSGRTRHGPVALKTVLTEAAQAAARTKNTYLGARYHAIRGRRGTFKAVGAIRHDILIAYWHIVTADVGYQDLGVDWLARRHSREHQIAQLAKQIEKLGAAVEITMPAA

SEQ ID NO: 318625 - protein, 340 aa, unidentified
MNTMTLLGIDIGKHSFHLHGQDAKGHQVLRKKTSRSQLLGTLAQLPACTVVMESCGGAHWLARQVEALGHEVKLIAPQYVKPFVKGNKNDFIDAEAICEAASRPAMRFCSIKTAEQQTLSALHRVRDSLIGHRTVATNQIHGFLLEFGISLPIGATALNRVPALLDDPQHPVPLRLKSVLMRLHRQIQQLNDEIKDIESDLKQQLKEDDAGNRLQSIPGIGPITASAVLADVGDASNYRSGRDFAASLGLVPRQYSTGGKTVLLGISKRGDKHIRQLLVQGARSVIQHIDKREDALGPWVRELLTRRHSNVVACALANKLARIVWAVLAKGGQYDPHPNA

SEQ ID NO: 318626 - protein, 344 aa, unidentified
MTIVEDRPVITGGVDTHSEVHVAAALDPLGGLLGTAEFPATAAGYGSLLGWLGEFGDVALVGVEGTGSYGAGLARYLARRGVRVVEVDRADRQDRHRKGKSDPLDAVSAARAAQSGRASGEPKGRDGAVEAIRALMVAKRSARNERTQAINQARALILTGPDELRARFARLRAAALAEVVAALRPRPGGAAEYSVRVALRELGRRVEFPGAQIGRLDELIVPLVTARAPGLLSLYGVGPDTAALLLIAAGDHPGRLRSEAAWAHLCAVAPIPASPGKTRRHRLNRGGNREANHALWRIVITRMSAHPATRAYVERRTAEGLSKKDIIRCLKRYVAREVYPYLRG

SEQ ID NO: 318627 - protein, 379 aa, unidentified
MEISSSTLPAVAAERATMFVALELSKSSWLVALHSPVADKVSMHRFVGGDVAGLLALIARKQTQAEARLGRTIRVLSCYEAGYDGFWLHRLLCARGIDNRILDAASILVDRRSRRAKTDRLDAAGLLRTLMALDRGESRVCGVVRVPSVAQEDARRRSRERTRLVVERGQHSNRIKGLLMTLGVRDFEPTRRDWQERLGGLRTADGRELPACLKAEITRECRRLHQVIVMIAEVEAEQAAALDAEEGRAAQLIRLRGIGLVSATVLADEVFYRDFRNRREVAGYLGLASSPWASGRVQRDQGITKSGNPRARRTAIELAWLWLRHQPGSLLTQWFRQRVGTTRGRMRRIMLVALARKLIVALWRYLSDGLVPDGAELKA

SEQ ID NO: 318628 - protein, 339 aa, unidentified
MSKPNQPAQATVFCGIDVSAATLNVVVQQEDHRFEERVFDNSASGHKALIAWLHKRKAMARVSLEATGIYSLDLALALDSAEGIEVAVLNPKIIHRFAQTLRRSKTDSADAQALAEYSRRMPFTPWCAPSVNGLQLRTISRHVQGLVVEHTRQNNRLHAAEKSVATPRCVVNDLKRSMASLQRRIVRLRREARELVRGDETIQKRFELLIRIPGIAEISALQLLGELSPLSPDMSVRQWVAHSGLDPSHHVSGTSVNKPSRMSRAGNRHLRRALYMPALAAVRCDPHLQAFYEVLLSRHKAKLQAIIAVARKLLHAIYGIFRSQTHYDGSKLFPHLEVA

SEQ ID NO: 318629 - protein, 452 aa, unidentified
MDEKKISMEIVNPYAAGIDIGSRTHWVAVGQGEEHVREFGVFNDDLKAIATWLREHEVKTVAMESTGTYWQALYAVLIAEGFQVILCNGKFIKNIKGRKSDVQDCQWIQKLHSIGLLTGSFLPDKATEQLRTYCRHRANLLDTAASTSKKMQKYLRLLNLRLDVVVNDICGLTGLAIIDAICKGESKPEKLAALRHGNCRKSEDEIARALQTNGRKDYLFALQQELQMYNHLQTQIALCDVEIERMLNEQVNNDDNKRQHHIDRKVYKRVTKNTPKNIDLNLLSYQYFEGVDLLAIEGFSYNTVLTLMSEVGLDGIKKFPTAKQFASWLRLSPNNKISGGKVLSNKIPKGSNRLKIALRNAANAIGNLKDSTPLRDFFHRINFRKGRVSAISATARKLAVIIWNMVVNNKPYLNPENYLFVDQKRKLAVLNRIKKQIDKFALTNQELGLAIP

SEQ ID NO: 318630 - protein, 416 aa, unidentified
MDDEVYYERCAGIDVHKKLLVVCLRIGRKTEIREFGTLTHEIREIVAWLKENGCQMAAMESTGSYWKPLYNIFEQEGLPAMICNAYHIKNVPGRKTDVGDAQWIARCLSQGLLNPSFVPEREQRELRDMTRFRKSQIEERSRNINRLQKFLEGANIKVGSWLSDIEGKSATALLELVIGKPDFTVDDVADRMYGNMKSTAEELYLSLEGSITPSQREFFALVMSVIREQTAQIEKTDAMIRRNLSENYKAAVDALDAIPGIGRVSAEQIIAETGVDMGRFRNQHSLSKWAGVCPGNNESAGKRKSGKTPPGNKTLKSTLTQCAKTAKNNKNSFFSAQYSRLVSHRGKNRATMAVAHSLLIAIYFVLNGSVYEDLGADYYMQFNREKKINSHVKQLSKLGVSIPDDILRAAIERPPD

SEQ ID NO: 318631 - protein, 411 aa, unidentified
MDVFCGIDWAEDHHDIALVDRDGKLLARRRIGDDAAGLARLLELLAEHGDSAGDLIPVAIETPRGLLVACLRAAGRKIYPINPMAVARYRDRHSVAGKKSDHGDSVVLANVLRTDIGMHRPLPDDSELAQAIAVLARAQQDAVWDRTTAHNKLRSHLREYFPGFLAAFADARGGIARPEARAVLAAAPTPAAAAALTLTQLRALLKKAGRSRGIDTEATRLRDAFRVPQMRQPRLVEDAMGRQAIALLRQLDAACASATDLERAVTESFNQHPDAGIITSFPGLGPLTGARVLAEIGDDRSRFQDARGLKAYAGAAPITRASGKTKSVTHRRVKNNRLNAAGYTWAFSALTASPGARAHYDRRKDAGDRHAAAQRNLFGRLLGCLHRCLATSQHYDEATAFPASTKLPAAA

SEQ ID NO: 318632 - protein, 391 aa, unidentified
MPEDAPRPMQAAIRTDLGAIFVSLELSRRTWLITSLSPGSGEKMSKHSVPAGDTAGLLRRFAQLKEKARARTGRDFPIIVIQEAGLDGFWIHRVLQSEGIESHVVDAASILISRRRRRAKTDRIDGETLVRTLMAYKRGEPRVCSMARAPTPQEEDRRRVCRERRTLVGERVRHVNRIKGLLFAQGVFGYEPLRKGRRERLEDLRTGDGRPLPVHLKAQIIRELDRLEVLLEQLKSVEAERDALLKPATEEAASPAAMLARLKGIGPETAVVLWSEGLFRQFDNRRQVAAYAGLAPTPWQSGSIDHEQGVSKAGNPRLRTTMVELAWLWLQNQPASALSLWFHERVRRLGGRMRKTTIVALARKLLVALWRYTTAGVIIEGAVMKAAPTRF

SEQ ID NO: 318633 - protein, 315 aa, unidentified
MTPAESKEINIGIDVSKASFDVAIHEQSEIWSESNTAGGCAALVARLIKLKPTRIVIEATGGYETLIAASLSAAELPVIVVNPRQVRDFAKATGQLAKTDRLDARVLAHFAAAIAPPLRPTKSDEAQHLEALLARRRQIVEMLVAEKNRLAAHRDRAVVKDLKTHIAWLERRLKQSDDELQRVLKASPVWRERDDLLRSTPGVGSVLSLTLLAQLPELGTLNRKQIAKLVGVAPFNWDSGQWRGSRHIWGGRAAVRAPLFMATLSAIRCNPIISSFYRRLIAAHKAPKVAIIACMRKLLTILNVMVKTQTSWRTA

SEQ ID NO: 318634 - protein, 345 aa, unidentified
MTEAYDGRQVVGMDLHRRRSVLVRMTEDGRKLETVRIENSPAALRAVIARAGNNPRVVVEATYGWYWAVDVLEAAGAEVHLAHPLGVKAFSYRRVKNDERDCADLADLLRLGRLPEAWIAPEPVRALREITRYRHKLVGQRTSCKDQVHAVLAKAGIPVTRSDIFGRGGGIWLDGLPLPQPYAGKIASLRALISVLDGEIGRLGEQAAAMLAGDRGYAAIRQLPGIGPVLGAVIAAEIGDITRFRNPGQLASWAGLTPRHYESDTRVIRGRVSKQGSRMLRWALVEAIQRQPAGTRPRQVKDAIIARRGPDVRGIAKTAAARVMLTQVFYGMRDGHIRRATSQAA

SEQ ID NO: 318635 - protein, 404 aa, unidentified
MFYFGIDWSARFHVLCIRNEAGARISQLRFEPTPAGFAHIEAERRKLQAPAAECPVAIETAANLVVDYLLERDYPVYIIPPQATAAYRNRQRSSGAHDDDSDAALLAGILRTDRASHRQWQPNSALTQQILAQVRLSESLRRSIQRQANQLRAVLSRTYPTALTLFSDLTTQITLQFLCAYPTAAEAQALSQAAFEQFCREHDYRRTDQLPSSYAQLVAAQPAAAPAVAQAYRSQVRSLAEVLLVQVRCLAQASRELAPLLAAHPDAFIFTSLPGAGALLAPALLAKFGDERSRFPRAGDVQALAGTCPVTKRSGQRTIIQFRRGCDREFRRISQQFARASLDKSGWAAAYWAEIRPDCASDSHAYRILANRWLAIIWKLWQSRQAYDEAYHLQQRALRRKPRA

SEQ ID NO: 318636 - protein, 389 aa, unidentified
MIYVGIDVAKDKHDCCILGSEADNLYPVFTIPNNKTGFDELYEKIFSVTDDRTEIKVGLEATGHYSLNLLGSLIDKGLPTCVINPLHTNLYRKGLSLRKTKTDKVDAGSIAMMLMTDKTLKPYSDTSYHSEELKSLTRYRFDKVQERAKLKSSVARLINILFPELEKLVPNLHMASVYALLSEFPGASYIAESHLTHLRNVLETASKGRYGRDMAVTIRDAAKDSIGSVMPAKSMELKHTIHLIEVMTDEIDEIEASIKSIMDTCDSPIMTIPGISYRMGAMILAEIGDFNRFSNADQILAFAGLSPSTYQSGQLDSSYSHMEKRGSRYLRYALFNATKYVCHWDESFGAYLSKKISEGKHYNVAVGHAAKKLIRTIYRMELTGEAYRK

SEQ ID NO: 318637 - protein, 466 aa, unidentified
MEVLYARCAGVDVHKKTVVVCRIIPGPDGQPLQEIRTFTTMTRDLLALSDWLAEGGVTHVAMESTGVYWKPVYNLLEGTFTLLLVNAAHIKQVPGRKSDVLDCAWIADLLRHGLLKGSFVPERGLRELRELTRYRTALVRERAAEQNRVHKTLEGANIKLSAVATDLMGVSARQMLAALCTGRSDTEAIAQLAKGRLREKLPLLEQALEGDFQPHQRFLVAQQLAHIDYLEGLIDPVSEEVAQRLEPLAPPPSGPAPAPGSDALDEAAAFAAAELEARREALHLRLALAGLQEQEAVEGPLSFAAAVALLVTITGISQRTAEVIVSEIGTDMSRFPSAGHLCSWAGLVPGLNVSAGKRHGNKTRRGSPWLRSALVEAAHGASRSKGTYLSAQYQRLAARRGRKKAIVAVAHTILATAYYLLKNRTTYEELGDAYYDARDKEAIQRRLVRRLEEIGYTVTVELAQAA

SEQ ID NO: 318638 - protein, 349 aa, unidentified
MFAGVDTHKDTLAVAVIDHAGRVVRQLELPNQDSGYVRLLALLSSHSVVRVGIEGSGNFGWPAAIYLLERDLNVVEVPPLMTSRERLSRPGQGKTDPVDAVAIARITAREDALPPVRPMTGHAADLRVLTEYRDQLVNERTATANRVHTDLGWLRPGYQHQLPHLTNTAHLHAALELLSGEDSVRAAVTRNRLARMLTLTEQLAELRIQIDALVKASGSTLPEVYGVGPVVAATIIGHVFDVRRYPTRHHFAAANGTAPIPASSGRTVRHRLNRGGNRQLNRALYTIAITQIRADTEGRAYYQRKRAEGKTSREALRCLKRRLSDLIYRTLRADLANAAQPTPTRSIAA

SEQ ID NO: 318639 - protein, 410 aa, unidentified
MELLHSHCAGLDVHKDSVVACARHMVDGKVATEVKSFQTTTHELMELSDWLSSQGVTHIAMEATGVYWKPVWHILSDGEFELVLANAAHVKNLPGRKTDVNDATWLADLMAHGLIRASFVPDDPTQQMRDLLRTRKQFVRERSSHTLRIQKTLEDANIKLDSVITDIVGLSGRRMIEALIAGQTDPEALAALAHRRIHATSAELEAALRGRVTAHHRFMLQLHLDHLDAVNAAIARIDKEVDCNVEPFCVAVEMLTTIPGVSSLAAEVIVSEIGIDMSRFKTEGHLISWAGLCPKNDESAGKRRSNRMKQGAPWLKTMLIQCAWAASRTKGSYLQAQYLRIRSRRGPKKAIGAVAASMLTATYHMLKDGTLYQDLGAKHFDNREKGKQAQRLVNRLQSLGFAVQITSIAA

SEQ ID NO: 318640 - protein, 342 aa, unidentified
MDTIGLDLHKRESQLCVLTEEGEIVERRIVTSRERFTAVLGGRAPARILLEASTESEWVARHLESLGHEVIVADPNFAPMYATRRRGVKTDRRDARTLAEAGRLGAYRHAHRASDAQRHVRAELAVRDALIRTRTRYVALTKALVRRDGLRLPSGGPAHTEAKLAALPLPPALATELAPLRALWEPVNTQIAAADARLAHVAAADPVVAQLMTAPSIGPVTAVAFVATLDCVTRFKGAHQVEAYLGLTPREYSSGEQQRRGRISKTGNARMRYLLVEAAWRVLRTTDLAAAPLRAWAAAIAQRRGRSIAAVALARRLAGILYAMWRDGTDYRAPRPPAVAVG

SEQ ID NO: 318641 - protein, 373 aa, unidentified
MKKVRFLGLDVHADTIAVAVAEPDGEVRSLGIIPNREESVRKLVKKLGPAEQLQACYEAGPTGYVLYWQLTALGVKCEVVAPSLVPVKAGDRVKTDRRDATKLARSYRAGDLTAVWVPNQEHEALRDLVRARETAKQDQLRARHRLSKFLLRHGRRVPLGIKVWTQKYQDWVKEQVHFEQPAQEYTLLDYLHEVEHMGDRIRRLDQAIAEAVKLAPPRMQEVMQSLQALRGIAQISAVTIVAELGKISRFDRARQLMGYSGAVSSEHSSGKRMQRGQITKTGNAHLRRIAMEAAWAYRHRPAIGPRLRKRQEGLSEEVKEIAWKAQHRLHKRYRNLSAAGKEKQKVVTAIGRELLGFIWAIGVQVERNSKQVA

SEQ ID NO: 318642 - protein, 344 aa, unidentified
MTYFAGLDVSLRSTNICVVDNQGELIAEGKTDADVAGIIAFLDALDVEITEVGLEAGTLTQYLTYGLQFAGYEVICMEARQVKSALSAMRNKTDKHDARGIAQLLRSGWYSRVHVKSMESHRVRALLTSRRAVLAKCIDLEQEIRGIFKVYGIKLPPRLGHGAFDPKVRPLIEADEVLSLSLLPVLDARLVLYRTFRELDNRTRKLAHSDPICQRFMTAPGVGFITALTFKAGVDDPARFKHSRTVAAHFGLTPRRFQSGELDLEGHISRCGDASVRSTLYTAANAMLTRSSKWSSLKAWGMKLAKTRGHRRAVIAVARKLAVILHRMWIDDTQFRWGTEAARS

SEQ ID NO: 318643 - protein, 381 aa, unidentified
MKERGRCSGRLLTPTASMCQSGIFADPLTGKEPQMQRTTIGLDIAKRVFQAHAVDPASGAVTRTKLQRAEVLPYVAQLQPSLIVMEACGAAQHWAREFAKLGHEVKLIAPQFVRPFVKTNKNDVADAQAIWTAAQQPEMRTVAVKTEEQQAVLALHAIRERLKKARTAAINQLHGLMGEFGIELPRGWRTMLPQAAAALDPAESAVPALLQPQLRRQLEEVRSLTAQMTEVERQIASWRSRQEQCERIAAIPGVGLLTATAAVATMGDAKTFRSGRQFAAYLGLVPRQRGTGGRVQLLGISKRGDTYLRTLLIHGARSVLVNSQAAKDPNTWLGHLTQRRPRNVAAVALANKRARQIWAILAHDRTYEPNYGLPQALATPA

SEQ ID NO: 318644 - protein, 372 aa, unidentified
MNYNTVYVGMDVHKESFSLCAYTIEAEKASHYQRTEADYKKVLNYLEFLRTIYGDDANFICGYEAGCLGYTLYHQLTANNVKCIILAPTTMLEQRSKKRIKTDKRDAEIIAKCLAQHNYSPVHIPTAKDEETKKFLRMRDDHKLALKKVKQQILAFCLRHNYRYDGNSHWTAAHLKWLKALTPEALYKEILDEYLLTYQTLSDKLERLDKRIEELSTQDEYKEAVKKLCCFIGVKTHTALSVLVEVGDFKRFASAQHFASYIGLVPGEDSSGDDQNRLGITKAGNRHVRLLLTEASQCYARGQVGFKSKELKARQSGNTPAVIAYADKANERLRRRYYKMVLNKCKKHNVAKTAIARELACFMWGMMTDNIA

SEQ ID NO: 318645 - protein, 342 aa, unidentified
MKVIGIDSHKATLAGCAVDELGTPVDERTLGNDRAGHVALADWARSLGVDRIGIEGSGRYGAAAARRLAAAGFDVRDVPPHLSYRERLRTHRPGKSDPTDALAIARVAAREQTLPPVRLADRSEDLGLLVTARDELVAEATQLRNRIHADLVVLLPGYGERVPNLVARRHRRGVALELATLSGVRAELTRSRLGRLEETDAATKLLERRLAALLVGHPLLALPGVRVLLAARILAETGDVRRFRSADAFAMFSGTAPIPASSGQTERMRLNRGGDRQLNRALHAMALIQGRYHDRAKAYLARKRAEGKTQREAIRCLARKLARVVFEVLRRSTLATADAFAA

SEQ ID NO: 318646 - protein, 403 aa, unidentified
MNNVAGIDVSKGKSMVSVLRPFGEVVAKPFSIGHTGSELKELADYLKSLDGETRVVMEHTGRYYEPVARFLHEEGVFVSAVNPKLIKDYGNNTLRKVKTDKADARKIARYGLDNWAELRQHTPMDTIRMQLKTLNRQQSLYTKTKTMMKNNLIALLDQTYPGVNALFDSPVREDGSQKWVDFATTFWHVDCVRNMSLTAFAERYRKWCKRHGYNFSQSKAVEVHAGAQDLIVMLPKDALTKTMVRQAIDALNAVSASLERLKAEMRTLAAQLPEYPVVMAMHGAGDSLGPQLMAELGDVTRFTHRNAITAFAGVDPGADQSGTHEAKSTRVSKSGPPELRRALFLVMDCLLKTQPQDDPVYRFMDKKRAEGKPYLVYMTAGANKFLRIYYGRVKEYLASLEEN

SEQ ID NO: 318647 - protein, 422 aa, unidentified
MAATRNSGVSRVVIGVDPHKRIDAVVVLDEAETVLAREMIEHTSSGFRTLMGLARRFPRRTWAVEGCNGVGKNLAQRLVAGGETVLDVSTRKSSLVRALATNSGRKTDDTDAYSIALVGLRTEDLPVVVRDERAEVLRLLSGRRRELVGLRTQAVCRLHRELVILIPGGASRRLTATRARVLLNGIRPVDEVARLRKALARDQLADLVAIDKRVAAINAEIRAAVAASRSTLTHLVGIGPVNAAMVIGEVADVARFATRHHFAAYNGTAPAQWGSGGDTHDRVNLGGNRRLNHALHIAAITQARYPGPGRDFYLRKLAEAKTKKEAMRALKRRISDSVYRQLLADAGARDTVGTGPGGQMGAALSSSAADRSPVISTSDRPQPGPVSADDTPAPAHPRKRSPARSRRPPNAPTRRPRQAQSA

SEQ ID NO: 318648 - protein, 441 aa, unidentified
MRAIGLDVHKHFAEVAVLEPGQGIVSRERVPVTPVSLRRFATALRPDDQVVLEASFNTWAVAELLSKHAGRVVVSNPMKTRAIASAKVKTDQVDAGILAQLLAADFIPPVWVPDRATRQLRRMVSEHRGLVVQRGQWRNRIHAILNRNLVECPCTDAFGRAGLRWLAQVRLPAAERREVDRLLRLHSLVERELDGLEGELAQARLRDGGLRHLVSVPGIGLITGVALLAVIGDVRRFTRPNRLVGYLGLDPRVRQSGDRPAYTGHISRQGQAHARGLLLEAAHSAIRGPGPLRAFYERVRSRRGAQIALVAVARKLAVLAWHLLTNDTDYQWVRPSLKAQKWRHVELRAGLPKGVRRGIWTRTNRADEDAIPYRAEAAYRSLVATRRQQADAAAPMRKRLEGQRPDARRRSHPHPPLFSRGSTASAASIVPHQGPQKGVTA

SEQ ID NO: 318649 - protein, 346 aa, unidentified
MDHYAGIDVSLECSSVCVVDANGKITREAKVASEPEALIGWCRSLGFELARIGLEAGPLSQWLYAAMKKVGLAVELLETRHVSDAFKAMPVKSDRNDARNIAQLMRLGWFRPVHCKSMSAQETRAMLTARKLLQAKLQDLENSLRGILRGFGLKVGKTTKRSFAARIGELVAGHPALEAIAAATLAVHAVLLREFNGLEKRVRAMSVLDAKARLLMSTPAVGPVISLTYASAIDDPSRFTSSKRAGPLFGLTPKKHQSGETDYSGCISKNGDAAVREALYEAAHIILTKPIKGCAQLKSWAMRIARRAGMNKAKVALARKLAVIMLRMLKDNVPFNPATKATAMAA

SEQ ID NO: 318650 - protein, 363 aa, unidentified
MEEDKRRFVGIDLGKREYTMAIIGKTGKMSIQQGKTSVQGRQALYKKLEKSDKVALEAGNLAFIMAGEIQEQVGSEVRVLNSAKLPFIWDAPTKTDKEDAMKLAHLIEERRDEKLPIVPLPSEKEMLRRKLLANYSREMKGRTRQINLLHALFVHQGHTTIVKKNLATAEKRQEVIEILRGQEREEAEWLLKHLELYEKRIKELKGKIHNEAKSDEDMKRLQSIAGVGPIVAYAYVSHVGDGSRFSNGAQVSNYLGFVPRLDYSGTIQRQGHISKRGNGYLRGLLVQAAWSMVRSRHGGSLRDRFIYRTEFQGKSKKKTIVSIGRRMAELMYSLLRNKTIYEVRPWKGPENIPAILAKQSMCA

SEQ ID NO: 318651 - protein, 322 aa, unidentified
MAMLSFCGIDVSKDRLDVMMLPQQQCWSVHNDPRGWAELVERLRSFSISAIGLEASGGYERGVMRALLAAGMSVRQINPFKLRQFAKASGVLAKNDRLDARMIASFVAIMPTRPAQRRAPAIERLSEMEAIRRQLSNQKVAAENASRLLEDAMLQRLCHRRIARLAADIDLLDKHLLEVVAGDPALANRYRLLISMPGVGPTLACTLLALLPELGRLSRKQIAALVGVAPYDFDSGKLKGMRCIWGGRAPVRQVLYMAAMSASNWNPVLKAFHNRLKAAGKLPKVVIVAVMRKMITMLNAMVRDDVVWADLLRGRHTVPTAR

SEQ ID NO: 318652 - protein, 345 aa, unidentified
MEQVSRIGMDTSKHVFQLHGVNASEEVVLRRKLRRKEMVAFFEKLAPTVIAIEACGASHHWARLLRSFGHEVKLIAPQLVKPYVKRGKNDAADAEALCEAMSRPTMRFVPVKTAEQQAALMLMGLRDQLVASRTQLSNAIRGYAMEFGLTAAQGKAHLEPLLERIQADDSLPVLARELFAIQAEGYRRLQAQIDEVDAKLAAWQKSDECSQRLVKIPGVGPIGAALLKMKTPAPELFKSGRQYAAWIGLTPKDHSTAGKARPGVITRAGDETLRSVLVVGATAAIQQAQRRGKASPWLAALLKRKPPKLVAVALANKMARIAWKLMVTGQSYAAKSAPAALANAA

SEQ ID NO: 318653 - protein, 399 aa, unidentified
MTALRRVVIGADTHLDTNHLAVITDAGKPLADAEFPTSPAGYDDAVRWARSFGTIAIAGVEGTSSYGAALTQVLQAAKIEVAEVSRPDRAARRRQGKSDPLDAYTAARAALAGDRLAVPKDARTSALRALLSARRSAVKAHTAATNQIHALLVTAPAELRERYRRHSITALVKALARCRPATHSDPTTVAVLTAAKALAQRTEFLDRQKQDLTAQLDVLTQQINPALRAAYGVGPDTAAQLLVTAGTNPHRLRNEASLAALCGTAPVPASSGKITRHRLSRGGDRAANNALYRIALVRMSAHPQTRDYVQRQDANGRTKKEILRLLKRAIAREVFRLLTRPHPVDDYSDLRPARQAKTITLKTVATHFGVPLITVSRLERGLQRNDTLANNYRQWLTAA

SEQ ID NO: 318654 - protein, 407 aa, unidentified
MLFVGDDWAEDHHDVHLMDEAGTQIARRRLPEGLGGIRAFHELVADHVDEPEEVVIGIETDRGLWVQALIAAGYQLYAINPLAVARYRDRHNVAGAKSDAGDAKVLADLVRTDRHNHRQIAGDSHDAGAIKVLARGHQNLIWSRNRQTNALRSALREYYPAALVAFDDLAHNDCLAVLAKAPTPAAGARLSIGQISAALKRGGRQRNIDRRASEIQAALRAEQLSAPAPIVDAFAATTTAAVGIIAELNRQIAKLEQSLTDRFEQHPDADVYRSLPGLGVILGARVLGEFGDDPDRYANPKSRKNYAGTSPRTIASGKKRAVLARHIRNRRLYDAIDQWAFCALSNSAGCRAFYDQHRAAGDLHHQALRALGNRLVGILHGCLHHRALYDEHTAWAHRQTARDELAA

SEQ ID NO: 318655 - protein, 310 aa, unidentified
MDEVVVGIDVSKDRLDIHVVPSGEAFAVGRDGKGLDALTERLKTMNVHLIALEATGGYETVAAAALAGAGLPVAVVNPAQVRQFARALGKRAKTDPIDAAVIARFAATARPEPRVAPSEEAVILAELIARRRQLIEMAASERQRKHHALNARVKKSLDRHLKLLESELAELDKEIGTTVRASPVWREKEDLLASVPGIADKTARVLIAELPELGTLTRRQIASLVGLAPFTRQSGAWKGKAMIAGGRAKVRSALFICALVASRHNDVLSAFYRRLLEAGKPKMVALTALARKLLTILNAIIRDKRPWQNA

SEQ ID NO: 318656 - protein, 347 aa, unidentified
MRFASPTAAFYCGIDLHARTMYLVVLDHAGNVRLKRNLPARPDAFLAAIAPFRPDLVVASECVHCWYWLADRCAAEGIPFLLGDAWGMKAVPGNKTKSDAHDADTIARLLRGGNLPLAYAYPKDQRSLRDRLRTRLRFVRLRARTYGHVHTALRQLNRPPVSSDVKYKSKRGSIADTIPDEHVRRSVAADLELLDPLDATIRHLERDLEVAAQQHFAQELAVLQSIPGVGLIISLTVLLEIDTIDRFDSRQQFCSYARLIAPPQESAGKKVGVGCRKRGNAWLKWAFSAAAVLCAQKDERLGAYLQRLTARYGTGKALGILAHKLGRAMYHMLHTKKVFDLDKFLRH

SEQ ID NO: 318657 - protein, 351 aa, unidentified
MDIMYERCCGLDIHKKIIVACLRCGNKRTNKSFGSTSAELRKLATWLVENNCQIVAMESTGSYWKPVYNILELSDTDMEVIVVNARHMRNVPGRKTDVKDAEWISELLQHGLLRASFIPDRKQRELRELSRYRRSIIQDRASEINRLQKMLEGGNIKLTSVVSEVTGYSSRKLLDYLLHNDEPMSEEVISELVHTSLVNKAKELESALDGLLSPVQKELLLIVLDQIDDLAKFIARMDNLIRKHMPEYEEAIERLDEIPGIARRSAETILIETGLDMERFPTAKHFSRWAGLAPGNNESAGKRGSGRTTKGNSTLKSTLVQSAKTASRKKAHSSVQDFKSCQCGEELNVLL

SEQ ID NO: 318658 - protein, 387 aa, unidentified
MPQPNDLSRSLVALDQDSTIIAVVEMSQSSWLVAGMLPGIERQPRKKLEPSAERLLGLLHRWRDEAVKAGRKITRIALAFEAGRDGFWLARWLRAHAVEAHVIHPSSVAVSREHRRAKTDRLDTELLKRGFLGWLRGERGHCTMARIPTIAEEDAKRPNRERECLVRERTRIVNRMKGTLARLGIRNFKPTLRKAAERVTTLHTPEGSALPPNVSAELQRNMARLGFVVSQIKEIEAARQKRLEQEPETEPHAMVRHLARVVGLGVETADILVNEVLSRPMRDRKAVARYAGLTGSPDESGAKRREQGLAKAGNARVRRGMIQLAWRFLRFQKESALALWYRARTADSRVGTRKTMIVALARKLLIALWRFVTTGETLEGVVLRPAG

SEQ ID NO: 318659 - protein, 387 aa, unidentified
MPEPNDLSRSLVALDQDSTIIAVVEMSQSSWLVGGVVPGIERQPRKKLEPSPERLLALLHRWRGEAVRAGKKITRIALAFEAGRDGFWLARWLAARGVEAHVIHPSSVAVSREHRRAKTDRLDTELLKRGFLGWLRGERGHCTMARVPTITEEDAKRPNRERECLVGERTRIANRMKATLARLGIRNFKPTLRKAAERLATLHTPEGTPLPPNVSAELQRDMARLGFVMSQIRDIEDARRKRLEQQPETGPHAMVRLLNRVVGVGVETADMLVHEVLSRPMRDRKAVARYAGLTGSPDESGAQRREQGLARAGNARVRRGMIQLAWRFLLFQKESALAQWYRARTADSRLGTRKTMIVALARKLLIALWRFVTTGETLEGVILRPAS

SEQ ID NO: 318660 - protein, 325 aa, unidentified
MKVSKLRPCGYSRALQTGEVLPFLNDAQGYRHVLDRLQQLGGPANVLIGMEATGHYWYALHDFLTRQGYRVEVLNPIQTAQQAAMGIRKTKTDRLDAHHVAVLLKNGGQRPAPVPGELAMTCRQLTRLRYSLVRQGSRIKQILWSRLQPVWPEYETLFANPFSPTGRKLLAAAPTPTDVLALGHQELADLIRRASRGKFADAKAQQVLQAALTTIGMQRGLPGVRIGIQTLLTTLDALRPVRRQLEADILALAVQIPPYVLTLPGANAIRAVSLYGETDPIRSFPSPDQLVAFAGFDMVVFQTGQYQAPRRRISKRGSPFLRRTL

SEQ ID NO: 318661 - protein, 312 aa, unidentified
MHGHFVGIDVAKDTLEVHERPSGEGVTVANEEGGLRELVARLTARAPALIVLEATGGYEVVVAATLTSAGLPVAVVNPRQIRDFARATGQLAKTDALDAAVIARFAEAVRPPVRPVATGTAQALGELVARRRQLVDMLGAERNRQAQVRDRQVQRQLGAHVKWLTKALADLDRDLQDTIRSSPVWRETEELLRSVPAIGPVTAHTLIADVPELGHLGRHQIAALMGVAPLNRDSGTFRGRRMIGGGRAAVRRVLYMAALVAVRHNPRIAAFYARLTAAGRPKKVALVAAMRKLLIILNAIVRDQRPWQPETA

SEQ ID NO: 318662 - protein, 340 aa, unidentified
MNVKTIGMDLAKNVIQIHGADGKGNTVLRKQIKRAQVLPFFANLVPCQVGMEACGSAHFWARKLVAMGHTVQLIPPQYVKPFVKRNKNDAADAEAICEAVVRPNMPGVPIKTVEQQAILSVHRARQGFVKARTAQANQIRGLLAEYGLVIPVGIRHIPSCVALIIDDDENDLPMSFRHLLQTLVEHFKALDEQVGKLELEIKYWHRDCAASTQLATVPGVGPITASALVASIGDAKNFKNGRQMAAWMGLVPRQHSTGGKTVLQGISKRGDSYLRTLLIHGARAVIRVSEHKIGADPWLKALVARRNKNIAAVALANKNVRVIWSMLTHERDYVPNYAHA

SEQ ID NO: 318663 - protein, 395 aa, unidentified
MKRESNTRETELRYIGLDVHKHYITVGGMNAQQEIVLRPRDVEMERFKTWAESNLRKTDEVVLEATTNTWDVYDTIARLVKRVVVAHPAEVKQIANSRVKTDNQDVVRLVRLLIADILPSVWVPPVEVRELRATISYRWRLVKMSTAIQNRMHSLLHRHNIQAPQGKIDTGENREWWEALKLSELETMRLKQEIKTLRLVRENIVEVEKELGRLSNRERWGDQAVYLMQIPGVGIIVTMTILSAIGDIRRFESPKKLVGYAGLGAGIHDSGQKHREKGITKVGRKELRWALVEASWQAIVAIAHKLLVTIWYLLNRKEVYKQSSEEDLAYKMLTWAWHMDKPALNGMTHQQFAKYGLLRLGKGEDVTRIVRGGLPRRLASKEEVLALKPELRIPQ

SEQ ID NO: 318664 - protein, 353 aa, unidentified
MNKVMAGIDLHSNNLVIGMMDLDGKRVARQKLPCELKAVAKFLAPFKKRLEKVAVESTYNWYWLVDGLRALGYPVVLANPAAMEQYNGIKHADDSHDAFFLAELLRLNILPTGYIYDPELRPVRDLLRRRLTLVHHRTALMLSFKSLYIRTIGQSMSLAELKELEIPQAQALYEHPANQLIAGLQIQHIEYLTQSIEKIEKAVHGCARELPCYQKLTTLPGVGKILGMTITMEVGDIKRFAGPGHLASYCRVVEARRISNNKKKGENNSKCGNKYLAWAFVEAANFARRYDAQCRQWFDRKETKTSNVIATKALACKLAKAAWYLMAEEMDYDPKRMFGQSQKTNEPLNFGQC

SEQ ID NO: 318665 - protein, 373 aa, unidentified
MNYTTVYVGMDVHKETFTLCCYTNEKEKAEYPQKVNGHYSKVLNYINAMRKHYGDDAVFVCGYEAGCLGFTLYHQLTEHNVDCVILAPTTMPQPQGKKKVKTDKRDAMLIARCLAHKDYSPVHIPTDIDEQVKEYIRMRDDHKLALKKIKQQIIAFCLRHNYRYTEGKSNWTEKHLQWLRSLEPEGVYAEILEEYLLTYEYLTSKLEMLESRIKELAELDEYKASVQKLRCFIGIDTITALSLVVEVGDFHRFATAGHFMSYIGLTPGEDSSGQDQNRLGITKAGNRHLRKLLSESSQCFSRGKVGAKSVALKKRQQGNPPAVIEYADKANIRLRKRFYHLVLNKGKHRNIAIIAVSRELAGFIWGMMTEQFA

SEQ ID NO: 318666 - protein, 348 aa, unidentified
MDHIIRIGMDTSKHVFQLHGVNAAEEPVLRRKLRRNDMVVFFERLAPTIIAIEAAGASHHWARLLRSFGHEVKLIAPQLVKPYVKRGKNDAADAEALCEAMSRPTMRFVPVKTAERQAALMLLGLRDRLVRNRTQLANAIRGYAAEFGLAAAKGIAHLAPLLARIQSDESLPGLARELFAAHAKEYAQLQAQIDEVEGKLMAWHKTNPGSQRLAQIPGIGPIGAAMLIMKTPAPEMFRSGRQFAAWIGLTPKDHSTAGKVRLGVITRAGDEGLRSALVVGATAVIRHLRNGKGRSMLSAWVEQLLKRKPPKLAAVALANKLARIAWKLMVTGETYAAKPRPVASAGIA

SEQ ID NO: 318667 - protein, 347 aa, unidentified
MRFYTKEHRYYCGIDLHARSMYVCILDQKGDVLVHENMDAEPEPFLRTIAPYREDIVVCVECMFTWYWLADLCSQESIPFVLGHALYMKAIHGGKTKNDRIDSRKIAGLLRSGMIPQAYVYPAEMRATRDLLRRRNYLMRRRADLLAHIQNTNSQYNLPEFGKKLSHKVNREGIVERFEEKDVQRSIELDLELIDHYNRLLTNLERYITTTAQHHNPQALYLLKTIYGVGKILALVILYEIHDINRFPTVQDFVSYSRLVKCARESAGKRHQSSGKKIGNAHLKWAFSEAAVLFLRNNPEGMAYKKRLEKKHGKTKALTILAHKLGRATYYMLKRERAFDMNKFLTA

SEQ ID NO: 318668 - protein, 656 aa, unidentified
MSRSCQNRRRAFARTATTQDNGAGAKATAVPAEVAAPETTATNTTAPGDAPAVTNIAVGIDTSRYGHHATFLGADLQPAAADLKFVESGQGYQQLQERLAALGKKHGPVHFHFRLDVAGRYADNLLAFLHDLPEPRTISCGDPQRNKNYRAAIFGHKKSDAVESTAAARYAMTEKPKPMLVAAPAVHELCQIASRLEAQTRQCTRTINQLHNLLASTFPELALHVKDLSTGWVLTLLDRYPTAAKLAAAHGASLEKIPYLPHEQIALLQEQARTSIAALTGPVAEALVRDLVGQLKDAHVRHKTLEKLLVVAYRQLPEPNHLDSIIGFGEVTAAILTAKMVTTGRFVEPAKLTGYFGIYPVEAASGIDRDGQSRAPKRMVMSRRGNDLVRRYLYMAALSAAQHNPAVRPLYQRVRAKHPDKAGIAIGHAMRKLLHLALAVWRTGKPFDPTHYHWDKPAHLQPKADLPAEKGTAAPTPAAHTQENAQAAGHKNPVTTPVRSVVTAACDAVSVTEAAAPGNHPVAAAPAVAAGADLSPQASPAPSTAATAPWINFAHLKTQLPLQRVLEHLGLFPALRGRSSQRKGSCPVHAPSGKARTFSVNLDKNLFQCFHPPCGCKGDVIDLWAALHKLSLRDAAVNLMQTFNLEPAPRTEKRHG

SEQ ID NO: 318669 - protein, 363 aa, unidentified
MIVIGADTHKATHTCAAVTAATGQLAGELTVVARKPGFAELLAWGRGLDAERIWAIEDCRHVSGALERFLVAAGERVVRVPPKLMGQSRRGERSAGKSDPIDALAVARAALREGPETLPAAHLDEAALELKLLLDHREDIVKARSADQQRLRWHLHDLWPELELPAGCLDRPTWLDRLARKLARAEQSARVRVARELVVEIRRRARRAKELEGEIAVLVSRRAPELLELKGCGTLIAAKLVAETAGAARLASDAKFSRLAGVAPVPASSGKRIRHRLDRGGNRQLNCALHRIAVCQGRVHPPAREFLERKQAEGKSRREALRCLKRHLARRVWRLLIESEREISPTSVDSQRGTPASQFAVAT

SEQ ID NO: 318670 - protein, 377 aa, unidentified
MTRATRCAEYTPCLYLAFELGSDAWKLGFTTELGATPRVRTMPARDLERLTREIADAKQWFGVQAATPVRSCYEAGRDGFWLHRYLTSSGIDNVVVDSSSIEVNRRLRRAKSDGLDARKLLGMLLRYHAGERAVWSVVRVPTVEAEDRRQLHRELRTLKQERTRVANRMNGLLANQGLWLPPGTDVGAAAKTVRLWDGSPVPAALRARLEREWEPAQFLRTRILELERERQRVIAHGRGEAIDKVRQLLRLRAVGPTGAWVYVNEFFGWRRFRNRKEVGAAAGLTPTPYQSGDGSREQGISKAGSRHIRAVAIETAWCWLRYQPQSRLSCWYQARFGRGGIRARKVGIVALARKLLIELWRFLECGVVPEGARLKTA

SEQ ID NO: 318671 - protein, 408 aa, unidentified
MQVLYPRCAGLDVHKDSVVARVRCVSEPQADETRTFATTTGALIELQEWLSAHAVTHVAMEATGVYWKPVWHLLEGHFELVLANAQHIRNVPGRKTDVSDAAWSADLLAHGLIRSSFVPPAPIQELRDLTRTRKQLVREISQHSSRIQKILEDANLKLGSVLSDVLGKSGRAILTALIAGQSDPEKLADLAQGTARKKRGELLKALHGRIRDHHRRLLKVHLELVAGLEHALADIDAAVGKNLAPIQQSARLLTTMPGVSGVTAHVVVAEIGVDMTRFSQRLHLLSWATFCPRNDESAGKRRSTRVRKGATWLKTALVTAAWAAVRVKGSYLHAQFLRLKARRGAKKAILAVAASMLTAAYHILKNGVEYCDLGAHHFTRRDRSKALQRLVRRLNDLGCQVQLTQHPA

SEQ ID NO: 318672 - protein, 354 aa, unidentified
MPKTASTQIAVIGIDIGKNSFHVAGHDKRGSMVLRQKWSRGQIEARLANLTPCLVGMEACVGAHHLARKLAALGHDTRLMPAKYVRPYARGQKNDFNDAEAIAEAVQRPTMKFVAAKTADQLDLQALHRVRERLVSQRTGIINQIRAFMLERGIAVRQGIRFLRAELPIILASRSDVLSPRMLRVIEELAGDWRRLDERIENLSREIEMIARQDAGCDRLMSVPGIGPIISSAVVAAIGSGDVFSKGRDFAAWLGLVPKQISTGDRTILGKISKRGNRYLRVLFVQAAWVVLIKPMSWERHGLKSWIEAAKKRLHHNVLAIALANKLARIAWAVLAKGRGFEATRTVNGSTQSA

SEQ ID NO: 318673 - protein, 321 aa, unidentified
MTYVGIDVSKVTFVVAYSSVKTNKTRTFKNTVNGVHEFVQTISASEHNCVLEATGNYSALLVYLLSEAGITISLENPLKIKNFARVMLTVTKTDEIDARLIALYGEKMQPAPYKLRSDAILVLKQKRTVLRQLKKQLVATRNLKGSMEVLPFFDPKCKKTIEKTITFLEKQIKEMEEELASLAQGEYKKQMDLLTSIKGIGVTLAAALIVATGRFSYFDNAKQLTRYLGLSPTYQQSGTSVNVKGHINRNGDSSLRSQLYVAAFSSLRYNTECKACFDRLRSNGKPGKVVVIAVANKLVRQAFAVVTQGKPYVDGFKSEKP

SEQ ID NO: 318674 - protein, 424 aa, unidentified
MKVTYQTCCGVDVHKSFLVATIVKTTGGIEPSYQKKRFSTFNNSILEFKQWLLDNDCHDICMESTGKYWVPVFNLLEDEINVVIANPKWVKAVKGNKDDAKDSKWIGDLFRLGLVKGSYIPCKKVRILREYTRYRYKLVSCRSSEKNRYQNALTVCNVALDSVVSDIFGKSSTSIIDYLLEQSGTSINHEEIASKLLRSLKSKEDAVIESIEGYQMTDAQKYRMRLIRAHMDYITAEINDVDKMIENMISSNPDFENAVQFLCTIPGVKRDSAITIISEIGTDMSQFGGSKRLCCWAGLTPGSNESAGKKKSVRITRAGVYLKPALVQCAHAAVKSDKSPYYKKKYESLVKRRGKKRAIIAIARMILTAIYQMLFTGEQWNPSDLYKIDMPIALVEKQKAKAIKQAKKLLQREGLLPPDEPLAS

SEQ ID NO: 318675 - protein, 309 aa, unidentified
MHQSRTLYIGLDVHQESIAVAYVAKEDHAEVISLGNIGTRQCDIDQRIRKMQSKSKHLVFVYEAGPCGYWLYRYLTKKGHVCWVVAPSLIPQKPGDRVKTNRRDAITLARLMRSGDLTPVYVPQVEDAAMRDLCRAREDAIGDLKTAKFRLKAFLLRHDIRSTGQASWNPAHLRWLSAVVCPTPAQQIVFQAYVRALTDHTERLARLDQALTEHVQTWRLAPVVDALQALRGVQFTVAVTTVAALGDLTRFDNPRQLMHYLGFTPSEYSTGERRQQGGITKTGNSHARRALMEGAWASRYPAKVSRHLQ

SEQ ID NO: 318676 - protein, 430 aa, unidentified
MKSNTQNAKIEAITEKTLVLGIDVGSETHYARAFDYRGIEYSKKPFKFSNTEAGFVTFKEWILDLKERHEKDKVVPGMEPTGHYWFNLGKFLQDNEMKPVLVNPHHVKKSKELDDNNPTKNDRKDPKVIAGLVREGRYMIPYLPDGVYADLRTASNIRFQLQAELTRIQNRISRWFNIYFPEYKTVYGKPDAKSGILILKTAPLPEDILTLGIDGVNQIWRDAKLRAVGKARAKTLIEAAEHSVGSKEGVVSARMEIRMLLEDYESRNTRLQEVMVLIEELVRKIPMAEKLLEIKGVGIRTVSGFLAEVGDISRFNNPKELQKLAGLALVENSSGKHKGETTISRRGRKRLRYLLFEVAMSLVSKNQEFRELHNYYTTRRLNPLKKMQSLMAIAAKLIRVFYAMLTKGVDYDPKKMVSDIKRPAVYLQAA

SEQ ID NO: 318677 - protein, 329 aa, unidentified
MYDHCIAVDWAQSNMAIARMTKESSAIKVVNVPSSVKELQIYLDRLRGKKILTFEETSTSQWLYVELKDYVDEIVVCDPYRNHLLSDGPKTDELDAAKLVKLLKEGFLKPVFHSADEFIYLRKLVSGYEDMIKAGVRLKNQRSALFRAQGKDKREKNLTQKVESFVLEGVDRGIEAYEKERTRYDAEMEKQRKKHLMIRNLDGIHGIGMIGAVKIAARVVDARRFEDKGKWLSYCGLVRQEKLSGGRSYGWKNPRYCRTMKGVFKTAALGVIGGENNFNNYYTFLLEKKHFSEHNARHAVARKIATIAWAIMKSGKPFDPAKMDQGVRK

SEQ ID NO: 318678 - protein, 330 aa, unidentified
MEATVSKFEHYIGLDWAQSNMAAAVLTVGGTKPRILEGRPDIEKLKRFIKSFEGTKRLVIEETTSTQWLFGALVGSVDELVVCDPYKNKLMTYGPKTDRIDSVKLAELAMRQDINIVYHSTSNIMLLRRIISGYEDVVRSIVRAKNQQSAIFRGECKRYKSKDKLQWGEDVFVSSLKDKEIEFMELQKSEYEKAFRAYAKKGVVRNLMSIPGIGLICAVKILGCVVDARRFSSRSKFYGYCGLAKHVMISGGKCYGKKKTRYSRVMKCVFKTAAMAAISGENGLSKYYTTLLSEGYPEHTARNVIARRIAVITLGIMKSGVKYQEKQIAA

SEQ ID NO: 318679 - protein, 407 aa, unidentified
MIFVGVDWAEAHHDVHVEDAEGRRLAGGRLPEGVEGIARFHELVGAHAEEPGEVVMGIETARGLFGGALVASGYLVYAVNPMSTSRYRDRHSSSGAKSDPGDAKVLADMVRTDRHNHRQVAGDSEAVEAVKVLARAHQSMIWSRGRQTNALRSTLREFYPAALLAFDDLSSADATEVLKIAPTPALGRTLSSSKIATALRRGGRQRNVDRRTAEIQEALRSPQLEGSTVVATAMGASVSALVAVITTMNAQIATLAAELEAGFEQHPAAKVVRSLPGVGTILGARVLGEFGDDPNRYADAKSRKNYAGTSPITRASGTKRVVLARYARNMRLADAIYMWAFASLTASPGARGFYDAHRAAGDTHHAALRALGNRLVGILHGCLANGSFYDEHTAWGHRADIKSAEAA

SEQ ID NO: 318680 - protein, 362 aa, unidentified
MSPMFQSFVGVDLHQCTVTLTSVDRLGEKIAQLKISTKSVGKIEDWLSALPRPSHLAVEACPFVEWFIDRFGPCVERIDIADATELANRRGKRRKTDRNDSLDIAQRLARGECPLGFIAPPELMQLRKLGRHWRCLSRLLSRTKHSMKSMLHAANLRGPKFDGAAAQRWLLANRDLLGPVQQDAFADFIDILNLVERQRERLRRQMIFAARGGKFAPTITRLMTVPGIAEIWGTLIAAEIGPFERFPNADTLEFWAGLTADMKESAGRTQSGHITKAGSATLRWALGKAAVTLCQSDARQEAIRQRLVSRIGKPKANVAMARRLLRILYAMIRDGKAYQGGPKRDRTAAANRARLGRKKQVA

SEQ ID NO: 318681 - protein, 432 aa, unidentified
MKFNQSNKQNQRISRISETTLVIGTDIAKHNHVARAFNYRGIEFGKRCLFQNDENGLLNLLAWAESIQQEHGLTDVLLGVEPTGHYWFPLFHFLKQRGVEVVLVNPHHVRKSKELDDNSPTKNDIKDAKVVAKLVIDGRYTQPQLPEGVYADLRVLMNQRDRLCGDLNRVKGRIHNWLDRFFPEYRQVFKDWEGKASLITLQHFPLPQDVVGAGETTVMATWKKNGVQRAVGPKRAGLLYRKAQKSIGLTEGATAAKHELAMYLEQYAMLCRQIEQLMEHVAALVEQIPGASHMMSIPCIGLVTVAGFLAEVGDLSGYDHSQQIVRHAGLSLRENSSGLHKGETTISKRGRCRLRALLYRAALTMVAKNPEFRALHLYFTTRRDNPLKKKQSMIALCIKLIRVLFELGRKQKNYDSSKVFGPHREAQLQAAA

SEQ ID NO: 318682 - protein, 311 aa, unidentified
MTDHNIGVDISKSHLDAFRLEDGAAQRFDNSAMGFRALTKWLGKAPVARIVFEPTGPYHKAFEAALGETFPLVKVNPLQARRFAEAHGTRAKTDAVDARMLARMGVAFDLVPQEPYSKEILVLRDLHVARTGLIKDRTRLRNRAQTQDIALLKRQTKARLAQVERHVVELDTEIAALIAAGQTTARNRDILCSMPGIGTVTAAAMLTLMPQIGTLERKQVASLAGLAPITRQSGQWQGKAFIGGGRKPLRDALYMPALVAMRFNPALKAKYEGLRAAGKPAKVAIVAVMRKLIETANALVKADRTWTQKTA

SEQ ID NO: 318683 - protein, 354 aa, unidentified
MSQNSNTSIAVVGIDIGKNSFHVVGLDQRGAIVLRQKWSRGQVEARFANMPSCLIGMEACVGAHHLSRRLKALGHDARLMPARYVRPYSKGQKNDFRDAEAIGEAVQRPTMKFVATKTADQLDLQALHRVRERLVSQRTGIINQIRAFLLERGIAVRQGLRFLRAELPRILAAPPEVLSPRMVRVIEGLAGDWRRLDQRVESLSGEIEAVARQDAGCERLMSVPGIGPIISSAMVAAIGTGDVFSKGRDFAAWLGLVPKQISTGDRTILGKISKRGNRYLRVLFVQAAWVVLIKPKSWERHGLKPWIEAAKKRLHRNVLAIALANKLARIAWSVLAHGRNFEMRTINGATAQSA

SEQ ID NO: 318684 - protein, 421 aa, unidentified
MKYALVRVLPEVPPGGVCAGIDWAAAAHAVCVVDMAGRVKDRFAAAHDKAGIAGLAARLRAAGAAEVAIERGDGVLVDMLLAAGLTVVVITSRQVRNLRSRYVASGAKDDGFDAYVLADTLRTDRARLRPLVPDGPATAALREAVRFRKELVRDRVRAANRLRAHLETAFPAAAGLFCALDSPLSLAFLTAFPSRQAASGLDEQAIAAWLGTLPHRGGAARPAVLAARLAAAAPGTGHDAAQAALTIEMAGAAGDAAARIRTLEAHIAAQLRTHPDQHVFTSLPRAGTVRAARLLAEIGDCRSRYPDPQALAGAAGVSPVTRRSGTWISHHFRWDVNAHLRDAICDFAADSRRASPWAAQIYAAARTRGKDHPHAVRILACAWTPVIWRCWQDGTAYDPGKHHALQNILARQTADHASQEQ

SEQ ID NO: 318685 - protein, 413 aa, unidentified
MIEVLYRICAALDVHAKTVVACLNQKGKKEIRTFSTMTDDLLALTDWLVTAGCEQVAMESTGVYWKPVFNLMEGVLPVILVNAQHVKAVPGRKTDVRDCEWLCDLLRHGLLKASFIPPFEIRELRELTRYRQTLVKEQATIANRIQRLLEGGNIKLSQVASDILGVSSRLMLKQLAQGETDSRKLASLARGRLKEKEAELGRALTGRLTTAQRFVLAELVARVEELDAALKRVNQQVEQEVTSGANPFWGKSIELLETIPGVGERVAQTIISEIGVEMNCFPSEKHLSSWAGMCPGNHESAGKRKSGKTRKGNKHLRVALVQAAWAATHTKETYLAAQYWRLVKYKGKHRALVAVGHSILVIVYHVLARQLSYQELGTDYFDKQNLEKQRRLFIRKLEALGVKITVEELPLAA

SEQ ID NO: 318686 - protein, 391 aa, unidentified
MYIVGIDIAKRKHEAAVIDGEGTVIIKPFSFTNNCSGYNRLLAMLTKAKLPLDEVSFAMEATGHYWLALFTRLQKEGFRVQVINPVQTNSIRSFYIRQAKTDPRDALLIAEVIRFGHFSESTLHPENIYELRELCRGRHAIVSMQADVKRKVVALLDQVFPEYETAFTNLFGDTSMAILQTCPTPKELSEMPFEELCHLIEVSSHKRFRMAKAQELQALARNSFGFAMAGDVFSTMIRLYAKHLDFLKQQVREMDCKIAEIMETLDTPITTITGIGPTLGAYILSEIGDISRFSSAAKLAAYAGIDPTMRQSGEYNGVRNRMSKRGSPYLRHAIWLAASSAVLHDPALKLYFQKKRDEGKPYMASVGHACRKMVSIIYAVMRDNKAYCLCA

SEQ ID NO: 318687 - protein, 420 aa, unidentified
MLPPDGQEGEVVVKVYRTFTENLRQLRFWLQALKVTEVAMESTGVFWRPVWNVLEGHFRLLLVNPAQVKALAGRKSDRRDARRIAEFLRDQRLDASFVPPPEIRYLRELLRDRVSLVEERTRVGNQIRALLETANIKLGSVASDVLGQTGRRILTALSEGQWDAERLSWKAVGKLRKKERELKKALTGYFTKEHEFRLGQLLKRLRFLEKHLEELDTEIRRCMGPYEKQVELLMTIPGVDQLVAWTLVAELGVDMAVFPDAAHCASWAGMCPGEKESAGKKQSVRLKKGNRYLRRALVQAGWAASRKKGSYLQGQFRRWMARRGPQKAVVGVGHQILTVAYAILRDGVAYRELGANYYDRRHGEKTKLRLMQRLMELGYRVEVTAVETVEPQADQVMPAVDGAVVVQAARKRGRPRKEIS

SEQ ID NO: 318688 - protein, 383 aa, unidentified
MKAVCGLDVHKDSIFLCILHSDGELFEQVFGVLTFQLEEMRKLLQKHHVFEVCMESTSIYWIPIWRVLSPHFTLRLVNPYFIKQLPGHKSDVKDAQWIAECTMKELVRGSFVPPEIIQQLRQYDRRIFDLNAEIVRKVSKVDGVLQRCNIRLSNYVSNIECKSYRDVVRRLSEGVTNPNELMKLVHGRIVNRHSAETILASLTGVVSQAEIDVLRQLHEEIDIAESHRNECQQRMLEICEKHFPEELERLQKIPGIKERAATSLIAEIGTDMSKFETANHLASWSGLRPRNDESNKKIKSRKITHGNVYLRNTIIQCAWAASRQKDSFFSRFSYHQTIVRRKNKMKVIVAVARKLLIAVWHVLHDKTDYVDFKPDREESANNG

SEQ ID NO: 318689 - protein, 348 aa, unidentified
MSKHAVPAGEVSGLLRRFAELRRKAAARTGRDFPIIVIQEAGLDGFWIHRVLQSEGIESHVADAASILTSRRRRRAKTDRIDGETLVRTLMAYKRGEPRVCSMARAPTPEEEDRRRVCRERRTLVGERVRHVNRIKGLLSAQGVFGYEPLRKGRHERLEELRTGDGRPLPVHLKAQIIRELDRLEVLLEQLKTVEAERDTLLKLASDEVASPAPMLARLKGIGPETAAVLWSEGLFRQFDNRRQVAAYAGLAPTPWKSGSIDHEQGVSKAGNPRLRTTMVELAWLWLQNQPTSALSLWFHERVRRLGGRMRKTIIVALARKLLIALWRYTTAGVVIEGAVMKAASATI

SEQ ID NO: 318690 - protein, 342 aa, unidentified
METAVTIGLDLGKSVFQVHGVSAAGAVVVQRRLTRSRLLQFFAKQPACLVGMEACAAAHHWGRELSKLGHRVRLMPPSYVKPYVKRQKNDAADAEAICEAVTRPTMRFVEIKTCEQQGTLVLHRVRLMLMRQRVQLSNAIRGHMAEYGLVAPVGRNGLQRLIAILGNPDDERVPAVARTSLAPLVCQFGLVNGQVLENDRRVKASARSTELGRRLMEVPGVGPVLASAMVATVPDPTVFKSGRNLAAWIGLVPRQNSSGGKEKLGGITKQGDRYLRQLLVAGALAVIRYAQRHGTKRPWLVHLLARRTPKIAAVALANKMARMIWAMMMTGERYREPRVAAA

SEQ ID NO: 318691 - protein, 372 aa, unidentified
MASIIYVGMDVHTTNFTFCCYTADSDRGFAVAQTEPDYRQVIKYMERVQKQRGEECKFVCGYEAGCLGYSLYHQLTRCGVDCVILAPSTMHQEKGKRIKTDRRDAENIARCLAFSLYSPVYVPTTEDDAVKEYIHMRDDIKADLKRVKQQIIAFTTRHGFAFDGKSYWTQKHLKWLETLVFEHPLYKETLQEYLILYYMLDEKVAVYDTRIEEMSHLEHYEENVQKLCCFRGVAAHTALSLLVEVGDFQRFRSAKHFAAYLGLVPGEHSSSDKQIRTSITKAGNTHLRRLLVEAAQSYNRGAIGKKSAALKARQGGNPAEVIAYADKANERMQRKYYRIAFKSRHNIAKTAIARELACFVWGMMTGNISNAA

SEQ ID NO: 318692 - protein, 413 aa, unidentified
METLVARCAGLDVHKDSVTACVRVPDGHGGRQVETRSFTTTTAGLVLLAQWLASFGVTRVGMESTGCYWKPVWQRLEDQVECWLLNAAHLHNVPGRKTDVADAAWIAQLVEHGLVRPSFVPPRPIRELRELTRYRKTQIQERTRETQRLDKVLQDAGIKLSSVATDVLGVSGRAMLEALVAGTHDPQVLAALAKGRLRTKLPALREALAGRFRTDHHGLLVAQILAHIDYLDKAIALLSERIQQVIAPYAEQVALLDTIPGVDRRAAEVIVAEIGPDMGQFPTAAHLASWAGVCPGNNESAGKHRSGRTRKGSKWLGGCLSEVAKAASRTKGTYLNAQYHRLRGRRGPGKATMAVAHSVLVIAYHLLDQGVAYQELGDDYFQQRHAVEHYQRQLVRQLERLGHKVTLEPTEAA

SEQ ID NO: 318693 - protein, 342 aa, unidentified
MKHYVGLDVSQRETAVCVVDEDGRLVFEGRAKSNPGALAEMLRKRAPFAERIGFETGAMSSWLWHELKRIDLPVVCIDARHAKAALSVRMNKSDENDARGLAELVRIGWYKEVKVKSAESQQVRSLLVTRSRLVEIRRDLENQIRAMLKEHGLLFERAIGSMFRRKVSELVDSGHALWDVIQPLLSIHEHVCKEQEKLDKQIAVLARADETTRRLMTVPGIGVVTALTFRHTIDDPTRFSSATNVGAYLGLTPRRKQSGESDINGKTSRWGDRLLRTYLFEAASVLLYRTKKWCSLKAWGLRLAKRAGTKKAQVAVARKLAVILHCIWVDGTIFEWSANKEA

SEQ ID NO: 318694 - protein, 400 aa, unidentified
MLSIGIDVSKGKSTVCGMKPGGEIVYTPFEVQHTREGMSELVSLLRSSGEEVRVVLESTGSYHCPVVAALLENGIFVSVVNSLRMKRFCSQSIRKVKTDRIDAMQIALYGLAFWQELQPTRLPEDTYRELQLLARQYYQMTSILIKAKVDFNALCDQALPGMQELMSDHAGRHKLSDFVLRYRHTTHILEMGETRFRKDYCKWAEKKGYRNCERMAVLIFATAQNGIPVLPNAPSTQIVITEAIRVLHTVEASRDAILTQMQALAKTLPEYSLVREMPCIGDTLAPRLIAEIGDVRRFHSKRALIAYAGIDAPPYQSGKFCANNRHISKRGNRYLRKTGYEVMQSYVMHKPANDPIFTFIEKKRGEGKSGKLAMVAGLNKFLRVYYGKVTELYRSLPTIE

SEQ ID NO: 318695 - protein, 389 aa, unidentified
MQLRNDLSRSLAPFEQDRTLVVVLELSLSAWLVAGLVPGVVRQPVKKLGADPHELLKLVHRWRGEASRAGRAIERICVAFEAGRDGFWLARWLSAHDMEAYVIHAASVAVSREHRRAKTDRLDTELLKRAFLGWLRGEPGHCGMVAVPTVEEEDARRPSREREKLVGDRTRIVNRMKATLVRFGIRCFKPTLRKAAEHLEAVRTAEGMPLPENTRAELRRDMARLRVVLDQIKEIEEDRLRKLAAASDPEPGAAAMVRLIARIVGIGVETADMLVREVLSRNLRDRQAVARYAGLTGSPDESGSRRREKGLARAGNARVRRGMIQLAWRFLQFQEESRLAKWYRERTADRRGSTRKTMIVALARKLLIDLWRLVTTGQVPEGVLLRQAA

SEQ ID NO: 318696 - protein, 430 aa, unidentified
MERVIQNGPAGAVSVGLDVGKEEIYAVMRWSDGTFERPWRALNPSEVPVLVEMLGKIGASRALTAAMESTGTYGDALRARLGQAGMALHRVSGKAASDYAEVLDGVPSQHDGKDAAVIAELAAYGKSRPWPYHEPNEEDAELAYWVDWLDLQQRIQMMWICRLEALLARHWPEATRVVELTSMTLLRGLAHYGGPATLAADPEAVRRLKGWGHWASTEKAERVLAAAVRTEGARQGMRDRLRMQQYATLALAARQETRKAHRRLQELARGTEILQRMAGVVGLATACVLWVTLGDPRNYPSGGAYRKALGLNLKERSSGKYKGRVKISKRGPGNARRWLFFAALRLAKNPSVRRWYEAKKAKDNNHGKKAVIAVARKLVLALYAVAVRGQAFEAWRLFPGRSTARQALTCSRETARSVTTPEDKQWKKRS

SEQ ID NO: 318697 - protein, 356 aa, unidentified
MISSTKYIGMDVHKESISIAVRNAAGKIVMECVIQTKASMILQFFDGLRGDLQVTFEEGTWAAWLYDLLKPHVTKLVVCDPRRNALLQDGNQNDRVDARKLSDLLYMNKLNAVYHGDHGLRTLKELGRSYLTMMKDQCRVMSRIKAIYRSWAIPCSGKQVYGSRHRAEWLGKILEPGVHRRAELYYQQLDALRTLRQEVRKDLLAESKKHKIWKRLCEIPSIGPIRAAELLGILQTPHRFRTKRQLWTYCGLAVESSSSADHKVENDQLRRRKKRKETRGLNENCNHDLKNLFKGAAVVASIKPGPFAEFYAALLAKGMRPEMARLTLARKIATIVLIVWKKGVCFDAQYLKPQTV

SEQ ID NO: 318698 - protein, 341 aa, unidentified
MSYKLFIGADTSKAKFDFTGLDNDGHKQLATEVSNCSTTLTLWLSELLDGHSLSASQILICIERSGIYSLNLAYIAHEMGFTVWMEDALHLAHSFGRVRGKTDAVDAARIAKYAQRNWQDMKPFNPENETVTRIRSLVKQRLRMIKTKNILLVPINEEQEFATIPIDDLHQSSREVIEKMEKTIKGFDDQIDQLIEADKQLKQKATFAMSVPGFKKVNFRNLVISTEGFTRLDNPRALACNIGIAPFPRQSGKCLNKKPTIGKMGNKSFKTTLTCAVMSVIGGENRFGQYYRRKMAEGKKHLVVVNALRNKMLHTVLACIKNEAMYEEKSSHKLAGTIAIW

SEQ ID NO: 318699 - protein, 430 aa, unidentified
MTHPKMLYTYVGIDSHKDAHTAVFINCFFEKIGELNFRNCPSDFETFLQRAQVHRPEGGTLMFGMEDCGLFGRTLTRFLISKNQNVKHVNALLVARERKNENIEDKSDSIDAECAARVLLSKFDKLPEAEPDDTYWVLRSLVVRRSLLVRHRSSMKNYLHSLLTHQYPNYRDNFENVDCNASLAFLARYPSPSTLKDTTVEELAAVLETASNKRYGMSKAKEILETLQDTTVQFQDIRDTVVQSAVWQLEFIIKEIERLEDSIEAFLKRFNCTLTSMAGIDTVTAAHMLSCIGDIKKFPTSAKLARYAGIAPVTYASGKKDLQYANQRGNRELNCIFFWLAVRLSIPLGGGDHYVVNSFFYNYYQRKISEGKTKRQAIKCVERRLVNIIWTMLTNNEEYINPPVIKAPKETTEEKSNNKPKDSCGKQKVS

SEQ ID NO: 318700 - protein, 414 aa, unidentified
MNISSRKDLPVHPNGRHVLGIDIGQRVHAAAAVTAAGHSFGRIISFDNNRAGVDRLEQLLLQPLGKPACVLIGMEATGHYWMPLFFELKRRGYEVIVINPIQTRGEFRGRIRKTKTDKLDARSIADLVLKGKALAARVPSESVLELRLLTRHRWRLTGLCGDLERFAHSLIERLFPEYPEILCKPLLPTGRALIRELGLSPATLASQPEQVNALISRASRKMVAPQKVRLLLAHARNSIGIARAESVLIAQLRSVLSLIETLEAQISTLDKELEQRVQALNSPLPSLGIHAPLAATIHAESDPISDFRRPWQYAAYAGLDPCTNESGNFRGSHNHISKRGSPYLRLALFLAASGLYRRHRQLQRLYQRSRKAGHHHTDALVIVAHKLARIVCRLLTDNRPFRAKPPKTALATAK

SEQ ID NO: 318701 - protein, 361 aa, unidentified
MTSMTHDGPQITGGVDTHGLTHHAAVIDSVGRHLADREFPATIRGYRDLLEWMRAHGELVAVGVEGTGAYGAELARVLTAAGITVIDVDRPDRKMRRMKGKSDPIDAYAAATAVLAGRATGTPKSRDGVVEAVRVLRIARRSAVKARTQAMNQIRGLLVSAPAMLREQVAGLDRAVLIRTLARVRPGDDLSRPLAATRASLRRLARRHQALDAEIAELDAEIGPLVQRAAPQLLELFGVGPETAGQLLASAGDNPERMRSEGAFAHLAGVAPIPASSGRTHRHRLNRGGDRAANNALHTIVLTRMRFDERTRAYAARRTKEGLNKKDIMRCLKRFVAREVYRALTSTPTERITQTDLTPAA

SEQ ID NO: 318702 - protein, 314 aa, unidentified
MDETKHFVGIDVSKAALDVHVLPVGKSQRFPNDGDGHAALEGWLSSHPVESVVLEATGGYERKAVQALQQQGYHVCVVNPARPRDFAKAGSRLAKTDRLDAAVLAHYAQVFDPPSAPRPGDVEAKLARYASARDSFVAEKTRLRNQLGLNDDADLERMHRDILETIEAKLAELDRMIQSCIREKAEVSQRYDQLRAVPGIGPVAAVSLLAFLPELGQVSRRAIAALVGVAPFARDSGMMRGQRRIAGGRAKVRRMLFMASLSAARHNPIIKTFYERLIKGGTGKKQAIIACSRKLLTILNAMVRDNREWQPMST

SEQ ID NO: 318703 - protein, 397 aa, unidentified
MIAVGIDVSKSKSMVAVLDSYGTVLASPYTVKHTVTDMNALTAYLKGFDEPVTILMEYTGHYHYPVLKKLQDEGLPVCIVNPYQMKKYGDVEIHKAKTDKKDALRIAAYALEKSYKLTPYSSMEQRYEDLKFLSRQYNQRINFVSKLKVQLIDLLDQTMPEITKILPLKSRNPETCTLLLFVKRFKSFDEITRIGKTRFLSAYAALMKKTPDRYAPSKGLSIFELASGSITTRGDDPYICSAQEQCINLLAASQNAADETISQMQNIAETIPEYRVLRAMNGVGDRLGPIILAEIGDIRRFHSGKALNSYAGNDAPPYQSGQFESKNRHISKRGSSALRKACFEVMQALKLSKPQNDPVYLFIVKKEQEGKPYNVAKMAGVNKFLRIYYARAMELYQ

SEQ ID NO: 318704 - protein, 343 aa, unidentified
MHTVTTIGLDIAKSVFQVHGVDATGQVIIRRQLKRRHVRAFFERLPPCLVGIEACASSHHWSRELQALGHTVRLMPPAYVKPYVKRQKNDMADAEAICEAVTRANMRFVPTKTPEQQSGLMLHRTRHLFIRQQTSVINAIRAHLAEFGVTAPVGRKGIEELLRVIADPSDERVPDVVRACLAALGSQLLGLKKQILDFDRMIMAWHRSNPTSKRLNCIPGVGPLLATALVASVGDPKAFRSGRNFSAWIGLVPKQHSSGGRARLGSISKQGDRYLRSLFVAGAFAVIRYAKIHGTKYRPWVAALLTRRPTKVAAIALANKLARMAWAMMARGERYNYPTGLRV

SEQ ID NO: 318705 - protein, 436 aa, unidentified
MKPHLPVLDAKATFVDVGSEHMHVSIGGAVPKVFGTVTAQLHALRDWLLAQGVRSVAMEATGVYWLALYGVLEAAGLEVRMVSGRQTRNAPGRKSDMQDAQWGATLHMHGLLRAGFVPPADIRRLQDYLRLRGDHVEQAASCVQLMQQALERMNIKLHDAISNLAGASGMAVMRAIVAGERDPSALLALCDVQIRRAKAELVKETLRGTWRDEHIFALEQALQSWDHYQRLIAECDRRIAAVLPPYDPSQPALPKTQKQGGANAPDIAMLREILAQMCGGRDLTQLPAHTQYGVLQLIGETGTELAKWPTEKHFTSWTGLAPGSRDSGKRKGHVKRKRNRAGRLFCMLAASLVRSKHIALGAFYRRLAARRGGLVANKALARKLAAWFWRVMVKGDDYVEKGIAHYEEQVRQNKERALRRLAKELGQQLMPVLQPA

SEQ ID NO: 318706 - protein, 354 aa, unidentified
MSQNPNVTFAVIGIDIGKNSFHVVGHDDRGSIVLRQKWTRGQIDARLANLPPCLVGMEACVGAHHLARKLAALGHDARLMPAKYVRPYAKGQKNDFNDAEAIAEAVQRPTMRFVATKTAEQLDLQALHRVRERLVSQRTGITNQIRAFLLERGVAVRQGLRFLRAELPGILAAPPDVLSPRMVRVIEDLSGDWRRLDERIEGLSSEIEAIARQDAGCERLMSVPGIGPIISSAMVAAIGAGDGFSKGRDFAAWLGLVPKQISTGDRTILGKISRRGNRYLRVLFVQAAWVVLIKPKSWERHGLKTWIEAAKKRLHHNVLAIALANKLARIAWSVLARGRAFEAKKINEVVPHPA

SEQ ID NO: 318707 - protein, 482 aa, unidentified
MKPRQKDKDKRATGRSTRLSWQEMNRKQRRETMRKIQSEELSLEVIHPDAAGIDIGNESHYVAVPPSRDSQPVRRFGCTTAELKVMAGWLKRCGIRTIAMQSTGVYWIAVYDILEEAGFEVYLVNARETKNLPGRKTDVQESQWLMKLHRYGLLRNSFRPSQEIRTMRTYWRQRNDLVQAGARHIQRIQKALTQMNIQLANVLSDVSGMTGQAIIKAILAGERDPHKLAAFRDPRVKASEEQIERSLEGHWQKDLLFVLKQEQDGYEFCQQQMAECDRQLDQYLQQQEDRSKGASLPEEKRKERLKKKKGNKPRFDLRTGLFRMAGVDLTQIDCIDVMTATTILSEAGSDMSKWETEHHFVSWLRLCPDNRISGNKIIGKGRLPTSNRITNALKMAASTLRTSNTYLGAQFRRLRTKLGAPIAIKAMAAKLARLIYRMLRYGMKYLDQGAAFYELQHRKLQIKHLKSKAAKLGFQIVQAPAA

SEQ ID NO: 318708 - protein, 349 aa, unidentified
MKIIGCDFHPSFQQIAICDLETGEFQDRKLSHGDGQAERFYRELGEPALIGIEATGNSQWFLDLVERLGHEIWVGDAAKIRASYVRKQKTDKRDAGHILKLLLEKRFPQLWRPSAAMRDQRQLLRHRDKLVEIRTKVKNSLQHLAMNRGMQKKSRLWTRQGMEQFQQLAMPGWAGTRREDLLQLFKELNGQIELLDQAVKQAAEQHPQAQLLMTQPGVGPVTALAFVLTIGDVARFAGSKQLTSYLGLVPSEHSSGSKRRLGAITKQGNCFLRKLLVEAAQTTVRKDEDFRKEYQHRCHHCPKAVAKVAAARKLAVRLYWMLRSNVGYPEIVHIESNPRVPLGESSPKH

SEQ ID NO: 318709 - protein, 431 aa, unidentified
MDTQQFEVIRPKCAGLDVHKKSVVAAVCTSDPVTLTASYKTKVFNTNNSDIAALRDWLLAQDCHDVCMESTGKYWIPIFNIPEPHMHVVLTHPKYVKAIKGKKTDRRDAKWIANLFRFDIVKASFIPPADIRALRELSRYRLKLSYMRTAEKNRYQNSMTISRIRIDCVLTDPFGLSATRIMDYLLSDEPFDEEKCRSLIDRRVKASKDEVMDAVHGYHILEEQKFKMTHAKAHMDFINKSIDEIEAELFLRSRQYDIRIKRIATVTGITELSALFILSEIGTDMSVFESDRHLCSWAGLTPANNESANKKKSTRCSKAGQYLKPLLIQCALAAVRSKKEPYFAIKYQRLCKRRGRKKAIIAIARMMLTCIYHMLSDNEDFHPDDYEAAVNPPKQKPVILTLDNTLQFLREQGADPETLKLIQQQCAAQAG

SEQ ID NO: 318710 - protein, 325 aa, unidentified
MQGKEASEQETPKCTAGIDVSKNWLDAHVLPTSKTLRMANSAEGIRQLKRWLLRHKVELVAIEATGKWHRLVARSLSASQISVAVVDPYRVRMFAKAHGILAKTDRLDAKVLAMFASMMAPSCRPPAPEALEGMKELVTARASAVAEETSLKNQLSASMGSFLKRQLARRIDQLAAHIKALEKECLKQIKQDPGLARRFTILTSIPGIALVGATTLIACLSELGSLTNKQIAALAGLAPVADDSGERQGVRVIWGGRAAVRRVLYLASLSASQRNHDMKTFYRRLIANGKPPKTALIAIARKLALLANTLITQDRLWQPHPPQSA

SEQ ID NO: 318711 - protein, 411 aa, unidentified
MQTLVERGCGLDVHQATVVACLLIILKNGQVQKQVRTFGTTTRELLVLREWLLSQSCTHVAMESTGVYWKPVYAVLEGGGLEIVVANAQHVKKVPGRKTDVKDAEWIADLLCHGLLRSSFVPPKPIRELRDLTRYRRKLVESQAAERNRLLKLLESGNIKLASVATDVFGVSGRLMLRALTEGKATPQEMAELAKGLLRKKLPELELALEGKFEEHHRFLLLLQLKRVQAAEEDLAVLERRIQEKLKPYEAQLTLLQEVPGVDWTLAAVIIAELGVDMKVFGNVSQLASWAGVCPGNNESAGKRKSSRIPKGNVYLKTALVEAANAAAKAKGTYLRDKFYRLKARRGYKRAAVAVAHKILVAIYHMFSHQVCYNELGDLYLDKLNKHSLTRNLVHRLERLGYTVTLNQKAA

SEQ ID NO: 318712 - protein, 356 aa, unidentified
MISSTKYIGMDVHKESISIAVMNAAGKIVMECVIETKASMILQCMDGLRGDLQVTFEEGTSAAWLYDLLKPHVTKLVVCDPRKNKSMREGNQNDKIDARRLAELLRLDHLTPVYHGEHGLRTLKELVRSYLSITKDLARVKSRVKAIYRSWAIPCSGKQVYARCHRAEWLGKISEPGVRRRAEFYYQQLDALRGLRQEVRKDLLAESKQHKAWKRLCEIPSIGPIRAAVLLGILQTPHRFRTKRTLWNYGGLAIEMHSSADHRSVGGQLQRSKKNVLIRGLNRNCNHDLKNLFKGAAAVASSKPGPFQEFYAALVAKGMRPEMARLTLARKIATIVLIVWKRGVCFDANHLKPQTA

SEQ ID NO: 318713 - protein, 396 aa, unidentified
MERVWAGVDIGKGHHHAVVVDAEGTRLLSRRVPNEEPALLDLLAEVLALAEEVTWAVDLTSSEAALLLALLFDHNQRVVYVPGMAVNRVAGSYRGEGKTDAKDAYVIADTARMRRDLHAVRADDELVVELRLLTAWRADLVADRTRIVNRLRVQLVAVFPGLERVLDLTNRGPLVLLTGYQTPAVIRRTGRKRLEAWLRNRKVRGAADLADRVVEAAHAQHITLPGEKLTARLVARLAREVMDLDEQIAEIDALIEERFRRHHHAEVISSLPGIGVLLGAEFLAATGGDLAVFDSADHLASLAGVAPVPRDSGKRTGNLHRPKRYSRSLQRVFYTSALISIRCCPASRAFYDRKRAEGKRHTQAVLALARRRVNVLWALLRDGRCYQTTPPAPAAA

SEQ ID NO: 318714 - protein, 357 aa, unidentified
MTSNKKYIGMDVHKESISIAVMNSTGKFVMECVIETKASMLLQFIAGLRGDVRVTFEEGTWAAWLYDLLKPHVSEVVVCNPRKNALLKNGSKSDRIDARKLAELLRGNQLKPVYHGEQGLRTLKELARSYLTISKDVTRVMNRLKALYRSWGIACAGTHVYAPRHRSEWLGRISEAGVRRRAEHCYQQLDVLRLLRQQIRRDLLLESKKHQAWRLLGLIPGIGPIRAALLIALIQTPHRFRTKRQLWTYSGLGLETHDSAQYRVVEGQLQRSKKPVTLRGLNQDHNHDLKDIFKGAATRVSSSSHGPLHDFYEHLLAQGRKPTMARLTLARKIAAITLIVWKKEVHFDASYLTSQAA

SEQ ID NO: 318715 - protein, 358 aa, unidentified
MTRMTQAVPLDQHHPEIVLGVDTHKDVHVAAVITAAGAFVESRSFPTTAEGYEQLLDWARTSGHVSRAGVECTGSYGAALSRYLHSQGITVFEVNQPDKATRRRRGKSDIIDAEAAARAVITGRATATAKAGDGPVEMLRLFKMAKASAIKSRAQAINQLKAVLVATDPELRESLAGLSNPKLIRACAGLDSSVSGTAGAAAHTLKLLARRIQHLTEEIEDLTTRIRDVITQHNPQLLACYGVGPDTAATLLIAAGDNPERLRSEASFAALCGVSPVEASSGKTQRRRLNRGGNRQANSALYTVVLARLRWDTRTRDYIDRRVSEGKTRREALRCLKRYVAREIHRLITRTTTHVLAA

SEQ ID NO: 318716 - protein, 379 aa, unidentified
MPTPTTHNESPRPGPTLHVALDLGNTSWCLAGAPGVAAPARVRLFPARSLARLHAELASARQHFGLPADAPVVLCYEAGRDGFWLQRACTAAGIGALVVDSSSIEVSRRARRAKTDRLDATALLRLLFRHTAGERGHWRVLHVPTVEEEDRRHVHRELARLTQERTRAVNRLKGLLALHGIRLTSLRAVPDQLPHLTQWDGTPLPPGVSERIQRIWTRLTLIQAQRTALVRARRALLETATDPTIQTVRRLLQLRGVGEVSAWLLTMELFSWRRFRNRREVAGVLGLTATPQASGDRRRDLGIGKGGSALLRGLAMELAWGWLRYQPASALSQWYRTRFAAGGSRQRRIGIVALARRLMIALWRYVETGQVPAGATMKA

SEQ ID NO: 318717 - protein, 355 aa, unidentified
MSEITRVGVDLAKHVIQVHGVDVGGKVVSNRALPRDKFVAWCAQLPVGCLVAMEASSSAHHWARKLLSLGLDARIIAAHLVSPYRLQGRSGKNDANDAAAICEAASRPQMHFVPVKSVEQQSMLCIHRLREGFKQDRTACTNRIRGLLAEFGLVIPQRSVALRQALPDVIEDGENELGGLARLALQQAQAQWAELDAHMKWCDERIAAHAKANESVRQAEQLAGVGPVTASAVVATVGDFKQFSNGAQFGAWLGLTPKQNSSGGKNNLGAITKRGDMYLRTLLIQGAKSAVMNAHKHDDPISKWAYQLREKSGWQKAVVALANKNARILWAVFVRGKPFDACHVSAKPGMSMAMA

SEQ ID NO: 318718 - protein, 315 aa, unidentified
MNSKQVFVGIDVSKDHLDIGLHPVGKTWQVVHDEVGKKQLYKELRKLKPELIIMEASGGLESAFASQLQEGKLSVVVVNPRQVRDFAKAEGILAKTDRIDAQVLARFAERIRPDVRPLPDEAQRALEGLMARRRQLVVMIGAEKNRLRRASTEVSQGIQDHIKWLKRQLEGVDRDISGRIQRTDVWKQKEKLLTSAPGVGLVLSRSFLSGLPELGTISGKKISALVGVAPFNCDSGRFKGRRRIWGGREYVRSALYMGTVAAVRWNPVIRSFFLRLVKAGKSKKVALTACMRKFLVMLNAIIASNEPWKFGKVVY

SEQ ID NO: 318719 - protein, 462 aa, unidentified
MPGREERETWEKSRRQLEGLPVIRRGVAGIDLGSEQHWVCAPTLDRSGREVARFGATTAELIRMAEWLKARQVESVAMESTGVYWIAPHEVLEAQGLQVLLVDTRQLAQVPGRDKKSDPTDCEWIQRLHSCGLLRGSFRPEEAVCMLRTLVRDKANLVAESGDWLRRMQKSLDQMNVRVHRAVSDIDGVTGMAILRAIAGGERDAQKLASLRDRRCSKTQQEIAEQLSGHWREDHLFSLQQALKMYDAVQERIAAYEQEILGKLGAMEREEPHEPTAPPLQNASKARTIKKRGQEAKRQALYRMSGVDMTQIDAIGVETVEVVVSEYGSDLSRFPTEKQFVSHVTLAPRVPTSGGKPVKKKKRNSASTRVAAALRMAALSLRHSQTALGAYYRRIAQRRGGDIAVFAAARKLATLIYRLLRWGQPYVDEGTAAFENRYRQRRIHRLEATAKELGYQLTPVPA

SEQ ID NO: 318720 - protein, 378 aa, unidentified
MKNDNRYVGLDVHAETIAVAVVETDGEVGFLGTIPNRIETVRRLVKRLGPAQRLRVCYEAGPTGYVLYWQLAEMGVHCDVIAPTLVPQKPGDRVKTDRRDAEKLAVLYRGGHLTPVWVPDRAHEALRDLVRAREAAKSDQLRARHRLQKFLLRHGRRPPQGIKAWTQKHLDWVRREVHFEALAQEAVLVDHLAEVEHARERIRRLEGSIDVAVEAAPACLRAVIEALQGLRGIAKVSAATIVSEVGSLSRFRKPRQLMGYSGGVPREDSSGERVRRGAITKTGNAHLRRIVGEAAWSYRHRPTVRGELLKRQVGLSEEVKAISWKAQHRLYSRYRRLIGKGKTKQQVVTAVARELLGFIWAIGVHVEQQHGAAARRAA

SEQ ID NO: 318721 - protein, 334 aa, unidentified
MEKVTTVGIDLAKAVFSLHGVDGAGRAVLRRTVRRDQLVEVVAGLSPCLIGMEACSGAHDWGRRFQEHGHMVRLMAPKFVAPYRKGGKNDGNDAEAICEAVTRPSMRFVPVKSLEQQALLALHRVRQGFVVERTATINRLRGLLTEFGVVLALRSVTVRRQAALAAEALPELAKRAIGDLLEQLRGLGERINGYDREIEAQAKLCEPAQRLMKIRGIGPTTALAIVATVGNAREFKNGRQFAAWIGLVPGQYSTGGKVRLGHISKRGDAYLRNLLVQGARSVLNSAGMHQDRMSRWILQLQPRRGYYRTLVAIANKNARTAWALLAKNETLRVA

SEQ ID NO: 318722 - protein, 353 aa, unidentified
MIYRGCLHVPGIIVGVDTHKDEHVAVVVDKLGVRIGQRNLPTTNTGYVGLEHWASSLGEIDAFGVEGTGSYGAGLVRFLRGQGHKVIEVNRPDRSARRRLGKSDPTDAEMAARAVLAGVARDRPKSGVDKVEMIRMFKSTKDSAMKGRAQAINQMKALIVTAPVELRAVLRGFTTSQLVTRCARWRYGQLGTPTAAAKYALRSLARRHIQLTQEIVALDAQLARLTAAFAPALTESFGIGPDTAAALLVTAGSNPERLKSEAAFAALCGVSPVPASSGKTNRHRLNRGGDRQANAALYRVVIVRLRYHDQTRTYFQRRMEEGKTRTEVIRCLKRYVAREVFSILHDIGKRRTA

SEQ ID NO: 318723 - protein, 342 aa, unidentified
MMLEPVAHSFLTAKSVFQLHGVDAAGKVVIRKKPRRSAVLDTLRNLPPCLVGMKACATAHYWAREISTLGHDVKLMPPAYAKPYVKRGKNDMADAEAICEAVTRPTMRFVPIKSAELQGVLVLHRTRDLLVRQRTILLTPARGHLAEFGLIAPQGPRNVMELIVQMREDARGDLPEIARTALLGTGAQIEARSRQVPALDRQLLSWHRQESTSQRLVTIPGVGVITATALAASVPDPSVFRSGRLFAAILGLTPRQNSSNVKEQLRRISKIGDSYLRRLLVVGAASVIRRVDTNPSATGAWVRSLLTRKPARVTTIAMANKTARIAWAVLAGGEIYRAPVMA

SEQ ID NO: 318724 - protein, 390 aa, unidentified
MIYVGIDVAKDKHDCCILGPDTEELFQVFTIRNNSDGYGELFHKIESVSKDKSQIKIGLEATGHYSYNILGSLLDHGYHTFVINPLHTNLYRKGQSLRKTKTDKVDARSIAEMLVTDKTLKPYTGTSYHSEELKSLTRYRFELVKERAKLKTSVSRLVNILFPELESLVPTLHMNSVYRLLQELPGAYFIASSNLTHLKALLADASKGHYGREKAIEIRETAKSSIGSLMPAKSMELRQTIRRIDTLTSDIKEVEQSIQKIMDECGSPITTIPGIKYRMGAMILAEIGDFTRFSNADQVLAYAGLSPSTYQSGQLISSYARMEKRGSKYLRYALFNAAIYASEWDDRFRLYLSKKRAEGKHYYVAISHVIKKLVRTIFRMEITHTSYQPL

SEQ ID NO: 318725 - protein, 348 aa, unidentified
MATNVITWVGMDAHKNSIKVAAWLPGEAEPVEWTEDTTAEAIRRLARRLRRIAPGEVRACYEAGPTGYGLQRLLGVEGVICEVVAPSLTPVKPGLRIKTDRRDARKLGELLRAGLLTEVHSPSETDEALRDLCRCRDDVRVDLLRARHRLSKFLLRRHLIYRQTKHHWGTRHVQWLEQLRFDDAISQATFDSYFLAVQQLEERQRQLDQRLAEFGAQEPYREPVAALRCFKGIDTVTAVCLVAELHDFRRFRSPRQLAAYVGLVPSENSSGEREQRGPITKSGNRHVRRLLVEASWHHRHRPALSRPLRYRRMSEAGKVHPKTIVAMARELCGYLWAVLHPAAAAPRA

SEQ ID NO: 318726 - protein, 416 aa, unidentified
MKIVRPICCGMDVHKNIIVATIGITNKKTRITEYIQETFSTLNSDLLNLKQWLINHKCFDACMESTGKYWIPIFNILEDEINIYLTHPKYVKAIKGKKTDKKDSKWICDLFKHDLIKFSFIPPKEIRALREISRYRYKLVGMRSSERNRYQNCMTVSNIGIGSVFSDPFGKSAQAIMKEVLESDIIEDEKILKCIHRSCKNKDKILDSIKHCNIETDQRFKMNESMTHMEELQVHINNCEIEMMKRAAPMFDQFMHITQLPGISTLSAILIISEIGVDMKQFESDKQLTCWAGLAPANNESANKKKSVRISKAGQYLKPLLVQCALGAIKDKEGYFGIKYSRIKKRRGHKKAIIAIARMMLVSIYHMILTGETFNPSDYESFRNPNPPIKQQVLTEESAIEFLKKSGFDVSKLTKP

SEQ ID NO: 318727 - protein, 376 aa, unidentified
MEDDSTLYVGLDVHKDSITVAYALGAGEVELLGKIGTTQADVERLCKRLQSKARHIRVVYEAGPCGYGLYRKLIQKGFECMVCAPSLIPRKPGEHIKTDRRDAVKLVRSLRAGDLSAVYVPSVDDEAFRDLARAWVIAKDDLKRARQRVKAFLLSHGVRYTGSANWGPAHRRWLSAYSFDSAWQQFAFEELRRAIEDRLAQCDRLESALREAVVNWRFYPAALGLQAMRGVQFTTAVGMLAELGDLSRFVHPRQLMAWLGVTPSEHSSGGKRRQGSITKSGNSYARKLLVEAAWSYRHPARVSPDIQRRHEGLPKPIVDRAWDAQVRLCRRYRKLVARGKQKNIAVVAVARELSGFIWDICRLSLSLAIPRETQMP

SEQ ID NO: 318728 - protein, 354 aa, unidentified
MEEQFIGCDGHKQYSVFVTVKRGENQGVVERVMNERSAIREYLGGLPAGSGIALEAGGTYYWLVQEIERAGHQPHLAHPLDCRRRMGSKKKTDVIDATELGKMLRDGTLPEVWIPPAELRDVRELLRLRMFLAHSARTRIKNRIQGVLAQHNVRPQQVQDVFTVRGRAELERRYGELPTETGASVKQQLAILDFIEGQIGTAERRLQEQMQLTPEALLLDTMPCVGPILSMVMALEIGDVKRFPDAEHLASYAGSVPTVKSSGGRTRLGGVSKEVNLTLKWAYVEAANLIAISQRRLAGSHVARLYQRISRTKKHSIAIVAVARHLAEASYWILTKREGYREPKVPAKVSSTHG

SEQ ID NO: 318729 - protein, 389 aa, unidentified
MFYLGIDIGKNTHVASLIDSRKKVLFKAFSFSNSIDGAESLICKLEPFRNQLEIGMEATGHYWLSLYSYLSEKNFTVRVINPIQTDGWRQGIEIRKRKTDIIDSLLIADLLRYGDFVETSLSNEDYLSLRNLSRFRAYLISSIGDLKRKTIALLDQVFPEYASSFSNIFAKTSKEILANFSSPSDFEDINSEDLQSFLNNVTMKKFAARKLEELSKKASKSFGVNFCMDSFGLQIKMLIGQISFIQNQVLDVEKEIESLLEKLNSPITTIPGIGAVNAAAILGEIGDIKRFSNPSKLVAYAGLDSTVSQSGEFESTSNHMTKRGSPYLRRALFQSALRAEFCDPVFSDYYQKKITEGKHHLVATNAVARKLVHTIFAVLTKDEPYQIQS

SEQ ID NO: 318730 - protein, 419 aa, unidentified
MKTVEKSREGERYIGLDVHKHYITVGGMNKAQEIVVRPRNVDIERFQTWAEENLHKTDEVVLEATTNTWDVYDMIAPLVKRVVVAHPAEVKQIANARVKTDNQDVVRLIRLLIADIVPEVWVPPVEVRQLRALISYRWRLVKMTTAIQNRMHSLLHRHNIPKPEGKVDTGENREWWEALKLSALEDLRMKQELETLRLVRENIAEVDRELGRLSTSERWGDQSVYLMQNPGVGIVVTMTILSAVGDIRRFESPKKLVGYAGLGAGVHDSGQKHQDKGITKYGRKELRWALVEASWQAVRSNPRLKAEYEELCSRRHKHKNKAIVAIARKLLVGLWYMLQRKEASRHQSEADLAYKMLTWAWHMDKTALNGMTNQQFAKYELLQLKKGENLTRIVKGGLPRRIASKEEVLALKPELRPTQ

SEQ ID NO: 318731 - protein, 346 aa, unidentified
MGKSIINLSSVTTVGLDLAKHVFQVHCVDALGRVVVAKPIRRNKLLEFFASLPRCLVGLEACGSAHHWARELIKLGHDARMMPPAYVKPYIRRQKNDASDAAAICEAVTRPSMRFVGVRSLANQAALMRHKAREMLVSQRTQLLNGLRGHLTEVGVIAAQGPRHARELAELIEACDETIAFEVCEALAPLVVQLRNLDEAIARLDRIIAKLAQKDETARRLMSIPGFGPITASAMAATIQDTSSFAGPREFAAFLGLTPKQNSSGGKPKLGRISKMGNRYLRKLLVVGALAVLFHRKPHTDPLRMWAKKLIEKKPFKLVAVAIANKMARIAFAILWSKTVYREIPA

SEQ ID NO: 318732 - protein, 342 aa, unidentified
MEKIATVGLDIAKSVFQVHGVDAAGEVVVRKRLSRARVVPFFAKLPRCLVGIEACSTSHHWARELIALGHDVRLMPAQYVKPYVKRGKNDASDAEAICEAVTRPTMRFVAVKTPEQQSVMMLHRVRLMLNRQRTQLSNATRAHMSEFGIVAPVGRIGFDRLLAIVADKDDESIPPDARLCLEMLGAQLAIVKEQILENDRSIRASARDTEVGRRLMEIPGVGPLLASAFVASVADPQVFKTGRDLAAWIGLVPRQNSSGGKERLGGISRAGNQYLRQMLVVGAMAVIRHAERHGTKRVWLIELMKRRATKVAAVALANKTARMVWALMTSGEHYREPQVAHA

SEQ ID NO: 318733 - protein, 334 aa, unidentified
MALELLAIDLGKRSFHLYGIDTNGEILSRKVSRTKLAEVVNNLAPKAIAMEACASAHYWARCWLAAGREVRLINPRFVKPFVKGSKNDAVDAEAIFEAAMRPTMRFVPVKSRDQQDLQSLHRARDRLICQRTALINHTRGLLAEYGVVLPQGPWRFTAQAPAAVAGAELSDLARSIFGELMDQLDELDRRVKKLDATMVALCRTNETCRRLAKLPGVGPVIATAIVAAVNDGRQFRSGREMAAWIGLVPRQYTTGGKPRLGGIGRRANHYLRRQLIHGARAVVTRLPQHDARRSTWLKALVARRGFNRTIVALANKTARIAWALLNRKEDYAIA

SEQ ID NO: 318734 - protein, 357 aa, unidentified
MQIRSVGIDLGKTTFHLVALDDNGTVLLRRKFTQRQLITFTANMQTSLIGMEACGGAHFLGRTLRAQGHDVKLIPAQFVKPFVKSNKNDFLDAEAIAEAVDRQNMRFVPIKTDDQLDLQALHRVRDRLITRRTSVINQLRAFLLERGLVFAKSPAKLREHMPEILENAEQDLTPRMRNLLAMLWNEWKDLEQQIVEMNDEVERIASGDAACVRLRQIPGIGPLVATAIVAAIGNGAAFHKGREFAAWLGIVPRQYSTGGKARLYGISKRGNNYLRKILLHGARAVVLRSKRDRIAIGAWMTALEARAPRNVLIVATANKLARIAWAVLSSGQDYCYDPVLLTLLYVFNAQPSQFCPA

SEQ ID NO: 318735 - protein, 451 aa, unidentified
MKKEKVNKGVIKMGSGLPVFNHFAAGIDIGDTLHCIAINDGNGGHEVKTTSAFTCDLNEIVDYLKSNGITTAAMESTGVYWLPLYIMLEEAGIEPYLVNAKHVKNVTGRKKDDTDSIWIQKLHTCGLLQKSFQPDNEIRLLRNYTRQRKNLIILGTDAVRRMQKALELMNIKIHTVISDILGKTGMEMVKAILAGEKDPQILATLCDPRIKASQEEIIKSLQGIWKEEYLFMLEQAVENYEFHQKQIKNCEEKIKQQLLKQVAIIKEGDITSLEEMLKKKAKSKRNQFDFAISPLLNAIAGVDLCMVPGISEVTALGFISEVGVDMSKWNSGKQFAAWLNLTPNTKITGGKIISSKMMKKNNKAGQYLRQAASCLSTNKTPIGDYYRRMRARLGGRGAALTTAHKLSRIIYTMLVKKTAYNPGMMIDNQEKFKEEKIKKLEKQLARLRQVA

SEQ ID NO: 318736 - protein, 355 aa, unidentified
MTDVDRKIIIGVDTHKDFHHVAVITALGELIGDQRFDATPTGYRGLIDWVQAQGVVLRAGVEGTGSYGAGLTARFRGLGWDVIDVIAPDKQERRLRGKTDQIDAYSAARAVLSRRASTVPKVRDGQVEAIRALRTTRRLLVKQRTETINQLQGLLVSAPEELRVKLGGQTRKNLALACSKLRDRAGDDVVTAATKDAARSLGRRFLDLAAEAARLDTRILALVTDYAPELLAVHGVGPDVAAALLTVTGENVDRISSESALAHLAGTAPIPASSGKTNRHRLNRGGNRQGNAAFHRIVLVRMKTHPETRDYVLKTLARGKTKRDAMRLLKRYLAREIFPILITIQQRHTPTQIAA

SEQ ID NO: 318737 - protein, 316 aa, unidentified
MIEDRPVIGIDVAKHAFDVHCHPGREAWHLANTQAARRALAARLAKLRPLAVGLEASGGYERVLAGELHDAGLPVYVVPPRQVRAFARALGGKAKTDPIDARLIARFVATALDALSPYDPDPALERLRELAAHRRRLVREKAALTGQLDTVQDLLVRRMIQARLRTIATGIKQLEGALRKTVAGDPHLAERYRRLTAVAGVGPVLASTLLADLPELGRIGPKRIASLVGVAPHARQSGKTQRPGRCSGGRKQVRDVLYMATLAAIKARCDPIDATYRRLRANGKPFKVAITAAMRKFITILNAKERDALIADQLAT

SEQ ID NO: 318738 - protein, 309 aa, unidentified
MDAVYVGIDVSKDRLDVHVRPSGESLAVARDGEGLAVLIARLQPLAPQLIAVEATGGFEIVVAAAIGGAGLPLVVVNPAQVRHYAQAVGQRAKTDAIDAEIIARFVEATGPSPRPLPDAATRLLADLVTRRRQIIVMMVAERQRAARLPKSLKKSCERVVRVLERELAELDRQLDTAVRGSPAWREREDLLASVPGIGPITARTLIAELPELGQLDRRKIASLAGLAPFARQSGKWRGKSFISGGRASVRTALFIATLSAARHNPVIRAFRQRLIAAGKPKMVAAIACMRKLLTILNAIARDHKPWQTA

SEQ ID NO: 318739 - protein, 341 aa, unidentified
MRIVGISGGVDTHADSHVAAAVDRNGGLLGVESFSADSSGFEELLGWLVGFGQVVRVGVEGTGSWGVGLTRFLTTGGVEVVEVDRPNRQTRRKQGKSDPTDAISAARAALSGTATTVPKHRNGPVEQMRVLLVARRSARQQRIQTLNQLRHLVFTAPEPIRVRFKDRYKTGLVTEAANMRPRKGTDPIIYTTNLVIRSLARRIKSLDAEIRTIDGALTQLIEETAPSLLGLHGVGTDTAASLLVAAGDNPDRLHNEGSWAHLCGTTPLPASSGKVTRHRLNRGGDRQANAALHRIVLTRMSSDEKTRRYVTRRRAEGLNTAEIMRCLKRYVARQTYKHLPT

SEQ ID NO: 318740 - protein, 387 aa, unidentified
MISVGIDVAKRAHEACFMDAEGQEIGRPLRFPNTAGGVATLSDRLRGLEQPVSIALEATGHYWLALHERLTREGFQVQVVNPIQTDAYRRTTVRKVKSDRRDSWIIADFHRIGRVRRGYVPDAMILQLRELTRFRFKLVDQVGDAKRKALTILDRVFPEYERLFSDVFIVSSREILRTAASAEEFASFDIEELTALLQRSSRGRFGKDKAQAIQMAARNSLGLSKLGSAATLELNCLLDQIEFLEGQIAQVEVAIEELITAQEQYLTTIKGLGPVLAASILAEIGDISRFSRLESLVAYAGIDPAVYSSGEFTGTQAKLSKRGSPYLRRALWLAATSARRFNPDLQEYFERKIRSGKPYGIAMSAVCRKLLARIYVVLKENRPYEVH

SEQ ID NO: 318741 - protein, 420 aa, unidentified
MEYAPVRLPGTPPGGVTAGIGWASADHAVCVVGVAGVVMARFAVPHTAPGLAALVRGLARAGVGEAAIERSDGPLVGALLAAGVTVVVITPRQVKNLRSRYGPAGNKDDRFDAFVLAGVLRTGRARLRPLIPDSPATVTLRQACRARQDLVRHRVAAGNQLRARLLAAFPGPVGLFCELHSAISLAFLGRFGGQDRADWLSQKRLAAWLKAAGYSGRTSLAGRYRRLRAAPRGATGEHRAASAQVTRALAAVLATLNTQIKHLEAQIAAQLASHADGHIFTSLPRSGTIRAARLLTEIGDCRAKFPGPQALICLAGAAPSTRQSGKHKAVTFRWAVRNQLRDAVCDFADGSRHASPWAAHLYNDAIARGKDHPLAVRILARAWLYVIWECWHNGTACNPARHRALQRLLAAQDAAAQPAA

SEQ ID NO: 318742 - protein, 350 aa, unidentified
MTSLQQIAEVVIGVDTHVHTHSAAVVDARTGGVLAEITVTADAGGYQELIDFAGQHSGQRAWAIEGTGGHGNGLARVLAQRDEPVIELDRPERAKRRNGAKSDPLDAVRAAREALSRDNLGTPRSHGDRQALSVLLAARQSAVQGAGDAQRQLFSLVIAAPEPLRKRFRGHKLPAMTRLAAQLRGSPRWDTETATTAVLRALARRALDLAAEAAQHEKDIRAIVAAWRPDLLTQRGVGPITAAVILCAWSHPGRVRSEAAFAMLGGVAPIPADSGSGTAPKRFRLNRYGDRQLNRALHTITLSRLRYDPTTQAYAKRRTAEGKTPRDIKRCLKRYIARDLYRLLEHPAAT

SEQ ID NO: 318743 - protein, 361 aa, unidentified
MKIMTGIDLHSNNALCGLMDESGQRLVHKQLPCELSAILQLLDPYKDRIATVAIESTYNWYWLADGLQDHGYHVVLANPARMKPYDGLKHTDDVSDAFFLTELLRLKILPTGHLYDRKTRPVRDLLRRRLMLVHQRTTLILSFKSLNERTLGRRIALSRVKTMPVAEARALFADPADQLLSGTEIELVGRFTQAIEQLEAHVLGVAGKWDPYQRLQTLPGIGKILGLTIALETGDPKRFATAGNFASYCRCVKSRRESNGKKKGENNRKCGNTYLAWAFVEAAHFARRYNAACRRFYDRKKQPTHPVIATKALACKLAKAAWHVMAEDAPYDAERVFGPGQKTDFGETGREPAKGSGHPSQ

SEQ ID NO: 318744 - protein, 345 aa, unidentified
MSEINLVSIDLAKRVFQVEASDASGRRLWERRVWREELAELIGSLPATTIAMEACATAHHWGRQFSAMGHTIQLIPPPAVSRLVDRRKKNDRSDTRAIRKAAGDEDVRAVPLKSMQSQAEQFEHRVREQWVHQRTATINQLRAMLGEFGIVLPKGAGVLLSRRADLLADRRLAGMDRLERLMGAQFDLLERLSAMIDEADRRLRQLARTSPVARRLTSIPGVGPVISTAMAAAVPDAQAFANGRAFAAALGLVPSQHSSGQTVRLGPITKRGSRYLRANLVHGARSLLTRVKRSAAEPSDGLMVWARGLLGRMHWNNAVVAVANKLARIIWALMANGGLYRPRPA

SEQ ID NO: 318745 - protein, 371 aa, unidentified
MKKSTRWVGLDVHAETIAVAVAEPDGTVRSVGTIPNRREAVARTLRKLGEGCKLHVCYEAGPCGYVLYWQLTEMGIDCQVVAPTLIPVKAGDRVKTDRRDAEKLARCHRSGDLTAVWIPDAQHEALRDLVRARHAAKQDQLRHRNRLGKFLLRLGVRRPDKMTSWSARHLEWLEGRSFEQLAQQMVFVDHLREVKQAAERIVRLEKAIDTALEGAPASFRALVAGLQTLRGVAKVSAVTLVAEIGNFSRFNRAPQLMAYAGIVPSEHSSGGSTRRGSITKTGNARLRHVLGEAAWTYRFKPGLRGALQKRQQGQSDEVKDVAWKAQHRLYMRYRKLTGAGKHHNRAVTAVARELAGFIWDIGCRIERQLAA

SEQ ID NO: 318746 - protein, 428 aa, unidentified
MNYNIQNAKIASITEKTLIVGIDVGSETHYARAFDWRNYEFTKKPLAFSNTEAGFLTFKAWVEDLQEKYGKTAVIAGMEPTGHYWFALGKFLQDNGMKPVHVNPHHVKKSKELDDNNPNKNDRKDPKTIAALVNEGRFSYPYIPTGIYAEIRSLSNLRFQTQEEVTRIKNRIARWFSIYFPEYKDVYGDVKAVSGRMVLKKSPLPEDIKKLGVEGVNKIWRDAKQRGAGMKRAKTLVSAAEHSVGSKEAPEAARIELKHLLGDMDVYTARLEELVEKLENKLKEIPYIDKLLEIKGIGMITVSGFIAEVGDIGRFDNPKQLQKLAGYAIVANDSGKHNGESRISYRGRKRLRYVLYEAAISLVGKNTEFRAIHEYYRTRKENPLKKMQSVVAVACKVIRVFYTILTKGVDYDAGKLLGDIRHRKVQAA

SEQ ID NO: 318747 - protein, 378 aa, unidentified
MTMIGAERPDSTTGVAVILGVDTHLDFHVAVALDHLGRRLGESSVPATVKGYERLLLWAEGFGPLRCAGVEGTSSYGAGLTRHLRASGIKVLEVERPKHRRRGSRRNLQKSDPSDAEAAARAVLAGESSGVPKSGDGEVEMIRALRAARRSAIKARTQAANQLQALRVTAPEELRHRLRGLSTKELVCVAARFRLADGPSDVPTATRFALRSVARRYEALSREIAELEAHLDRLVGQAASELLSLPGIGTDSAATLLIVAGDNPQRLRSEASFASLCGVSPIEASSGKVVRHRLNRGGNREANRALYMICLARMRRDPRTQEYVARRTAEGKSKREIIRCLKRYLAREVYRVLVTCGARSSPTGPQAKVHVASRSRAT

SEQ ID NO: 318748 - protein, 370 aa, unidentified
MSVRRILAKTINTDLEYEAIGIDLAKNCVSVALLTTDGEVVCIDRLDYSELEKSAQVLCPTTFAMEPCTEMNYLVQKLEAWGHRCLVIGGKNVQNYVENHYSGQKTDLNDAQALAFLAQDTQLRTIKAKDMEQQKYASLTTLREQYIKQYRQTIVSLKGICQAWGLNISKGISGKARLKDLIENHAAFPEELKESLVDMVTHAQAAQKALNKITKTLELLAKNDKVCQLIQTIPGLGPICSCRLRATIGDIQRFKNLKDFPAYYGLVPRSIATGHNEKKGRITHRGDKTMRSLMVQGAGSVVNMATKGKLKSKQLTKWILKKQKEKMPWGKLVCAVAAKLLRIVRAVLISRKPYNPKIAGVAKCSLPKGT

SEQ ID NO: 318749 - protein, 338 aa, unidentified
MKVYGGIDLHSNNNVIVLLDEEDRVVYRERLPNDLQLVLRDLEPYRDTIEGMVVESTYNWYWLVDGLMDAGYRVHLANTAAIVQYSGLKYADDDSDARWLATLLRLGVLPEGYIYPKTERPIRDLLRKRSQLVHQRTSNLQSVQNLLARNRGHSLSANRIKGLTVEEVDQLLPDADLALAVKSNLAVMRTLEEAIERLEKTVKARVKLRPAFKPLLTVNGIGEILGLTIMLETGEIGRFAKVGNYASYSRCVGSKHLTNGKLKGRGNTKNGNKYLAWAYVEAANYAVRYSPKIRRYYQRKAARTNGIVAIKTVAHKLARACYYILRDQVVFDVNRAFA

SEQ ID NO: 318750 - protein, 354 aa, unidentified
MIKYIGFDIDSKKTVACVVQSGQKDLYETFGSDIVSMKKFLQRQKIDNSRVELVFEISGQAGFLYDCLIDCVDEIKVANPSKMTWIYRTVKKNDRIDARKMAVLLSIGELPDVHMPSRQVRQWRQTILHRKKIVCKVVSVKNRIRATLKSQGYLKSLHKGSWWKKLNRMWMKNICDEAVGSLDLWHMHVSNLLDELELLEEQLKRVTAYLDEYLCTETGGVLLMSIPGVGPRTAEAVLAYTDDIRRFGNYKQYCSYFGLVPKLDESGSTRRIGHISKRGPSVVRWLLCESSWKVIRKSRSIREFYERVKSGQDSRKKIAIVAVCRKLVCIMRAMLLSGELFNEELVDEVISKAA

SEQ ID NO: 318751 - protein, 427 aa, unidentified
MNYNQNHKLSQITPETLIVGIDIAKNKHVARAQDDRGFEFGKRLIFDNRVHGFEQLLNWVSRLQKEHRKSELIIGAEPTGHFWLSLAYYLKAKDINFVLVNPMHVKKSKELDDNSPTKNDTKDARVIAQLIKDGRYSVPNLLDGIYAELREGIKLRDQLVKQLIIIEGRIQNHIQRYFPEFNDVFKDWEGKTALFSLRNFPFPSDLRGVTPEEVLAQWKTTIKRGVGIKRATQFIEKARKSVGIEVGLRFARKEIHSLLDQYELYQSQLTELDMEITDLMKDIPGAQEMMNIKGLGSITIATFLSEVGDLKKYDHPQQLVNMAGLSLREHSSGKFKGQTRITKRGRKKLRKALYLAVRPLVASNSTFKTLHRYYTTRSVNPLKKQQSLIAMCGKLLRVLFVIGRKQCEFEGSKLLQGLTQMKELQAV

SEQ ID NO: 318752 - protein, 350 aa, unidentified
MKKILKQVVGIDVAQKELVVALGRMNEDLDLELYGHKSFGNNQKGFLSLLLWVKKQTDAATGVRFVMEATGVYHESLAYFLDDKGYKLSIILPNKISNYARTLDIKTVTDKTASEAITRFGLERKLDDWQRPKPLFKSLRQLTREREQLIQIRTMVKNQLHAEQTEAWPNAGSISRFKTQLALLNKQEQQIKTEIAILSKQDSQVHASIELISTIPGIGTLTAVTILAETNGFELIGNKRQLTSYAGLDVKEKQSGTSVKGKARISKRGNKYLRKALYMPSLAAIRHNEWFKTVYARLISKHGIKMKSAVAIQRKMLELAYIIYKTNTAYNKDHYKKLESNQGCSLNRLA

SEQ ID NO: 318753 - protein, 411 aa, unidentified
MKTLHKRCAGLDVHKTEVVACLRVVNRGKANYELRRFPTTTRGLIELGDWLEQAACTHVAMEATGVYWKPVWYILEDRFQQILANEAHIKAVPGRKSDTHDATWISDLLAHGLIRASFVPPQPIQVVRDLTRPRKQLTREIVQHSQRIQAVLEEANIKLTSVITDILGTSGRRILKAIVAGETDPIKLAELGGPRLAATKSQLADALLGRVRPHHRFLIEQHLKTIEQLEETITAFDGRIEAALEPFRDAIERLKEVPGLSETSVQILLAEIGTDMSRFPTAGHLLSWAGLIPRLDESAGKRRSTRVKKGAPWLKPVLVQCAHAAAKKKNSYFQAQYLRLKARRGPKKAVIAVAASILKTAYHMLADGTCYQDLGADYFARRDPRRVVAKLVSRIRSLGYHVEVNVAEVAA

SEQ ID NO: 318754 - protein, 347 aa, unidentified
MKHYAGIDVSLNSSSVCVVDESGKIVREVKVASEPVALINWFKSLCTRMERIGLEAGPLSQWLSGALRESGLPVELLETRHVKAALSAMPVKTDRNDARGLAQLMRLGWFRPVHCKSIAAQEVRALLTARKLVQSKLYDIEMSLRGILRGFGLKVGPTTSQSFAARINHLVAGQASLETVAQALLSVHAAALREFKILEKQVRQIGRADERVRLLMSAPGVGPLVALTYVSAIDDPKRFTSSKAVGAHFGLTPKKYQSGETDITGRISKIGDSTVRAVLYVAAHIILTRPIHGGALKSWAMRLAKRAGMKKAKVALARKLAVVLHRMWVSASTFDFEKANGCMRAAA

SEQ ID NO: 318755 - protein, 397 aa, unidentified
MCCVRVPSPEAPGKRLQEVKTYQTMTRSLLVLADRLAELGVTRVVMEATSDYWRSPFYLLEAHGFEVWLVNARDVKHLPGRPKTDRLDAVWLCKVAERQMLRPSFVPPPPIRRLRDLTRYRADLVAVRTAEKQRVEKLLEDAQIKLSVVASDIFGVSGRDMLAALIAGERDPKVLAQLARRRLRAKLSLLEEAFYGRFSDHHGFLLQTMLARIDQASADIAELDRKIEEEIAPFAAAADQLDEITGVGWAAAQVIIAEIGVDMGRFPTAGHLVSWARFAPGVKESAGKKKGKATTGHGNPYLARVLGEAAVSAGKTNTFLGERYRRIARRRGTKKAIVAVGRSILIIIWHLLSDPDARFHDLGPGYYDTRTNADRQKRNHIRQLEALGYKVTLQPAA

SEQ ID NO: 318756 - protein, 443 aa, unidentified
MSRKKRTHLRGTRGQAFADKIRGLPLDRILCVSLDIHKYFHVVMLHNALGEIVTPTFEIDIFKTGFDQLGQAMDAAVAQTHAQVVLLGLEPSSHYFENLARHLLERPQPVTLINSFAVKQNRDQQMMQREKDDEIDTAAIGDLLRRGEGSPFRPAQGVYLQLQQLDRVRLGKVKIRTMLQNQILGHLDRICPGLVILGDEATERYTPLFKMNFWACQTLQHLIRVCPDPRQLAAMSPQDLVTAFHARGYRMGRLAAAKIIAYAKTLLLPEAALIAIRTELLQHDLALLEEVERHIAQLEERLVALVAETPYQVLTKLKGLAPIQVASLAAAIGDPSHYQYAGQVFRRAGLVCGRDDSGTRQHKGKGKHVVKVGDVYLRRALMNALATLILHQPVLLAYYNQLKNSKPNGVARVATARRALGILWATLRDQRPATLVLKRGATL

SEQ ID NO: 318757 - protein, 361 aa, unidentified
MRDVGIDYHKHYSVLCATDERGQELKQRRIKGNTAAGFAQFFSELGEQNKVVMEACWNWGWLYDLLGQIDQVGEVVLAHPYKTRLIAEAQIKTDRIDAQTLAKLLRGDLIAQSHAPSAATRARKHLLRQRLFWVRLRTMLRNRMHAILDRQHGLERPQLKNFFSRRGQTWLEGVELPCAEDQPLLKQDLEVAALLDQKIKELDRAIGQSQSVEEKLLESIPGIGPLFSSVIATEIDGIERFHSAAKLAAYAGVVPTTHASGGRVFHGRLLWQCNKWLRWALIEASWTAIQFSGYFGAIYRNARARGKNKHVAITMVAHRMAKIIWLLLKEKRPYTETLPDRSEDQVTVAPRRKALSLASSC

SEQ ID NO: 318758 - protein, 358 aa, unidentified
MSERTFIGLDVHARSVRAAVLDGLTGEVRNLEAPVPTKKLVGWICAQPAPQVVAYEAGPTGYVLARALQEAGVRCVVAAPSRILRAPGERVKTDRRDALKLARLLRLEELVAVRVPDLTEEAARDLVRAREDARVDLMRHRHRLAKLLLRRGIVWEQRAWTGTHELWLARQRFDETPLQLAYEEALAAMVAARDRRDVLDRAIAEEACKEPWAAVVARLTCLRGVSTLTAFGLAVEIGDWRRFSGRGLGAFLGLVPSESSSGATRRQGSITKTGNSHLRRLLIEAAWQQRRPAGKSVRVGLARVSAPAAVRERARLAERRLYRRWMRFDERGKRSPVAAVAIARELAGWCWSLAVMEL

SEQ ID NO: 318759 - protein, 367 aa, unidentified
MKSPASLKYNGAVNVNHNLKGLVMATYYIGADVHSNNTDLAIEHRGQIVARYSVPTSIPSISAVLNSIQGKKILAMEEGPMAGWLYRNLHEKVDKLVVSEPRRNKLISSEGDRDDKIDSGKLAVLLRGNYLKAVHHTSDSHRAHLKHWVNLYHDRVRDAVRDINKIRACCRMHGVRIPRRVVRNPVRRRAWLSELDNSVLKVQLKMLWIGYDATREQVNIAKKQFSSYARKYPIIKSWSALPGIGIIRAATIFAYLDTPWRFKKRAKLHRYCGVGLVRITSGKDKKGRPKPARLKLPWAVNRRLKNAVMGAATTAIERGDNAFKDYYKRMISNGIAPANARHSVARKLVSTMSAIWKTGNKYDETLV

SEQ ID NO: 318760 - protein, 322 aa, unidentified
MTSSKLATRVIGVDVSKDKLDISDSRGKIQKEVKNSTASIVKYIVKNIAEPGETFVVCEATGGYERTLVKAMQTAGVAVCVTNPFQVQQFARGIGVLEKADPIDAGKLRQFGELVDLQPTAPKSAEHERHEALVRRREQLLTLISMEQNRRAQSYDPTVTAMIDKILKVMKTQQKLLENEIEAMLKKAAETNPAVAVVQSVPGIGPVTTSTLICDLPELGKLNRSEIAKMAGVAPIVNQSGKRDQQRSIFGGRSQVRRVLYMAALVATRHNPVIRAFYTRLIARGKEKKVALVACMRKLLTILNCMVCNNETWRTEKVVTGT

SEQ ID NO: 318761 - protein, 364 aa, unidentified
MYASTTTVTVGLDVHARSIRLAAVRADELLEERTLPYDEEAVERTLRRWPGVRCCYEAGPTGFGLYRHLIGRGIDCAVVAPGLVPRRPGDRIKTDPRDARKLARLLAGGLLEPIHVPSRELEAARDLVRAREDARLDRMRDRHRLSKFCLRHGRILPTSSWTVVRRRWLGEQRFEFAAEQLTFDTYVHAVDLVDRRIEALERAIRETAEQGPWRALVAQLRCLRGVDTLTALALVSEIGDFDRFRNAEELMAFVGLVPSEHSSGEKRRQGAITKVGNSHIRRLLVEAAWHARRRPKVGYELARRQRGQDAAVVERAWRCQQRLYSRWQRMAGRGKPQQKIVVACARELAGFVWAIATEQPLRST

SEQ ID NO: 318762 - protein, 346 aa, unidentified
MMIIGCDFHPSWQQVSWVDTETGEAGEQKLVHAEGQAKAFYQQLAAPVLIGMEATGNSQWFIELVQELGHEIWIGDAAQIRASYVRKQKTDKRDAAHILKLVVEGRFPKLWTPNQEQRDLRQLVLHRHKLVEIRTRVKNELQHLSMNKGMQRKRRLWSRSGMQLRRELPLKPWAACRREDLLGLLAMLDQQIGKLDQAVQQAADQHPQAKLLMTQPGVGPNTALAFVLTIGDVSRFPRGKQVASYLGLIPREESSGGRQKLGAISKQGNPWLRSLLVEATHNVVRLDPGFRKQYLHRCHQKPKGVAKVAAARKLAVRLYWMLRTQVGYPEIVRIESRPPVPLVSAS

SEQ ID NO: 318763 - protein, 406 aa, unidentified
MDKPSVETAVLKTDRGGKRLYFVGIDISKFKHDCAIVDELGDVITPSWSFQNDYEGFSLLRELLGALDGEKKIGLESTGHYGQNLKLFLENNGFSFMKFNPLLINRFVRSKSLRKTKTDSIDALMIAQYMMTVEYKPYPPSFYTLKKLKSLTRFRDSLIRQRSRQMVELTNILDKVFPEFKPFFKGRFSATALYILSHYASPEKISNMNSKSYEPLRRLSRGRFSMVDFVELKTLARNTVGSAHDYLLQEMEITIDIYDQLQSKVEEIELQINDCVLGLAPPMLTIPGIGVASAAVILAEFGDLSKFSSPSKLLSFAGLEPGYFQSGISESTGKMVKHGSSHLRYAIMNCAQTVINNEPTFAVYYAKKRAEGKEHRVALTHVAKKLLRVIYTLQTKDLSYNPDLVR

SEQ ID NO: 318764 - protein, 420 aa, unidentified
MYYVGIDIAKRFHIASVIDENNKLIKKNFRIESEISDFTLFGSMLCEIDQDKSNFIIGMEATGLLFENLYLSLKTQGFRVVLLNPYQTNRFREMDTMKYVKNDNIDSQMIAALLKSGRYSEAYVSEELYQSIKSLYRHKATLMDEMKKAKRQVSTTLAVVFPEFERIIKDPFSVSGMALLEKYPTAKHYKHASGERIIKVFRNIKGNNFNLEKANHLLDLALTSVYQGNAKDERAYVILSNLRRIKFLKEEILQCEVQMSELLDESNRELDKSLSKDDEVYISDLVDNLRSIDGVSDKTIFAILSECGDINRFKDAKAFIGYLGLYPTLYQSGNSTKYGKLAKRGARLAKMAIYQASIAAIRHNDELKKLYLDKKSSGRAAKEAVIVVARKLAKIIYAIYKHNTPYNPVRVFSSKTSLSH

SEQ ID NO: 318765 - protein, 400 aa, unidentified
MLSIGIDVSKGKSTVCGMKPGGEIVYAPFEVQHTREGMSELVSLLRSSGEEVRAVLESTGSYHCPVVAALLENGIFVSVINSLRMKRFCSQSIRKVKTDRIDAMQIALYGLAYWQELQPARLPEDTYRELQLLARQYYQMTSLLIKAKVGFNAICDQVLPGMQELMSDHAGRHKLSDFVLRYCHTTHILEMGETRFRKDYCKWAEKKGYRNCERMAALIFATAQNGIPVLPNAPSTQIVITEAIRVLHTVEASRDAILTQMQALAKTLPEYSLVREMPCIGDTLAPRLIAEIGDVRRFHSKRALIAYAGIDAPPYQSGKFCANNRHISKRGNRYLRKTGYEVMQSYVMHKPANDPIFTFIEKKRGEGKSGKLAMVAGLNKFLRVYYGKVTELYRSLPAIE

SEQ ID NO: 318766 - protein, 346 aa, unidentified
MTYVGLDIHKKTISYCVRRVDGVILQQGTLAASRDALDAWMRHLPMPCMAGMEATLFTAWVYDHLVKTGLSVKVAHPAMLKAIFAGKKKNDRIDAQKLADLLRCDYFPECHIAAKDIRDRRRILRYRTLLVRQSTQTKNKLSALLMETSVPYNKQKLHHSKKYFDQLIKEQKTTMPETMPALLGLGRNVIEVLAAMDRRLLRSLESDSMLAERVQRLMTIPGVGIILALTWALEIGDVKRFPSLKAAISYCGLCGSERSSAGTSKRTPLSKQRNKHLQSTLVEAAKIAPRWHAEFAAMYEHEKQRGNRNRASLVIARKLVAYLLAIDRAERSFLPQPPSAEALAPA

SEQ ID NO: 318767 - protein, 358 aa, unidentified
MAGKVTETAVVGGVDTHKDLHVAAVVDQNNKVLGTQFFSTTRQGYRQMLAWMTSFGALKRIGVECTGTYGSGLLRYLQNAGLEVLEVTAPDRMERCKRGKSDTIDSECAAHAAFSGIRTVTPKTRNGMIESLRVLKTCRKTAISARRVALQIIHSNIISAPDELREQLRNMTRMQLIKTLGSWRTDASEYRNVTNVYRISLKSLARRYLELHDEIADLDVMIAAIVDELAPELIKRNAIGYESASQLLITAGDNPQRLRSESGFAALCGVSPVPVSSGKMNRYRLNRGGDRAANSALHIIAIGRLRTDDKTKEYVARRVAEGHTKMEAIRCLKRYISREVYTLLRNQNRQINSIPITA

SEQ ID NO: 318768 - protein, 347 aa, unidentified
MKKIATIGLDIAKNVFQVHAADTDGSTAFNRKIKRADLLEFFAKLPPCLVGLEACSTAHHWGRRIAELGHEVRLIHPAYVKPFVKRGKSDFNDAEAINEALTRKTMRFVPVKSAEQQASAMIFRTRTLAIRQRTQAINALRSHLAEFGIATAQGTTGLKALIAIANDEHDGRIPASARFALQQILKQIEFLGEYIARLDREILARTKNDADIKRLMTIPGIGPIIAVAITALVPDLSGFKSARHFAAWIGLTPKSHSSGESQALGNISRMGNSHLRTLLVTGAMSVIRSAKTAERVSPWLAKLRKRRPFKVAAVALANKTARIVWALLTRGGNYSKPGSSADVGTMA

SEQ ID NO: 318769 - protein, 417 aa, unidentified
MAFKIFRKNCCGLDVHKTWIYACIGITDSNGRTEYHQSRFSSFTNGLCDLAKWLDKYSCKEVCMESTGKYWIPVFNILEQSCMVTLAHPKYTKPQKGNKTDRKDAKWICDLFMCDMIKPSFIPPPDIRQLRDLMRFRMKLTYQVTGMKNRALNCLTVSNLKLDDVFSDVFGKSSRSIIQQILDRPGETFDVAPFVDKRCKHPIGEIQAAVDGAVSREQAAKLKICLDFIDEQQKRIKEIEAEIFRLAEPYSYALELIRTTPGFNKDPLTAIRILSEIGADMSAFPTSKHLVSWAGCCPRNDKSAKNIKGTRISRAGSYLKPVLVQIANALLKSKDHPEFRERYRRIKARRGHKKAIVAICRMLLTSIWNILSKLEPYTAKGYLADKVKDHSVVITKAQGLELLRKRGYIFKEELADA

SEQ ID NO: 318770 - protein, 346 aa, unidentified
MLHAGLDLSRKRLDFHLLDREGATVEVGSVPPDADGLRGLTERLHRHGEPIRAAIESMNGARFVHDRLELAGWQVEIADAQKVKGLAPLACKTDRIDAGVLAELSRRELVPAIWLPDPSVRAERERARWRLHLVRHRSSLKQRVHAVLLAHGKPCPVSDLFGLRGRQLLARLQLPEPWQGTVAASLRLIDELDREIAACETELRRLGADHRYVPLLLTVPGIGWVLAYTIAAELGDIDRFPSPAKLAGYTGLCPRVYQSGESDRRGPLAKQGPRYLRWALVEAATHACTHPAYRDRYQRTKTRLCKQRGAKVAQVDLARRLALAIWHILTRNQPFAPASATDPLAA

SEQ ID NO: 318771 - protein, 387 aa, unidentified
MARKRILSTLNTSIAYEAVGLDLAKTDVALAAFDSDHKEPYFIDRIPYDKLYELLANMAPTLVAMEPCSGAHQIAEQIQALGHEVMMISGRHVQAWVKDHCNGQKTDLNDAFAILNLAYDRWLTPIRGKTREECRLLALQASYRQLKGQRTKTMVHVKATLHAWGFPIRTGSFNQKALRELIDANREVFGGEMAETLHLMIDRVRDLDHDIATVLKLLTEATKRDPRASLLRSIPGFGVLTTSRWCAVMGDIARFDSPKQTMAFIGLVPNNRITGHHTETSSGREARGQGRMSKRGDKMLRSLCILGAASLCMLVRKDRLPDCPFVASIKARLASPRPWFKVLVYVAAKLVRIATALLKYGETFSFEKAGISKAVLKQWELEQAKAA

SEQ ID NO: 318772 - protein, 383 aa, unidentified
MQPTLKQDCTLDAAVLAVSLELAKGSWKVALHDGRRAKPAVHSVAHEQAAGRLVEVVQLVEATKYKWRLGAATRVVVIYEAGQDGFWIERALAALGYEVKVVDPASLPVTRRARRAKTDRLDAIGLVLSLLAWLRGERDRMQVVRVPAVAAEAQRHGVRERGALQKEIGQHRDRIRKLLRTVGCWEEVKSDFAQRLARGAVVCHDDSELPAQLRTRLERECERLALAVGQLKTLEAALMEALPEAVRERIGRLMQIKGVGQVGATRLVLELFWRDFANRRQVGACVGLVPQPYDSGESRVDQGISKQGNRRVRALLIEMAWLWLRYQPDSTLTQWFAYRTQGSGPSKRGKRIAIVAVARKLVIALWRYLEQGVIPEGAALKAA

SEQ ID NO: 318773 - protein, 370 aa, unidentified
MIHIGIDYHKRSSHIVAIDDAGEVRWDGDMPSCRESFEAVKASLPPGELVQSALEAGPNWGIPFDTLEELGLGPKLSNPLKTKLIGESFVKTDKIDATAIAVMLRAGILPLVHVPPKEVRDQKNLLRHRSWLVKFRTALKNRIHALVDRNHVQPPEVTDLFGSHGRAWLNALTLPDPDGKLLKSDLELLDTARSHVRQTEKWIDAELKANAYIPILESMPGIGKLLAALIALEVDTIGRFPTPEKFCSYSGLACSTFQTGGRGGKTFHGGLIPTCNRHLRYAFIEAAWTAARVSPHFSAYYRRLRFAKSAQDSIPAVARKLCAIAWHCLKKRRDYVEKPYLFKSGRPTRAQSPVAAHVGFERKIAIKSSC

SEQ ID NO: 318774 - protein, 358 aa, unidentified
MFTKSLKVTDFTGQHIYVGLDVHLKSWMVSIYSDEFELKSFSQPPDALKLANYLKHHYPNATFHLAYEAGFCGFWIHRAFKEQGIECIVIHAGDIPSSDKEHKRKTDGVDSRKIARGLKNNELNSIFVPGEQQEADRMLIRGRGKEVKDLTSIKNRIKAFLKIYGINIPENFTAGNWTNSFTEWLNQLSFIEPSSKLLLQNYVQQANFLIAQRKQADQQIQALARGSYYANRVKLLTTIPAVGILTAMTFLTEIGDINRFKNIDHLCSYCGLAPDCRNSGQTERIMGITRRGNAILKTILIECSWMAIRKDPALLLYYKQLLPRMNGNKAIVKVARKLLNRIAYVMRHQQAYVIGLVA

SEQ ID NO: 318775 - protein, 341 aa, unidentified
MKITTVGIDLAKDVFQIHGVDAQGQVVLKKQLRRVQMASFFVNLPQCLIGMEACGSAHYWARILQDQGHTVRLMAPQFVKPYVKTNKHDMADAEAICEAVRRPNMRFVPIKNVEQQAVLSVHRVRQGLIKARTAQANQIRGLLSEFGLVLPVGISFLYQRVPILIDQAKDELPGMFQELIWRLLEHLKDLDRQVNELERQINVWHRSNKLSRKLEKVPGIGPITASALVASIGDAKSFANGRQLAAWLGLVPKQHSTGGKSNLLGISKRGDTYLRTLLIHGGRAIIRCAALKPPQANSWLARLLARRHKNVATVALANKNARIVWALLAHDREFQVDYAGA

SEQ ID NO: 318776 - protein, 425 aa, unidentified
MSEKDYNKQVTKRQRINKTTLIVGVDVGNAFNAVGFMNKDGKVLGHRAKLYNNREGFEQFIEMIEGLKAKHHLQDVLIGMEPTGHYWRKLAYFAKEHGYEVRFVRTTALKHHRELDESSSAKSDQRDALTIANITREGKYIDTVIEDGVLRQLRALSKARERLLRYSVSAKNSLHATLDDYFPELHEIFWSMGSRSLWVILDQCPFPEDVVLMKASTLEALIAKSSRKKAGSSQKAKALYEAAQKSIGMKQIGSADRDRLKVCLEEVKRTVLALKDMDRQLKLMVKDVQSASYLMTIPGIGPLSAAVFLGELGDPEHFHSARQIVKYAGYDPQESDSGSWVSRKFISKKGRWLLRKYLFFMSMRVVVLSKYFQEYYQRKLETKNRVGQQPRRKEILCAVAIKLIKVIFALLRDKRGFEDLVSVAA

SEQ ID NO: 318777 - protein, 344 aa, unidentified
MEQYAGIDVSLELSSVCIVDAQGKIVKEAKVASEPEALIGFFETLGFAVKRIGLEAGPLSQWLHAGLKRAGFDAVLLETRHVKAVLSAMTVKTDRKDARGIAQLIRMGWFRPVHAKSIGAQEIRALLVARKQLLGRLIDVELSIRGILRGFGLKVGPVTRKNFEVRIRELVTGQAMLERIVAAMLSARAALKAEYGKLHKAVLTIVRDDTVCRRLMTVPSVGPLVAITYKSAIDDPHRIAKSKAAGALFGLTPKKYQSGETNVTGGVTLAGDEMVRTALYEAANVLLSRITRFSKLKRWGMDVAKRRGSKRAKVALARKLAVILHRMWVDGTTYRWAEAGAITA

SEQ ID NO: 318778 - protein, 428 aa, unidentified
MRITRRADKINLKHVIDVSTDVHKETLCFYFEINGHEYSDECPNRTTSIEKRLKQYHGIAQEHGKKSLRIICEPTGQYQNKLFRTARRLGFLTCYVNAESVAKFRLIESNDMNKTDSKDPRVISSLGKLNKTLRFRLLGEEYLMLRKLHKLYDETDVSLTSLRCRISKLLLELFCDYSMKKDFLYSRSGLCLVKQYGCNPFRIVADGFSVFCRRMKKSVPRIRTKTLERLWGDACSSVLNELPAGYVSILENRLQEYIEDYYRELERKDEITKQMVDVLKYLREKDPNIPPPTPHVISEKNLARLLGETGNLQDFSHWRKLLRYAGMNIRMRQSGTYKGKNKLSKKGRPLLRKVLQQIVLPLVRKGYLYGEVYHRKKEQEKRPGTMAMAIVARQFLRKFYGWYRSGNAFDEQRFFICESHYTRLAQAA

SEQ ID NO: 318779 - protein, 467 aa, unidentified
MKKSKMEMDIINPHCAGIDIGSRSHFVAIGQAESDVKEFGVYAEDLDNLCLWLKDNGINSVALESTGNYWQNLFRQLVKNGFDVVLANGKFTKNAKGKKTDVKDSRWIQKLHTLGLLTSSFLPDHQTEVLRTYCRHRTKMLEQKADTSHKMQKYLKLLNFRLDVVVRDVTGLTGLKIIDAICNGQLDPVELAKLRHYNCRKSEEEIAKALHSNERTDFLFGLKQEYERFLFYKSKIEECDLQISSFLDDHIIQMEDATGEVPEAKPYKRVNKNAIKGIDLNVVAFQYFGGIDLFAIPGVSHSTVLTIMSEIGAEGFNKFKSAKQFASWLRLAPNNKISGGKTLSNRIPKGSNRLKIALRNAANAIGRMKDSYLAKFFAKIAFKKGRQTAITATARKLAVIIWNMIVNQVQYASPEQYLFLDQKRRQIALLRKKITKFGIDPNELGLFTRPQYEEKYRKKSIDNQRLS

SEQ ID NO: 318780 - protein, 405 aa, unidentified
METKTSCSSDKDQGEIVSTYFGIDLHKDQITWHAILVSSNGTIGRQNGMVPTDRILEDFIPLLSGSKSYAVVEASSSSFFFYGQIASHCEKAIIVNPSAFRELYMTGKKTDRIDARKLADRLKYHIEMGKEDSNFPEVYIPDAEALEVRRLVTMYEMLVKQGTQIKNRLKAVFTAKLISEYENVLEGTLDNVLTDTRLDRADKAIIKTLKNIHDTLQLEKKAIKDEILAIGSKRFRHEVELIIGVSGISSLGAIIFMSDVVTVDRFTSSKRITSYLASVGKVDASGNTIRNGGLNKRGRRSAYRFILQGLEHIVSNNPNFIQFKEHHARTRANKVRAAIVRKTFVTLYYMLKNNEPYRFRDERCYNRKLKEFEKLFSENSLNSSLIEAYTDCSYRESIFCSIMRI

SEQ ID NO: 318781 - protein, 322 aa, unidentified
MLYVGIDISKLIFDVAILYNGSYQNMQFTNNSEGFKALFKWVKSFRKEAVFCMEATGIYGLALAKYLVQKGARVIVANPIKTNAFAKMEMSRNKTDKADAQSIARYCKHLDDKGEITKNLFKPKGEAFERLQSLITRLEQLDKITTQENNRLGVSLDKEAVRSIKSIISHINKQIIKIKKTLKEIVKQDDTLKQQVDLLTSIPGIGEKTAWSILAYLGDISLFSNAKQVTSYAGINPRIEQSGTSINKSSLSKIGNKRLRKALYMPALTATKHNPLTKDLYERLQQKGKPNKVALCAVMWKLLVLAYGVLKSGKAFDPCYQR

SEQ ID NO: 318782 - protein, 339 aa, unidentified
MGYYASVDLHGDNGYYGVADETGKRVFEKRIANDLPTVLKNLEPYRAQLTNGIVVESTFNWYWLVDGLMDNGYQVHLANPAAIEQYEGVKNTNDETDTFFLIELKRLGVLPTGYIYPKETRPVRDMLRRRMTLVQQRTAHILSYQSLVARQSGQAISADKISKLRVEDLAELYEDPNLRLMGETSIDVMRFLSGKIRDLEKSIEQQSRLTPAYEKLLTVPGIGKILALTIMLETGPIGRFADVGKYTSYCRCVRSRCWSNGKAKGTHNRKNGNRYLSWAYVEAANFIRRYCPEAKSWYQRKAARTNVVVATKALSSKLAKACYFIMRGQVDFDVKKIFG

SEQ ID NO: 318783 - protein, 363 aa, unidentified
MEVAGRFVGIDLGKRTYEMCIVDRKGKISRTGGKTDFAGIDRLCEKLNGDDAVAIEACNLAFRIERAIRKSVGCKVCIMNAGKLAVIYMSTRKTDKEDSLKLAKLLKTHDEDELPIVAPPSDEEWERRKLLSEYRSLKCQRTKEINKLHAIFEHNGYTQFVRKDICSEKNRANILPLLKGYEKEEAERLVERLNLLEKQIERLLQKINAEVENDGKIQKVMTVPGIGPITALAYVAYVGDVNRFDNAHQVSNFIGFVPKVDNSCTICRSGHTTKKGNPLLRSLLVQAAWSTVKSKNGGALRDKYKYMAESRCIGKGKSIVTIARKLGELLYLILKTDQEYKPQKFITPELKISKLAEDALECS

SEQ ID NO: 318784 - protein, 345 aa, unidentified
MEQIIRIGMDTSKHVFQLHGVNAAEVPILRKKLRRKEMVAFFEKLAPTVIAIEACGASHHWARLLQSFGHTVKLIPAQLVKPYVKRGKNDAADAEALCEAMSRPTMRFVPVKTSDQQAALMLVGVRDRLIRNRTQLANTIRGHAAEFGLTAAKGMAHLVPRLDRIQADESLPALARELFALQAKEYLQMQAQIKEIDGKLTAWHRADECSQRLAKIPGVGPIGAVLLRMKTPDPELFRSGRQFAAWIGLTPQDHSTAGKTRLGVITRAGDEGLRSVLVVGATAVIKQAQRSGKASPWLAALLKRKSPKLVAVALANKMARIAWKMMVTGETSMANSAPAVVANVA

SEQ ID NO: 318785 - protein, 343 aa, unidentified
MTHFVGLDVSQKMTAICVVDNAGRRLWRGQCPTAPEQIAAMVRRHAGDESCIGIETGAMTPWLVHELRALGLEVICLDARHARAALKMQINKTDQNDAEGLAQIVRTGWFRSVHVKSFDSHRARALLGARAQLVGMTTRLSNHIRGVLKTFGLLPGAMRGLRFDRKVEVLLEDRSDVAPIVRPMLVAWRQLREQISAFDKAIRVLVRSNSPCRLLMSVPGIGVLSALAYVSTVENPARFSQSRSVGAHLGLTPRQYQSGDVDRSGRISKCGDTLARTLLYEAAVVIMTRVKKASELKDWAVAIAKRSGVGKARVALARKLSVILHSVWRSGKPFRWAERAIAA

SEQ ID NO: 318786 - protein, 281 aa, unidentified
MKYLPVGVDIAKSLIQVHFIDEHTGEVVDKQLRSKDFLSFFSNREPCLIGMEACGGSQHWARELEKMVHSVRLMQGRFVKAFVMGNKNDVMDARAIWGAVQQPGKAIAVKTEEQQSILVLHRSRRQLVKFRTAQISALHGTLLEFGEIIHKGRAAMDKELPLALERMKAKLPPYLITVLEDQYNRLNELDMLIDGIEKQLNSVARQNETCKRLMEIPGVGPLIATAAVATMGEASAFKSRREFAAYVGLVPKQTGSGGKVRLLGISKRGDTCLCMVPGLRH

SEQ ID NO: 318787 - protein, 313 aa, unidentified
MSLYNNYIGIDIGKFSFVVAVYGSKKTNEYENSSSGIKSFLNDFNNKLKTSLCILETTGGYEQRLLLTLCHEHVPVHRANTCKVKRFIQSYGNDAKTDKLDAHALALYGYERGARLELYTLPSLNALELFELIQRRNDLKQILVAEKNRMKGPRAERIKKSCLIIINTLEEQLTLITKEINAMIEEDEVLKAKKAILKTIPGIGSIVANELLVLLPELGTLTRRKIASLAGLAPKANDSGQFSGYRRVNYGRSGVKSMLFMAAMAARRSNSYLKAFYEHLTSAGKKKMVALTALMRKIIVVANAKIRDLNMAT

SEQ ID NO: 318788 - protein, 392 aa, unidentified
MRYFIGIDVAKFKHTACVIDTDGIALVEPFDFTNDIIGFQSLLKNIKPFLKKKHLVGMEDTGHYGDNLRNFLLEKQYKVVMLNPIVTSHIRKASNKAKNDRIDCFVIANTMMNPNFYRDQQVQSIDYATIRQLTRMHHTHTEEINRYKCQLQKSIDIVFPEFNSLLNTKYSKTYLEILDTYHSAYTIANTDIRLLRNTLKNDGLGRSVSISAEQLKKSAKESIGQYNLAIEMDIPFLISLIRRLTSILGEIDKKIEEFSHQLNSPILDISGISHFSAMSIISELGDITYFSNEKKLIKFAGVNPCVYESGTYSMTHTRLEKKGSKYLRKTLYQIIDSVIRFNPIFQAFYQKKISQGKRYRCAQGHCIRKLLRVIYKIISTGAGFDSAKLKSS

SEQ ID NO: 318789 - protein, 425 aa, unidentified
MHTKQYSKQVQKRKKIGNRTLVIGMDIGSAFNAACFMDKEGNVLGRYPKIYNSRKGFDYFHTMVEQTKRKHKLTRVFIGMEPTGHYWRKIGFFAKEKGYEVRFVRTTAVRHQRELDESSSAKSDIKDAFTIGNIAREGKYIDTVIEESVFRNLRTLAHVREKTVRSSTSATHVLQAVLDDYFPELRDIFWSAKAKGLMALLAHYPFPEDVRSAGLAAVTALLEPTNKRRRQAREKAKQIYQAATESVGLATIGVADRVRLATALEGVTRSEARIKEIEHEIKELLKEIPVAAYIQSLPGIGPVSCGIFLGELGNPDYFKNPRQIIKYAGYDPKEDESGLRVGRKIISKKGRWLLRKILFFMALGVVQHSSFFRGYYEHKKKGIHHPLKKKEALCAVILKLVRVIFALMRDGRMFTEELNRCREAA

SEQ ID NO: 318790 - protein, 409 aa, unidentified
MNVIHPRCAAIDLGKDILVAAIRIQEGAQVDRECRTYGTTSEQLLDLSRQLSDRGVTHVVMEATGSYWKSVWRSLERDFELVLAHPASVRNLPGRKTDMNDATWMADLLAHGLIRGSFVPPAEITAIRELTRTRKQFVREIARHTQRIQKILDVANLKVTGLITDVLGTSGRAIVKALIAGEANPERLAELAHPRLRVKRERLVEALRGHLTAQQRSLLAMHLNLVETLESSIAALDREIESAVEPFRPIVDRLTAMPGFSEVSAPALLGEIGVDMTRFKTHRHLVSWARLCPRLDESAGKVHSTRTLKGAAWTKTLMTQAAWAAVRTNNSYFQAQFLRLRARRGAKKAVVAVAASMLTAIYYMIRNHTEYRDLGRDYFQKRDRARNARRFVTQLQRLGYTVHITEATA

SEQ ID NO: 318791 - protein, 343 aa, unidentified
MNVTTIGFDIAKGVIQVHGVDAAGTVTLRKRMSRAGALKFFGGLKPCLIGMEACGGAHFWARELAGFGHTVRLISPIYVKPYVKRSKTDAADAAAICEAVSRPHMRFVPIKSREDQALAQAYKTRGLLVAQRTALVNALRAHLTEFGIVAPLGPAGAAQLIALVRTDVEPLPELARRTLLELADMIEATQARIAAFDARLRKLTATDEASRRLMKIPGVGPVAAGTLRALAGDVTRFRTGRDFAAWLGLTPRQNSSGAKVRIGAISKAGNRELRTLLVMGQMAVLRYALANPAKASPWLTGMIKRRPRLVVAVAMAAKTARVIWAMLARGESYRPLRVSTAAG

SEQ ID NO: 318792 - protein, 337 aa, unidentified
MEHLAIDLGGKESQICVRDSMERILEEKRWPTRKLGEYLSTRPHSRVILETSAEAFAVADLARKAGHDVRVVPATLARTLGVGARGIKTDRRDAQALSEVSCKVELRSVHIPSDQARAWKALCNSRDALVSSRTKLTNTVKSQLRGRLVSSCPRRSKAMPVAIRAHWTALEGVVPPHVERLLVMIEALDVQVREADKEIKLLVKGNEICTRLTTVPGVGPITALRFVATLDEVKRFGTAHDVQSYLGLTPGENSSSSRVQRTRLTKAGSPQMRWLLVQAAWSTRRCAPNHPIVKWATKIAERRGNQIASVALARKLAGILFALWRDNSTYSPLHGAA

SEQ ID NO: 318793 - protein, 463 aa, unidentified
MSKQEPKGKQQRSVQKKVDWKALEIVHPDAAGIDVGGSEHWVAVSPDRDPEPVRRFGCFTADLREMARWLAERGVRSVALQSTGVYWMPVFEILEQQGLEVYLVNAQHTKNVPGRKSDVQECQWLLKLHAFGLLNNSFQPTDEIRIARSLWRQRANLVAEAGSVIQRVQKGLTEMNVQLSNVLSDLSGVSGMKIIGAILEGERNPWELAALVRPEVKATQENIAKSLEGNWREELLFILRQQVDLYHVFQRQIANCDLQLRKHLQSFGSKVDLRAQPIGPRPKGKKSSRNAPAFDLRSELYRITGVDWAQVNGIDVLTAQTVMAEAGADLSAFPTERHFTSWLGLCPSNEKSGGKILNRRTRKVVNRATVAFRNAAMTLLRSQSYLGAQYRRLRTRLGAPKAITAMARKLACLFYKLIKRGQQYVDRGTEYYEARYREQQIRSLTRKAQKLGLQLVIPDTPAA

SEQ ID NO: 318794 - protein, 325 aa, unidentified
MQTQTNYTGIDISKLFFDVAISNQNKYLYYKFSNDEPGFKALIKLLCPDSHIVMEASGPYYLKLACYLDDQGLAVSVFNPLVVRRFCQMRMSRTKTDKKDAGMIAEYGKTEKPGLWQRPQQHVITLQQMDALLAHLNKEHTALSNQLESFKNSGLLDGQLEKKIVKELAHKQSFLKETIAAMQLLAEQHYAQMLANLESIPGVGKKTAMMLVIISGGFSRFNDYRKLSAYIGICPRIYDSGTSVKGKARICKMGMSKIRASLYICSWSAKRYNKACKELYDRLLAKGKAKKQALIAVAGKLLKQAFAIATQKTKYNENYSNIICF

SEQ ID NO: 318795 - protein, 338 aa, unidentified
MNKFSGIDLHSNNSVVVVSDVADRVIYQRRLPNDPVQILAALAPHREDLVGVVIEATFNWYWLVDSLMKDGYQVHLANPAAIKQYEGLKYSGDFADAAHLAQLLRLGLLPEGYIYPAEERPVRDLSRKRMQLVQCRTAQILAIENLFSRHTGGQMRGEQVKRLDQTQVSGFRFAPDVALAMQANLAVMQTLQEQIGILEKRLMDRVKLQPDYMLLNSVPGIGPVLATTIMLETGTISRFTAVGEFSSYCRCVDSRRESNSRKKGEGNTKNGNKYLAWAFVEAANFAMRSCPEARRFYERKKRARNGIVAIKALAHKLARACYHMLREHKPFDVTRCFG

SEQ ID NO: 318796 - protein, 386 aa, unidentified
MIYVGVDIAKHTQYACVADERQKIITAPFSFSNDEAGYAKFRKAFRKYPKDNVIVGLEATSVYGENLIAFLADLGYKIALINPIETAVERKKKIRNAKTDKIDTKIICKYLATEEYRLLQPKELETLRLRGLCRFRQTLKKSNCRLKTQLVSYLDVSFPEFAGAFSTIHGKGAYAVLSEFPSAQAVAKANVSKLAQLLSDASRGKLSRARAEELKTLAKRSVAAKDCDMGFQVKNTIGQIRLIASQLQDVETHIGKIFDELDSVIRTVPGIGAINGSMILSEIGDVKRFSNPGQLIAFAGLDPIVRSSGQFRARTTRMSKRGSSVLRYALINAAWNVSLNNATFKAFYDEKMAQKGRHYATLGHVAGKLTRVIFKMLKDNVTFDLP

SEQ ID NO: 318797 - protein, 401 aa, unidentified
MNAVGIDVSKGKSMVCVMRSFGEVVLEPFEVLHTAQNLNDLAGKLKALDGETRVVLEATGNYHKPVAFVLHDAGLFVSVVNPVLIHDYDNNSLRRVKTDRKDAVKIANYTLDKWTRLRQYLPEDDTRLALKNCYRQYQQAVAIRTMLKNNLISSLDLTFPDANKLFTSPAKSNGCEKWVDFIGDFWHSECISSLSANAFAKKYLKWCQKHGYVFTRSKSDEIYACAVNSASLPKSPTSKLLIQQQVAQLKAVSQSVAAFRQEMLRLSQQLPEFDTVMEMYGVGPSLGPQLMAEIGDVRRFSSKKSLIAFAGIEPQPNDSGKVVGNDKGISKVGSAVLRRTLFLIMTVILQTQPQDEPVFQFMNKKRSEGKPYKVYMMASANKFLRIYYARVKAVMDSERSQ

SEQ ID NO: 318798 - protein, 425 aa, unidentified
MEVIHQRCAGIDVSKKDAKVCIRVQGSGRRKTASTVSTWGAMTADILALREHLIEQKVTGVVIESTSVYWKPFYYLLEDVLDVVLVNATAARNVPGRKTDVSDAAWLADLGAHGLLRASFVPPEPIRILRDLTRARTTIAQARVKEIQRLEKLLEDAGIKLSSVATDIVGVSGRAMLEALVAGQTDAAAVADLARRGLRAKIPALTEALRGRFSDHHAFMVRLYLDRIDTHNADITRLTERLEEAMAPFRATRELLISIPGFSTTVAEVFIAETGADMSVFPTAGHLASWAGVTPGCNESAGRVKSSRTRHGNAHLKAALGTAALSACRNADTYYGARYRRIADRRRPRATTGRRQSAAGSIAIVALEHKMLTDAWNMLVDGTFYHDPGADYYTRRHPTKTKNNAVKQLEGLGYHVTLTPHTEIA

SEQ ID NO: 318799 - protein, 427 aa, unidentified
MKDIMAGIDLHSNNLMLALVDKDGRRLMHQKLACDLKSVEQALAPYRKRIDTIAVESTFHWYWLVDGLQALKYHTVLANPAAIQQYEGIKQTDDKHDAFWIAEMLRLKILPTGYICDPKLRPVRDLLRRRLSLVRKRVALILSLKSLHLRVHGQPLSLSEVKRMEVDEIWRLFEHPADQLFAREELRLIHEMDVSIDRLEEQALKQAVKMPEFDSLLTLPGIGKILGMTIALETGDPKRFAGAGEFASYSRTVRSERTSNGKKKGENNTKCGNRYLAWAFVEAANFAQRYDAQARSFYERKKAKTSTMVATKALACKLSKAAWHVMRKKISYDAQRVFGQPADKASVSTPQAKGNAAGLRKVSFSQKTEVEKGGQKQAGAKASPVENSQLSDQAALRLHSCRAVSSAGKQKGKETFAARKSKKVKAM

SEQ ID NO: 318800 - protein, 352 aa, unidentified
MLIIGCDLHTRYQVIARLDTESGEMVTRRLQHENGEARAFYASLPAAALVGIEATGYTPWFERLMAELNYELWVGDAAQIRARAVRRQKTDTRDAEHLLELLSTHRFPRLWIPSPEQRDLRQLLKHRHKLVRMVTALKNQLHFLAMSQGVCRKSKLWSERGRQELESLALDPWASRRRQELLGLLDQLQPQIAELDTAVAQAAAANPAAVDLMTQPGVGPVTALAFVLTLGPVERFQNSRQVVSYLGLNPSEYSSGGRQRLGGISKQGNSMLRWLLVEAAQTAARFDPELRRKYQRLKFRRGGSVAKVALARRLAVRLYGRLRQSKTETQPVRMPGSSGSGVVLPPAAGSRQ

SEQ ID NO: 318801 - protein, 344 aa, unidentified
MIWVGLDVHQRFSRMGCFDPASGEVRDLGSVSNNASALEEALEELASPRTVVLEAGRSSYHMAGLLESIAEEVWIVDPGEVRRLQHTISKTDRRDAAALAWWAAKGVLKPQWRPDGQTMDLRELTRGKTALTRMSTQVRTMIRMLLARHGHECPHRDLMSERGQLWLEEVELEGHGGQMLAGLREILVVVQSKADNFERLVEQTSKQHPVAQRLRTIPGIGPFLSLALAVEIGDINRFPGPAQLRGYSGLVPAVYQSGDKDARGPLTKAGNKWLRYAAVLAAQRIGQMKEPDPRLKRIFLSVAFRHGRNPGKIAVARRLLDLIYHLLKKGQDYRAPKPRVAIAA

SEQ ID NO: 318802 - protein, 449 aa, unidentified
MKKEDQKSEIKKKKHSQGLPVINPFAAGIDIGDEMHDVAISDGISGFEVRQYPSFTEDLGDMVNWLKSEGITTVAMESTGVYWLNLYLMLEEAGIEPYLVNAKHAKNVTGRKKDDTDAIWLQKLHCCGLLQKSFQPEGSIRVLRTYVRQRKNLISISSDSTRRMQKALELMNLKIHTVISDILGKTGLRMIRAILSGERDPDELIKYKDSRIKASDIDLKKSLTGIWKDEYLFMLKQAYDEYMFYQSQIDECENRIRELLLSMAAKILDGDVTNLSVKKKSAKNQFRYDIRPLLSTIAGVDLSAVEGISETSSLEIISEIGVDMGKWENSKHFVAWLNLAPNTKITGGKIISSKMQKKKNHAGQTFRMSANSLKKCKSSLGDYARKMKSKLGKRAGNVASAHKLARIVYKMLTDKCQYNPEIISLFQEKWKEKRIAYLENQIMRLKRAS

SEQ ID NO: 318803 - protein, 399 aa, unidentified
MKGRAGSGARGDAACAGRAAGSRPSAPNRKVEDRADSGRAAGQFETEVPTVSNPTRWVGVDLHRRRSQIAIIDEHGQLALSRRIVNDPETFRELLGDPEGTHVALEATYGWEWLAELLQEAGYEVHLAHPLRTRAIAAARVKTDAVDAKTLAHLLRTGLLPEAYIAPPELRDLRELLRHRAVLTRMRTAVKNRVHALLARQGILPEHTDLFGKAGREFLAGLELPDGSRRRLDSLMALIADFDREITATTREIDARAKADERVPVLCQIRGVGRYTAMLVIAEVGDVSRFPTARHLCAWSGLAPSVRSSDGKARLGHISRQGSPALRWALTEAAQHTPTGGGPLRDMFERIAKRRGRNIAKVAIARQILTLCYYGLRDGEIRCLTHQPTNDHDELADAA

SEQ ID NO: 318804 - protein, 347 aa, unidentified
MRFYTQTHRYYCGIDLHARWMYLCILDPQGEVLLHRNLRACPEAFLKAVEPYRQDLVVAVECIFSWYWLADLCAQEGIEFILGHALYMKAIHGGKAKNDKIDSQKIAVLLRGGMIPVAYVYPPEMRSTRDLLRRRTYLMRKRAELLVHVQNTNSQYNLPEIGKKIAYRANRSGVAERFSDPAVQTSIAADLSLIDFYDTLLNQLELFITSQAKQQDHHSFYLLRSVPGIGKILALTLLYEIHDIARFPRVQEFVSYCRLVKCSRQSAGKNYGFSGKKIGNVHLKWAFSEAAVLFLRHNPEGQKLLARLERKHGKAKALTILAHKLARAVYFILRREKAFDLTQFLAA

SEQ ID NO: 318805 - protein, 488 aa, unidentified
MKATKTPSVFDSQNLELRKLYEDAASPRAILCVALDYAKSKHLALCCDGNGDILKAPFPVRNNAEGIDFLVEQIEASARRRNIPKKHIFIGGEDEAPYVSNFISALRARGYLVVRVNAFEAQHNRNGRLASTDAIDLSGIARTMVSRRARTTTPPDDAVYVELREAARFRRILVRDLTAASNRIHAVVDQLFPGFLDHSRSRLTPFTEASLDLMAERFSTMEIARRKPAALAKFLHLRRVHDPEETAAAIIALAREALPPDPTRIAGLQRTLTGLVELHRCLKRNALDLRAESARMLATTPYALLTSLPGIGFVLAAGIAGELGPPEQLRSIESLCAYAGIVPRSYQTGGPDKPAVQGHVSNRCNRILKDWTVQSAQKLHLYGTPEIKDRITRWNANGQHGIYAAAKRYLRLVRALTRNGVPYLEPAARTAAAAPQDITAGAIAAWTILTRKWRTIPGGLDLIADSAHPIGFWRTTVTELHGIKLHVR

SEQ ID NO: 318806 - protein, 346 aa, unidentified
MEQISRVGMDTSKRFFQLHGVNAAEEVVLRKKLRRKEMVEFFQALAPTVIGIEACGSSHHWARLLRSFGHEVKLIAPQLVKPYVKRGKNDGADAEALCEAMSRPTMRFVPVKTAEQQAALMLIGLRERLIGNCTQLSNAIRGYAAEFGFTAAKGMAHLDPLLERIQADESLPLAARELFAVQSKEYAQLRGQINEVEAKLKAWHKSDECSQRLIKIPGVGPIGAVLLKMKTPAPEQFRTGRQFAAWIGLTPQDHSTAGKVRHGGITRAGDEALRAVLVAGATAVIQQAVRYGGRASPWLDALLKRKPPKLAAVALANKMARVAWKLMVTGDSYSTKSAPAALASRI

SEQ ID NO: 318807 - protein, 387 aa, unidentified
MQVAASRTASTAIQTDLRAIFVSLELSRSTWLITSLSPGAGEKMSKHSIRAGDVAGLLARLAQLKEKARGRTGRDFPIIAIQEAGLDGFWIHRLLQSEGIESHVVDAASILTSRRRRRAKTDGIDGETLVRTLLAYKRGEPRVCAMVKAPTPEEEDRRRICRERKTLVGERVEHVNRIKGLLFAQGVSDYEPLKRNRRARLEELKTADGRPLPAHLKAQISRELDRLELVLPQLKAVEAERDALLKPVSEGCPTPAAMLAQLKGMGPEFTAILWSEGLFRSFSNRRQLAAYAGLAPTPWQSGSVAHEQGVSKAGNPRLRTTMIQLAWLWLRHQPTSALSVWFQERVQSNGGKMRKTMIVALARKLLVALWKYSTSGVVIEGAVMKTI

SEQ ID NO: 318808 - protein, 448 aa, unidentified
MSKIKTKNETVKRISQLTVINPTAAGIDVSDKEMMVAYPIGSGQLEVRSFGCFTSDLHSIANALRKFSITSVAMESTGVYWIPLFLLLQEYGFEVYLVNAKHVKNVTGRKDDESDAEWIQKLHSCGLLSASFQPDNLTRTLRSIVRHRKSLERTCSLYINRMQKALELMNIKLHTIISDIDGKTGLLIIESILAGERNPEILADLRDRRIKASREDIIKSLQGHYTTEHLLELKQCYQLYCTHRQMIDECDREIEKQLIEQVASKNEGVITNIPEVKRKKSGKHKLSFNATTYLKEILGVDVTEVFGISELSALAILSEVGTDMSKWKTEHHFTSWLGLAPNTRISGGKVISSRIMKKKHHAGQAFRMAANGLHNSKSPIGDYYRRIKAKAGAGKAVVATARKLAIIFYKMVASQEAFNPKALEDYQEKYKQKKINQLKRKLQLLEAA

SEQ ID NO: 318809 - protein, 358 aa, unidentified
MKIVGCDFHPRWQQVAVFDTETGEMGEHKLSNGDGAAERFYRQLEGSALVGVEACGNSQWFVDLLGRLGHQVWVGDAARIRASYVRQQKTDRRDAGHILRLLLEDRFPRLWVPTAEQRDQRQLLIHRHKLVEIRSRVKNGLQHLALNQGVQRGSRLWSARGKAELKNLSLKGWSERRREDLLHLLEELDQQVEVLDEAVESAAQEHAQARLLMTQPGVGPITALAFVLTIGDVSRFEHSGQVASYVGLIPRERSSGGRQRLGAISKQGNGFLRSLLVESVQTVNRLDEGFRKQYPARCRHKARGVAKVAAARKLAVRLYWMMRQNIGYPEIARIESSPAVPLAAPKAERLSGRSRIQH

SEQ ID NO: 318810 - protein, 348 aa, unidentified
MDNNITIGMDLGDQNHVVVAMDVNGKEIEMKTIRNTELSLRKFFSRYKEATVAIEAGTHSPWISRLLKEIGCNVYVGNPRKLRIIWDCNDKSDLRDARILAMVCRVEPRLLWPIKHRDRQAYADLGIIKARDTLVQNRVRMINHIRSVTKTCGCRIPKCSTPSFSKRAPSHIPKELRDSLEPLIFAIDLLTQQVKEMDRQINKLCKKYSETEKLLQVLGVGLITALAFVLTIEDPHRFTKSRQVGAFLGLTPKRDQSGRCDKQLRISKAGNTYLRSLLVSCGHYIIGPFGPECDLRNYGLSIVVRGGKNAKKRAAVALARKLAVLLHRLWISNQKYNPFYKSAAQDAA

SEQ ID NO: 318811 - protein, 415 aa, unidentified
MTNHLYVGIDISSKQNVVCCLTNDNEKHAMSRFSVYNNRPGIMELQNRINQLEQKHNFSKILFGLEHTGCYSTHAAVYLHQHLDFGCSDTKVYMFNPSIIKQFKKAHYLYAPKNDRVDAWFIASKLKAGHLPHPFSLNEPLMALQRLTRARYHIMKALVRESNFLMTNLYLKCSDYTLVFDNKLSATSLAIMEEFESIEALAEISLDELSEFLIEHGRNRFEDPVTVAKDLQKAVRSSYRLPKSMNDSVNLAMASSIRVIRTLQDQLKSLKKAISDHLDTVPQTLDSVPGIGPIYASGILAEIGDIHQFASHKQLAKFAGLAWTENQSGDFSASQTRMIRSGNRFLRYYLIEAADKVRIHDPVYSEYYAKKKAEPKQFAHKRALALTARKLVRLVYYLLKTNQLYQPRGGNRQIS

SEQ ID NO: 318812 - protein, 347 aa, unidentified
MDYYAGIDVSLEESSVCVVDSDGKIVREAKVLSEPDALIAWFGGLGVGLSRIGLEAGPLSQWLYAAMKEAGLAVELLETRHVRDAFRAMPVKTDRKDARGIAQLMRLGWFRPVHCKSMSAQEVRALLTARKLVQSKLLDIEMSLRGILRGFGLKVGATKPNRFGCRIEELVAGHATLETVAKALLAAHEVLLRELKGFEKRVRAMARDDQRVRLLMSTPGVGAIVGLTYVAAIDDPGRFKSSRDVGPHFGLTPKKYQSGEKDISGRISKIGDASVRAALYEAANVILTRPIKGASSLKSWAMKLAGRAGMRKAKVALARKLGVILHRMWVDGKPFSAEPVGALKPAT

SEQ ID NO: 318813 - protein, 393 aa, unidentified
MFIVGVDIAKRSHEATVIDDNGSKIKKPFNFKNDSSGFHSLLSVLESISLDPDDFIIGMESTSHYWLALYSGLRKKGYTVHVFNPIQSNALREMYIRQVKNDDRDCFVIAEVIRFGRYSEGGMPPSNIYELREMCRARFFMVDAVADLKRKAIALLDQVFPEYETLFTDIFGLTSSELLRNCSTPEEIMAIETDRLCEIISVPSRKRFGMKKAEEIKSLAENSFGIVQEFDAFGCLIKQYMEHIRFSEQQIAALDERIAALYSSFDTYLSTIPGVGPVLGATILSEIGDISRFSSAAKLAAFAGIDPTVKQSGEFVGTRNHMSKRGSPYLRRALWQASTIAVRCDPVLKEFMAKKRAEGKPYMNAVGHVTKKMANIIYAVLRDNKPYYIRSNI

SEQ ID NO: 318814 - protein, 344 aa, unidentified
MEHSAGLDVSVKETSVCIVDDTGKIVREVKVASEPDALLAVLTNSAYRLKRIGLEAGPLSQWLFSALAEAGLPVICVETRHMRAVLKAQINKTDRNDARGIAQMMRAGLYRPVHVKTLRSQKLRMLLTHRKLLQSKAIAVENDLRGTLRNFGLKVGMVGAARFDARIRELVDNIPDLATLVEPMLIVRRVLREQIAILHRRLLAIVRDDEVCRRLMTVPGVGPVVALTYRATVDIPARFRKSKSVGAVFGLTCAKYQSGEVDWDGRISRCGDEMMRVMLYEAAQSMMRSKKWSWLKAWAMQIARRRGMKKAIVALARRLAVIMHRIWVDGTEFRWSREQATAAA

SEQ ID NO: 318815 - protein, 340 aa, unidentified
MRELYGGCDLHSNSNLVGVIDGQGKRVFKKRLSNDLGEIRETLVAFKAELVGIVVESTYNWYWLVDGLREEGYRVYLANPSAIQQYAGLKHADDKHDAFWLAEMLRLGILPEGYIYPKEERPIRDLLRKRGHLMRLRTSLVVSLQNILSRNLGRKVDVNEVKVLREDRITPLLQENEDLAMAGRISKETIDFLTHQIDQIERRVDKVVRLKEAYRFLQTLPGVGKILALTIMLETGPISRFKTVGDYVSYCRKVPSRWLSNGKWKRSGNRKNGNRYLSWAYAEASDYARRLHPEPRAYYQRKRQKTNAVVAHSALAHKLARAAYYVMRDQVPFDSEKLFR

SEQ ID NO: 318816 - protein, 346 aa, unidentified
MEHYVGLDVSLKLTAICVVDRSGKIEREGVVTSDPETIAAFVKSHAPHVARIGLEAGATSTWLWTELNKMGLPVICIDARHAKAALKMQINKSDRNDAVGIARIMQCGWYKEVRVKDLDSHAIKALLVSRALLVKIKRDIENQIRGLLKNLGLVIGRAKMNVFAVRAAELADARPAVAAAVEPLLKARDAVGRQIADLDRKVLRLARNNAQVRRFITVPGVGPITALCFLATIDDPTRFKRSRSVGAYAGLTTRRYASGEIDWTGRISKCGDKMLRTYLYEAANVLLTRIEKWSALKAWGIRLAKRSGLRKAKVAVARKLAVILHRMWIEGTEFKWSSKEAANQPA

SEQ ID NO: 318817 - protein, 427 aa, unidentified
MSYRIAGIDVHKRMIVVVVADVDVAGDYEFERRQYGSSPAQLRLLAAWLVEQGVEEVVMESTAQYWKPVWASLERYWKPICEKWEGTSPMSGSLHLAQAQSNRGARGRKNDFADAERLVRRLVAEELTLSFVPDAEQRLWRTVMRTRYQLRCNQVQLQNRLEALLEEAHLKLSSLVSDLLGLSGRRMLQAMAEGETDPAVVAARADCRLRATQEQLCDALGACRELHPVYRRLLKAALEEWERIEAQIAQLGQEMASLIGPQQEQVQRLAEVPGLGVDSGQQILAEVGASAATFPSGRALASWVGACPGEEETAGVNRNRRSPKGNRHLRRILNQAAHAAVKLKGSIFALLYRRYVVRLGHNQTIAVIAHRLCRLIWKILHEGVRYDERGPAVSQRAQQRRTARMIRQLRSLGYSVELLHAAAGVPA

SEQ ID NO: 318818 - protein, 401 aa, unidentified
MKEFNPEAVQIEVASAVETILPILPAVGYPAYIGLDVHKETIAVAVARSGRAVPESRGEIANKPKAVAKLVERLSRAFGGEVLVFCYEAGPCGYGLYRQLLALGHDCQVVAPSLIPKKPGERVKTDRRDACKLAGSLRSGDLTGVWVPDEEQEAMRDLARARDDLKAQERKARQQLNAYVLRHGHAWPSNRTRWTQAHYHWLESLRFAHDWQQVVLQEYCDAVKSASRRVADMTAQMERVLPQWSLAPVVDSLVALRGIDKLAAMVVLAELGDISRFESPKQLMAYLGLVPSEHSSGGRRRQGSITKTGNGHARRMLVESAWSYRFPARQTMHLKRKAKPASEEAKAIAWRAQKRLCGRYRTLVQAGKNTKQANVAVARELVGFIWDIVCHEMPKVEQVSR

SEQ ID NO: 318819 - protein, 387 aa, unidentified
MVAALRPMGEVALAPKEYPHTAIGLEQMAHDIISLGENTKVITEATGRYHEPVSAALHEYGIFVCVLNPILIHQSGGGSVRKVKSDKKDAIKIAKYGLDNWTDLQKYASVDILRQQLKLYSRQYNLYMKNVVALKNNLLALTDKVFPGVNELFESPEKTNGHQRWVDFIYAFWHCDCICRVSENAFSQRYQKWCKRNHYHFSSRKSSDIYTASCGHFTTLPRNNNTKFLVTTAAKQLTSIKENIALLRAEIFSLAKQLPEYDVVMGMFGVGEITGAQLMAEIGDVRRFPNRSSLVAFAGVDPSVNQSGKYNTHSNSTTKRGSSHLRKTLFQIVSTYVKCSPVDEPVYQFICKKRSEGKPYYVYMTAAENKFLRIYYARVKECLNAQN

SEQ ID NO: 318820 - protein, 341 aa, unidentified
MQITTIGLDIAKNVFQVHGIDAAEKVVVRKQLRRGQVLKFFAALPPCLVGMEACATAHYWARELTKLGHEVRLMPAKDVKAYVKRNKNDAADAEAICEAVRRPTMRFVRAKSAEQQGRLMQHRTRDLLLRQQTQVINALRAHLAELGIVAAQGREGLKQLLAIIADEKDARLPIDARASLIVLAAQLQALHTMIGSIERRLIVQHRANEASKRLQSIHGIGIIGASAIAATVTDPNAFRSGRDFAAWIGLVPRQDSTGGKQKLGPISKQGDRYLRRILVVGAHSVLRRAKQNPEKYPWLTQLLARRPFKVVAVALANKMARIAWALLAKGGTYRAPQLAAA

SEQ ID NO: 318821 - protein, 368 aa, unidentified
MKKVSTAAAKASRNISRQTLTVGLDLGDRNSWYCVLDEAGQIQLEQRVGTNAKALREVFGAMPRSRIALETGTHSPWISRLLSELGHEAIVANARKLRLIGESRKKDDRLDAQTLARLARIDPQLLYPVKHRSAQGQADLAVIRARAGLVRARTAMVNTARGLAKSYGERLRGCNVRNLNPEKAEALSPELQAALQPLLAALESVSQQMREYNQQIETLAQERYPQTALLKQVKGVGTLIALTFLLTLEDPQRFGKSRDVGCYLGLQPGRRNSGKSQPQMHISKEGDPYLRTLLVQGAQHILGPFGVDCDLRCWGLKLAERGGRSGKKRAIVATARKLAVLLHHLWVSGEVYEPLHNSRRRTTVAAAA

SEQ ID NO: 318822 - protein, 322 aa, unidentified
MVNLLALLGIDVSLLENVVCLRIEERCYRAAFPNTPEGRQALIRWTLEGATEGLLAAVEATSNYHKELVQDFRDAGLSCLVLNPRQVRDLAKGLGITCKTDRVDAEVITRVLEVPRLRSQVLRSRKHDDLRDISREIQALTDTCVDTQHRLNTPARCQIAKAADANLIKFLKQQMRELEEQWMRLLGECPELKERYEDQLGIDRIGPKTARVLVSELAGDMSTFCTKQVARYMGVSPNTKQTGQQKPTGRIEGGNTFLRKAFFMPALTACSKDPECKELYARMRAKGKTHKQAVVAVMHKLIRRSAAVMIRRSPWRPRLDMS

SEQ ID NO: 318823 - protein, 417 aa, unidentified
MDSHSKKVKHINKKTLMVTLDIGKAVHYGYLRTPSGEEVKPFPFDNRREGFNELWGRVCQFKQAQGLEDVVVGFESTGPYAEPLFHFLRTKPVHLVQVNPLHSKRLKELTGNSPCKTDKKDPRVIADIMSLGHALTLVVPEGAAAQLRRLTQARERAMKRRTALLNQIQHLVFVVFPELLDVFKRAHSKSVLYLLQHHPTPQDIVGLGCESLTVLLRRVSRGKVRAEQARQLFEAARESVGITEGRESILVEVKHLLTAIAHEDELIDDLKQQLHYYVQQIPYSQSMLSIKGLGTITVAGLIGEAGDFDAFATVAEVMKLAGLDLYEVSSGKHRGRHHISKRGRALMRKLLYFATLSMVRKQGIMHEYYHLMLSRGMPKVKALVAISRKLLRLICALVRNRTVYSTQYHQGTLGIAA

SEQ ID NO: 318824 - protein, 393 aa, unidentified
MICVGIDVAKDKHDCFILSSEGEVLADVFTIQNNAEGFDMLLQTIRRCARPEDKIKVGLEATGHYSYNILGFLLDKGLDTYVINPLHTNLYRKSLSLRKTKTDRVDARTIAAMLMSDVDLKSYTDTAYHNEELKSLTRYRFDKVRERAKLKQSVSRLVTILFPELEKLVPSLHMASVYALLSEFPGAKQVAGAHLTHLKAVLYDASKGRYGRDMATTLREAARCSVGSVMPTKSLELQHTIRLIRELDAEIEDIEAAIQSMMDEMQSPIMTIPGIGVRMGAMILAEIGDFSRFDSPDKILAYAGMSPSTYQSGQLSLSGAYSHMEKRGSRYLRYALYNATKYVCLWDPVFAAYLAKKRTEGKHYNVALSHAAKKLVRLIYAMEKSRQSYRNAA

SEQ ID NO: 318825 - protein, 482 aa, unidentified
MKPKQQEKTKNATCRLTQDTWQQMNRKQRREMTRKIQSEDISLEVIHPNAAGIDIGNESHYVAVPPTRASDPVHRFGCTTAELKEMAVWLKQCAIRTVAMQSTGVYWIAVYDILEQAGLEVYLVNARDTKNLPGRKSDVQESQWLMKLHTYGLLRNSFRPSQEIRTMRTYWRQRNDLVQSAGRHIQRMQKALTQMNIQLANVLSDISGVTGQAIIKAILGGQRDPHKLAEFRNPRVKASEEEIARSLEGNWQEDLLFVLQQEQDGYEFCQKQMAECDQRLEQYLQQREDRSGGAKLPEEKRKERLKKKKGNKPRFDLRTGLFCMTGTDLTRIDSIDVMTAMTIFSEAGWDMSKWETEDHFVSWLRLCPDNRISGDRIIGKGRLPTNNRVSTALKMAASALRTSKTYLGAQFRRLRSRLDTPVAIKAMAAKLARLVYRILRYGMNYVDRGAAFYEAQHRQQQIKHLKSKAAKLGFQIIQVPAA

SEQ ID NO: 318826 - protein, 364 aa, unidentified
MNEIYYIGFDVHKKSVSYCAKTVSGEIVQEGELMARREVLRAWAAAQSQPWRGAMEATLFSAWIYDTLKPYAQQLDMGHPARMKAITAGKKKSDRLDARTIADLLRCNLLPTCYVLSPPMRDLRRLLRYRHLVVTQSVRMQNKIAGLLMESGAPFVKARLRGKKYFNELLQALEEVPESVKDLLKMSRGAMELFEATQKQLIRRLLQEPVLQARVERLASIPGVGPITALTWALEIVDPFRFPSIGDAVSYCGLTAAFRSSAGKEQRGPLSKQRNAWLQSTLIEAAKLAPRWNAQLAELHQREMQRGHANRATLQVARKLVAYLMAVDKSGRPFQLRPAPTSETAPPLKKKAKARLREEVPQLT

SEQ ID NO: 318827 - protein, 434 aa, unidentified
MAVPPDRDCEPVREFRTFTAGLHELADWLAQCGVKTVAMESTGVYWIPLFEILEQRGFEVLLVNARNVHNVRGRKSDVSDCEWLRELHSVGLQRASFRPAAAIVPLRSYVRQRESLVEEAATRIQRMQKALSEMNLKLHTVLTDITGQTGLTIVRDILKGERDPERLATHRDPRCHASHAEIVAALTGNYRTEHLFALKQNFAAYEFLLQQIGECDSEIEALLTTLAAQQPPPTAPLPAARRKRISKHTPGFDIRSPLHRLTGGADLSQIDSIGPHAALQIVAEIGLDMSRWPTAKHFTSWLALAPNNKVSGGRLLSSRTPPSANRAAAALRRCAMSLARTSTALGAFYRRLGARAGKAKAITATARKLAVLVYRTLSGDLIYNDPGATAYHQLNRRRELKSLRKRAHLLGCDLLARSTGEVLLHANPASLSVS

SEQ ID NO: 318828 - protein, 347 aa, unidentified
MRFYTQQHGYYCGIDLHARTMYVCIISQDGTVLVEQNIRARPAPFLELITPYRENLVVAVECIFTWYWLADLCDKEGISFVLGHALYMKAIHGGKAKNDRIDAGKIAMLLRGGMIPQAYVYPSPMRSTRDLLRRRLHLVRHRGRLLAHIQNTNHPCNHDDFRKKLTYKANRIGVAEQFEDPSIRKSVEVDLELIAQYDEIIRDLELFIVRMAKQHDADMFHRLRSITGVGKILALTILYEVHDITRFETVQQFASYSRLVKCSRESAGKRMGTGGAKIGNVHLKWAFSEAAVLYLRKNPQGQKYLARLTRKHGKGKALSILAHKLGRATYFVMTRSQNFDDKKFLAA

SEQ ID NO: 318829 - protein, 415 aa, unidentified
MKVVFPTCCGVDVHKTFVVATIITTPVNSLQPHYQKKRFSTFNSDLNRFADWLLEHNCLDVCMESTGKYWVPVFNILERRGVRVVIANPKWVKAVKGNKDDTKDSKWIGDLFRIGLVKSSFIPDLDIRILREFTRYRYKLISMRSSEKNRFQNAFTVCNVALDSVVSDMFGKSATAITDYLTSDESFDPQHCVSLLQRTLKKKAKQVLESIEGFSIADEQKNRIKIIREHYDFIETLIAKVDTCVNEMVAKYEGAINLLCTVPGIDRKSAITIISEIGTDMSQFGSSKRLCCWAGLTPGNNESAGKKKSVRISRAGVYLKPALVQVAHAAVKDNNNPYYKLKYEKIAKRRGKKRAIIAIARMILTAIYSMFCTGEVWNPVDLFKIDMPEHLKEQQLAKAIKQATRFLEKLGLSVA

SEQ ID NO: 318830 - protein, 364 aa, unidentified
MEGKKKAATRFVGLDLGKRTYEAAIVEKGAVKTSNGRTCVSGRQSLYKKLRPTDKVALEAGNLAFIIAKELEAIVGCRVYVLNPSQLPLIYGSMKKTDKEDSLKLAHILEDFQEERLPVVPVPSDKEMMRRKLLAGYRRVQNSRSREINKLHALFLAQGITTVVQKDLSTREERKESIKMLTGLEREEAEYLVSCLELHEQRIKALKQQIKKESAGDEVIERLQSVPGVGPMVAFAFVAHVGADRFENASQVSNYLGLVPRVYISGDTVRYGRITKRGNGYLRALLNQAAWALTRTRAGGKLKERFEYMTIEQSKSKKKAIVAIARRIAELLYTMMRDGTWYASRPFIPGKKAADGLAQLATSA

SEQ ID NO: 318831 - protein, 410 aa, unidentified
MANLLVGIDVSLRNHAVQFMNDSGDALASFSVANDLTGAESLLQRILHSADKYSTDMIRVGMEATSNLGWHLAHFLNARFHDVTQVKAQVFVLNARKVARFKKGYDSLPKNDRIDAWVIADQLRFGRLPHALTSAVQYEALQRLTRTRFHLMKNIARDKTYFLNQVFLKFSGLRQDNPFSNLFGATCLAVLQELEPEQIVSMSITELVDFLKEKGKNRFDNPEELAAYLQKLARSSYRLDKAMTDPVNLSLSVMLSVINTMEKEVSKLDKEIEKLMKSIPETLSSVKGIGPVFAAGIIAEIGDIKRFSDHNALAKYTGLVWSQYQSGEFESDETKRLRTGNKYLRYYLIQAANSVRRYDSDYAAFYAKKYAEALKHQHKRALVLTARKLVRLVFMLLKTRQLYTPPERRG

SEQ ID NO: 318832 - protein, 346 aa, unidentified
MQKIAYLAMDLHAKNFTLGKMDEQGSFKGTIDLQTTENNIVTALQSVKAKIKYLTIEQGPLTYWAAQVASPYVYQVIPCDPRANALIYKNPYKKDKVDTKNLCRLLRLGELHHVYQPQDDNRALYKAAALHYIDLRNQLTRLKLKIKAMYRHWGVIDVFTDSVYSKSSRDHYLDKIKKIPIRNQLIRLYGLLDQTEQTRQTALKALKQLGRNYPEIKQFMKIPGIADIHAHLFDAFIQTPHRFAKKNQLWKYCRLSVTDRSSDGKPLGYQRIDRAGNGELKALSYRAFVAAMKSDNEVKRFYQQSLQRTLNRKHARLNTQRKILATMYNIWRKGVAYRPELFSPSA

SEQ ID NO: 318833 - protein, 427 aa, unidentified
MSVTQNEKIRQVTDTTMVIGVDIASELHWARAFDWRGLELGKAVKFENSAEGFNFFLRWVSELTVEQKKDSVMVGLEPTGHYWFTLAAHLQGGDFKLVLVNPYHVKRSKELDDGHPSKSDKKDPKTIAKLVLEGRYVYPYIPQGLYAELRVAMNCRWRIRKELASIQNQIQRWLKIYFPEHSKVFGRFTGAGSMALLHSAPFPSDLISLGVEGISGIWKQMKLRGIGRKRAQRIYEAAQTSIGCTTGMEAARMELQILLEDYDAELQQYERVMQVVENLCSQIPAVAELLKIQGLGLVTVAGLFAEIGDIRRFESPRQIQKLAGLAITENSSGKHKGPTEISRRGRSRLRAILFRAAIPLLAKNREFQLLHRYYTTRQNNPLQKIQSVIAICCKLLRVFYALATKDCAYSPEKMLADIQRNQPLKAA

SEQ ID NO: 318834 - protein, 410 aa, unidentified
MKVAGIDVHKKVLMVVVVDARMPEEKPARRRFVTMPSELHHLLTWLREQGVEEAVMESTAQYWRSVWMELEPHLRLHLAQAFSNRAPRGRKHDFKDAERLVRRLIANELILSFVPGGEQRIWRSMTRMKLQLTRDRVRLQNQIECLLEEMRIKLSIVVSNLLGASGLRILHALANGETDPKKLAQLGGERLQCTEEQLVDALTGRAQPVHGEMLALQLQRLQLIDQQMARLNSMIAAAMKAHQDAVIRLAEVPGLGVDSAQQIIAEVGAQASTFPSAAELTSWVGTCPGKEESAEQNHSSRSAKGNKYLRRVLNQAAHAAVAKKASHFQAVFRRLLPRLGYQSAIWAVAHRLCRLVWKILHEGVRFIEQGHEVSPREKKKRAQMLARALRKLGYEVTITPINQLAANPVV

SEQ ID NO: 318835 - protein, 417 aa, unidentified
MSWTGERVRLFAGDDWAQDHHDVELMDEAGRVLAKRRLPEGVAGMARLHEMIGQLLGGDADAEVVIGIESDHGPWVAALAAAGYTVFAVNPLQASRYRERHGVSGAKSDAGDAHMLADMVRTDSHQLRAVAGDSADAEGIKVLARTHKTLIWERTRQVQRLRHQLLEYFPAALDAFDDLDAPDTLELLGKAPDPARAAKLTRAQISAALKRARRRNIPDKATAVLAALRREQLGQPPAVTAAYAVTVRSLIALITVLNEQVKTLQGQVEENFGRHPDAEIYRSQPGMGAILGARVLGEFGDDPDRYADGKSRRNYAATSPITRASGKKKVVAARFIHNDRLVDALNSQAFAALNASPGARALYDDLRARDIEHNDALRRLASRLVGILHGCLKTRTLYDEATAWSHREKISQPDVAA

SEQ ID NO: 318836 - protein, 343 aa, unidentified
MQPATHILGIDIAKDKFDVNLRRLEASDSRWAATFPNNPKGFKALHQWLVQHGPRFSHQVHACLESTSRYGDALAQFLHQEDYPVSLVNPRRTRHYADSQLTRTVNDTIDARLIADFCAAERSTLSLWEPLSPEHRQLRDLTRARQALVDERERFANLLETASGFARKAFLKQVRQLDRQVKDLDRAIQQFVRLVPQLHQQVALADSVTGVGPITAATVIAELPPIEKIPQAAQAVALFGLDPIKKTSGSSVNTPARLSRMGSRHGRKALYMPALVALRWNPIIRQLGQRLQNKGRSGKYIVVAAMRKLLRLIYGVIKQGRPFDPNWSAPAQRDPQAQTPVLA

SEQ ID NO: 318837 - protein, 373 aa, unidentified
MQNDSTLFVGLDVHKESITVAYALDGGEVQALGKIGTTQIEIDRLCKRLQSKARHIKVVYEAGPCGYGLQRRLAAKGFESMVCAPTLIPRKPGERVKTDRRDAIKLVRSLRADDLTAVHVPTVEDEAFRDLARTWAKSRDELKRARQSLKSFLLSHGVRYVGSANWGPKHRHWLSNFSFGNEWQDFAFNELRRAIEDRFAQCQRLEAAMRDAVPRWGFYPAVLALQAMRGIQFTAAVGLLSELGELTRFAHPRQLMAWLGVTPSEYSSGGKRRQGAITKTGNSLARKLLIEAAWSYRHTAKVSPEIQLRHEGLPKVIINRAWDAQVRLCRRYRKLVARGKNKNVAIVAVARELAAFIWDIGRLGMAQASPRCV

SEQ ID NO: 318838 - protein, 404 aa, unidentified
MNNVAGVDVSKGKSMVSVLRPFGEVVAKPFSVGHTGSELKELADYLKSLDGETRVVMEHTGRYYEPVARFLHEEGIFVSAVNPKLVKDYGNNTLRKVKTDKADAWKIARYGLDNWMELRQHTPMDTIRMQLKTLNRQQGLYSKMKTMMKNNLIALLDQTYPGVNSLFDSPVREDGSQKWVDFAASFWHVDCVRSMSLAAFTERYRKWCKRHGYNFSQSRAIEVHTKAQDLIAMLPRDALTKTMIRQAIDALNAVSASLERLKNEMRTLAAQLPEYPVVMAMRGVGNSLGPQLMAELGDVTRFTHRNAITAFAGVDPGADQSGTHEAKSTRASKSGPPELRKALFLLMDCLLKTMPSDDPVYRFMDKKRAEGKPYLVYMTAGANKFLRIYYGRVKEYLASLESAD

SEQ ID NO: 318839 - protein, 353 aa, unidentified
MDGQAMQNEVILGVDTHLDLHVGAVISGTGKLLGTLATATNASGYLQLLTWARSLGCLRRAGVEGTGTYGACLARTLSEQGIEVLEVNRPDRSKRRLKGKSDPTDAENAARSVLSGQATAIPKSHTGAAEAMRTLAVARRSAVKAKTQAINQLRAILVSAPQEIRDRLWKTKAEQCVAGCAQLRQLGPSTLLLALTSTLRLLAKRWMMLAAELKELDAQLEKLTTQFAPRLREQFGVGPLTAATLIVVAGDNPERLRSEAALAALCGVNPLPASSGKTIRHRLNRGGNRQANNALWTIAMVRMRSEPRTLAYVEKRTMEGMSNKEIHCCLKRYVIRELYTYILADLGAAAGNP

SEQ ID NO: 318840 - protein, 335 aa, unidentified
MNYRLFAGIDVSKLKIDVVFFLAENPDKQFHECFENSDEGCSKMVYWINQISGLLISDMFFCAEDTGLYTLPVCTFFDEQGGNLWIENALRLKRSLGLKRGKSDKADAAEIANYGFLHRRKAILFKLPGKTISKLKHLLSCRKQLVKQQTALKNATGELEVFDKESADFTLCIRKSLITEYDRKINMLEEKLLACVKEDEILEKQYNLVKTVHGIGAQTAMFIVVLTQGFTLFENPRKFACYCGLAPFGNTSGTTLKGKPKVSHLANKRIKTLLTMCALNTIKKDNEFKRYYDRKIKEGKHHSSVLNVLRNKLVSRAFAAVLKDRPYEKEVNLAA

SEQ ID NO: 318841 - protein, 337 aa, unidentified
MKYSGIDLHSNNSVVAVTDETDKVVAEKRLPNDLAKIVGFLQPWREEMFAVVVESTYNWYWLVDGLQEAGFIVKLANTAAIRKYDGLKHSGDEADARQLAHLLRLGILPTGTILPPEQRALRDLARKRMQLVRSRTSHILAVENIVARQQGAKIGGRQIKQLTADAVDQMGLPPDVALAIKSNLEVILTLNAQIGLLEKHLQKKVGKRKEFILLSSVPGIGHILATIILLEIGSIERFAEVGNFASYARCVDSQHMSNGKKKSEGNTKNGNKYLAWAFIEAANFAQRFNAEAKRFYERKKAKTNTTVATKALAHKLARACYHILKEQKPFDVTRCFA

SEQ ID NO: 318842 - protein, 369 aa, unidentified
MNDITYVGLDVHKATVCVAIAESGRGGELREVGVFENRPDVLRKMVARIGKHRRRLNFCYEAGPCGYGLHRLLTGLGHECVVVAPSLIPMKVGDRVKTDRRDALMLAKLHRAGELTPIWIPDAAHEAMRDLVRARATAVRALSKARQHLQGFLLRHDRIYHGARPWTLAYRRWLTTVRFDHPAQQIVLQDYIHAVEDAESRRDRLTRQIEELMPSWSMAPVATSLQAMRGVALVAAVTVVAEVGDFRRFTNARQLMAYLGLVPSEHSSGSTVRRAGITKAGNALARRVLIEGAWTYRMSARVSRKLHDRLEPLSAAIRDIAWKAQVRLCARYRRLVAIGKPKVVVTTAIAREMVGFIWAIARVAQPELI

SEQ ID NO: 318843 - protein, 390 aa, unidentified
MYVGIDVDTDNCHVILLDGNGEEIDSYRIDNTSKEITRLMQKIPNDAEIVLESSTLGKPIYWQLKKAGRNIHMAAPSKIALISQSKKKTDDHDSRLLADLLRLGYLPESYVPSEEIEELRKMVRYRKSLGEKCAVVKNQVHALLARNGIKNEFSDLFGRTGMRSFMELRLPVMEKIILEGCVREIGFLSEEINMMDIRLAEVAGNYKEIHLLMSIPGVDYYSAMVIFTEVGDVHRFSAAKKLVGYAGLAPRVYQSGKTTHYGHISKDGPSILRWVLTIAAQGAIKKPGKLQRFYKRLSKRKGGSKAIVATARKLLIIMYHMLMNHQEYEERDDDLTCRKIRRMNMKAKRMMNIKENGGPIVEKHKMLMEKGLKMLISEEFDMSLGTKQFS

SEQ ID NO: 318844 - protein, 338 aa, unidentified
MEYGAIDLHARKTLIRIVDAAGAVILDRTITTTRDGFVQVFQGRARMRVLLETGTESEWVAQAIEAEGHEVVVADPNYALMYGVTVRAVKTDRRDVAALAEACRLGIYRAAHRVSATQRRIRRQLRVREQLIRMRTQAINLVRAQLRQEGYRLPTGSSRTTAARCRALPLTSPLRDDVGPVLDLLDGLAPLIHGCERAVAAQADADPVVRRLMTAPGVGPVVGLTYRAVIDDVTRFRDASSSSAFLGLVPREDSSGTRRRKGGITKRGPTALRVLLIQAAWTIWRQRQGRGALHAWVERLVARRGRRIAVVALARRLARTLYAMWRDDCDYRPMPRPA

SEQ ID NO: 318845 - protein, 355 aa, unidentified
MKFYVKQHKYYCGIDLHARTMYVCIIDQEGAIVKQKNIDSGPDAFLQIIEPYREDTVVAVECMFAWYWLSDLCRKENIPFVLGHALYMKAIHGGKAKNDRIDSHKIAALLRGGMIPVAYVYPSEMRATRDLLRRRNHLMRKRADLLSHIQNTNHQYNLPAFHKSICYKGNREGVAERFSDECVRKSMEVNLSLIDHYDQLLRKLEYYINQKAKAHDPEALFRLLSFPGIGQTLSLIILYEIHDIHRFPRVQDFVSYSRLVKSAKESAGKRYGTSGAKIGNAHLKWAFSEAAVLSLKQSPEIKKYKARLVKKHGKAKALTILAHKIGRAVYYILKRKEVFNIDKFLNKQLIQTGRA

SEQ ID NO: 318846 - protein, 367 aa, unidentified
MNATTAPVVRATIVAVDLAKSVFQLAVADGSWKVVESHRLTRTQFERWFINRRIDLVIMEACGSAHHWARWLNGLGIEVRLLPAAYVRAYVKRNKTDAADACALLEAARCAEIVPVRVKSIEQQALQGLHRTRSLWMGTRTSRINALRGFCREFGIVIAQGSRLGVEQISRALADPHAAVPTLIRGTMTLLVEEIRLLEVRIAQLERELSSLARQSPACTTLLSIPGVGLLTATAMVAATSGEVSHYRDARHFASWFGLTPKEHSSGSTRHLGRISKRGDRYLRMLLTHGARSVLRAASVAVQAGKSVDGLRQWALGVQRRSNHNKATCALANKLARICYATLRDHEPYGTTRLNKKLARTAVALPA

SEQ ID NO: 318847 - protein, 409 aa, unidentified
METIVSRCAGLDVHKETVAACVRCLEDGDEVRQEVKTFGTMTGDLLALSDWLKERGVTHVAMESTGVFWKPVFNILEGEFEVLLVNARHVKHVPGRKTDVKDCEWLAQLLQCGLLRASFVPERPQREWRDLTRQRRQLVADRSRVANRLHKVLEDANVKLGSVASDILGVSGRAILSALIEGRTAPEELAELARGRLREKRPELRRALEGRLTEHHRFMLRQLLEHWVYLGDQIGQFTQRIEVLTAPFAPVMERLDLIPGVNRATMEGVLAEIGTDMSRFPTAEHLASWAGMCPGNHESGGKRKSGRTPHGNRWLRAALTEAAWAAAHCKKSYLAAQYHRLAPRRGKKRALLAVAHSILIIIYHMLKDGTPYTDLGPEHFDRLENHRRTNYYIKRLQAMGHKVILDPAA

SEQ ID NO: 318848 - protein, 354 aa, unidentified
MPSKVTKPNTSAYPKLMSIGLDIGKDVFHIVGFDHNGKVVLRRKFRRLELDAVFEKLPRCVVGMEACLSAHFVSRRLRALGFEPRIIPAIYVKPFLKGQKNDYNDAEAIAEAALRPNLKLVKEKTQEQLDLQACHRVRSRLVSRRTATINQIRAFLIEHGIAIRTGANSLRRSLPEILLQRADELSPRMRVLIEELHGDWLRLDARIEALNEEIEEISRQEKSCQNLMTIPGVGPLISTATVAAIGNGEAFERGRDFGAWLGLVPRQYSTGGKPILGRISKRGSKYLRTLFIQAANVILMRPQNWPRYSFGAWLVTAATRLHRNKLATALANKLARIAWSVLRYNERFDDAQTI

SEQ ID NO: 318849 - protein, 367 aa, unidentified
MKKISTAAAKQSKNFSQQKLTIGLDLGDRNSWYWVVDEAGQIQLEQRVRTTGKALQEVFGTMPRSRIALEIGTHSPWISRMLSDLGHEVIVANSRKVRLIGESRKKDDRLDAQTLARLARIDPELLYPVKHRSARAQADLTLIRARAGLVRARTGLVNMARGLAKSYGERLRGCNVRNMNPEKAESLSPELQAALEPLLNAIESLSERIVEYNERIENLAQQSYPQVALLKQIKGVGTLIALTFLLTLEDPHRFGKSRDVGCYLGLQPGRRNSGRSEPQLHISKEGDPYLRTLLVQGAQHILGPFGVDCDLRRWGLKLAERGGRNGKKRAIVATARKLAVLLHHLWVSGEAYEPLHNSKQKAMPAAA

SEQ ID NO: 318850 - protein, 473 aa, unidentified
MRTIGIDLALKATHKAVVADDSGMVITPVIRFHTDPDELQALMKRAREGKADDESLRVVMEPTGLAWLPLASYFIQRGVTVHLVSTQKSADLRKFYSKHAKSDRICARVLVRFPWVLPQEMQSLELADADYGDGQRWCKQRNELADLMTAIKNRVQAWERAFWPGLEKIVDDLFSPCMRRWREAFYDPWKLQEMDARSLETFLIEAGARVETAENLASGLQAVARSSAALFGTPQGGSSPYANYASLQDQVLRELRLLSTYEQEHRSLQRQVCELYRCTHPSRNLETIKGVGEGGASVYLFFISNVERFARQKHFRGWSGMVPESNQSGDMDKKGLRMTKAGPDLVKKYAYINAEVARQWDPQIAAIYHDQMVNKGKHHVQAVCHCATHLLDRVRAVLRDDRPYELRDVDGTPVTWQEARSIIAERYQVPEEVRKRSSARDRRRRRDREAERKQRRREASQAYKRLTLVGHLN

SEQ ID NO: 318851 - protein, 341 aa, unidentified
MDKIASQPVAWCGIDVSAQQLVVALQRGDRAVQHRTFPNGSVGHQALIRWLARSTGTVRVCLEATGLYSLDLALSVHEVPGIELAVLNPKAVCRFAETLRRSKTDPADALVLLDYARRMPWQSWQPPSATALVLRSITRRFAALTKQHTMEANRLHAAEASKTVPRCVRQDLKQSLRQIECRLRRLQSEARELVTRDVELEQRYTLLRSIPGIGESSALQIMGELEVLAPDLDVRQWVAHSGLDPLQHTSGSSVHRAARISRAGNRHLRRVLYMPAVVGVRFDPYLRTFYEHLLERHKTKLQAIIAAARKILHAIYGMFRSRSRYDGSKLFPLLQPTAQAA

SEQ ID NO: 318852 - protein, 330 aa, unidentified
MSIIRVGIDLAKNIFAVHGVDENGKAVLIRPKVLRDQLLLLIAKLPPCLIGLEACSGAHHWARQFRTFGHTVKLIAPKFVTPFRMSGKRGKNDAADAAAICEAVGRPNMRFVPVKEEHQQIILTLHRTRQGFVEERTATYNRLRGLMSEFGIVLPQKVACMRRSIGAHLDDLLAHADHLDARIADFDKAIAKAAREDARSKRLMERPGIGPVTASALLASIGNGHDFKNGRQVAAWIGLVPGQYSSGGKTRLGRITKAGDSYLRSLLVMGARAILSGLGDKQDGFSRWARSLVERRGYWKAVVAIAAKNARLAWAVLHYGEEFRLNPATV

SEQ ID NO: 318853 - protein, 433 aa, unidentified
MQDVQDEPLFAERVAGLDIAKAGVEVTIRVPSDTTAGRRQQETRAFGTTRAELESLGDWLACWGVTKIGMEATSDYWKPVFFLLESRGFDCQLYNAAQVKALPGRPKTDRSDSIWLARITERGSVCSSFVPPEPIRRLRTHTRYRRHLTQARTAEKQRVEKLLEDGHLKLSSVISDIHGVSGRDMLEAITAGQRDPRALAQLARGTMRGKIRRLEEALDCSFFTAEHAAVLAMMLVTIDHYTTQIEVLTAKIEALIAPYLRQVSQLDAVPGIGQVCAQDIIAEIGADMTVFPTAAHLVSWARWSPQVKQSAGKRKGGNATGRGNPYLGAALGEATSSAGRTQSFLGAKYRRLTRRMPKKKALVATGNSMLTSIHALLSDPEACYQDLGPDYYEQRMHVRRQARNHVKGLQRLGYKVTIQPVNPDTGELLATAG

SEQ ID NO: 318854 - protein, 246 aa, unidentified
MDLSLVIDRDKQNVVYEQFENNAKSIRRIGLWLKKYNIEWDRVLVCMEFTGIYNRPMLQFCTLKKIAVWMIMPIEIIRSMGIQRGKNDKIDSKKIAMYAILHHDKIKVWQPVSKNIVLLKDLLALRQRLIKVSKILLQPINELKAIKDKVAAKETEVHCKSSIEQLKKELHKTEARIKKIITEDEVLQKNYNLLLTIPGIGAYTALDLVCYTNNFEYYQEAKQLACYAGTAPFEHSSGTSVRGKQE

SEQ ID NO: 318855 - protein, 340 aa, unidentified
MQITTIGLDIAKNVFQVHGIDGDEKVVVRRQLRRGQVMRFFQELSPCLVGLEACATAHYWARELTELGHEVRLMPAKDVKAYVKRNKNDAADAEAICEAVRRPTMRFVRVKSAEQQAQLMQHRARDILMRQRTQLINAMRAHMAELGITAPQGREGIKQLLAIIANDEDTRLPVDARASLIVLAAQLGAMRTMIGSLEKRIVARHRANPDSKRLQTIPGVGVIGATAIAATITDPAAFRSGRDFAAWIGLVPRQDSTGGKPRLGPISKQGDRYLRRLLVGGAVSMLRRAKLNPERYPWVTRLLARRPFKVVAIALANKMARVAWALLAKGGTYRPRLAAA

SEQ ID NO: 318856 - protein, 361 aa, unidentified
MTGTVTWAGLDVHARSTHAAAINVMSGELVRARFGAGLEQPLAWLAGLPGPVKACYEAGPTGYGLYRAARAAGVEMIVIAPGKTPRGPSDRVKTDKKDAELLARLLLAGSLTAVKVPPPEFEAARDLMRAHDACRRDLMDARHRVSKLLLRYGRVYPEKATWTARHRGWLGRQQFTEIGTELAFADALACVDAISARKAALALKLSELALDERWWPTVARLRSFHGIDTLTAFALHLELGGDWKRFERAPQLACWLGLTPTLSQSGESSRQGHITKTGSTLARRLLVEAAWHYARTPGPGVALAARQAGQPAHVLQISHRARQRLHRTHRKMRARGKPGNVCVVAAARELSCFLWAAAVAD

SEQ ID NO: 318857 - protein, 435 aa, unidentified
MSSKAYRATRVNEVNWEQIARGKEGLGVTMGIDVGKFDLSVICRWADGRFERPWRVRNPWEIPTLVGVLMQVKADRKLVVALEPSGTYGEALRQALGDNGIDVQRVGTKASHDYAEVFDGVPSQHDGKDAAVVAELAALDKAKPWTYQAADSWEEELAYWVEEMVAQRQMLTPWQGRLEGLLARHWPEASQVLKLSSGTLLRILKRYGTPQALAADACAATQLARWGRSLLSAAKIDKFLAGARSSVGVRAGPWERRQIQEYAERVLAARQQANRAQRRLRQLAEGHPVLEAQGKVVGVPTACVLWTSTGDPRHFDSAGAYRKAMGLNLAERSSGTYQGRLRISKRGRARARQWLYFAVLRLVQRCGVRPWYEAKKARHEGEARRVLVAVMRKLAVALYHVGVRNEGFHPRRLFGRIGRRSGRSARRSGASKQRA

SEQ ID NO: 318858 - protein, 343 aa, unidentified
MDHFGGLDVSVKETSICIVDDTGRIVREVKVASEPEALLEVLGDPIYRFKRIGLEAGPLSQWLFSALAEAGLPVICVETRHMRAVLQAQINKTDRNDARGMAQMMRAGLYRPVHVKTLRSQKLRMLLTHRKLLQSKAIAIDNDLRGTLRNFGLKVGVVGTVKFEARIKELLENLPDLAVLVEPLLIVRRTLREQIGILHRRLLAIVRDDEVCRRLMTVPGVGPVVALTYRATVDVPARFRNSKAVGAVFGLTPSKYQSGEINRTGAISKCGDEMVRVMLYEAAQIMLVRTAKWSWVKAWAMKIARHRGMKKAIVALARRLAVIMHRIWVDGTEFRWTREVAAA

SEQ ID NO: 318859 - protein, 325 aa, unidentified
MQAKKLCCGIDVSHTKLDVCYQNNLGELFHLQVGNNNAGYQKILDHTGTQYHFVMEATGVYYIRLAFFLHRRGCVVSVVNAIAIKRYIQMHLERNKTDKKDAGWICRYAIDQRPTYWQMPDSAYFESKQLYNTIRDYTEQIKRINNQLHSLRLLPVPSKDTIKSLEKIIVCMEKEIKQLEQKLQLLLVQWQPDQLKNVSSIKGIGKRAAAMLIVFTQGFKHTQNHRQLISFAGLAPTQYSSGSSIQGKPRIYKRGGKNLRDVLYMCSMNAMKTNTACKALYERLRANGKTGKQALIAVCNKLLKQVFAVVKNNTLYQPNYCSAKP

SEQ ID NO: 318860 - protein, 365 aa, unidentified
MTKVRTWAGLDVHGAATVACVVDAPSGEMSVHRLAGRTSEVTAFCGRLPAPVRVAYEAGPTGFELARALDASGVSCVVAAPGKIERPAQDRVKTDRRDAERLVRLLMIGGLHPVRVPSSEEEALRDLVRAREDIRGDLMRSRHRLSKLLLRHDVRYDDSASAWTKAHRAWLSGVDLGEPAAQATLLDYLGAIDGLAIRRDAIERLIAELVPHSPWAVQIARLRCLRGIETLSAVGLCAEIGDFSRFEHPRQLMSYLGLVPSEHSSGQTRRQGAITKSGSRHARRLLVEAAWHYRRPPRRGTTLERRHEGQPAQALAISWKAQQRLHQLWRRLHTRRGKRKTVVAVAVARHLAGFCWAITTIDTDT

SEQ ID NO: 318861 - protein, 414 aa, unidentified
MLPVVLSMCCGLDVHKRSVSACLLGTGASGETIKKLRTFGTTTPQLRLLADWLREEGCQHVAMESTGVYWKPVHNILEGVCQEVLLVNAQHIKNVPGRKTDPKDAAWIASLLRHGLLQGSFIPPPEIRALRDLTRYRSTVVRQRADECNRIQKLLENCNIKLASVATDVLGKSGEAMLRALCAGEDDPEALADLAKGRLRAKIPELTEALQGFMSETQRWLLRQQLERVAELDETIARLDSKIGELTVPFAPILQMLDQIPGVNRRIAQIIIAEIGIDMSRFPSAGHLASWAGMCPGHNESGGKKRSGKTRKGCSWLRAALIEAGWAAGRCRKRKTYLAAQYQRVMRRRGKKRACVAVGHSILTIAYSLMAQPREYHDLGPEYFEQRSEDALKDNLVRRLRQLGYTVTLEKPAA

SEQ ID NO: 318862 - protein, 352 aa, unidentified
MKSEIKYAGIDLHQSTCFIVLEDQTGQELSQSVVKTDAENLRSYFRGIGGTIHVAFEVGTQSAWLYEILKQVVSSITVCDVRQHKKRGNKNDRIDARKLARGLRMGDLKGVYQGDRNLRKLRELAHGYLGTVSDSVRVMNRIKAVYRSWAIRCGGRDVYYKRNREEWLSKFPIHESRMRAEGYYDQFDLLREQRKATRKAFLKEARRYPVQKILRGIPGFGPVRSALVIAVMGTPQRFRTRRQLWSYSGLSVVIQTSSDHQVIKDQIIRKQRQHGTRGLTRDFNRILKGVFKSAAKEAIRRDPLIGAIYRKKIATGIRPEMALLSIARRLATIVLVLWKRGEQFNSAKLISN

SEQ ID NO: 318863 - protein, 406 aa, unidentified
MERPAPVRRPWVTLRIGQSVAQSHMRREPVMGSVTRFVGLDVHADTIAVAVAERGEVRSLGVIPNRPEAIRKLIRKLGPAKDLKVCYEAGPCGYVLYWQLAELDVACEVVAPSLIPTKAGDRVKTDRRDAEKLARCYRNGDLTAIWVPDAGHEALRDLVRARLVAKEDQRRARHRLGQLLLRHGIRKPEGMTSWKRPHRVWLNQLRFEQRALQLTFEDYLAEVDHAAERIARLESAIEAAVEAAPEKLRELIRALQCLRGVARVAAAIVAVEVGDLSRFQTAPELMSYAGVVPSEHSSGAKTSRGRITKTGNGQLRRVLVEAAWAYRYRPAIGPELRKRQQCLSAQVREISWKAQHRLHSRYIKLTLKGKHRNVAVMAVARELLGFVWAIGKEVERGGTTCVPVAA

SEQ ID NO: 318864 - protein, 342 aa, unidentified
MNITTIGIDLAKNVFQMHGADEKGKAVLKKQLKRAQMLAFFANLKPCRIGMEACGSAHYWARKLQALGHTVQLIPPQYVKPFVKRNKNDAADAEAICEAMMRPNMPTVPIKNTSQQAILSVHRARQGFVKARTAQANQIRGLLAEYGIVIAKGIGHITKRVTEILEDGENDLPGSFRLLIARLTDHFKELDRQVDELETQIKLWHRDDSASQKLAKIPGIGPITASATVASVGDARNFKNGRQLAAWVGMVPRQHSTGGKSTLQGISKRGDTYLRTLLIHGARAVVRVAERKPNADPWLKNLLARRHKNVAAVALANKNVRTIWALLAHDRDYEAGYVRAAA

SEQ ID NO: 318865 - protein, 444 aa, unidentified
MPKARKRYVGLDVHKNSVEYCILDTEGKKIDGGNFICEQSVLVNFAKNVLSLNDHVAMETTTSTWTVVDILEPFVEKIVVGNPLKTRIIAEANVKTDKVDAMILAQLLRCNFLPSVWIPDKQTRELRRISSFRKSLVEEATAAKNRIKGILNHLLFKHAVAWTKQDLEELKRLALPPVERIIMNTEIAVLEHLELQIEKIESEIQKLAYAEENIRLLMTLPSVGYNTAAVLVAVFGDISRFKSADHATSYLGLVPRVKQTADTCHYGPITKTGSALARGMLCEAAQSLFLNDGPLGVFIRRVRDKKGGGKAVVAGARKLATIAYHMLKNKEPYRYAPVVRTRDKLRTLRSKAGGAKLPPQRHGYNDDARQNRPEGDFIVNYIPPLADVYKNEGLPPALTFAELSNGEQRVLKEMGVAEKVLANEKVGYTTRPKRATSSPQQIEK

SEQ ID NO: 318866 - protein, 389 aa, unidentified
MGEAIRATVAYLGIDVGKRSHSACGLGEDGEVAFRSDLENRPADIDRLLERAGAGALVVVDQKRNIGALVLARAFAHGNPCAHLPGYAERQARGMFPGVAKTDAIDAEVIARTARGMPGALRPLAEEPEGAASLRILSSQREFAAAARTRAKNRLRATLLEADPALERAVDPSRGWHVAPLAEFGSAAGCSAAGWRRFSAAARRAGAPAAGASAPWESMLASAGSGRALPAGEDVAVRMLAREIAALDADVAELEGLVADSLAGDEVYECLLTVPGIGPKTAAALVTSVDVSMFRGHDELASCCGVAPADSRSGTSVRSTSPQRGGNKQLKNLLIFSCNSLIGTQNRFGRYYDECRARGMRHNKALKAVARKRLKVIYAVMRDAVPYAA

SEQ ID NO: 318867 - protein, 375 aa, unidentified
MKETVRFLGLDVHAETIAVAIAEPDGEVRSLGTIANRAESIRKLVKKLGPAERLKACYEAGPTGYVLYWQLAELGVFCEVIAPTLMPTKPGDRVKTDRRDAERLARSYRSGDLTPVWVPDEGSEALRDLVRAREAAKQDQMRARHRLSKFLLRTGQRPATGVKSWTLAYMSWVKQIRYTQAARESTRQDYLHEVEHMAERVMRLEQAITEAVKQASPEIQQVVRGLQAMRGIAQISAVTIAAELGNISRFESARQLMGYSGTVPSENSSGQRTRRGSITKTGNAHLRRIAVEAAWSYRLRPCVGPALRKRQEGVSEEIKQIAWKAQHRLHKRTMRLAAAGKDQRKIVIAVGRELLGFIWAIGVKAETASRQQRAA

SEQ ID NO: 318868 - protein, 428 aa, unidentified
MDYTTQNKKIELITEDTIVIGVDIGSEMNFARAFDWRGREISKKVFKFSNTLGGFNFFDGWMTDMLQRAAKMQIIVGCEPTGHYWFPLAGHLKDRGILLVTVNPYHVKQTKELDDNSPTKTDLKDPKTIAKLVIGGNYGIPYIPEGIYADLREAVSSRDRINKELNASANRIQRWLKIYFPEYLDVYKNFDSTSGLMVLEQAPLPEDVIALGIEGIVKIWRAAKMRAVGKKRATTLVESAHNSIGIKGGNCARLELQMLLEDYKTKKRQMEMIEEVLTKETMKVPNVEKILAIKGIGIITVAGFIAEVGDIRRFDSPKQIQKLAGFELKRNSSGKHKGQTTISKRGRRRLRRILYQVVLPMLKSNPEFREVYEYYTNRVKNPLKGKQAVIAVSCKLIRVFYTLLSNGVEYDAARLRADIIRPIMLKAA

SEQ ID NO: 318869 - protein, 405 aa, unidentified
MIEAVTKRVAGLDVHKMVVVGTVLLEQEDGSLQHETKQFGTFKRERRKMCQWLKDHDIELVVMESTGIFWKSIYSTLQRAQIRAYVVNARHVKNVPGRKTDVSDSHWLAALARLGLLRPSFIPPEDLNHLRELTRQRMKLKGMLSAEKNRLSKILDSAGIRLSGVVTDIGGKSAQEIIDGLIDGAPIDELLNCIRGRLKSKTEQLKDCLDEELTPKQIFVLKEIRDHIQYLNSAIQRFDEALFAAMSPYQKQWEILQTLPGVDKVSAAILIVEIGTDMEQFGSADRICSWAGMCPGNNESAGKRKSGRTRKGNIFLRSILCEIANAAIKTRSQFKGKYESLVIRRGHKRAIIAIGHKILRIIFTLLKRNQPYDDPDINYEKLMVDRNAPRWLKALDKYGYLPQAA

SEQ ID NO: 318870 - protein, 433 aa, unidentified
MTDSGTPQIAAFIGIDWADEKHRWALQVAGPPGPRTPVEQGEVAHTPEALEAWICALGARYPGRSLAIALEQSRGALLFALSKYAHVVLYPIHPNTLDHYRKSFYPSGAKSDPGDAALILELLVKHPERLRRFQPDTVETRTLQFLVEARREAVDEKTRCLNRLTSQLKMYFPQLLDWFEVDQVLLSELLLEWPTLEHWRQARPSAVAKWLRQRHLSQARVAQLQADLAAALPATHDAAVIEAGVLTAQRVARQLQLLRDSIAQLDRRLAELTQAHPDRAIFQSLPGAGPVMVPRLIAAFGTQRERYATAAQMQCYAGIAPVTERSGKHTWVHWRWACPKFLRQTFHEWAWLSTRTSAWARAFYQRQREKGKSHHAAVRALAFKWLRVVFRCWKDAKPYDQTRYSQALQKRAKPVEIPVKKTSGLTSIKDLLA

SEQ ID NO: 318871 - protein, 391 aa, unidentified
MYYIGFDIAKENHYASIANSNGEVIQEAFLVKNSIKGFNFFMDKLKEKNINISDCLVGMESTGHYGENLIQFLHNKGFNIGIINPIQTDALRNSNIRKTKTDKIDTYLIIQSLMLKHYTPFVSKDIKILELRSLCRHRDDILKYRTKLKVRLVSFVDQLFPELNLIFNSIHLKSCYTLLSKYPSPKDIASTRVDAIANLLSTASKGHFSLGKAQKLKELAKSSIGVNNSSLSIQIKHSLKQIELLDSQIKEIDLKIKEIMDELNSVILTVPGISYTLGAIILSEIGNIDKFASHTKLLAFEGLDPSVKQSGNFNATIIKISKRGSKLLRYAMLRASGLIIWNSETYNVYYNKKISQGKSHNNAVCHVAHKLTRVIFHMLKENVEFKEQLEN

SEQ ID NO: 318872 - protein, 341 aa, unidentified
MKNLFIGIDFSKEKLDVAVITAVGLSETAQRECYEFKNSVSGFRQLVKWVERNSNGIATSSWLFCGENTGDYSKPLCNFLYGKGYDIWLENAKSIKDASGIRRLKSDRADALMIAEYAMRNYDKAFMYEPLSASLSQLRELFLYRQMVIRHRCSFQVRRGEKRLAMEKSPVKTMISQSGRHIVSELNKEIEKIDKRIAELIDSEEELKEIYHIVTSVPGIGCQNAVCLMVYTDNFRRFNYDARKIACYYGIAPFGKNSGASVHTDPHVHYLANRQIKAMLTQAALAAINHNPVLSQYYLRLVERGKKKQVAMNNVKNKLIHLVTAMVRNRQVFSPEYKISA

SEQ ID NO: 318873 - protein, 394 aa, unidentified
MSLIEGCAGLAGAEPQTWGTSLMNDTIFVGLDVHKETIAVAVAEGRRGGEVLQLGNFLNRPDHIEKLVARLARGNRTLSFCYEAGPCGYGLFRQLVALGHDCMVAAPSLIPVKAGDRVKTDRRDAVMLAKLHRAGELTAVWVPDDAHEAMRDLIRARATAVRVLGKARQHLQGFLLRHGRVYAGKKGWTQAYRRWLTTVRFDHVAQQVVLQDYIHAVTDAEARVERLLRQIEDLAQSWSQAPVVEALQAMRGVAFIVAVTLVAEVGDFSRFANPRQLMAYLGLVPSEHSSGRTVHRAGITKAGNALARRALIEGAWTYRMQPRVSRKLHDRIEALPQVARDIGWKAQVRLCARYRRLAAAGKPKVVVTTAIAREMLGFVWAIARSVQVAPLRTV

SEQ ID NO: 318874 - protein, 346 aa, unidentified
MQPVIGCDAHKHFSVFVSVDQHGKASSPVRVDHDRDLYCKYLRSLPAGSEIALEATGHWYWIVDAMEEAGHHPHLANPFEAKRRMAKSNKTDALDAKGLAILLRCGTLPESWIPPGELRDKRELLRTRMALRDLRTSLKHRIHAGIDRYGLQADAISDLFGTKGRAYLAGILKALPTETAHMIALQLNSIDQLEEKIAAIEHRIAEQLKTSPEMRLLRTVPGLGPILAPLVWLEVGDVERFPRAEHLASYAGLVPRIIASGGHIRHGSTCRNVNHYLKWAFVEAANCAIRIKAHRQNHIGLLYQRLYPNKGHGRAVVAVARHLAEASYWVLRKRQAYRAPQPRIAG

SEQ ID NO: 318875 - protein, 344 aa, unidentified
MDHFAGLDVSVKETSICIVDETGKIVREVKVASNPEAMLAVLKNPAYHFKRIGLEAGPLSQWLFSALAEADLPAVCVETRHMQAVLKAQINKTDRNDARGIAQMMRVGLYRPVHVKTLRSQKLRMLLTHRKLLQSKAIAIENDLRGTLRNFGLKVGMVGKVKFEARIKELVENLPDLAVLVEPLLLVRRVLREQIIILHRRLLAIVRDDEVCRRLMTIPGVGPVVALTYRATVDVPARFRKSKAVGAVFGLTCSKYQSGEIDRSGRISRCGDEMMRVMLYEAAQGMLRSKKWCWLKAWAMQIARRRGMKKAIVALARRLAVIMHRIWVDGTDFRWTREQAAAAA

SEQ ID NO: 318876 - protein, 324 aa, unidentified
MTLPSLGIDISKLKFDICLSRQGGKFRHKVFPNSPAGFSQLSAWLIKYKVERVHACMEATGTYGEALATYLHEAGHVVSVVNPAAIKAYGQSYLSRTKTDKADATLIAQFCSERCPPEWQPLPAEIRGLQALVRRLDSLLEMRQMEANRLEVSTAAEAVTESLVGHLAFLDEEVARTERLFRTHIGNHPGLQEQRDLLLTIPGIGSTTAAKILGEILDVKLYESARQLAAFAGLVPRLHESGSSIKRKARLSKTGAPRLRKALYFPAIVAIKHNPRIRALAERLKERGKCPMQIIGAAMRKLVHIAYGVLRSGSPFNPELAKTA

SEQ ID NO: 318877 - protein, 318 aa, unidentified
MNRNTLQNINVGVDTGKSQLDIYIRPLDVYFTVSNTDKGISDAIKIIKKHKPQRVVIEATGRLEMPFILAGDKAKLPYVIANPLRIKRFAEAIGQRAKNDRLDAELIAHYAERVQPELTKLKSENIRLMSDLVTRRNQLLTMQTMERNRLQILPKNISSTITPILTALKNQLEKVEAKITKLIESCPEYQAKNTILQSMPGVGKILAASLISNVPELGFITNKQASSLIGVAPITRESGRFKGKRMIKGGRPQVRTVMYMAMMSAIQCNPVFKATYKRLLEAGKPKKVAIVACMRKMVVTLNSMLRDGAMWDKDSVKN

SEQ ID NO: 318878 - protein, 408 aa, unidentified
MQVLYPRCAGLDVHKDTVVAAVRCVSPPVHHEVRSFSTTTRDLADLAEWLASHGCTHVAMEATGVYWKPVWHQIEGRFELVLANAQHIRNVPGRKTDVNDATWIADLLAHGLIRSSFVPPAAIQELRDLTRTRKQLVREISQHSLRIQKVLEDANLKLGSVLSDVLGQSGRAMLAAIIAGEEDPERLAALALGTARRKQAALVEALRGRVTPHHRAMLQLHLGLVDALDAALVEIDERVGKSLEPIRASARLLTTMPGISNLVAHVIVAEIGTDMSRFPSSGHLISWAGLCPRNDESAGKRRSTRVRKSGTWLKTTLVTSAWAGVRVKGSYLHAQFLRIKARRGAKKAILAVAASMLTAAYFMLRDGVEYHDLGSDHFDRRDRSKVIRRLVRRLHDLGCDVAITPEAA

SEQ ID NO: 318879 - protein, 330 aa, unidentified
MDKTSYIGIDIARNKFDAVIYKKTGKPRHKVFANNLEGFTQLLQWVNTPAKNLHIGMEATNTYWEDLAYFLKDQGSCVSVINPKCLKKYGESQNMRCKTDKTDAAIIARYTAKEQPEAWKPQRNEERTLLLQMRQLEHMKQCEQKERVRISMMKDAASREVAKRIADYIQTEIVQLEKQITALIHADKKLNKSAQLLKTVPGIGAKTLPWLVAYLGDGSRFKNGKAAATYAGLTPIKHDSGDTVAGKTKISKIGHSEIRKAMYMPAMIYGCGRMKDGVFRAFTQRLRVNGKCSMEIITALMRKMLCIAQAVLKSGQPFNPELHEKSFNNA

SEQ ID NO: 318880 - protein, 319 aa, unidentified
MAQNGLVVVGVDVAKDKVDACIRGLALRQTCPSTAQGHRKLVAWLRKYQVNKAVMEASGGYERDWVKVLREAGIEVRIVDPKRVRSFALSAGRLAKNDAIDAEMIAWFAETFSEAPGQVHDALQEELQALVKARLNLVDLKIRLEAQNEHAAPGLVQKARARLLKSLLGEIAKLEVAISTRVRATPDLAERAEIIDSVPGFAETTSANLVAGMPELGHVSDKIAAALLGVAPYDDDSGKRRGERLIKGGRRWVRNAIYMPCVGAATLNNPVLKAFYDRLIAKGKKPKVALVACMRKLIVILNTLIARRQKWDPCRYLVS

SEQ ID NO: 318881 - protein, 355 aa, unidentified
MNGSKYIGMDVHKDSISIAVRNAAGKIVMESVIETKASMILQFVDGLRGDLHVTFEEGTWAAWLYDLLRPHVDRLVVCDPRKNKSMREGNQNDKIDAQRLAELLRLNHLSPVYHGQHGLRTLKELVRSYLTVTKDQVRVMTRVKAIYRSWAIPCTGKQVYAAGHRAEWLAKISEPGVRQRAKFYYLQLDALRVLRQEVRRELLAESEKHKAWKRLCQIPSIGPIRAAVLLGILQTPHRFRTKRQLWTYSGLGIERHSSADHRSVDGHLQRSNKQVLVRGLNRNCNHDLKDLFKGAAVRAASKPGPFEEFYAALLAKGMRPEMAQLTLARKIATIVLIVWKRGVCFDAQHLKPQTA

SEQ ID NO: 318882 - protein, 331 aa, unidentified
MDNSLYFVGADIALKKFDAAIRLDDNRYKHKVFANTPEGFTAFHAWLQGFGSHFHILMEATNVYHEDLADYLLVQGLTVSVINPRCMPNFAKSTNMRSKTDKVDARLLADYAYCNAARLRKYAPLAANYRTLKRLMRQLTHLKKIIAKEQVRIQMMMDALCVEISQEIIAGTKALVKELEKKIKELVKEDKVLSRNAQLLQSIPAVGWMSAMYLLSHLGDGSRFRNSKAATTYMGLTPIVKQSGDSLHIVSGILKMGPRDIRDVLYAPAMSYAFGPWKERVYAPSVQRLTANGKAPKEVIVALMRKLVSIAQAVLQHQRPFDSAILVAKAA

SEQ ID NO: 318883 - protein, 513 aa, unidentified
MTVVGREGRLIIGALCPSRSLVSGVSVFNIGDVLILQSECDPVKEMAAVSAPLRPQLFDQSPVAKTRKREQIISHPRKQSPRTLPNNVSNLPQHLQHINVNAAGVDIGSERHLVAVPEGRDTVSVREFKTFTVDLYAIADWLEQCGVSSVAMESTGVYWIPLYEILEARGFEVYLVDARRVKNVSGRKSDVLDCQWVQELHTYGLLAKAFRPAEEICVLRGYLRQKEMLVQTAAMHIQHMQKALQQMNLLLHNVVSDITGATGMKILKAIIAGQRNPQVLAKERDPRCKSSAETIAKSLVGNYRPEHLFALRQAVELYEIYQTKIADCEAAIVAYLEQQDHRTEDEPPSPPKPVAARDRMRGGTDVRAQLYKMTAVDLFAIPGLAADTLLTLASEVGLDLSPWQSEKHFASWLALCPGTKRSGRRVLSSKTRPSANRAAQAFRMAAATQARAKTALGAFYRRIRARSGGREAITATAHKIARIFYSMLQNGTQYVEIGQAAYEQQFKERRLPP

SEQ ID NO: 318884 - protein, 310 aa, unidentified
MDTIFVGIDVSKDRLDVHVRPSGEAFAVARDGKGLEELVERLRAVNPTLVAVEATGGFETIVAAALGGAGLPLVVVNPAQVRHFAQAVGKRAKTDPIDAEMIARFVEAVKPELRQLPDEAARLLIELVSRRRQIIEMLVAERQREKRANAVRVRKSLARHITALEKELAAIDRDINTLVRSSPAWREKEDLLVSFPGIANTTARILLADIPELGSLDRRKIASLAGVAPFTRQSGHWKGQSMIAGGRNSVRSALFIVALVAVRCNPTLKAFYQRLLAAGKPKMVALIAVARKILTILNAMLRDHKPWLPA

SEQ ID NO: 318885 - protein, 347 aa, unidentified
MDHIGIDVHKRESQICILAEGGELIERRIRTEPERFAAVLGGRPQARIVIEASTDSEWVARCLEALGHEVIVADPNFAPMYATRTRKVKTDRRDARALADACVLGAYRRAHRLSDVQRHVRGRLLVRDALVRTRTRYISAIRALLRQQGYRVSSGSAEAFPARVRALALPGPLLSLIAPLLAVMRHLNRQLAYSDETIERVAAYDERVPRLRSVPSVGPVTAAAFVATIDDVQRFQHAHHLEAYLGLVPRECSSGDTQRRGPITKAGSGRARWLLIQAAVSILRRRPPEAEALRTWALRIAARRGKHVAVVALARRLAGILYALLRDGTVFTPRQISPPLASAARAV

SEQ ID NO: 318886 - protein, 516 aa, unidentified
MAVKNNRNQVKHLKSGGSYSSEELRFLRLDDGTTVVHSADGDIRRPVCAAIDVHKEILMAAVCKTDTETLKATFYVRKFTTMNSDIRSMALWLKEYGVQDVCMESTGKYWIPVFNILEQNSIKPILTHPKYVKQAKGQKTDFRDAVHMASMFRMDLVVSSYIPPADIRDLRELCRYRLKLTYMRTSEKNRFQNSMTISKVRLDSVFSDPFGKSASAIMEYLISTEPDEVSDDEILRLIYRRGNMKASDEDILDSIHGYEFIGVQRDKLQIISLHLSQIEECIGLIDRKLEYYRQKYTGIIRHLTTMVGITPASALYILGKIGTDMSVWRDDASLACRAGLSPANNASAGKKKSTRIGNGGHYLKPLLVQCALAAVKSTKKDPYFRRKYETLKKRRGHKKAIIAIARKMLVAIYHMIRDDADFLPVDHREIIQNTKTTKGLNLKNVIAFLKDQGADDDTIRLVEVQCSGKVPETADACGKASADKEAKEKQSASECADAFQPIQESVNGSPVLISGS

SEQ ID NO: 318887 - protein, 289 aa, unidentified
MTETVKYVGLDVHKETIAVAVADGERGGEVRFVGTVANEDDAIRKLVKRLTGPGVTLNVCYEAGPCGYGLHRLLTKLGQNCIVIAPSMMPRRPGDHVKTDRRDAMTLARLLRAGELTAIWIPDEAHEAVRDLIRARRSAQDDAIGAKQTVRSFLLRHDRRFGGKAAWTKMYWRWLSEQRFDFPHQQLAFEEMQKRVLEAQARVGRLEAALTEAVDAWCFAPLVRNLQVLRGIRLVSAATLVAEVGDLTRFDNPKQLMAYVGLVPSEHSSGARTKRGRITRAATRRHEPC

SEQ ID NO: 318888 - protein, 465 aa, unidentified
MKSKASKNKMKSKRIILDPAWAPVNVHAAGVDIGAREHWACVPSGSSDRPVRKFGTFTADLEAMAQWFEECGVTSVAMEATGVYWIPLFQILERRGLQVVLVNARQTKNVAGRKTDVQDCQWIQRLHTYGLLQGSFRPEDPYCVLRTYLRYRDELVSARTSQCQHMQKALQQMNLQLTQVLSDITGVSGLAIIGAILDGERDPVKLAGLVDRRVRASTTAIQQALKGDFRQEHLFVLRQAYALYLTYEGKISECDEQIIRETVALPAKVDGRLKPLPPRKPGRKPSDDRLNGQDMRPRLYEKFGVDLTAIEGIGIQTCLVLLTEVGPDVSRFKSEKHFCSWLGLCPDNRISGGKVLRSQTRRVLNRVADALRIAASSLERSQTALGGFYRRMKARLGAAEAVTAMAHKLARIIFRLIKHGEAYVRQGLEDYEKKFQVRKLNALQKTANAMGFELVSKQPLPQAVS

SEQ ID NO: 318889 - protein, 395 aa, unidentified
MHKENVVATIRGKGLVTQTRSFSTYTRSLISLRDWLKKHGITHIAMESTGVYWKPVYNILGDHFQVLLVNSRHVKNVPGRKTDQKDSQWLAQLLLAGLLKASFIPNREIRELRDLVRYKTKLTHQISSEKNRVIRILEDANIKLSSVLSDIFGVSGQKILKEIISGDYQPEKLLYHVHGKVQKSREEVKEAITGHVSEHHRFMLQTIMGSIEKTEGIIEKLDAQIDKQTVDYGIEIELLDSIPGVDKNGAIGIITEIGKDMSAFPDHKHLAKWAGMCPGNNETGGKKKSSRITYGNAYIRALLVELAWAASRTKKTYLSNKYKSLVGRRGKKKAIIAVGHKILIASYFIIKNKVVFNELGEDYLSNFRKDKLIAYYKRQLEMLEPDMELDKKEVA

SEQ ID NO: 318890 - protein, 350 aa, unidentified
MLIIGCDYHPGFQQIAYVDTETGEFQERRLQHPEEAEKFYRALWEPSVKVRVGMEASGHARWFERLLEELSFELWTGDAAKIRAKRVRKKKTDREDARHILELLVENRFPKIWVPTWQNRDLRQLLWHRHRMVQTRTRIMNQLQAVAINEGVRYKKRLWREAGRQQLESLSLAPWASRRREDLLEVLDRINPTIAELTQAIENEAEKCCEARRLMTHPGVGALTAVAFVLIIGEAHRFGCGKQIAAYLGLVPEEDSSGERRRLGHISKQGNSLLRFLLVEAAQATARCDQRWRNQFFHLAQRRGRKIAKVAMARRLAVRLYWMWRREWNYEQLQSFGSHVGQPGNPHGVQ

SEQ ID NO: 318891 - protein, 313 aa, unidentified
MISMNPVVGIDCGKRYLDAALFPGTDRTRVENTPHGLATLVIWLAERGVRVAGLEASGGCERLARDALIEAGLTVRIFEPGRVRHFAGAKGRRAKTDAIDAALIAEFTAAFPESPPAVRDPAREQLAGLVRARRLVVTKQADLVKGLASAPEEAKPILEAVVAQLATAEEALETAIVKQVAADTRLAQLTTALVTAPGVGPVTAATLAAVLPELGHTTGARIAALVGVAPFADDSGEHQGKRRIAGGRGDARRALYMAALCATRTKGVLGEFYRRLVERGKPPKVALTACMRKLVVRLNAMVAADATWQEHPT

SEQ ID NO: 318892 - protein, 356 aa, unidentified
MKHVNKLDFTGQQVYVGMDVHKKSWSISIYTDQFEHKTFSQPPKTEMLVNYLKRNFPGAAYKTAYEAGFCGYWIHDQLQEQGIQCLVVNPADVPTKDKERVTKTDPVDCRKLARTLRSGELEGIYVPSRVKAEDRSLLRTRQGMVKKQTRCKNQIRSILCFYGINLPEDMTSSHWSKRFINWIGSLRMERASGDVALKVHLAELLHHRKTIAELNRAIRALANTSDYRVNVALLRTVPGISTLTAMLLLTELYDMNRFKTLDTLCSYVGLIPNTNSSGEKDTKTGMTNRRNGQLRAAIIESSWTAVRKDPALMMAFNELCKHMTKTKAIIRIARKLLSRIRYVLKNQQAYVPAVIQ

SEQ ID NO: 318893 - protein, 397 aa, unidentified
MYIVGIDIAKRKHEAAVIDGEGTVIIKPFSFTNNCSGYNRLLAMLTKAKLPLDEVSFAMEATGHYWLALFTRLQKEGFRVQVINPVQTNSIRSFYIRQVKTDPRDALLIAEVIRFGHFSESTLHPENIYELRELCRGRHAIVSMQADVKRKVVALLDQVFPEYETAFTNLFGDTSMAILQTCPTPKELSETPLEELCHLIEVSSHKRFRMAKAQELQALAHNSFGFAMAGDVFSTMIRLYAKHLVFLKQQVQEMDRKIAEIMDTLDTPITTITGIGPTLGAYILSEIGDISRFSSAAKLAAYAGIDPTMRQSGEYNGVRNRMSKRGSPYLRHAIWLAASSAVLHDPALKLYFQKKRDEGKPYMASVGHACRKMVSIIYAVMRDNKAYTPYIPNEISA

SEQ ID NO: 318894 - protein, 316 aa, unidentified
MIAQGVFVGIDVSKERLDVALFSEGQSWSVGNDDRGIAQLVSQLREVRPELVVMEATGGLEIAVAAELGVAGMPVAIVNPRHVRDFAKALGILAKTDRLDAHVLAKFAQAVRPEPRALADVQTRQLEALVTRRRQVVEMITAERNRLHKALPAVQPRIKQHIAWLEQELKALDGDLHDSIRNSPLWRAKEELLRSVPGVGPVLTCTLLAELPELGRLNRKQIAALVGVAPLNRDSGKLHGRRTTWGGRASVRVALYMATLAATQHNPVIKAFYERLIAAGKLRKVALVACMHKLLVILNSMLQHQTSWHPACSLAQ

SEQ ID NO: 318895 - protein, 332 aa, unidentified
MYLGIDLHKRYAQVAVINDAGEVVEEVRVENANLDDLAQRYAGSRAVIEATSNYYHVYDTLAEYLDVTVAHPGKLTLIAQSDKKTDRVDAKELARLLRLNSVPESYVPTDEIREARALVRGRQTLIEDRTKFANKIHGLLADNGITRKVKPLSVKGREFLWELSLPSPWDALLESYLDVIKTLTEKITQLEAAIEERAGSLTETQLLMTIPGVSYYSALLIYAELGEVDRFDGHKEVVSYMGLNPTIRESGDSRIEGGISKRGSGRVRWILVQSAYTAVYNSGDEYLSRFFHRLNSRMNSKKAIVATARKLLVSMYYMLNRGEVYDPPGVST

SEQ ID NO: 318896 - protein, 364 aa, unidentified
MNATTVRPGRELAATVAIDLAKEVFELAFADGNGRIIERKRLGRGPFQRCLINRPPLRVVMEACGSAHYWARRLARLGHSVVLLPAHHVRPYVRGNKSDRTDAAGLLEAARCQDIHPVPAKSPEQQGIQALHRIREHYKAQRTAGINLVRGLLREFGVVMPAGAGNLRPATLAALEDGDNELPMELRHALAGLLEKIATCEAAMDDLEKRFTAMARNDPRCQRLMAACGVGPLTATALCAGVGELSRFPSGRHLASHLGLTPREHSSGHIRRRGRITKRGDVYLRTLLIHGARAAINAAQVARKRDRCLDRTQQWALELADRIGHNKAAVALASKTLRRLWAAERHGARFDPNHRSLRPSVQAA

SEQ ID NO: 318897 - protein, 348 aa, unidentified
MKKIAIGIDFSKKTFDATIKRRVEDDYIEVAYSKFDNEEKGFKSFVSWVRKSVKHFPEGKGRASLIFCGENTGICSAALSDYLAEKGFDMWLESALQIKKCSGIVRTKDDKSDSNRIAEYALRYFSSKVRLHEPDTKTLKRLRALFTLHNMLTRDKVAKINQIKSGILEAAPEASKLAKEHLEMIEQQLEDVDRQIENMLKDNDEFSENYRIMDSIKGIGPITTCCIIIKTHNFKYMADARTFGNFAGVVPSHREQSGTSIDKSPRLSKCRDKETKTILSQAVNIALRYNPIIRAYFDRLVGRGVHMNKAKNNCKFKLINIIMSMIRTRTLFDPEKYGKARSKWKQAI

SEQ ID NO: 318898 - protein, 344 aa, unidentified
MDHFAGLDVSVKETSVCIVDDTGRIVREVKVASEPGALLQELAKSAYRFKRIGLEAGPLSQWLFSGLAEAGLPVICVETRHMRAVLKAQINKTDRNDARGIAQMMRAGLYRPVYVKTLRSQKLRMLLTHRKLLQSKAIAIDNDLRGTLRNFGLKVGVAGAVKFEARIRELVENLPDLAVLVESLLIVRRVLRQQLGILHRRLLAIVRDDEVCRRLMTIPGVGPVVALTYRATVDVPARFRNSKAVGAVFGLTPSTHQSGESERTGGISRCGDEMMRVMLYEAAQILLTRSAKWSWLKAWAMQIARRRGLKKAIVALARRLAVIMHRIWVDGTEFCWTRQEPAAA

SEQ ID NO: 318899 - protein, 338 aa, unidentified
MVEITRVAIDTSKSVFTIHAVDARDRPVLRRNLRRQDVAGFFAKLAPVEVAIEACGASHYWGRTLQAMGHSVRLIPAQYVKPFVKRGKNDRNDAHAISEAAARPDMPHVPVKSAERQGDAMLLSVRDLLVRQRTQMINALRGHAAEMGVVAPQGDKGLAQLRAEVAGEAILPASASQALEMLGHEIDRIEARLAEIDAQLLARHKATPQSRILAEVPGIGPVGALNMVLRVDASQFKSARHFAAWLGLTPRDHSTGGKQRQGGITRAGNERLRQLLVLGATSVIRYAKPGRASAWLLALLERRPRKLAAVALANKMARIVWAMMTSGEAYRQPVPVAA

SEQ ID NO: 318900 - protein, 344 aa, unidentified
MSTIQIGVDLAKSVFEVAVSGEPGVVQSRHRLTRTAFPRFLAGHPPAEVLLEACGSAHHWGREAQRLGHRVRLLHPADVARYRDGNKTDRADAKALLEAARNQGLTPVPVKSVEQQAIVALHRVRAGYLRTRTARINALRGHLRELGYAIPIGARRVTVDARTALADETVPGFLRQVLLDLIKEIRSLEAKAESVRTSLSSLIPQMPDAQRLLTVPGVGVLTATALVAFVGDIHRFKSGRHFASWLGLTPREHSSGASRRLGSITRKGNSYLRMLLIHGARSALRAGAVTDQPDDLRIWAREVSARHCHNVAAVALANKLARICWRVWRDGRDFQRREGQITNC

SEQ ID NO: 318901 - protein, 341 aa, unidentified
MSDYSYFCGIDLAKNHFSLHAVDQNGKVILHKSVTRSKLLTTIANMPLIRIGVEACGGAHYWARTLNKLGHDARIMAVKYVVPYRTKGKNDLNDAVAICEAVQRLSTRFVPIKSPEQQAILSVHRIREHWVRERTALMNRMRALLSEFGLIIPVGRSSLLKQVPLMLEDAENELPHLARTVIADAYHHLGELNQRIADTEQVFDSFAKVSANVQRVMKIRGIGPQTATAILASIGNGSQFDKSRDFSAWLGLVPKQYSTGGKPRLGRITKHGDKYLRTLLVHGARTVIANLGDKQDKLSQWCRGVLERRGMNRAIVALAAKNARIIWSLLRNQTEYENYAA

SEQ ID NO: 318902 - protein, 450 aa, unidentified
MRSIYAGVDWASEKHDVLIADETGEEILAATFAHDEAGVRGLCRALVRHEVTLVAIERPDGLLVERLLKAGLRILALHPNQVAATRDRFRASGGKSDRFDAFVLCELARTDHHRFRVLEPDSDQTKALRALTRAREDLVGTRTALTNQLRAELARFWPGPLGLFRDLHSRISLAFLERYPSPADARGLGQARLHGFLVREHYTGRQQPGQLLAKLRRAPEARVGELELGIRRALVLSLVATIKVINEQIKQLERQIATAIREHPDGAVFLSLFKAPNSVICAAELLAEIGDCRARYPTRDTLAADAGHAAVAIESGKRKAACFRWACNKRLRTAFCTLADTTRHHNPWAQDTYARARARGHDHPRAIRTLGRAWCRILWRCWQDRMPYDPARHRALQQHITVTIPTPSGPRPDLAATQRMAGAAVTEPAAQRAEREALDGKPTSAITPEG

SEQ ID NO: 318903 - protein, 335 aa, unidentified
MQIYGIDLAKEKFDVSFFDLTSKKVSNKPSHKVVKNNFKSIGRFLETLPSDAVLVAEHTGVYGDTLLKCCMDSNVKIAFVGGYVIHRYRATPDRAKTDVLDCALLREFGERYPDKLKYRKFPEEDLYELRQLARHREMLVEQRKQLMTADKSEDCRPIRSLAVKRSMDRIKEMLDTEIAETEKEMLKVINGHDSIHHNYEIVKSVNGVGLVTAVELLVKTDNFTKITTARQYAAYAGTAPYEKSSGKMDKGAHISKIGNRRSKTLLYICAESARLHNKEIKLYYERRTLIDKKPRHYVLNAIANKLLRIIFTLVEKGEYYDANFIRQDPRVVKHN

SEQ ID NO: 318904 - protein, 425 aa, unidentified
MTAVDQRPLAARIGLDWADGHHDLALLPDGSEHVERFRIAHTPEDLREFLGELQRRFQGRSVGVCLEKCRGAIVHALLEYDFVRLFPVNPLTLSRFREAWTPSRAKDDPTDAEALLEILCKHANRLRCWTPDDADTRTLARLTEARRNAVDLRTRLTQALRAELKGYFPQALDWTGKTLTSQLACDFLLKWPTLEAVQRARPETVRKFYYGHNCRRGDIIEKRLQHIATAAPLTTDPAIIDVSVLTVQLLARQIRELGPAIQRYEEEIEKLFASHPDAEIFASLPGAGPAIAPRLLAAFGTDRDRFEHATEVQEYSGIAPVTERSGKKEWVHWRWAASTFLRQSFHEFAGLSIQQSEWARAHYDVQRERGKRHHAAVRSVAFKWIRIIFRCWQTRTPYDEQRYHQALRRRGSPLAHRLHPIARAA

SEQ ID NO: 318905 - protein, 343 aa, unidentified
MKHTTIAVDLAKSVFQVAVSHRPGRVTKQHRLSRARFLPFFSQQPPATVLLEACGSAHHWARQIRSLGHTPVLLPAHDVHRYLHGNKTDSADAKALLEAFRNEQVHPVPVKSVDQQALTALHRLRSASLATRTARINTLRGILREFGVVLPMGAKRVLPALRAILDDHSSVLPLPLRIELEEAGLEIRSLEERAHSLERHLQTLAGRLPAVQRLLTVPGIGPLTASALVAFVGDVRRFPSGRHFASYLGLTPREHSTGMSRRLGRITKRGDVYLRMLLIHGARAVLWAAKSKKDPDRLRAWALNIERLRGHNKAAVALANKMARIAWAVWKKEQNFEEVPIAA

SEQ ID NO: 318906 - protein, 344 aa, unidentified
MMYIGMDVHQVSTTFCLFDPSAADRRRYRTLTRPTTVEAIRAVLEPYDGCCKVAFEVGTQAQWVAKIVRPLATDVEVANPSRIPWLFRDGRKNDRLDARKLVTLLYLDQLPTVHLPSEAVSAWRALINHRRTLVKRRTMIKNQVRSIVRTFGCRCPHKSCWTRAGVAWLRSQTFDEARHFMAATMLDELAFVGSQLVKVEVQLDGIAETQPNVALLRTVPGVGPRTAEAIVAFTDWVGRFSNRKQFASYFGVTPTEDSSGLIERHGHISKRGPSVVRWLLVESAHRVIARCPALRAFFDRVHRGQKSRYKKAIVATGRKVLTICYGMMRDQTAFDARKVVRSAA

SEQ ID NO: 318907 - protein, 346 aa, unidentified
MVIIGCDFHPSWEQVCWLDTETGETAEQKLVHGAGEAQQFYKGLPAPALIGLEATGNCHWLLDLLRDLGHEVWIGDAAEIRASYVRRQKTDKRDAAHILKLLVEGRFPRLWVPEREQRDLRQLLIHRHKLVEIRSRVKNGLQHLALNQGMQKKQRLWSAVGQQALRELPLQPWASRRREDLFGLLASLEQQIAPLDRAVAEAAQQNSQARLLMRQPGVGPITALAFVLTIGDVSRFARSKQVASYLGLIPREHSSAGHQRLGAISKQGNRFLRMLLVEAAQSAVRYDPEFRREYQHRCHSKPKNVAKVAAARKLAVRLYWMLRSEKARPESLAIESSPRVPLVSAS

SEQ ID NO: 318908 - protein, 423 aa, unidentified
MSYRIAGIDVHKKMLAVVVSDVEIESEYQFERRMFSSNPEQLRSLAAWLVEQKAEEIVMESTAQYWKPVWETLERYWKPLCEKREGARRRSGTLHLAQAQSNRGRRGRKKDFPDAERLVKRLVADELVLSFVPDTEQRLWRTVTRRKYQLTRNHVRLQNQLEGLLEECHIKLSSLVSDLLGASARRMLKALAEGETNPVALAAMADKNLRATQAQLCDALGACTELKPIYRRLLKMFLEELQFIDQQISKLDQELASMLSRHHDAVVHLAEIPGLGVDSAQQIIAEVGAGAATFPSAKQLSSWVGACPGEEESAEVSKSHRSPKGNRHMRRILNQAANAAAKSKGTIFEIVYRRLVSRLGHNQTIGAIAHRLCRLIWIILHRGVRYEERGPSVNAKTRRHRTNRMIRELRNLGYRVEPLVNTV

SEQ ID NO: 318909 - protein, 391 aa, unidentified
MPQPNDLSRSLTALDQDSTLIAVVEMSQSSWLVGAIIPGVERRPAKKLEASEGMLLALLHRWRDEAAKAGCTIDRITVAFEAGRDGFWLARWLRQRGIEAHVIHATSIAGAREHRRAKTDRLDAALLQRAFLGWLRGERGHCTMVAIASLAEEDAKRPSREREALVGERTRIGNRMKSTLARLGIRGIRPGLRKAAERLEQLRTPEGAPLPPNTLAELRRDLARLRLINDQIGEIEAARLERLRQQPDEARHPMILLLARVVGIGIETADMLVQEVLSRKLRDRRAVARYGGLTGSPEESGARRREKGLARAGNARVRRGMLQLAWRFLMFQKDSALAQWYRARTADARGATRKTMIVALARKLLVALWKLVTTGELPNGVVLRPAIQAAL

SEQ ID NO: 318910 - protein, 271 aa, unidentified
MIAATSMVGIDVCRDWLDGFCLPGLQRFRLPNTPAGHHELISMIRQLSASIQVGFEATGGQEWGLWTALVEAGIVSKQLPPAQIKAFAMSRGTRAKTDRIDAELIARFMLFRPDAGRMLPDHNLRILRTLTTRRAQIVQMRKRLMLQVAARKKQGILADVEDLDHALKAVLETQISDVEQRIERALASEETSATKAGLLRSIPGIGPVSAAMLVAEMPELGRMTAGEAAAMAGLAPVPHDSGAMRGRRAIAGGATGNTTGPLSGRTCRRMP

SEQ ID NO: 318911 - protein, 355 aa, unidentified
MSQEKYIGMDVHSATISVAVGDAQGKLLMECVLETKASTIVEFIQGLQGTLSLTFEEGTWAAWLHDLLQPHVSRLVVCDPRKAALLKEGNKSDRIDARKLAEMLRTNQLHPVYHGEHGIRTLKELARSYLTLSQDVTRTMNRIKSLYRSWAIPCSGSTVYAPRHRAEWLAKIVEPGVRLRAEHLYQQLDSLQPLRLEARGGLLRESHKHAAVKRLRQIPSIGPIRAALLVALLQTPHRFRTKRQLWAYSGFAVETHDSGEYRWVRGKLQRNREHITVRGLNDNHNHDLKNLFKAAAISASTRPGPLQDFYLARVAKGMRPTMARLTLARKMAAITLTLWKKGASFDPQQLSRQTV

SEQ ID NO: 318912 - protein, 338 aa, unidentified
MFIIGIDPHKGSHTAVAIDGDERLVGELLIPADRRQRERLLSWAAEFEPRLWAVEGATGTGALLAQQLVGAGEAVLDVPPALSARARLLDSGHNDKTDPYDARSAAIVALHNRKLRAVALEDHRQILRLLARRHHQLTAARTRAICRLHAVLCELVEGGLSKNLSAKRAAAELRKLRPADAVGSERKRIASELLDEVRRVDQALIELRRRVEVAVSTSNSTVTDVHGVGPIVAAYLVGYTGDVCRFPTAGHYARYNATAPIEASSGPKVRHRLNPNGNRQLNHALHVAALGQISHDTPGRAYYLHKQSEGKSSKEAMRCLKRRISDAVYQRLRADTGH

SEQ ID NO: 318913 - protein, 374 aa, unidentified
MKYYSTLYVGMDVHRDSFTLAHYALDMKQPTGIVKTDNDYRRIVAYVQRLREKYGQETRIVCGYEAGCLGYTLYHQLTKMNLECVILAPTTLPSPRGGKRVKTDGRDAANIAQCLAYGTYSPVHVPSAEDEQVKEFIRMRNDHCQMLKKLKQQILSFCLRHGYQYSGTRSNWTQAHMKWLDALQPEGLLGDTLEEYLTSFRYHQNKLERLDRRIEEISREETYREPVGKLCCLIGVKSLTALSVISEVGDMHRFATAEKFAAYLGLVPGEHSSGNSVRRGGITKAGNVHVRTLLTEAAQSYTRGKVGYKSSALKKRQSGQSETVIAYADRANERLRRRYYQMTLQNGKRHNVAKTAIARELACFMWGLLTEHVA

SEQ ID NO: 318914 - protein, 388 aa, unidentified
MLPSIHHASTEQTASDSPDLTLYASLELSRATWLVTCLLPERDRMSKYSTPGGDGGALLGLLERMRARAQQLAGRPAKVVVIQEAGLDGFWVHRLLEANGIESHVVDPASIAVPRRRRRAKTDAIDGETLLRTLLAWTRGEPRVCAMVVPPTPEEEDRRRVCRERAILLQERIRHTNRIKGLLAGQGITDFNPLHKDRRQLLDAARTGDGRPLPHQLKAEILREIELIELLLRQIADVEAAREVLAGPKAAKAPSPVVLLEQLKGIGPEIASVLYLEGLFRSFGNRRQLAAYAGLAPTPWRSGTVDQEQGISKAGNPRLRSTMIELAWLWQRHQPASTLSRWFHTRVGNERGRIRRISIVALARKLLIAVWRYVTQGEVPEGAALKAA

SEQ ID NO: 318915 - protein, 316 aa, unidentified
MVGIDVASTQVEVAAIGAELPATLSRVSNDAEGHSALADGLARLKPALVLMEATGGYEAALACALQAAGLRVAVVNPRMARDFARAMQRLAKTDRIDAGTLAEFAGVLARRTDCDRFIRPLSEPEQQDLAALVTRRRQLVTMQVAERQRLHLARPVTRPSIEALLEAIARQLDDVEAEMVRHVEEHHAQMAKLLQSVAGIGRVATATLIAELPELGRLNRRQICALVGVAPYANDSGMSRGRRRIAGGRFEVRRALYMATLAATRYNPAIRAFYERLVAAGKLKKVALIACMRKLITHLNAIARDHLNGRSGLGNA

SEQ ID NO: 318916 - protein, 411 aa, unidentified
MHHRQNYLYVGVDLHKEQHTAVIINCWQEKLGEIQFDNKPSAFSKFLLEVETYVSAGITVVFGLEDVGGYGRALAKYLVDHEQVVKEVNPALSFLERKSHVTTQKSDSWDAECVARILINKLNQLPDAKPNDLFWSIQQLVSRRNALVKAQSALKNQLHIQLNHHYPSYKKFFSELDGKTALAFWQQYPSPFCLEGANIKQLTAFLLDVSNNTCSVKKASDILKLVKEDGQTMKEYQETRDFLVRSIVRDIEFKKKEMKYIERELKRLVNLLDYQLETVPGIELVTASALIAEIGDIRRFPNTNKLARFAGIAPVYFGSGGKGKVHKSKQGNRALHALFYNLAVQQVQVAKGSKKPRNPVFHAYYQKKLKEGKTKGQALVCIMRRLVNIVYGMMKYKTAYELPVVEEKEVV

SEQ ID NO: 318917 - protein, 405 aa, unidentified
MEVLYKRCCGIDIHKNMMVACIFTSVRKKEIRQFSTMTEDILQLVSWLKETDCEMAAMESTGSYWKPVYNIFEEEQIPIMVVNAQHIKGVPGRKTDVKDAEWIADLVRHGLVKASYIPNRDQRELREITRYRQEITEERARELNRIQAVLEGCNVKLSSVITDISGKSGMTILKAIVSGETDPVVLSELAEGRARDKIPEMQKSLQGRISEHQQKMLKHQLGHIESLTALIMDLDADIKKKTESINWAIEALDDMPGIGRKSAERILAETGVEMEHFQNESHFSSWAGLVPECKESAGKKMSTRIRKGNKYLKATLVECARAGIRNKQSYLYSRYQRIAARRGGKRALIAVAHAMLIAIYHILKEKVPYHDLGADYYSVINQEKMINRNIRTLEKLGVNVMIQPK

SEQ ID NO: 318918 - protein, 359 aa, unidentified
MEYVALDVHKNYTWARVENSQGARLYESRLAHGHGTIKNFVNRWSGRSPVAVETVGNWYWVVDEIEAGGGTPQLVNARLAKLMMGNVNKSDKLDCQGMNRLQRTGTLPTVWIPSSSVRDGRELARTRMVLSRQRTQLKNRIHATLGKYGYTVKGASDAFGKKGREIIEELLLKLPPHTQQALRLILDELDHVTDNLKAIEGHMIEIFSPCPQTQWLKSLPGVADILAVVIWTEIGTIERFNRAEQLASYCGLVSRENSSGGKIRLGPVRRDVNVYLKWAFVEAANSACSMRGAVGMVISAGFMSGLNPAGAMAKPKSPSHATSLRPASGCLRKESPIGNRCRPRNAKRVRLMSPTRLAF

SEQ ID NO: 318919 - protein, 388 aa, unidentified
MHIVTDRPHAPTAIRTDLGAIFISLELSRSTWLITSLSPGGGEKMSKHTVRSGDVAGLWARFSQLKDKVQVRTGQAVPIIVIQEAGLDGFWIHRLLQDKRVESYVVDPASIATSRRRRRAKTDKIDGEALVRALLAYKRGEPRVCAMVRAPTPQEEDRRRICRERKTLTAERVEHVNRIKGLLFAQGITDYEPLSRKRRERLEELRTGDGRPLPEHLKAQIGRELDRLELTLQQIKSVETERDAMLSPSDEGTRAPGAMLQNLKGIGAEFAGVLWSEGLFRSFSNRRQVAAYAGLAPTPWRSGSVAHEQGVSKAGNPRLRTTMIQLAWLWVRHQPRSILTLWFHQRVALNGGRARKVLIVALARKLLIAFWKYVTAGVVLEGAETAAA

SEQ ID NO: 318920 - protein, 349 aa, unidentified
MVTIGADSHKRTHTLVAVDATGRRLAEKTVSATTVGHLELVRWAERWPERRFALEDCRHLSRRLERDLLLAGERVVRVPPKLMAGARRSSREPGKSDPIDALAVARAALREPDLPVAVLDGPDRDLRLLVDHRDDLVAERTQGENRLRWHLHELMPGEEPGPRALDRAVTLAALEVRLAPESGTVARLARELVGRIRELTITINALEREIVGLAEQLAPSLLALQGCGGLSAAKLVGETAGIGRFGSRAKFARHNGSAPQPVWSGNVVRHRLNRGGNRQLNVAIHRIAITQVRLGGPGRAYFEHRLAAGDSRTEALRALRRRISDEVFRRMRHDEAARAASPSGLAAAA

SEQ ID NO: 318921 - protein, 347 aa, unidentified
MSNHIENGQVRVLGIDLGKSVFQLHGVDARGKSVLKKRLKRDELLEYMAQLPPCLVGMEASSGAHHWARKFQGYGHDVRLMAPQYVKPYVKRHKNDSVDAEAICEAVQRPNMRFVGIKSVAQQEILALHRVRSLAVKNRTALVNQIRGLLAEYGIVFPKSIKQARRAIVLILSDESSEMSANFRVILEDERDELAHLDERIGKYEREIEALAKAEPQCRLLMTIPGVGPITATALLASVGDVRAFKNGRELSAWIGLVPNQHSTGGKAWLTGISKRGNGYLRTLLIHGARAALRVCENKPDRRSQWAVSVSERRGANRAVVALANRMARSAWAMLVKQEAYGASAAV

SEQ ID NO: 318922 - protein, 329 aa, unidentified
MNIVGIDVSKSKLDCVLICSSRPDKELQKRVSNCEQGFKNLIEWCTKKAQCDPSQLHAVMEATGPYHEAAALAFFNAGCQVSVLNPAQIKHYSQGLGYKIKNDKHDASVIAQYALKHKLRVWQPDPQEYQDLRSLLYRLDAVESDIQREKNRLEKAQASESTSGAVFESYDRSITFLNQEKDCLEKQIREHINNHPHLKKDKQLLESIPGIGPVLSAWMSLLLRNGTRFDAAPQAAAFVGLIPTQHQSGTSVLKKPHLSKAGPAIYRAKLYMPAIVAIRHNPDVMDLYNRLLAKGKTKMAALGAAMRKLVHICFGVIKNQSPYCPQVAL

SEQ ID NO: 318923 - protein, 416 aa, unidentified
MNQKADKVCGLDVHKLFIFAAIMIRGMAEPMIKRFSTDGKGLLELRNWLEENGIERVAMESTGIYWRVVYWSLQDRFEMIVANAREIHDLKKARRKTDKRDCVWIARLCLNNMITPSYVPAWEIQQLKDLFRARVNYVEMRTECKNIIHKHLDIMNTRLGTYLSDIFGKTGTQILNGLVNGCTIEQIMERITDKRILKKKEDIIQSLQGTLNSSSILIIKVHLESIQDIDAKISELDAKIDDTLQNLHAEELRILLSVPGVGYNAAANIISEIGDVSLFETADQLTSWAGLAPSSHSSGGKVINGRIGKTGNRYLRRILIQVAHAAARTKGSVLGTFYRRLLKRRGAPIAIVALARKILAIIHHLLTNMEPYEEPGVKKRVRHQKVLKCDEFGISGAFEIIGKAENKVGAAGGGCG

SEQ ID NO: 318924 - protein, 457 aa, unidentified
MGRKGKRTEGLEETHPFSGMSQVNPKAAGADIGAVEIVVCASGDENTQIVRAFGNYTVDLQAIGRWLKEYQVETVAMESTGVYWIPLFEELERQGFECLLISSRSLRRVAGRKSDITDAQWIQTLHSYGLLESSFRPQAELIALRTLLRHRNQLVEHRSPHILHMQKALLQMNVQLSQAVTDITGVTGQTILRAILSGERDPQELASMREPGCKKSAEEIGKALTGTWREEHLFILKQSVEMFDFYTGQIRACDEEIERVYGLTRPDWVVGEVKPLGERKRNAHSKNRPQHPEEIRKHLKRISGVDLSVVDGFGISLAQTVIMEVGTDMRKFPSEKHFCSWLGLAPKHEISGGKVLKNKTLKTKNRAGQAFRMAAQSVKQADCVFGVTYRRLKARLGPAQATVATAHAIARVVYRMLKYKVEYETISVEEYEKKYQAQQLKYMNKKAAKMGYRLVPA

SEQ ID NO: 318925 - protein, 425 aa, unidentified
MRFIALDVHRDFCEVAIAEGGRVRRAGRVETTPATLELFAQSLAADDQVVLEATGNALAIARIIEPHVGRVVLANPKAVKSATQTAKTDKLDARTLAKLLAAGFLPEVWTPDEQTRVLRRRISRRAQLVRQRTREKNQVHAILIRNLKQRSPAADLFGAAGRRWLATQQLPADEREMVEACLRGIDFLDQEVVAIDRALAELVLASPELRRLLTLPGVNFVTACALLAAIGDVRRFPTARHLVSYLGLDPRVRQSGSEPARHGRISKQGPGETRHVLVEAAWHAARTTGPLRAFHERVATRRGRNIATVAIARKLAVIAWHMLSRGEDYAFARPSLVREKLRRLELMTGAERRQGKRNPVRVFATREQHRLDKELAAQAELAYRRLVQDWQPAINKGTGAAPGRASRRPSSGQAARQETAPPPAL

SEQ ID NO: 318926 - protein, 411 aa, unidentified
MLSVGIDVSKGESMVCALNQFGKVVLTPRRYKHVKSALGSLVERLRSFGDNDIRIIMEATGIYSLPVAKYFKEQGFFVAVINPYAMSRFRIGGQGSLRNVKTDKADSMTIAGYGRQCWDTLMEYNPAAETYWKLDYLLRLYQKILAYRVSILQELYGIIEQTMPGIKEIGIKSPQVSTAKDLLLDFAKTFWHYDQITGMSEKKFISRYLVWAKKKGHRPDVGKAAAIYAMAKDGIPCLPADPIVKQSIHTNIEALERVGTTLRDILSQMSGLAKTLPEYDIVRAMGGVGDVLVVKLIAVIGDIKRFRKAKSLVAYAGIDPPPYSSGKFEGNKRRISKRESTLLRKIGYEIMKSLTRNKRPEDGAVYDFIRKKEEEGKAKKQAKIAGLNKFLQIYYARVKSIYKKTTEGKAA

SEQ ID NO: 318927 - protein, 355 aa, unidentified
MRFYTQQHQFYCGIDLHARQMYVCILDAAGEIQVHCNMPATAEALERTLARFAGFDLALAVECVFTWYWIADFCAERNISFVLGHALYMKAIHGSKSKNDKIDSRKIAMLLRSGMLPQAYVYPAEMRATRDLLRRREYFMHQQSELLEHIQNTNTQYNYAPFPKRIRNRANRIDITERFEDPLVAKSIEVDVRVLDLYHQILLELEAQIQRQARHHDPVSLQLLRSIPGVGKVLALVILYEIQDISRFPTVGQFISYSRLVKCPHESAGKRSGGTHNKIGNAHLKWAFSEAAVLFLRGNEPAQRYHQKLVSKYGKAKALSVIAQKLGRIVYFILSRQMPFDSHRFFRDRVHESVA

SEQ ID NO: 318928 - protein, 343 aa, unidentified
MQIRSVGIDLGKTTFHLVALGASGKVLVKKRFTQKQLLAFTANMQTSLIGLEACSGAHFLGRALKQQGHDVRLIAAQFVKPFVKSNKNDFVDAEAIAEAVERKNMGFVPIKTDDQLDLQAIHRVRDRLVCRRTAVINQIRAFLLERGMVFAQKPAKLKAAMPDVLENAENDLTPMMRTLMDKLWAEWKLVEEQLKELGDELERISAADAGCTRIRQIPGIGPVVATAIVAAIGNGAAFRKGREFSAWLGIVPRQYSTGGKAKLLGISKRGNVYLRKILIHGARAAVLRIKRDRVPIGAWLDRLDSRAPKNVVVVAMANKLARIAWAVLSSGEEYKPANVAIAA

SEQ ID NO: 318929 - protein, 347 aa, unidentified
MKKIFIGIDVSKEKCDATAISAENGLTGVEKLDYLVFENRPKGFRTLLSWAKKLRSDIPQEDILFVCETTGAYDRALCDYIYSKGLDIWRESALQILWSSGVRRGKDDKTDSLMIAEYALHHMDKVHLYESPDSRILEIRALFLYRRKLEQEKTSKIVRIKELEATAGKSRTLTFILRDAKKSIRQLEKSIKECEDKILELIEADKALNKSYQHLDSVKGLGIVNITALIVYTNNFKAFKTSRKMATYWGVAAFRSKSGTSVDKRADVRNLSSSMLKSYLTQAAMHTIAKGGIYHDYYHRKIAEGKTHSIALNNAKNKLLHLAMSLVTHDMDYEANHEFLRTQRVAN

SEQ ID NO: 318930 - protein, 381 aa, unidentified
MAYLGIDVGKSSHSACALDAGGGVAFRAELANRPDDIDRLLERAGSGALVVVDQKRNIGALVLARAHAHGNPCAYLPGYAEKQARGMFPGIAKTDAIDAEVIARTALGVPGALRPAPEEPEGAASLRILSSQREFASSARTRAKNRLRATLLEADPALEGQIDPSSRWQVSLLAEFGGAAGCSAAGWRRFSRAAGRAGAPSAGARRLWEALLASSRSGRRLPAGEDVAVRMLAREIASLDAEIEELDSLVADSLAGDEVYECLLTVPGIGPKTAAALVTSVDISAFRGHDELASYCGVAPSDRRSGTSVRSTSPQRGGNRRLKNLLIFSCNSLIGTDNRFGRYYGECRARGMRHGKALKAVARKRLKVIYAIMRDAVPYAA

SEQ ID NO: 318931 - protein, 405 aa, unidentified
MNAVGIDVSKGKSTVTIRRPGDVILMPPCDIPHTQSAINALIEQIKGLDGETKVCMEHTGRYYEPVANWLSDAGIFVSAVNPILIRDFGDDSLRTPKTDKADSKKIARYALDRWAKLKQYGSMDKTRNQLKTMNRQFGFYMAQKTAMKNNLISLLDQTYPGANDFFDSPARSDGSQKWVDFVYTYWHVDCVRGKSLQAFTEHYQKWCKRNGYNFSASKAETIYQGSSDLIAVFPKDDSTKTLIRQAVTMLNTASQTVESLRIKMDQTAATLPEYPVVMAMNGVGPSLGPQLMAEIGDVTRFTHREALTAFAGVDPGKNDSGKRNQKSVRTSKKGSPSLRKTLFQIMDGLVKRSPADDPVYAFMDKKRSEGKPYYVYMTAGANKFLRIYYGRVREYLASLEESQES

SEQ ID NO: 318932 - protein, 440 aa, unidentified
MNQEDGSRLEEFRQFRREVRGSRADLLVGIDIAKEKHYAFFGMATGKTLLRRLVFENNLEGFGKLLDQARALRDQNGLRRMVFGMEPTGNYHKPLGEHLIRCGHLVVLVSGVAACENRKTLDGRWDTNDTRDAANVADLMSQGKCLFYEFPVGPLSDLRNLLSLKRRFKRVEQGYQVRIRNHLLAKYFPELDRYYRRPTPTNLAIVRWCLDPSVIAGLEYNRFAEMVRSRRGRYSQEKRLQEIWRLAVDSVGCEAGPTVEFEAKVMVEGLKQVRESLGEIEEKIQEICSSFPEYECLLSIPGFGPDVASKVLGAVGNPDRFQNRRQVLKLAGFDLCAKRSGKSSENAVPVISRRGKADLRNGLYQAALIASIKNPGFIAYYTEKLRGREREPGIKFKMRVKLAAKLLIIAWTLMKKRKPFHPGFLRAAGPSFSVGRREER

SEQ ID NO: 318933 - protein, 316 aa, unidentified
MAAESYVGIDVSKAELVVAVRPSGERLTLANDRAGIKRLVGRLGELKPTLVVVEATGGLQRQVVAGLWLAGIAVAAVNPSWVRNFAKGRGVMAKTDRKDAELLALFAERERPEPRPPADAETQALQDLVMRREQLLEMLVAEKQRLHRAAGTMRKELRHHIAYLEGRLKELEQDIDKTVRRSDGWRRKSEIVRSVPGFGPRFSAIALAKMPELGTLNRRQIGALVGVAPMPDDSGRRHGRRIIAGGRFEVRNKLYMCAMVAARSNPVLKQFYERLVARGKPKKLALAAVMRKLIVILNAMLKTNSLWRPPCPDPSV

SEQ ID NO: 318934 - protein, 342 aa, unidentified
MDIVGGLDVHRKQITFDCVQTQTGELFRGEIRPATRENLRCWLSGFSNDKRTAFALEATTGWRFVVEELQRAGIEAHLAEPAETKALRGPKKRAKTDRLDARHLRELLLIGRLPESWIPPEHIQELRTLVRLRKSLLEDRTAWQQRIHAQLFHNGYPQERNLLARESRERLERLEVPPSARKMVDHALSMIDHINEELAPIEKDLRSYARRQAGCRALMEHYGIGELTSVAMLSELGDSRRFSSSRKAVRYAGLDVTVSESDDKRAPGKLSRQGAPVLRWAAFEAAQVARRTGSPDHDYYVHTKERLGSSRACLAIARKLIRRAHHTLRELGEEALSKPLAC

SEQ ID NO: 318935 - protein, 420 aa, unidentified
MTNPYRWFVGVDWGSERHRVVVLDAEGALVASRNVEHTGVAQQQFLQWLAELTENRISEVAVGIEVPRGAMVEGLLERGFAVFAINPKQLDRFRDRYAVSGAKDDDRDAFVLGDSLRTDLHCFHCVTIEDPLILQIRELSRLDDDLQTDAVRLANQLREQLLRYFPSLLALNPAADEPWLWDLLEVAALPAQAAELGRSRIESVLSARRIRRLSAEQVQTALRTPALTLAPGAALAASRHALLLLPRLRILHVQRRQVAREIASLIEQLPAATDADGHPVEHRDADLLLSWPGLGIGIAATMLGEASRGLAQRDYHGLRCYGGLAAVTRQSGKKQVVIMRYACNRRLRNAFYHWSRCSLQKDPRSREHYAALRARGHSHGRALRGVADRLLATLIAMLKTRTPYDPKLRGRGRENIPSTP

SEQ ID NO: 318936 - protein, 445 aa, unidentified
MTNAMTVAKSEPEWAAYVAIDWADQKHYWKLVPAGSQQQEQGELQNTPEAVETWAAGLQQRFGGRPIAVCLEQARGALVYMLAKYAHLVLFPVHPTTAARYRETFCTSGAKDDPNDTAFLLDLLLRHRERLRQLQPDTVETRLLQFLVEERRRTVNERTRQSNRLTNCLKQYFPQILLWFDGVDSPLVGALLERWSSLDTLRRAHPGTLRQFFQKHNCRSAKRNQERIDAIYAAVPATNDAAVLEAGAVTARGLVALLRTLRDHIAELDRRIEQLVMAHPDGALFASLPGAGAVLVPRLIVALGTHRQRYDTAFEVQCYSGIAPVKESSGKTSRIHFRRTCPTFLRQTFHEFALHSIRQSEWAKAYYQHLRENKNKTHQAAVRSLAYKWIRIIFRCWKDGKPYEEEVYLQSLRRRGSLIVGTVGLHTCAGWKTVAGFQKLSENKT

SEQ ID NO: 318937 - protein, 315 aa, unidentified
MPEQNTSYVGIDVSQDFLDVHVVPEEQSCRVANDEGGFVALTDFLKSFRVSCVVLEATGKLESPVAAALSSAKIPVAVINPRQVRDFAKATGELAKTDAIDARIIALFGRAVAVQPRPVKDAEARQISDLLARSRQLTRMIAEEKTRLSRATGRARSDIKAHIQWLEERAKRIDGELDAEIKKSPVWREQDALFQSIKGVGPVLSRTIIAGLPEIQWISREGLAKLVGIAPLNFDSGRMRGQRHIWGGRAHVRAVLYMATVTAARWNPVIKAYYEKLIAVGKPRKVALVACMRKLLNVIRAVVRSGAPWEARPVS

SEQ ID NO: 318938 - protein, 450 aa, unidentified
MSDTWPQGPDEMPQSTSAPVFAAFASIDWAARKHVWKMARRDAPSEQGEFENTPEAVQAWATGLFHRFGGRPIAVCLEQSRGALVYMLTRYPHLVLFPVHPTTAARYRETFCPSGAKGDPGDTASLLDLLLRHRERLRPLQLDTAPTRLLQLLTQQRRELVDEKTRQKLRLIASLKQYFPQLLQWFDDVDSPLVGALLQRWPSLQQLHRTNPSQLRDFFHEHNCRGEERIQQRIQAIYAATPATEDAVVLEGEGSKACDWVAVVATLRERIAKLDQRIAELVATHPDSVLFASLPGAGPVLLPRLLVAFGTRRDRYDSAYQMQCLSGIAPVTESSGNRQCVQFRFHCPKFLRQTFHEFAFCSLQKSVWAQAYYKLQRDKKKSHQAAVRALAYKWIRIIYRCWKDGKLYDEQTHLENLQKRNSPLRGGIASATGKRWNPVGGLRKISENFS

SEQ ID NO: 318939 - protein, 402 aa, unidentified
MNAVGIDVSKGKSMVAIMRPFGEIVSAPFEITHTASDINSLVELINSVEGESRIVMEHTGRYYEVLAHQLSAANLFVSAINPKLIKDFDNDSLRKVKSDKADAVKIARYALDKWQNLKQYSVMDELRNQLKTMNRQFGFYMKHKTAMKNNLIGILDQTYPGVNTYFDSPARSDGSQKWVDFASTYWHVDCIRKMSLNAFIDHYQNWCKRKKYNFSQSKAVEIYGKAKELVPVLPKDAITKLIIKQAVDQLKSASTTVESLRTLMNETASKLPEYPVIMAMKGVGPSLGPQLMAEIGDVSRFTHKSAITAFAGVDPGVNESGTYAQKSVPTSKRGSSDLRKTLFQVMDVLIKTHPEDDPVYQFLDKKRAQGKPYYVYMIAGANKFLRIYYGRVKEYLSSLPES

SEQ ID NO: 318940 - protein, 436 aa, unidentified
MIRLGPFLYLIYSIGGDYMSQELSTLYVGIDVSKESNYTYITNFNQSFHQSFNTKNNMHGAELIESNLIEILDDKNYTDIICVLESTGIYSAHIATYLSASENLFSYNIFVYCINPKISRNYRASFSDMDKTDPQDSYILADIARVGRTKSMTPFKGSQKLALQRLTRHRVHLAELLAKEKTYVLTNIYLKFSEFGKPDFKFTSNKWSQTAISVLEEFSSPDEIINTSLDDLVDFIIAVSKNRFSDPEDIAKTLKKAAKASYKLDRTAYEPINHAIASSLVIIRTYEAEIKKINKSIEILLKGFAVNEYTSLRSIPGIGPVYAAGIISEIGSIHQFDNEASLAKYAGITWRKNQSGNFEADDTSMTKTGNHYLRYYLIEAANLVKKYIPAFKDYYHKKFNEVTKHQHKRALALTARKLIRLIYGLMSKDQLFNKNY

SEQ ID NO: 318941 - protein, 338 aa, unidentified
MKELYYIGLDVHKKSISYTIKQADGRIVRQGEVEARRAALSAWARAIGKPWVGALEATLFTGWIYDHLRPFAEELQVAHPAMLKAIACGKKKNDRLDAEKICDLLRCNLLPRCYMAPAEMRELRRVLRYRHLLLSEAVRMKNKISGLLLEVGEPYVKQKLHRRRYFQELLGNLRDTPASVLEMLAISRGSLELFDGLQRKLLRGLRRHPLLAARVERLRTIPGVGEVLALSWALETGSPERFSSLRRAISYCGLCSAQRESAGKNQRGPISKQRNKHLQHVLIEAAKLAPRWNPPLRRLHERELQRGSRNRASLAVARKLVAYLLAVDKSGRAFVPQA

SEQ ID NO: 318942 - protein, 365 aa, unidentified
MGVPTLAQVRSWAGLDVHAAKVVAASVDQASGELSLRRLPGATEKVVEFCAALPAPAVVAYEAGPTGFGLARALGERGVRCVIAAPGKIARAPQDRVKTDRRDAERLVRLLMAGELHPVRVPSVAEEALRDLVRAREDLRGDLMRARHRVGKLLLRHDLRFDGNNWTQRHRDWLADVQLADPVAQAVLLDGMGAIDALLVRRESLERQMHALIPTSPWATEIARLRCLRGIDTLTALGLCAEIGDFRRFRRPGQLMSYLGLVPSESSSGERRRLGSITKSGSQHARRLLVEAAWHYRRTPRVGRELAARQHGQPAQIVAIGWQAQRRLHRTWRRLDEQRGKRRTLVAVAVARELTGFCWAAATAD

SEQ ID NO: 318943 - protein, 414 aa, unidentified
MLKIVYPICCGMDVHKSFVVACIATTNERGVTTYKSKRFSTFTGDLRRCAAWLAENNCKDVCMESTGKYWIPLYNILERTCNIVLAHPKYVKAIRGKKTDKRDAKWIADIFKHDLVTGSFIPLADIRQLRDLVRYRWKLTSFTTGEKNRAQNCLTVSNFKLDDVFSDVFGKAAFAITTRILNNPAEKITDVSNFRTKGMKATDEQVLAAVDGAMCEEQAEKLRIIRSHMDSLELCKLNLESLILATAEKYLPQLNLVMTAPGIQSFAAIGIISEIGVDMSVFPTSKHLCSWAGLTPQNNESAGKKKTTRISRAGAYIKPLLVQCALCAIRAKQFPEVRNRYLALKKRRGHKKAIIAIARILLTAIYNMLKKNEPYNPELYRKGDRPPTHREVSVGEAIFILQRQGYLVTAPPTP

SEQ ID NO: 318944 - protein, 323 aa, unidentified
MTTVTIGIDVSKKQLDVAIGGLPDQQPYCQFPYTVSGKKQLLKWLDRHEAQGGQVCLEATGQYSVEIATTLYEAGYPVSIENPIRTKNFAKSMMTRHKTDKVDAQVLANYALIMPLRAWSPPTILHSNIKELKRLIDDLQADRTRIINRLEGLRKASPARRYLNEQLEQVERQIAEIENELDAQLNQDDNLRSQSQLLISVIGFGKKTVLQLLAEIPNWSRFGSADQLVAFAGLHPRHRQSGNKIGYSHLSKQGNAHIRKTLFFPALSAMQHNPHLKRFADRLIAAGKEKMVVVVAVMRKLLVLAYAILKSGKPYDPEYQVSA

SEQ ID NO: 318945 - protein, 413 aa, unidentified
MKKHTYRAKKVNDVNWTQLKEKLAGGTAVLAVDVAKEKQYALLSTADNRVSELWHWNHPDQTRDVLTGLESLACLVTVVMESTGTYGDALRYQFRRLGFAVDQISAKRVFDAKEIYDGVPSLHDAKSVSVITRLYREGLTSSWRESNDDERNLDALRREYDLHQSHYQRNQNRLEAYLSRHWPELTYLLALDSVTLESLLIEYGSPERIAGQAKEAGRKLRTWSKNQLKEDKIERILHSAAVTVGQPCLDAERRYLQALAEEMRHSRQQRAHAKQALEAIVSADAGLTELSRCIGLVTTAVLLSCRLDPRHYANARSLQKALGLNLKEKSSGRYQGRLKLTKRGCALARRYLYFAALRLIKNDPVVKAWYLAKADARFKNKTVIAVMRKLAKALWYLGQGERFEARKLFTVAA

SEQ ID NO: 318946 - protein, 355 aa, unidentified
MQKYKVSFKGQNIFVGIDVHLKTWHVVSITESGYKISFSQRSDAKVLFDTLNKKFPDAHFKSAYEAGFCGFSVHYKLTEVGFENIVINPADVPTSNKEKVTKTDAVDAEKIARALKQGQLTPIHIKSKEYMDDTNLIRLRSRFVKDLGRMKSRTKHLLYNQGVEYPERFQKNGTRWSRNFIAWLRNEVEFLSEEKRTLMLLVDEVENLRKAVLRITKEIRRLAVSPKYKENFELLTSVPGIGEITGMSLLTEIDNDLGRFSNERQFASFLGLIPTCHNSGEKTSNGMKTFRGNHQIGPLIVEASWVAIRNDRELSNCYINYCQRMKPQTAIIKIARKLACKLFAVLKTKKKYVHQ

SEQ ID NO: 318947 - protein, 370 aa, unidentified
MAQSTPLFVGLDVHKDSIAVAHATGGQPDPPVFVGAIGSRQADIDQLLRRLRSKASALTFAYEAGPCGYGLYRYLTGKGLHCQVVAPSLIPKKPGDKIKTDRRDAVELARLLRSGDLTAVYVPSVEDEAIRDLCRARDAARVTGKDAKLRLKAFLLRLGHHYVGRATWNEAHRRYLAKVVCPTPAQQVVFQESVRAVDEQVDRLQRLEAELVERTPGWRLAPVVEALQALRGVQFLTAITVVAELGDLTRFDSPRQLAAFVGLIPSEYSSGGTRRQGGITKAGNGRARRALIEAAWAYRHPAKVSLHIQQRIDRLPKSLQDLGWKAQVRLCKRFRRLTARGKHPNVAVTAIARELIAFMWAIAREVPLSA

SEQ ID NO: 318948 - protein, 429 aa, unidentified
MNYNTQNAKIASITEKTLIIGIDVGSETHYARAFSWRNYEYSKKPFAFSNDEAGFAAFKEWIDDIADKHEMEVIIPGMESTGHYWLNLGAYLQEQGMKPVHVNPHHVKKSKELDDNNPSKNDRKDPKTIAGLVNEGRFSYPYIPAGIYADIRNLSNLRIQTQEEITRIKNRMARWFSIYFPEIKDVYRNPDAVSGLMVIKQAPMPCDIRELGVEGVNKIWRDARLKGAGIKRATTLVTAAEHSIGNTEAPRSARKEIRNLLEDYEGYKKRMDELMEEIEKTLSEIPYIDKLMEINGIGIKTVSCFIAEVGDIGRFDNPKQVQKLAGYAIVADSSGKHNGESRISHRGRKRLRYALYESAISVIGKNKEFKEIHSYYRTREKNPLKKMQSVIAVACKLIRIFYTILTKGVDYDGQKMLNDIVRPEIQPAA

SEQ ID NO: 318949 - protein, 346 aa, unidentified
MNQIIRIGMDTSKHIFVLHGVDASEQPVLRKKLSRKLVLEFFAKLPPTVIGMEACGASQYWARELSRLGHEVKLMAPQLVKPYVMRNKNDGRDAEGLCEAMSRPSMRFVPVKTAEQQAALMLMGVRDGLIARRTQLTNTIRGHAAEYGLIAPKGLDAIEPLLARIAQDETLPALARELFVVLGRECVRLEGELEAVEARLMAWHRGDATGRRLAQIPSVGPIIATMLVMKTPDPGAFRSGRHFAAWLGLTPKDHSTAGKTRLGKITRAGDQDLRRLLVVGATAVIQQARRGRGHHSRWLLALIKRKPPKLAAVALANKVARIVWKLMVTGESYDAARLNAATTGTA

SEQ ID NO: 318950 - protein, 305 aa, unidentified
MTLHQHVLGVDVAKDWIDVFDPSSERSIRIATSQLKAFARGLGNVLVVFEATGGYERPLMEALEAAGRPYARVNPRQAREFARATGRLAKTDKVDARVLSEMGRALDLAATPPLDPARKRLAELVARRDDIVRALTGETQRLAMARDAFVRRDIGRMIAVLRARRLAIEKELAAAISANDDLALAAARLRSAPGVGPAICSLLLARLPELGHVDRRAIASLAGLAPHACESGHRRGRRHVWGGRADVRRALYLAAFVASRCNPAFSAFRRKLEDAGKPAKVAILACARKLLVILNAMARDQRTFT

SEQ ID NO: 318951 - protein, 355 aa, unidentified
MNSEKYIGLDVHQATIVIAVTDSTGKLIMESILETEAATILQFFAGLRGTLYVTFEEGTWSAWLYDLLHPHVDKLVVCNPRKNALLKDGNKSDRIDARKLAELLRGNQLKPVYHGETGVRMLRELSRSYLSIVKDLSRVMNRLKAVYRSWAIPCAGRDVYYPRNRAQWLAKIPEAGVRRRAERLYEQLDMLRHLRQQARRELLVESRKHAITAKLRQIPYLGPIRSALAVALIQTPHRFRTKRQLWAYSGLALETHISAEYRLVEGQVRRSKKVLSIRGLNKDHNHDLKGLFKGAATMASVRPGPFQDFYQTALAKGIKPTMARLTLARKIAAITLTLWKKGESFDAEKLKSQAA

SEQ ID NO: 318952 - protein, 342 aa, unidentified
MEHYAGIDVSLESASVCVVEAGGRIVREAKVASEPDALIAWFGKLAVKVSRIGLEAGPLSQWLYAGMREAGLPVELLETRHVRDAFKAMPVKTDRNDARGIAQLMRLGWFRPVHCKSLPAQELRAVLTARKLVQGKKHDIEMSLRGILRGFGLKVGPTTTRSFEGRVRELVEGHPTLLAVADALLLARATLGEQLGKLQKRLVSLARDDTRARLLMSTPGVGVLVALTYVAAIDDPARFRSSKAVGAHFGLTPKKYQSGETDVTGRISKIGDASVRTALYEAANVILTRPVKGSSLKSWAMRLAKRAGMRKAKVALARKLAVVLHRMLADGTRFTADKAAAA

SEQ ID NO: 318953 - protein, 353 aa, unidentified
MPIVAEKYQFVIGVDTHAASHSFAVIAPATTAVGQEAQFPATAAGLSRAVAWAGRHAGSPDVALVVVEGIGSYGAGVARAFTAAGYRIVEGGAQSVGDRRGTGKSDALDAVRIARSVIGTDTAQLREPRADGIRNALRILIISREMMTRERTATVNALTALVRTTDLGLDARKALTIGQLRVIAAWRTRTGDAIDVAVARAEATRLARHALELGTHAAANARQLDGLVRQVAPDLLDKRGVGPVTAAVLVVSWSHHGRVRSEAAFAALAGTCPIPASSGNTTRHRLNRGGDRRLNWAIHTIALGRMAHDPDTKAYIARRVAEGKTKREAMRCLKRYLTRSLHRTLENSPAMAA

SEQ ID NO: 318954 - protein, 392 aa, unidentified
MDELTHIGLDVHKETIAVAVLRSGTTTSDERVIPNTPEALRKLLARCPNRSALRTCYEAGPTGYDTHRLITSLGIACEVIAPSLIPKRSGVRIKTDRSDARNLARLHRAGELTKVRIPTPAEEALRDLVRAREDLKSDRRIARQRIRSFLLRYGRRYPSRADRWSFRFEVWVRALRFDEPAAQAAFDHLLSADSVRDSQLAAIDKQIEEAALCEPLAGPVARLRAFRGIDTLSAVTILTETCGFRRFASAASYMAFTGLVPSEHSSGASRHQGSITKTGNAHVRRVLVEAAWAYRHRPAVRGALAKRLEGQPPDVAAYSWAAQCRLSSTYRKLAAKKGPNKAVVAVARELSGFVWGAMTERMGVYTDGCERVGARRSGEILVDVMREENARF

SEQ ID NO: 318955 - protein, 366 aa, unidentified
MKKISTVAIEGMQIFKENQLTIGLDLGDRTSYSCIVDEAGQVIWEQELPTTPKGFEQVFGKIPRSRVAMETGTHSPWISRQLTQLGHEVIVAHARNVRLIGESSRKDDRLDARTLARLARIDPALLGPVRHRSAKAQIHLTVIRARAALVSTRTALVNAARGLTKSYGARLPKCGTEQMTRETAKELQPELREALNPLLAEIESLNERIAEYDTRIEQIAREKYPEVARLKQIKGVGPLIALTFVLTLDDPYRFRRSRDVGCFVGLRPGRRNSGMSEPQLHISKEGDRYLRTLLVQGAHYVLGPFGQDSDLRRWGLKLAERGGKNAKKRAVVAVARKLAVLLHKLWVSKEVYEPLRNNRKGMAQVA

SEQ ID NO: 318956 - protein, 392 aa, unidentified
MRYWVGFDVGKGFHWVCVIDGEGEEVLSRKVEATEEDLEAALSEIARLGGERTFGIDLLGGPATLLEAVLLGRGETIFHVPGIAVNRARDAYRGEAKSDSKDAHVIADQLRLRRGSLHEICPRDELIAEIRVLVAHRRDLLQDQTRRAARLREVLLGVFPGLEAALDLKREGALVAVTKVATPAAARNLGAARLFRWLKARGVRKAEDLAERIIGAARAQQRELPAAETKAALVAEIASEILRTRGRIAELDRRLKELLADDPKARIVRTMPGMGVVFTAEFLAEVGDLVTFASADSLAAAAGVAPVLRASGATSHRRRARRGNKVLKRVLYRSAFSCISHHQRSEAFYRKKRAEGKGHHQAVIALARRRVGVLWAMLRDGQTYTEHPSLAA

SEQ ID NO: 318957 - protein, 309 aa, unidentified
MLTAESDKRKTKVVVNTAAGVQALLAWCAKHGAQPAQLHAILEPTGLYHEQAATALPQVRVSLVNPAQARDFAKALALRSKNDALDSYVLARYGQTLSPALWHPAPLHARQLRALLTRREALSKDLLRELNRKEKSQFSPSAPLVDGSIDKAIAFLREQIKQIERAIDQHIDNHPDLKQDCELLNSIPAIGPQAGNAILAVMHNRHIDSAQSLAAYLGVVPVQRQSGSSLNSCARLSKAGPSQVRATLYMAALVGTRHNPHIRALYQRLLKAGKSKKAALGAAMRKLVHLCFGVLKNRIPYQPNYAMNG

SEQ ID NO: 318958 - protein, 369 aa, unidentified
MTTSQNSKPEIWIGLDTGVASTALCAIDGNSKVLIQQELPTKAAKIRDLLVEHFPDGVSSIGMEACSTSLQVVKGLRAFGYNANAYDTFAVRRFLELRKNKTDKNDARGIAEVARLGRGFLVEVHIKSNECYATRSKLVARHNMVRQRVSTELMIKSMLRVYGTRIKERTHNASRFRFHVERAIEEVRAETGHDLTQHMKPLLELSLKLRTEIVNLESELHDFAMSNDLCRRFTEIPGVSSITAVSFFTAIEEPTRFRRSTDVAAYLGLTPKIFESGDSTRNGGITKAGNPMTRVHLVSAATVMLAVAKKHDTALRRWGLDRAEAIGFSKARVAVARKLAVIMLNMWRTGRSYEAFPEVRDPEPLPVAA

SEQ ID NO: 318959 - protein, 434 aa, unidentified
MTTRQPMPDGAVLVAIDVAKHRNEILIEAPASLRRRRLTILNTREEHDRLVGALTGYEPPVVVGFEATGNYHRPLAHRLLEAGLELRLISSLALARTRQALTNGWDKNDPKDAQVILHMLRIGAVQHYHDPLAHGLLDLQELSKTHEMVSRAKTELWHRLLTHYLPLYFPEAERFRGNTRSDWFLALLEAFPTPSSITAMSKEEFITAAWSLVGRKVSKRCLLADIYETASNSIGLPIGPDSDAVALVGERPHRGRPGSSSLRMTLAEGRSLIRQRDEIERRAELMLAEDTDYRRLRTIPGLGPINVLTILAEAGDLRRFAHHRQFLKFCGLDLATHQSGTFRGQTKLSKFGNARLRKTFWLAAQVATRQRDNSFRTKFERYIAPDRNSPDRRRKALTAIAAKMARTAHAIVKGGVDYRPFFEGAVPGGRTPLG

SEQ ID NO: 318960 - protein, 413 aa, unidentified
MVFWSVQYLLQHLLVQTQVSHQLLQPLILILQLPQTPQFRHARPGKFFLPVNGMDYFLPLRLTVRNVLTRRITMNIVFLGIDLAKNVFQLCGLNQAGKPVYTKRTGRKELLQTLANIPACLIGIEASTGAFYWQREFEKLGHKVKVISPQYVRPFVRGQKNDGNDAQAIAVALMQPTMQFVPPKSPEQQDIQALHRARQRIVNHRTATVCQIRGLLLDRGIPIGSAVSRARRAIPLILEDAENGLSSRMRRTIAELYDLFNDLGCRIHFFDKEIETVFRQSEACPRIAKVKGIGPKTATAVVAAIGKGTEFKNGRHFAAWLGLVPRQHSSGDRQVLMNMTKKGDKHLRTLFIHGARAVVRVATNNNDGHMNQWVNQLKERRGFNKTTVAVANKNARIIWSMLRNDTGYQVVCN

SEQ ID NO: 318961 - protein, 435 aa, unidentified
MACSSCVALGDHGDRFGQAISRVCTINMCASQGRTSRTTNSGMEATHNHQGMLSPSLSHGQSGGGERMIERVHGIDRHKQFSTICVLNREGKEVQFEGACRELRKYVEGLGPSDAVVLEASNGSFWWADQIEARGGRCCVVDPRKFRIIKDSWNKTDKQDARNLAKALWVHVVTGEFGIPTVYKPTGVVRELRKLFAQYCALNRQITRVKNNAQAIFVDNGVGLKKEAKGRLFAPESGLELLKELNISAASCVCLEVTLQVLWRVEEAKERLAAEILLAGEPLRSQVELLISIKGVTPLIALAFLADVADIRRFRTLRKMNAYLGLVPRAKNSGGKERAGHITRESRKLTRTILTQCVHHVAASSASLDRYYRELREKRGTGRARVAVIRRLCGMMRRMLLSGEQYRWMDRGLYEKKLRQYEGVLKRMKQERAAA

SEQ ID NO: 318962 - protein, 352 aa, unidentified
MIIIGVDFHPEFQQIASVDTDSGEFQEKRLAHRDEAANFYRALAGHKVRLGMEASGHARWFERLVAELQFELWIGDAAEIRTRRVRKQKTDRQDAQLILRLLVEDRFPKIWVPSWENRDLRQLLWHRHRMVQARTRIMNQLQAVALNEGLRCKKRLWREPGRQQLESFRLAPWASRRRRDLLELLDRLNPTIAELSQAIEQEVEKCPEAQRLRTHPGVGALTALAFVLIIGEADRFQCGKQVASYLGLVPLEDSSGNRRRLGHITKQGSSMMRFLLVEAAQVTVRSVPEWRSKYLHLMMRRGRKTAKVAMARKLAVRLYWMWRKEWDYEQWKKFGSHAGQPGNRDGVRSITE

SEQ ID NO: 318963 - protein, 338 aa, unidentified
MNCTTLGIDLAKNVFQLHGVDERGHVVVQKRVTRAKLRATVAQLPPCVIGMEACGSAQYWAREFQQLGHTVKLISPQFVKPYVRGNKNDSRDAEAICEAVSRPHMRFVPLKPVESQDIQAIHRLRSRLIKERTALVNQIRGLLAERGIVIAQGITRLRKQLPVIVGDGENELTPLSREVMRELYAELVALDERITRADAMVHRVFTQSAACQKLAQVEGIGPVVATALVAAVGNAQEFANGRHLAAWLGLVPRQSSTGGKERLLGISKRGDRYLRTLLIHGARATVHRARRKTDARSRWILSVEQRRGKNIAAVAIANKNARIAWALLTSDAGYRKAA

SEQ ID NO: 318964 - protein, 356 aa, unidentified
MSVYLGVDFHARTQTVCWCDTADGLIHQRTLDHEHDDVRGFYTQFAVPAVVGLEATGYARWFHRLLEALGHRLLVGDAYVIRKCALRHQKNDRRDAELLLDLLLHGDFPAVHIPPIASQAVLRLLRYRQRLVEIQTKLRNGIQALALNHQLRLGPKLRSKQGQQQLLAIELDDTDVLQRENSLELLGQIRTRIRTLEKELTSRADQDARVRLLRTHPGVGLLTSLAVVHTLEPVTRFDRARRIAAYCGLDPRETSSGETVRMGHISKQGNRLLRHLLVEAAHRAVHSKADAELRNFYFRLMERKKNAAVAITAVARKLVLRLYRMLREDIDYTEFRRRGREARRARKTASPVTGGC

SEQ ID NO: 318965 - protein, 355 aa, unidentified
MHKHTYYVGIDLHRDFFVAVAQDETGTEVLKKRYENSIVSVEALVNEFKTPPMVVVEATRNWMWFIQALQKRGCTVQLAHPFRTKAIAFARIKTDSIDAKTLCDLLRAGLIPQAYIAPVETLDNREIGRARISLVHDQTMLKNRIHAIVIKENLKYAGTDMFGVKGKAWLTQQELTTGARDVITVYLEQLEKVQESISKVEELIKQRSSSIPEVKQLQTIPGFGTTTAFLLAAEVGDVKRFTTAKKFASYFGMVPRLSQSGNHAYYGRITKLGNPYVRWLLVQAAHRYYRMDKEAKRFVDRLSFRTGKKKAIVALARKMSVIVYSVLKENRSYEKRTKETLKVCPVIIPENQSLG

SEQ ID NO: 318966 - protein, 341 aa, unidentified
MTEVSTIGLDLAKNVFQAHGASVSGAILFRKKLRRDQVLAFFAAQPRCLVAMEACASAHYWAREIAKLGHEVRLIAPTYVKPFVKRQKNNAADAEAICEAAQRPTMRFVAVKSEAKQASAVVFRTRDLLVGQRTQIINAIRGHLAEYGLIAPQGPSHVDQLIAQIEDPSSGIPDPARSCLAVLVETLRALQGKIAALDTEIAARAKRDDGARRLMSIPGIGPLIATAIEALAPPVETFRSGRDFAAWVGLTPLQRSTGAQERLGKISRMGERTLRRLLIIGASGVVRWARRKGVPAGSWLARMLARKPPMLVIVALANKMARIAWALIAKGGVYRAPAVAA

SEQ ID NO: 318967 - protein, 592 aa, unidentified
MNEVMTIGVDLAKNVFQVDGVDAEGDVVIGRQLRRSRVLPFFKKLPPFLVGMEACATAHHWARQLIEFGHEVKLMPPHYVKPYVKRGKNDAADAAAICEAVTRPTMRFVSVKGAEQQSVLMLHRTRELLVRQRTMLINAIRSHMAGLGIVAPVGVPQVKKLLRIIADTDDARLPSLARTCLESLARQFLSLHDEIHATEKRIHAWHRMSEVSRRLETIPGVGPIIASALAASITDPGVFKNGRELAAWIGLVPRQNSTGGKQRLGKISKQGDQYLRWLLVSQRDPMMWLCYVGRATANIRLGEYDSAMDCCRKGMQLPNATYLLPLNLVFALTKLGQFEDARKAIDDGEDIHGEGVNVAARLEGLAEPGGICISGDVYNQVRNRIDANYEDRGEQQVKNVSAPVKVFAIRLQEPTGVSATAAQTIVDKPSIAVLPFDNLSGDPEQEYFSDGMAEDLITDLSKISNLYVAARNSSFSFKGQMPDVREVAEKLGVAYVLEGSVRKMGERLRINAQLIDAADGDHLWAERYDGNMDELFDFQDRIRAEIVSALELKLTPTDKARTERKPTDSLEAYDLFLKGRASYHRYTPEILL

SEQ ID NO: 318968 - protein, 382 aa, unidentified
MTWGGQREARDLHVDRLMNTNPTDSVSESVPLESSRKRAKRIKLGLDVHGAHHVVVRQIDEAAAQPPQKFTPEQFLVFARKQLALADEVHSCYEAGPFGYVLHRRLTQLGVRNLVVRPRDWSTYGERVKTDSRDAAALCSCLDRHLAGNRGALAPVWVPTAAQEQARALGRQRQSLQRERVRLILQGKSAAQLCGEHLPKDWWVARTFAQLAPTLPDHLVAQLQCWQRVLVSVNTELAALTAQLEQHQTTPRPLGVGALTLELLTREVGDWGRFRNRRQVASYTGLCPSEHSSGQTRRQGAITRHGNPRLRHLLIEAVWRLFKFQPNYQAIRKWHAALLEPRLSRARKKKIIVAVARQLAVDLWRLATGRVDAATLGLQLSP

SEQ ID NO: 318969 - protein, 342 aa, unidentified
MLYVGIDVAKNKHDVTALNVQGKTVLKPLTFSNNKAGFELLDLSLRQLNQDCLIALEDTGHYAFNLLNFLHEQGYKVYTYNPLLIKEFAKSLSLRKTKTDKKDAHGIALKLLSDPNREQFQHDNRQVELKILARHIHRLKKKQSDWKVQYTRCLDIIFPELDKIVGKHSEYTYQLLTRYPNPQKRIEAGFDKLIEIKRLTASKIQDILSVAPRSIGTTSPAREFEIIEIIKHYKRLIDKAETCVNDLMAEFNSVITTVTGIGGRLGAVILAEIRNIHAFDNPAQLQAFAGLDSSIYQSGQIDLAGRMIKRGSPHLRWALIQAAKACARFSPAFKAYLKTKLE

SEQ ID NO: 318970 - protein, 359 aa, unidentified
MRIIGCDLHSRQQTLAMLDTITGEVEKTTLKHDENIVREFYSKLPRPVRVGIEATGSMQWFVNLMEELGIECLVGHPAEIRAAEPRKQKHDRRDADLLLSLLVEERFPSIWLPTKELLDIRALLRHRHQWVGLRVKIQNALQAIALANGLRRGSSLWTQAGQRAIAALPLSPHAAYRRDELQAMYVKFETEIEKLNQRVEEQACGRAGARLLMTHPGVGPITALATDVFLGDPARFADSKALASYVGIIPRENSSGGRQRLGGLTKQGNPLLRFLWSEAVIHAVRRDPQLKHFYRRKLIQKGLGKARAAVARKLGIRMWIMLRDRIEYNEFCRRGQMQQRSGDARAGMPEPRYGAKVTG

SEQ ID NO: 318971 - protein, 363 aa, unidentified
MTRKRYYIGMDVHKDSVQMAVYTEKGEEPVYERRLNNETGLLIKEVSRYSREGKTEVAYEAGCLGYVIQRAMEKAGIPCHVLPANKVAKKREDRIKTDKRDARLIGREIRSQNIRPIAVPTSADEAARDLMRCREDINEELKRAKQRLLKFLLRHGYCYTERTNWTVRHWKWMGQITFAHDHERLVYEEYRSQIQALLERLGRMDRQVVEAAESGRYREAVSRLRAFKGIDYIIALAVVCEIGDFRRFASAKAFMSYLGFVPSENSSGGKRKQGGITKAGNGHLRKLLIEGAWHYTKGARVGKRLEQRRSGCPASVIDIADRALHRLHKKYIRLLFNGKHKNKAVTAVARELAGFIWAVQVSA

SEQ ID NO: 318972 - protein, 368 aa, unidentified
MFTERTSLGLDVHARSIKAAAIDTLTGELIERTMPSDAGEVMALVAGLRAGHGDVKVTYEAGPTGFELARALAEEGIACQVAAPSKLLRPSGERVKTDRRDAILLARLARNDDIVAVRVPTRSQEGARDLVRSRADARGDLMTARHRLSKMLLRRGIVYDGARTWTRIHDAWLRRVRRDHVIGMGPSALAAFDDAYDTVVHTTARRDRLDEAIAGLYHDGELAPTARRLACLRGVSALTAVSLAVEIGDWSRFKGSTIASYLGLVPSEHSSGTSRSQGPITKTGNTHARRLLIEAAWHHAPAYRPSKAIRARWALAPAPVAERADAGNRRLHARYQALTARGKKHAVVATAIARESAGWLWSLATMDA

SEQ ID NO: 318973 - protein, 429 aa, unidentified
MQMIVERGCALDVHLSSVVACALVGPADQPPQRHERVFGTTYRELEALRGWLKELAVTHVAMESTGVYWKPVYAVLECDFTLLVGNAQHLKQVPGRKTDRKDAAWLAELLHHGLIRPSFVPPPEIRELRDLVHYRRSLVAAQTSERNRTLKLLEGAGLKLASVVSNVFGVSGMAMLKALTTGDATPETIAALAQGRLRRKRELLTAAAEQRLGEPQRSMLGVQLRRLAAVEADIADVESRITERMERFRVQPRLLTTIPGVNELTAATIIAEIGIDMTSFGSASRLAAWAGVCPGSSESAGKKKTVATRKGNPQLKAVLVNAALSAARVGGSYFKDKYHRLKVRRGAKRAAVAIAHKLLVVAFHLLSTGEPFRELGEGFLDQQARHRTTRRLIRRLNQLGYEVQIARRAEGGPSAGLPTSVAGNLVRAP

SEQ ID NO: 318974 - protein, 372 aa, unidentified
MKKHSIFVGLDVHKDSIDIALVESDRSATVRFYGTIGGELTDLEKAVKKLQKAHPDAIFHFAYEAGPCGYGIYRFLKKSGHDCIVVAPSMIPKRSGNRVKTDRRDAQSLTSLHRAGELTPIHVPRIEDEAMRDLVRSRQDSVKAGRVVKQQVKGFLLRHGIKFQGKGDWKSSHLKWLTGITMPIPAQQIALQEYINAVKECADRVARLTTQIQELLPSWNLAPVVAALQSLRGVSLIIAVTTVAELGDLKRFTTPRQLMSYLGLVPSEHSSGDSRRTGGITKAGNGAVRRALVEAAQTYRLPARLSKTLLARQEDLAPQVCAIAWKAQVRLCNRFRKMTARVKKYQKVVCAIARELCAFMWAIAQEVECTPA

SEQ ID NO: 318975 - protein, 457 aa, unidentified
MNRKRTKSKVDRTMPMVHPNAAAIDVGATIHMAAVSADRTPEPVRSFGTFTTDLHRLVNWLKECGVETVVMESTSVYWIPIFELLDARGFTVFLVNARDAKHVPGRKTDVSDAQWLQRLHSYGLLRASFRPKGQIAELRAYVRQRERLLEYAASHIQHMQKALTEMNLQLHHVVADITGTTGLRIIRAILAGERDSKALAHLRDYRCHASAETIEKALTGSYRAEHLFALEQALALFDAYHEKVSACDVRIEAVLKELSIGRSRGSGSLPSSRRRTDQTNAMAFDVRAALFALLGKDVTQINGLGPYLSLKLIAECGDDLSAWPSAKHFTSWLCLAPSNKISGGKVLSSRTRRSGSRASALLRLAAVTVGRTDTALGAFYRRLSARIGKAKAVTATARKIAVLFYNAVRHGMEYVDPGASFYETRYRKRVVDNLHRRAKAFGFVLHPAEPTPSVAVS

SEQ ID NO: 318976 - protein, 424 aa, unidentified
MKTTTAFKATIGLDWADQKHDLWIRPADSQKDEHRALQQTPEALHSWVAQMRQRFQNGPIAIAVETSRGPVISALMAYDFIVLFPVNPKALKDYRAAFAVSGAKDDRTDAQLLEEFVRLHQDKLRAFHPDDELTRKLARLTENRRNLVDQRTALVNQLHSILKTYYPLAEMLLGSEMTTPMAADFLARWPELATLQAAKAQTIREFLYKHNSRSEKKIQERLDVIKNAQPLTTDRALIEPASAMVLALTGMLKALHKSIAQFDQAIEQAMDKHPDAPIFRSLPGAGPAMAPRLLVAFGTQRDRFDSAEDVAQLYGIAPVVVQSGNSRTVHMRHRCPKFGRQTFHENACCAAKSEPWARSYYLRQRQRHEDKYHQACRALAYKLIRIYFACWKNRTKYDGQIYLNALSKNASPLAALLNKNTLGE

SEQ ID NO: 318977 - protein, 327 aa, unidentified
MDAIIERCAGLDVHQETVVACVMYGPLDRKPKQDTQTFPTTTKGLLALHDWLLQWECTHVAMESSGVYWKPVWNILEDSFTLVLANAQRIKNVPGRKTDVNDAAWIAQLLRCGLITPSFVPPEDIRDLRDLTRYRRRLLGHATSEKNRIHKILQDANIKLTTYVSDLFGVSGRALLEAVINGEVLTAEQVRDLVKTSLKRKVPELLDALNGRVRKHHRRMMRMHMDHLLYIENQIAELEQEIDRLLQPYRESVTLIQTIPGIKEDAAAVILAEIGNDMSCFPSDAHLASWGGLSPGNNESAGKKKHPNHQREQELKSSPMSGSLGCE

SEQ ID NO: 318978 - protein, 484 aa, unidentified
MARRKLSTFERLQRGERLNRKDRREVQQRLSLDDPGLDIIHRDAAGIDVGNESHFVSVPPERDPQPIREFGSWTGALEEIARWLKDCGIRTVVMQSTGVYWIPLHDVLQPHGLEVNLVDARGTKNVPGRKSDVQECQWLRKLHTYGLLRPCFLPPPEIHAVRTLWRLRIQHVRDAGRCIQQMQKALIQMNVQLHIALSDISGVSGQAIIRALLTGERDPNALAKLRDPRCQASEQEIVQSLQGNWKEDLLFQLQQTVDAYDFYQSQMNKCDKQLRRYMAALPTRDLPAPASAPSLPSTKPGKQRRARKPRKPKGNQPAFDLATELERILGVNPIMIDGIDVLTIQTVLAEVGPDLSAWKTEQHWASWLNLAPKRDVSGGRVIRHVRQHHTNRAGNAFRMAAQSLVRSQSYLGARYRYLRAKLGGLKAVKAMARYLACLYYRLVTKGQIWVDRGTQEFNRRSEQRELAALERKARQHGLQLIPAA

SEQ ID NO: 318979 - protein, 318 aa, unidentified
MSEAVFIGIDVLRDTLEVGSSAKPATWRHGNDGAGIETLTTELVSLAPALVVLEATGGYEFEAACALQAAGLAVAVVNPRQARDFARAMGALAKTDSLDARMLAGFARVLHQHPERERFVKPLADAELQRLQALVLRRRQLMGMLTAERQRLHLSHASARPSLERTIEFLKAQVADIEGESAEHVRAHHAALAQALSSVKGVGPATLATLLAELPELGKLCRRRIAALVGVAPLNRDSGQMRGQRTIWGGRADVRRTLYMATLVAVRHSPVFKAFYARLVAAGKPKKVALVAAMRKLLTVLNAIAKSGRSWDESLHSA

SEQ ID NO: 318980 - protein, 334 aa, unidentified
MGKLTEAGIDVSKDVLDVAMRCNGAGLETARFDNEAGGHGKLVRWLTKRGHTARVVLEATGPYSLDVALALQRARGIEVMVANPRAIKQFAGALMQRSKTDLTAAVALHEYATRMPFVVWVPPAEPVLHLRAMARRIAALVVERTRERNRLQAHTASAEHLDVVANDIAVNIRHLERRIALLTAQAVALIASDADLQRAYDRLTSVPGIATRSAVQLLPELLVLPADMTVRQWVAHAGLDPRAYQSGTSVHKPARISKVGNAHIRRVLYMPALVAVQREPRVTAFFDQLIARGKKPLQAYVAVMRKLLHAIYGMFTTNKDFVAEKFYAMASETA

SEQ ID NO: 318981 - protein, 455 aa, unidentified
MTGAKSGGMDAMAMINPGAAAIDIGSTMHMAAVNPRADDNPVRAFGTFTGDLHELARWFKACRVTSVAMESTGVYWIPAFEILEQHGFHVILVNARYAKNVPGRKTDVSDAAWLQRLHSYGLLRGSFRPEAGVATLRAYLRQRERLIEYCASHIQHMQKALMEMNVQLHHVVSDITGVTGMRIIRAIVTGERSPGTLAVMRDVRCHASAEKICAALSGNWRDEHIFALCQSLALYDFYQTKILECDRKLEVALQGLRTGKGHDTSSLPKVRTKTRQVNAPDFEVRSALFRVLGVDLTQIHGIGPSLALKLVGECGTDLAAWPSSKHFTSWLCLAPGNKISGGKLLSSKTRRSSSRTAAHLRLAAITIGRSDTALGAFYRRLSARAGKAKAVTATARKIAVLFYNSLRYGMAYHDPGATRYEEQYRSRLIGNLQRRAKTFGFTLQEMPAEPDMSVS

SEQ ID NO: 318982 - protein, 406 aa, unidentified
MISVGIDVSKGKSTVTIMKPGGEIVSAPYDVLHNYESLNILAGRLNAYDDEVRVVLEATGNYHLPVVVQLTGKGIFVCVENALRMKKYNAQNLRGSKTDDIDSLGIASYGLAYWNELTAVLPVDTAYSEIRTLSRQYYQFTSLLIKSKNNLINLLDQVMPDINALLKDSKINNKLTDFVARYFHFENIVKMGKTRFVADYCKWAKKQGYRDNERKATAIFALAQNGIPVLANTASTKIAVSETVRVLQATEKSRNTILTQLKEIAKTLPEYYVVLAMGGVGETLAPRLIAEVGDVRRFRSKHSLIAYAGIDVPVYQSGKFTAAERHITKRGNKYLRKTGYEVMQSLTKHKLADDVVFQFIQSKRSEGKAYKKAAIAGLNKFLRIYYARVSELYDEITNELVFTSNI

SEQ ID NO: 318983 - protein, 393 aa, unidentified
MICVGIDVAKDKHDCFILSSEGEVLADVFTIQNNAEGFDTLLQTIRRCVCPGDKIKVGLEATGHYSYNILGFLLDKGLDTYVIKPLHTNLYRKSLSLRKTKTDRVDARTIAAMLMSDVDLKSYTDTAYHNEELKSLTRYRFDKVRERAKLKQSVSRLVTILFPELEKLVPSLHMASVYALLSEFPGAKQVAGAHLTHLKAVLYDASKGRYGRDMATTLREAARCSVGSVMPTKSLELQHTIRLIRELDAEIEDIEAAIQSMMDEMQSPIMAIPGIGVRMGAMILAEIGDFSRFDSPDKILAYAGMSPSTYQSGQLSLSGAYSHMEKRGSRYLRYALYNATKYVCLWDPVFAAYLAKKRTEGKHYNVALSHAAKKLVRLIYAMEKSRQSYRNAA

SEQ ID NO: 318984 - protein, 353 aa, unidentified
MDTMYERCCGLDIHKKTIEACFRSGKKKTHMSFGTTSAELRKLTMWLVENDCQSVAMESTGSYWKPIFNILELSGTDMKIIVVNARHMKNVPGRKTDVNDAEWIAELLQHGLLRPSFIPDREQRELRELSRYRKSLVGERAREINRLQKMLEGGNIKLTSVVSEVTGYSSRRLLDRLLRSDEPMTEEVISELVHTSLVGKSKELETALDGLLSELQKELLIKVLDHIDDMSRRIADLDDFCRKQMDRYEDALDKLDEIPGIARRTAETILIETGLDMSRFPTAKHFARWAGLAPGNNESAGKRSSGRTTKGNPTLKSTLIQSAKVALAKRTHFLKPGIKRLQQSEAPTALVWL

SEQ ID NO: 318985 - protein, 350 aa, unidentified
MNVNHYIGFDVHKKTASYCVKTADGTIVEEGKLRATHDALRQWAGKRREPWHGAMEATLFSGWIYDTLRPFAAELQMGHPALMKAIAASKKKNDKLDARKIADMVRCNLLPACYVAPPEIRELRRMLRYRNLVVGQATRMKNKMSGMLMEVGAEYNKRQLHGKQYFTNLLDTLEEVPESVKDLLRLSRGAMEMFETTQQQLLARLGKVPLLAQRVMLLKSIRGVGPVTALTWALEVGDPHRFPSVAHAVSYCGLTSALVSSADKQQRGPISKQRNAHLQTVLVEAAKLAPQWNPQLAAVHAREVARGNRNRATLAVARKLVAYLLAVDKSGQRFAVYHPPAVETEAPKVA

SEQ ID NO: 318986 - protein, 335 aa, unidentified
MKLTRVGVDLAKQVFQVHGVDRAERPVWCKRLKRSRWIAELERDVEPGAEIRMEACGSAHHWARVLQGKGYRVKLIAPQFVKPYVKTNKTDANDAETICEAMSRPSMRFVAVKTVEQQDLQAVHRVRSSLIWERTAKANQLRGLVYEYGLVAPREISSLRRAVPQWLEDAENGLTVRFRSLLAGLYRDLKQLDERVRELDQEVAAITREHEPVRRLMQINGVGPLIASALYALVGDARQYRNGRDLAVAPGLTRQRSSGGKEKLLSISKARRRVRAHAADPRRTLGVAHGARQDGSDQSLGLGARGALTSERRCDGARQQDRPGRLGDAEAWSEL

SEQ ID NO: 318987 - protein, 413 aa, unidentified
MNKHTYRSKKVNAINWEQLRERWSGQALLFAVDVAKDGQYAELSCQGPDGAVLMHWDLLEGTAALIAELKGFGSPVAVVMESSGTYGDALRHRCRLAGFEVFRASAKRVHDAREVYDGVPSLHDAKAACLIAKLHRDGLTKPWHEPDARERELGALRREYEMHRGQYERCQNRLEAYLSRHWPEALRILSPDSVTLEQVLKKYGSPAEVAARGEEAAADMRRIGGHFLAEGTIREAVASAGATLGEPCVEAERRYLMALAGEMEHSRLHMRQAGRAMEALVGADGELSGMAKAVGLLTTAILLSLHLDPRHFASARAFQKALGLNLREQSSGTHKGRLMLTKRGSALARKYLYYAALRLIKNDPVVARWYAGRLDPKAKLKAVAAVMRKLAMALWHVARGQAFDAGRLLKPAA

SEQ ID NO: 318988 - protein, 345 aa, unidentified
MKYFFIGIDVSKEKLDATLIHYESKSDSEQQLAYTTVENNPKGFRSLVSWSKKNAGRGVKTDAMLFCCETTGGYDRALCDWLYGNGLNIWRESALQIKRSMGLRKGKDDKADSEMIAYYALRFRSKATLYKPLDGNMRSLRDLFLYRQSLVADRQAKLVSAKEKRHISSKSKVDKFIYRDAQKAIDILTKSIKECEHRMLEIIKEDEEMYRNYLHLTSCKGVGLVTSVMLIIYTDNFKGWNAKKMASYCGIAPFYESSGSSVFHKANTGGYSNRRLKGILTQAARSAITHNPTLRQYYLRMKAQGKPYGVILNNVNNKLVHILFSLVLHDCDFELDHETKRTARA

SEQ ID NO: 318989 - protein, 414 aa, unidentified
MQVLYPRCAGLDVHKDTVVACVRLAGEGQATTEVRTFATTTAGLCALAEWLVESSVTHVAMEATGIYWKPVWHILSDNPLELILANAAHVKNVPGRKTDVNDATWLADLLAHGLIRSSFVPPREVAELRTLLRTRKQLVREHASHVQRIQKTLEDANIKIASALSDIMGKSGRAMIEAMIAGETDPHKLAALADRRVQAPRAKLVEALTGRLNAQHRFLLRLHLGQIDALDRATAEVDAEIEGHLGPFADAVKLLDTIDGVDVLAAEVILSEIGLDMTRFPTDGHLVSWACICPRNDESAGRRRSTRTRKGARWLKATLIQCARSAARMKGRYLSALYQRVRGRRGDKKAILAVASSILVAAYHMLKTGTPYRDLGPNHFEPIKRTALARNLRKHLEGLGFAVDIKPLAAAQPV

SEQ ID NO: 318990 - protein, 456 aa, unidentified
MPDYFFGIDASKGYSNLVMLDSSKRCVEDDFQLDDTFDGHQKPYSILSEFCVRHPKANIFAAIESTGGYENNWFNALVRFQSHLPIKTARLNPCGVYNNSRAGLDRNITDKISAENIAKYIIEHPEKVRYQQQDPLAPLRKQWGFIKMLKKQKTQLLNQLESNLYTANPEILAYCKDNTPAWVFSLLQRYPTASKLAKARKSSVALIPYVTPQKAKKLIEEAKHSVASATDETTSQIIKATVQQIRQLSKVIDAQTKAMTDKCSIPEVELLKTFIGVGDDSAVGLILEIGSIERFESSKHLASFFGLHPVYKKSGDGSWGFHMSKKGRVVPRQILYMVAMVAIQSNPLIREIYEKHTEKGMEKKAALGVCMHKIIRIIYGMLKHNKPFNPEIDQKNRKKQNTQGEKKICRDKSRRYQAYDAKAPISRRQAKKREERKQSQSDNIAKCGIKAPVPVL

SEQ ID NO: 318991 - protein, 341 aa, unidentified
MTQTNIVGLDLAKNVFQAHGIDAEGKKTFNKKLRREEVKEFFENLPSCTVAMEAGSACHFWAREIGALGHRTLIIPGQYVKPFVKREKTDALDAQAIAIAASQPDMQSVPAKSAEQQALTVLITTRALFVRQRTKAFQAFRGQLSEFGIITGTGTAKLERLAMDLRAGVLQEIPTAVRDVLLAIYDEIEALTVKIIRFEKKLASLSKQEGDTRRLLAIPGVGPVTASTIKAYVPDALLFRSSRQFASWLGLTPRAHNSGGKTRSGRISKRGNPVLRALLFISGLTLVRQAKAKAHTVDAWLVRLVERRPYKVAAIAAANKIARIIWALLSKGGNYQSPKYA

SEQ ID NO: 318992 - protein, 452 aa, unidentified
MARKGKQASKSNNTALPVMRPDAAGIDIGATEIFVAVPADRAQENVRSFPTFTQDLYALADWLKHCGIRTVAMESTGVFWIPLFQILEERGFEVCLVNARHVKNVPGRRTDVSDCQWLQFLHSVGLLRASYRPEQQVCAIRSLLRHRESLVQMAATHVNHMQKALDQMNLQVHHVISDIVGQTGLAIVDAILDGERDPLTLAQLRNKRIKASEEVIAKSLVGDYRPEHLFTLRQSLAVYRSYQKLIDECDSEIRARLRDFEPPHPPAEIPEEGKSNKKPISTDGVLRSELKRVFGIDLTQIPGIRTGIAQTLFGEIGPDFTKFRSASAFASWMGLCPDNDISGGKVLWTGTRKVNCRAATALRMAAQSLHHSKSALGDFYRRMRAKLGAPKAITAAAHKLARIIFHLISARQEFDDSKFAADQLRFQKHQEKKLRAKAKSMGYELIPIEPAA

SEQ ID NO: 318993 - protein, 326 aa, unidentified
MQGKVTLKDSAAMEAYAGIDVCKRWLDIAIHPHGHCERFENTGKGLKKLMRWLSAYDVALIVMEATGKLHRKAHTALHDAGFAVAIVNPLRARLFAGAVGQLAKTDKIDAGSLALMAATVKPQAAAPRPEPMETLHELWRARQALVDERTAFLNRIAACASAFLKRELTRQQAALAASIARIDKELLRLIKTDAGLERRYKILLSIPSVGAVAASGLAIGLSELGACSNKQAAMLAGLAPVACESGESKGARHIRGGRAGVRRSLYMAAVSAITHNKPLKAFYERLIAAGKLAKVALTAVMRKLAVIANSLITQDRFWQEEAPQHA

SEQ ID NO: 318994 - protein, 341 aa, unidentified
MKPAMNVLGIDIAKHVFHAVGMDNTGEIVFRKRLSRHDLIPFMAKLPPVLIGMEACGGAHYWARRFREHGHNVKLMAPQFVKPYVKSNKNDSRDAEAIAEAVTRPTMRFVPIKDVDQQDIQALHRVRERLIGERTALVNEVHGLLHEYGIVIPKGVAKFRQAVIGKLESEKDKLTSLSQEMFWKLIEEFAGLEKQLAYYQEKLEALATTHPECQRLMTIPGVGPLTATALVAAVSDASAFKNGRQFAAWLGLVPRQHSTGGKDRLLGISKRGDSYLRKLLVHGARTTIRWVGRQTDRRSQWMRQLVERRGTNRTAVAVANKNARIVWTLLTSHQDSQLATG

SEQ ID NO: 318995 - protein, 400 aa, unidentified
MLLFFEVITMIFVGIDVAKDTHYAAVSDDSGAVLVKPFAFQNNAEGFCLLLKKLSEFDRSKLLIGLESTGIYSENLICFLYESGFRLAVINPIQTATLRKTAIRKTKTDKVDTMLIIKSLMVNSYRLYSQRDADSLKLRTLCRFRQNLKKSKARMKIQLAEYVNLVFPEFGKFFKSGIHIAASYALLKKYSSPKEIAALRTSTLCTLLSKASHGRFGKDTAEALKSLALSSVGVKNPYISIQIAQTIAQIELLEQQIKDLNSAIEEAMESINSVLMTVPGIGAVNAACILGEIGDIKRFSKPCKLLAYAGLDPTVRQSGQFTAKSTRMSKRGSALLRFALINSAWQLTLNDTTFKAYYDLKRSQGLNHYGALGHVAHKLTRVIFKLLTSDTPFIPAKLVA

SEQ ID NO: 318996 - protein, 310 aa, unidentified
MFSYPAGIDVSSGSLEIRVDQLDVAMSCSNSQSDFPGLIGWLTLHRVGRVLLEATGGYERKVMKALQAAGFEVIRINPCRAKSFARAMGQQAKTDPIDARLLAQFAAVIKSPDSRVTSAEQDDLRALVQQREHFVQQRDDDKRRLKTASSDVVKPALQSHIDYLQKVLKELESLIRQSTERLDRKKVALLCSVKGIGLVTAASLMSYLPELGEVGRHQIAALSGTAPYNDDSGKHKGKRHISGGRFAARRSLYMACWSVIRFQPEFAARYKALREKGKCAKVALIACMRVLLVRLNAMIRDGSEWKEQAA

SEQ ID NO: 318997 - protein, 414 aa, unidentified
MEVKYPRCCGLDVHKKTVTACVLIKEGAVAKKRTRRFGTTTGELQRLAAWLKSCAVTHVAMESTGVYWKPVWNVLEGQFELVLANARHVKALQGEKTDAKDSGWIADLLQHGLLRGSFVPGQEQRDCRDLSRLRQELVDDSNRVANRIQKVLEDANIKLASVASDVLGRSGRDMLRAMVGGQRDAAVLADLAIGQLRKKREALQAALEGRLRDHHRCLLGHLLDQWEFLEAKIAQLEADLREQMGPFQEVNQRLDTIPGVNETLGWTLVSELGVDMTRFQGRADRAAAWSGLCPGNRESAGKRLSGRMRPGNRYLRRALTQAAWAASKANGTYLQAQFRRLAARLGKKRAILAVAHSILVIAFHVIARNEDYHDLGGDYFDRRDPRRSARRLVRRLEQLGHKVILQPLAQQIPA

SEQ ID NO: 318998 - protein, 428 aa, unidentified
MAVSVHTDPSNEHTDHALPYQWFVGIDWGSQTHQVCVLDRERHRVGERSVEHEGIALAECAAWLTTLAAGDVHRVAVAIEIPRGAIVELLVERGFHVFAINPKQLDRFRDRHTVAGAKDDRRDAFVLADSLRTDRPSFRQVHVEEPHLLMLRELSRTEEALLTEFRRATNQLREQLHRFYAPLLQLCPAADEPWLWDLLELAPMPAHAAGLTEAQVAGVLKTHRIRRVSAGDVLKVVQAPALPVAPGTAEAASAHCALLLPCIRVLAAQLQTCARQVESLLTALGTVEAPTAPPSDVAIIRSLPGVGRKITAWLFAEAAQPLAERDYQILRTQGGVAPVTKQSGKRRQVVMRRGCNPRLRNALYHMAHCVAQRDAYFASVYAALKIKGQSHGRAIRSIGDRLLRMLVAMLRNHTLYDPSWRQPVRMER

SEQ ID NO: 318999 - protein, 343 aa, unidentified
MQSITTIGLDIAKSVFQVHGVDAGGQVVVRRQLKRRYVLAFFQKLTPCLVGMEACASSHHWSRELQALGHTVRLIPPAYVKPYVKRQKNHAADAEAICEAVTRANMRFVPTKTLEQQSGLVLHRARHLFIRQQTAVINAIRAHLAEFGIVATVGRHGVEELLNVVADPNDKRIPEIARACLSALGAQLRGIKEQILEFDRLIRAWHRSNEISMRLDEAPGVGPVLATAVVAAVADPKSFRSGRNFSAWIGIVPRQHSSGGKNRLGNISKQGDRYLRGLFVAGALSVIRYAKIHGTKHRPWLTALLARRPTKVAAIALANKIARMVWAMMARGERYKEPVAIAR

SEQ ID NO: 319000 - protein, 309 aa, unidentified
MKEELVYIGVDIAKAHLDAAMGNEKCRFANDALGHRQLVTWVKQMPASVQVICEPSGGYERALVRALARARIKVSLVQANRVRQFARAAGILAKTDCIDAEVLCEFGKVMQPQTVTAATLEPEHLRELESQRRHLTHLLVMEQNRAARVSDASVVRLNRSLINQIKKQIEKLDLLIKEHIEQSPGLSAKAQKLISIKGVGLRTAALLLAQMPELGQLNRREVAALVGVAPFNRDSGKMRGKRAIYGGRRFVRHGLYMAALVAARHNPILRNFYLRLRAAGKPAKLALTATMRKLLIVLNSALKPDLRYA

SEQ ID NO: 319001 - protein, 309 aa, unidentified
MTLWIGIDVAKATLAVCLWPQAKHYTFTNTAEGHAQLLALLHGQPVGNVLLEATGGYERAVLRALQAAGHPATRINPRRARAFAEAMGKTAKTDPIDAALLARMAELVQAPSPALEPEREALRDLVQRREQLIQQRDDERRRLHQARLPQVRDDLIEHIGHLRQRIRRIARTIVQTQRQLDDDLSRRLLAVDGIGEVTTASVLAYLPELGRLDRRQIAALAGLAPYNVDSGQHSGQRRIRGGRAPLRRVLYMASWSVIRTQPDFKARYARLRQRGKCAKVAITACMRVLLTRLNAMARDRVEWRAPMVG

SEQ ID NO: 319002 - protein, 377 aa, unidentified
MHSENIAAYIGLDVHKETLAVAIAAPERLGEVRYYGTINNEAQAVRRLFQKLQGLYGNILSCYEAGPCGFGLYHQLTAMNIKCQVIAPSRIPKSPTDRIKNDHRDAISLARLLRAGELTPVWIPDLTHEAMRDLIRARAAAKRDSRVARQRILSMLLRTDKRYAGKHWTGKHRTWLANQSFSQPSQQIAFQHYCQSLEQIEDRILQLDQEISRLLPEWSLCNLVCQLQALKGVGQLTAITLVAELGDFSRFSSPKQLMAFLGLVPGEYSSGNSIRPRGITKVGNSELRRLLYEAAWSYRTPAKVGAWLIYYRPDSVTQYSKDIAWKAQQRLCSRYRSLTAKGKKSQVAITAVARELTGFMWDIVLAAQSPFSQQKQN

SEQ ID NO: 319003 - protein, 318 aa, unidentified
MQKQRNKLNFEGQNIYVGIDVHNAHWTVTVLTEFNFHKKIHMEPSPEVLDKYLRTTFPNADYYSVYEAGFCGFWIHYRLVELGINNIVVNAMDIPTTGKEKDRKDDSRDSGKLADKLRSGNLKGIHIPLLSTQEARSLIRTRKRAVTDMTRMKNRIKQHLHFYGIEIPKEYSCVRGFPCSYIKWLHDVASKRSAVGRRSLEILTKNAEDQKNHLKDITRDVSLLSRSVEYRENINLLQSISGIGALSSIIFLVEIEDISRFCNCNNFASYFGIVPSCHTTGDGLFQMESIKHQDNKKFVKTGEMTRRAQKDLRSTLIE

SEQ ID NO: 319004 - protein, 461 aa, unidentified
MRKVSRRGVAAGRAEGKSLCARLAPSSGAQGSNGIQRRKRRPRMDKQECEFRLRGTGNLIGEGGRLRFAGIDIGAERHMVAVLDEQGEVLCRSSPFGEDASGYARLFELLGPSADCLVALEATGHYWRNLFVALIAKDYAVAVLNPLRTARFAEEELRRTKTDAIDALGIARFAQQKRPRAAQLPDSVTEELRELERLRERVVEDFADRLRQLHRAVDLGFPEFTRYVRTLESQLAATILSRYPTAASFRGVSVKKLARIVYDGSHKIGEELARNLIEAAEKSVGAHHSEPYRRRIKYLCEDLDVLRRRLKDLARDIERKLDDHEVGKLLMTIEGLGPLTAACLIAELGDPARFDSPGAIASYVGVIPRIRQSGKKRFTKGPAIPLGNARLRKSLFMVVLQMVRRNPWLRQYYERLRAAGKPGKVAIIAAMRKLLTAVWSVATHRRPFVPIMPQLPAPKNA

SEQ ID NO: 319005 - protein, 346 aa, unidentified
MAYYVGLDVSVKETSICIMDDKGVIAARTDVSTDPDLIAQFISKHASEVERVVHESGILAIWLTRELEKRGVPIICIDARLAHKALSGRINKSDQGDAEGLAQLARTGWFTQVHIRSEASERMRVLIGARERLIRMRKDLEGHVRGVLKVFGICMTSVATGKLRKGFRDQLVAAADTDPAIAMMAETFIPLHKTLCIARDALDEEVRTIARESDLARRLMTVPGVGPIVALAYIATLDDEKRFRKSIDVGAFLGLTPKRHQSGEMDWSGKISKCGDCDMRRLLYSAASTLISCTRKQSRLKEWATKLAERKGHKKAAVAASRKIAVILHSLWRNETVFEPGMEGAR

SEQ ID NO: 319006 - protein, 406 aa, unidentified
MNAVGIDVSKGKSTVAILRPGGEVVASPFEVSHNPRELNGLVTLMKSLDGDTKIVMEYTGNYYLPVALFLRKVGLFVSVVNPILVKDYSNKSLTVRKGKTDKKDSIKLAAFALDRWNELPLFSSKSDTRTLLKSFNRQYNQYTKLKVMLKNNLISVLDQTFPGANTLFTTPARKTDGHEKWIDFVLKFPHCECISRKIYSAFSKCYLLWCKKCGYKFSGAKAKEIYEFACNCTPSLADSEAAHALVSAAILQLNTLNETLASLQKEMDLLASSLPEYDTVMSLFGVGAVLGSQLIAEIGDVSRFSNKKALVGFAGIDAPPFQSGNFNPQSRSISKRGPAALRKTLFQVMAVILQNAPANEPVFLFMDKKRSEGKHFYVYMMAGANKFLRIYYARVMEHLNKTQPAA

SEQ ID NO: 319007 - protein, 354 aa, unidentified
MQNDRQSSETVILGVDTHLDIHVGAVISQAGKLLGTHIIQTNQAGYLELLDWARSFGILKRAGIEGTGTYGAALTRYLIKNGIYVVEINRPDRSKRRLEGKSDPLDAENAARTVLSGSSKAIPKMQSGACEALRIINVARRSAIKARTQAINQLRALLVSAPQDVRDKLWKSKPHECVTACINSEVSEHSPLRIALCSTLRSLAKRWMALTEELNELDESLDKLTRKYASNLRSQFGVGPQTAATLLAVAGDNPEHLKNEAALASLCGVNPLPASSGKTVRHRLNRGGSREANNALWTIALVRMRSDPCTRIYVDRRTGEGLSTKEILRCLKRYIVRELYPLILSDLAYANRRS

SEQ ID NO: 319008 - protein, 366 aa, unidentified
MKQLAYIGIDYHMNTISAAVIIKGQNDFFDTIHMKNNDKTILKYFKKLSKNFEIQACYEASCNGYSFQRKMNNWGFHCDVIAPSLIPKKPGDKRKNDYRDARNLTQFYANGQLTVVHPPTEEQESIRNLIRCRLNLKKDEKNVKLQINSFCLSQGLKWPQSKWTVKHRAWLSKIEFPDAYSQQVLSEYLGHLQYLSSRIANLDKIIEEISCSKVYASSVKKLRAFKGIDTLSAMILIAEITDFRRFPTPRALMAFLGLIPSEESSADKQKGGGITKTGNSRCRTQLIESVQHLMKKPTISYKMKSNLAQVDAASSNIAIKCMHRLHKRFWALVIKGKNRNKAKAAIAREFAGFIWAMMTQPESAII

SEQ ID NO: 319009 - protein, 413 aa, unidentified
MVKTAGKEGLMDFYVGIDVSKFKHTVAIIDQNGEVRKKSFDISNSREGFNLLLNELGLLGLKEQIKIGMEATGHYMNCLVRCLISNGYQVQIYNPSLIARFRDSEAVNLAKTDNLDAMLIAKYVATHPFTSSPQISYLIGEIRKISRTKYFLFGDKTACYNHLLRYLDEIFPEFVSFFKKNEDGSRKNMGRNLFESPTIRWLLSNYPSASKMAKMRVETGEALRRMSKGAISFNRFNQLRELAKNSIGYSTEVDEQIIRNLVNQVRIIDDEIDNLNELLEPLMEELNSPILTIPGIGVNLAAVIIGEIGDINRFSSPEKLIKFAGLDVKVYQSGTINIKGHIRKRGSPILRYALALSVQKLRIHSPVFSEYYYSKLRQGKATNVAIIATTRKLTRIIWKIMTTNQVFENIKRD

SEQ ID NO: 319010 - protein, 434 aa, unidentified
MRILYERCCGLDIHKCSIAVCVVITRDGKTEEETRRFGTMTADLLELAAWLKARGIEHVAMESTGVYWKPVWNILEAEGFDLLLANAQEVKIVPGRKTDQKDSQWIADLHQHGLLRKSFVPPRQIRDLRDLTRSRATLAQEHSSMCNRIQKVLEDANIKLSSVASDVFGASGRAMLLALMKGENDAEALAELSKGRLRNKIPELRRALEGRVTGHHRFLIDRHWRQMESLENQMRQFEAEIAERMKPTAEEIARMRESLPADAPLPPSPREEAIRLWMELPGVGLTTACSMVAELGVNMEQFPTSAHVASWAALCPGNNESAGKRMSGKTRKGNVWLRRAMCEAAWAAAHSKNTYFAAQFGRIAARRGKKRALLAVAHSLLVVAYEMLKHKGHYRELGADFFDGLNKEQVKRRLVQRLAKLGFQVTVTKAPTAE

SEQ ID NO: 319011 - protein, 484 aa, unidentified
MKAAKTSRLPRTTAKRSAGADGRQRPAKNLPVLHPHAAGIDVGATQHYVCVPADAVGPDESAVRSFGAFTGDLDQLVEWLLVCGVKTVAMESTGVYWIPLYQKLEAAGLEVVLVNARHLKQVPGRKTDLKDCQWIQRLHSYGLLSGSFRPEGPLCRLRVLMRHRSNLVASCGQQVLHMQRALDQMNVHLHHVVSDLDGETGMRILDAILSGQRDPEELVKLRDPRVRKSTVAEMEGALQGDWRPEHLWVLGQAREAYRFFQGQIADLDRQVEALLPQIVDAPPALPETERPQNPQATPNAQRPRRKKKKAGNAPAIDFTAELTRICGVDLTRVVGFNLLSVLILISEIGVDMSKWRSAKAFCSWLGLCPGNRISGGKVLSSQTARVSNRAATLLRTLATAVGKSDTWLGSFHRRLRSRLGPASANTATAHKLACLLYHLLKYREPYIEVDRLLYEERIQRRRVARLKQLATELGFELVQAKQAA

SEQ ID NO: 319012 - protein, 472 aa, unidentified
MRRRDPGEGRRASHEALSSALREAPSPGAPDSNGIPRRPARPRMHKAEHEHRPRGSRPCPSERLSMRFAGIDIAAETHVVAIVDQTGTVLVKPTPFGEDAEGYARLLDRLGPAPDLLVVMEATGHYWKTLFATLAAHGLAVALITPLRTHRFAGEDLERTKTDAIDALGLARFGAPKRPAATRLPDAATEELRELVRLRDRLVQDFGDRVRQLHRRVDLGFPEFTRYVKSLDSELATAILQDYPTAQAFQGVSLKRLARLCYDGRHPVGADLAQALREAAARSVGRHHGEAYRLQVRYACEDLDLLRRRLRTLERDIEKTLQAHEVGTLLTTIEGIGPQTAARLVAELGDPAAFRSAAALAAFVGVVPALRQSGKRTPTPAGLTPLGHGPLRAKLWMPTLTAVQRNPWLRAPRQVAEGRARRRHAEAADRDLPRCPTSPALHRRPSGCGEPPMKKHLTGLTVSQRAVWPPST

SEQ ID NO: 319013 - protein, 427 aa, unidentified
MSNRPKRPDTGGAPILPGRSSQVKQLPKLHYAGIDWATKTHAVCVVDQAGQIRARFQVPNTGKGFTGLIKRLGSLGVAGVAIERSDGPLVEAMLEADLRVVVVTPRQVKSLRSRYRASGAKSDPADAYLLADVLRTDGHRLAALTPDSEPTKILRALSRTRKDLVEARVALVNQLTSQLEGCFPGAIGLFHELHSPTAVAFLRRYPTGHAAAVLTQASLAALLRRLRYSGRTPVSELLRRLQTAPAAGISPAEAAGRAVCVLALLDAIQVTSRQERELEAEIIERLEVHADQHIFTSLPRAGHGVRAAALLAELGDVRARFPTEEALAAQGGAAPVTITSGKRRVVKFRWACDKKLRAALLDFADDSRHASPWAAKIYAEAIRRTRHHPHAVRILARAWIRVIWRIWQDGAAYDPTKHRGAVRLLAT

SEQ ID NO: 319014 - protein, 379 aa, unidentified
MTTQFTVNDVCCVALELSKSTWVCAFAPPESGRASVHRMRAGDVDRLISVLEAGRARAMRDTSGSLDIVLCYEVGYDGFWLARLLIARGIRTIVFDPASFLRPRRGRPAKTDRLDAEEMTRILRTWLSGDHAVATAVRIPSVEEEDAKRIERERKNLVEERTRIVGRIKGLLALHGIWLNSKRIGKGLLGRLDTMMTGDGRPLPPFLRRDIERMIRHYEFVCDQIAEVEADRHTALNDETSSFPQRDKVRRLTGLGAVGVTTATILVAEVFHRSFETRRHLASFIGLAPSPYASGDVNRDRGINKAGTKLARQTLVELAWFWLRYQPNSKLARWWHERFGKLGMRGRKVGIVALARKLAIALWRFVEQGVVPEGATLKA

SEQ ID NO: 319015 - protein, 424 aa, unidentified
MKNTLARKLKQVPEGYLIIGIDPHKKRHAAVAMTQDFTTRDKFKFDNTREGLETMLRRARMEMVKYGCRGVMFAIETGGHYWRNIAYFLDERGLPFRLINAFTLKRRREGKELNRRKNDYRDGEVAAQLLCTGEFTESKLPQGVYAELRTAHNAYRRLVKESTRITNLVKGLLDGLFPEFTQVFKDPCGLTALSVLSTCAIPRVIAGMTEDEFVAIIEAQYKGRRLMRKKLRALHFIAGTSIGIDAGARSVSSEIAFLVDKLELIRQHICIIERTLVRLVDETEEGKYLLSIRGLNYIAVAGLLAELGCFKSYQSAKQMIKMAGSNPTESESAGKRSTNTPMSKKGRPVLRYCAWTSVIPMLRFNPDFRAWAKQRRERPVHANPLGGREVVGAALNRLLRLAFVLVKKQTFYQLPRTDLVEIAT

SEQ ID NO: 319016 - protein, 360 aa, unidentified
MTGTILAMDLGKFHSVACFYEVADGRHEFKRIETTPRAISDLLVERKVMRVVIEVSGQAGWVVDLCRGLGMEVEVANANGEAWRWRNLKDKSDRNDALKLARLSVMGQLEGVAVPAKEVRQWRSLIQYRHTLVERRVAIRNSIHALLAVAGGEAVIRNWNERMVAELRKESRRLGKCGREELWRGQLGLELDAMEQVEGLIEQVEKKLDELVADEREQWGERTALLRTIPGVGPRLAEMVVAWIDDPKRFGNGRQVGAYAGLTPRRYQSGESDRSGRISKAGSGRWRKLLVQVAWGMLRYNARGREVFDRLCKEQKTRRKQAAVALARKILVWCWAMLRDGKAWQEDHLPVGAASTSVET

SEQ ID NO: 319017 - protein, 327 aa, unidentified
MIYVGIDVASNKHDCYLMNDKAEVYSSSFTISNDEEGYKKLHNSIKDFVKQTNDSNVRIGLESTGHYSTNILLYFVKANYKVMLINPLLTNMDRKATTVRKTKTDKVDARGICMFLDRNKNDFKPYTLISYHKNALKSLSRERFSLVKDFSKQKIKLQRLINVVFPEYLNFFSDLYTSSSLDLLYAYPTPKLMKRAKLSSISKFLHGNCKITAKEIQDKSACSIGQSLDYYAFEIRLVIDSLRFHKKQIESYDTQIKVVMDEVGKNIMSIPGISYTNGALILGEIGDINDFESADKLLAYAGLDPSVYQSGKYDANQIQYLKEDQNT

SEQ ID NO: 319018 - protein, 358 aa, unidentified
MEQQILKVALGVDVSKENLAVCLCRLTVDLAKEFEDPFEVNNDLPGFKKLIRWLDKKVASRDDLWIVMESTGIYHEAFVYYLYDAGFNVSVMQSGRVKRYAQSLDQRSKTDALDSRMLAMLGCERGLPLWTPPDPTLRELKGLSRERSFLLKEKQIEQNRLHATENAAYTNKRELRRYKQRLKLIAKQVEEIEKEMAVLINANPDLKGRIKHLESIPGISFVSAATVIGETLGFTGFNNAKQLTSYAGFDVVLKESGAYKGKTRISKKGNKNIRRALYMPAMTAVRCNPTLKKFYDRVKPTKAKPMIALVAVERKLLVLMYSLWKNEMNYDPEHEQKKTARTEVLAAQDRSNLALTSS

SEQ ID NO: 319019 - protein, 370 aa, unidentified
MKFEVTKNQLTLKSRTMSKVKELNFDGKTIYCGLDVHKTNWKVNIGMDKMELGGFSQNPDPEELIRHLKKNYPGAEVKVVYEAGFCGFGIQRSLKALGIDCIVVNAADVPSSDKERKRKNDKRDARKLRRELSEGELKHGIYVPDIEMEQARTLVRERHRLVQDQSRCKSRIWHMLMFSGIQLGLEQKRWSAKLVKELETLDCPTSLKMALNLALEEYKQIRSIIKQATLAIRKMALEPPFAALQPYLQSIDGIGLITGMVIQTEIQDIKRFRTLDSLCDYAGYVPDISSTNDKDVIKGITHRRNEFLRETIIESSWILIRKDPAMLMKYQEYAKRMNSNKAIIRIGKHLLSRIRYVWNNKTQYVKGVVG

SEQ ID NO: 319020 - protein, 351 aa, unidentified
METQQTALPKLFIGIDIHKRNWKVHCSTELFSGKSFSMSSDPGQLLNYVTKHFPDHEVSTAYEAGCCGYYAHRCFKSYGWCSLVVNPADIHRKGKEKHTKTDRIDAQLISRELKDGRLESIVVPEKEREELRSLFRRRNDLVKDFRRIKSYIKMQLLYFGIKEPKEFDNDHWSHKYRNWLDDMVFQYPTAKATLESRMRFFRFVDQELRDVSTQLRRYCKVHYKKDYMLLRSIPGIGGIVACGILCELGDLRRFNSVKHLAGYVGLAPGVHQSGNNYKVMGITPRAHRLIRSYFVEAAWQAIRADPVMQAYYRKHTGKNVKSVIIKVARKLLSRTLAVIKTEVPYTIGVVE

SEQ ID NO: 319021 - protein, 422 aa, unidentified
MKGPRTKRVRTVKEGTLIATVDIGATTNTGYCTTVDGRDMKVFKFGNTREGFEKFWHMVVAARNRFTCTEVIVGYESTGPYAEPLVHYLRDKPANIVQVNPLHTKRLKEVNDNSPGKTDDKDPRVIADIIRLGRALSVVVPEGDAAYLRRLNNARERHVGERIALLNQMQQLVFLIFPEFKTVIARMAGKTVRLILKKYTTPEKIGSMDTHVLGEEMRRRSWGKLGMKDAELLIKAAQQTVGIKEGVAGIVLDIQHIIAQLEVVERFIAEIESEMALILERIPCSARLLSIKGLGVISVAGLIGEVGDFSKFRTQSEIMKLAGLDLYEVSSGKRKGQKRITKRGRSVMRKILYFAAIQMIGKHGIMHEYYERLTGRGTLKMRALVAVMRKLLGIIHAILRDDRDYVGEYCAPPKRRLIKRAA

SEQ ID NO: 319022 - protein, 340 aa, unidentified
MKGTIIGIDLAKNVFEVYVEDGVKQTGTRTRLSRKKMLPWFANRSSALVGMEACGGAHYWARELEQLGHTVRLIAPQYVKPWVQTNKSDQADARAICRAVQEPEMRFVRVAGEAQQAVQALHRVRSRHMGNRTALVNQIRGILLEYGVAIPKGVASVRKALPLLLAEERWAPLIRQFLTDQQAELTDWDTKIEAVTAQINRESATQPVCQRLEQIRGIGPLGASALWLKVAGQPYQNGRHVAAAVGLVPKHTGTGGKIKLGGISKRGDRYLRWLLIHGARAVVAQVGEKQDRLSCWLRALVARRGMNKAVVALANKNARVAFAMIHEDQTYDVTKMCRPV

SEQ ID NO: 319023 - protein, 398 aa, unidentified
MDPVIGLDVAKGESQVQAFLARKQPFGKTFKFKHDTNGLRDFYVFYKEVKLNAEADPVVIFESTGHYHEPVLQYLEERRITYYLVNPVVSYETKKSSLRKVKSDPADARHLCELYYKEDLQTFHRKNVQTMNLRNLSRQHDSLTRNYVQLKLQFQTILDQVFPEYKGVFGNLYSQVSLKTLLLYPTSDVVLKATTDEIASVMHSLGGKRSYAWFWDKANKLKEAAERNPFKKTLYHSHLVTLKMYIQMLLQQKEFLSILEQEIDELAKQFEEYEILRSIPGVGCKIAATIISEIGEIKQFSHPKKLVAYAGIDPRIYQSGKFTATINRITKRGSSKLRQALYTAVQCGLTNNRNTKLKEFYDKKRSEGKPHKVAIIACANKLLHWIYAILKHKESFIA

SEQ ID NO: 319024 - protein, 334 aa, unidentified
MKCIGLDIHKKHTQACVRDENGKTLGNERFRTDVADIGQFFKRMTTDTNEKLAVALEATGFYFWIYDCIAALGHDVLVVHPTKVKPLMRAKAKNDKNDASALAELLRTGCLEGIYVPPLEIREMRELTRHRESLVRKRGDLKREILASLDQKGVKVPEEFRSNFTRKQVGWMRSLNDFVVSEKLDLLALTLEKIGKVEAVIEERWGKDEDVQLIQTIPGVGLVTASVLKAEIGDLSRFSSADSLAAYVGLTPTTYQSGEKAWSGPTRRGNSRVKHVLIKAMLFHTHFCPDSRISRYKSRKSDSIGKKKAIVAAGRKMLEAIYFMLLRRQPFHAH

SEQ ID NO: 319025 - protein, 343 aa, unidentified
MQTITTIGFDIAKSVFQVHGVDAAGQVVVRRQLKRRYVLAFFQKLPPCLVGIEACASSHHWSRELQALGHTVRLMPPAYVKPYVKRQKNDATDAEAICEAVTRANMRFVPTKTPEQQSGLVLHRTRHLFIRQQTAVINAIRAHLAEFGIVAPVGRHGVEELLNVVADPNDKRVPEIARACLSAFGAQLRRIKEQILEFDRLIRAWHRSNEMSMRLDEAPGVGPVLATAVVATVADPKIFRSGRNFSAWIGIVPKQHSSGGKNRLGNISKQGDRYLRGLFVAGALAVIRYAKIHGTKHRPWLTALLARRPTKVAAIALANKIARMLWAMMVKGERYKEPVALAA

SEQ ID NO: 319026 - protein, 368 aa, unidentified
MKKNTSKKQRTGKGNRQQQEKEAFAFYIGMDLGDKHADMCVMNPAGELHQQFRLRMKAPELQAYFVAIGRSRVAVEAGGQSQWVADLIQRCGHQVYVSNTRKVAYIYESDDKDDPGDAYKLAELVHFKPRLLHPIQHRSQAVQADLSWIRAREALVESRTQLINTIRGISQAFGERLAKCSVESFTAKLAAEIPAAIRGPVAPLLETIDHLNEQIQYYDQMEEQIARERYPKYRLLEQVNGVGVHTALSFMLTIGDAERFQKSRMVGCYLGMRPRKKDSGERKPQLGITKAGDEYLRKTLVNCAHYILGRYGKDSDLRRFGQRICERGGKNAKKRAAIAVARKLSVLLHRLWVTGEAYEPLRNSKKVA

SEQ ID NO: 319027 - protein, 343 aa, unidentified
MQIHSVGIDLGKTTFHLVALGAAGKVLVKKKFTQRQLLTYTANLQTWLIGLEACSGAHFLGRALRKQGHDVRLIAAQFVKPFVKSNKNDFVDAEAIAEAVERKNMRFVPIKTDDQLDLQAIHRVRDRLISRRTAVINQLRAFLLERGMVFAQTPAKLKAAMTDILENADADLTPQMRNLIDMLWSEWKTVEQQIEELTTQLERISAADAGCTRIRQIPGIGPIVATAIVAAIGNGAAFRKGRDFAAWLGVVPRQYSTGGKAKLLGISKRGNVYLRKVLIHGARAAVLRIKRDRAPIGPWLDRLDARAPKNVVVVAMANKLARIAWAVLSSGQDYRPLPSASAA

SEQ ID NO: 319028 - protein, 355 aa, unidentified
MSRDIKYIGMDVHKEATVIAVLNANGNLVMESIVETKAGSLLQFIHGLRGELHVTWEEGTWAAWLYDLLKPQVQVLVCDPRRNALLKEGNKSDKVDARKLADLLRTGMLRPVYHGENGLRTLRELGRSYQTISQDLNRVMNRLKALYRGWGIACAGTQVYAPRYREEWLQKIEHAGVRRRAELLYQQLDGLQALRRTLRPELLAESRKHKATKLLRQIPCIGPIRAARLLALMQTPHRFRSKRQLWTYCGLGIETRDSAQYRFVRGQLQRAKKPQQIRGLNRNHNHEMKEIFKGAATRASCGVGPLRDFYVALLDKGMKAEMARLTLARKIAAIALTLWKKEERFDAEQLKTQAA

SEQ ID NO: 319029 - protein, 346 aa, unidentified
MKLFIGIDASLKHNQCCIVDHKGKKLMQLNVSNNLSGAQELERNIDQKALELNVEELKVATEASSLYDFHILEFLSESEILARHNIKLYRFNPRLIKTFKPSLKLKDKTDPQDAYAIAEYLRFREESAEEYRAKLDHLPLQRLTRFRWHLVTQLVREKNYFLNQLFLKFSAFGKGQPFSDTFGATATAVIEEFMTPDAIANADDEQLVEFVIKHGKNRFPNPEEIVKELKYVARESYRLRPQLPESVHRILCLSLSNIRALKASLKELDDTIAKQLNAFSITLTSIKGIGAVYAAGIFAEIGDINCFPSEAQIARLAGLAWIRHQSGNFEAETTRLDKQSNAYLRY

SEQ ID NO: 319030 - protein, 353 aa, unidentified
MLIIGCDFHPSFQQVAIFDNRTGEIQKKRLHHREEAEQFYRGLAGQPVRVGMEACGHYPWFERLLAELGCELWLGDAAEIRATVVRKQKTDRRDAEHLLDLLRQDRFPRIWVPSLEERDVRQLLVHRHKQVQARTRVKNQLQAMALSQGVQKKRKLWTEAGRPELEKLELLPYAAQRRKQLLAALDGLEAEIEQLNRRVEAEVAKRPAAVKLQTHPGVGAVTALAVVLTLGPAERFPSGKQVGSYFGLIPREYSSGGQQKLGHISKQGSSFLRFLLVEAGQTAARYDGELGRFYRRLAVRKHRALAKVAVARKLAVRLYLMLREDWTYAQLCRAVVQASPSHPVVGGQNRSLE

SEQ ID NO: 319031 - protein, 352 aa, unidentified
MDRYIGLDVHAESCTLGVIGPSGKRLKSMVVETNGQALLEAVRSISGRIHLCLEEGTQSAWLHELFSPHVAELVVVMPPQSKGAKDDLRDAWMRAEELRAGTIETRVYKAPQYLAALRNAVRAYGFAVRDVVRAKNRLKSAFLSRGIATDAGIYDPTRRRKQLQKLTLPHRQLADWLGRQLDELTPLRDEAEGWLLKESKTHPIIRTLATAPGMGPIRTAQLVAIAANAERFRTRRQFWSYCGLGIVTRSSADWVRGKDKRWERSLVQQTRGLTRKRHPLLKSVFKGAATTVIAQLPDHPLHKDYERMLEAGIKPNLAKLTLARRIAGTVLSMWKHKEVYDPERHKGVTDKT

SEQ ID NO: 319032 - protein, 331 aa, unidentified
MKHQYLRVIGVDIASDKIDINDSLGKIVKSVPNTVAAITNRVVAKVKDRKNTLVVCEATGGYEHVLVEAVQDAGIAICVANPRQVRDFAKGHGYLEKTDSIDAYMIRRFGEDVEIHLTPPRSAEEKEHRALVRRRTQVVDLLSQEQNRLRQCSDACALEMIEETISHLKTQLKQIDKRLESMLRERAKSDPKVEILQSVPGVGPVTVSTLLSELPELGSLNRGQIAKLVGVAPLANQSGKTDRKRKPRGGRSQVRSVLYMAALVATRHNEVIKRFYQRLLSRGKEKMVALIAASRKLLTILNDMVRRGQSWQPTLHAAAKQKEATMAPSLN

SEQ ID NO: 319033 - protein, 370 aa, unidentified
MKSIVYIGADVHKKSYSLCAIDGDTGEILGETKISPDVKLIEKFINNAMKKAQKDADVLVGYEAGCLGYSLYWQLKEKGIACDILAPSTMHRSAKNKVVKNDKRDAQMIATNLANKSYKSVYVPNDHDVEVKEYIRMMNDFKGESKKVKQHINAFVLRLGYRYEGKSRWIPSHIKWLKELKMDPMYREILDEYLSQLELLETKIGRFQHKLEELSQEEPYKEKIGELRCLKSIDTTAAMTLHAEISDFNRFPTANAFSSYCGLTPGEDSSGDKNKRLSITKQGNAVVRETLVECAQVLVRGTVGKKGKKVISKQKGQDVKVIDYADKAVIRLQKKYHRMILKGINRNIAITAIARELSCFVWGIETGHIN

SEQ ID NO: 319034 - protein, 368 aa, unidentified
MSTITIGVDLAKNVFSVCSVNSTGRVLDRKDLRRDAFAAYLVQLPAGTVVAMEACSGAHYWGRRCVEWGLQPRLMAAQFVKPFRMSARNKNDRNDAEAIATAARQGNMRFVPLKSIDQQARLSWHRVREGYKVEGLAIGNRIRGLLAEFGVVISPSDAALRRWLADLDSVTLPSEFIELIGDLAKHWDSVRERVVTCDRRIEAHARADERCVRVRAIIGIGPLTADALVATIGDAKEFKNGRQLSAWLGLVPTQHSSGGHIRLGGISCRGDAYLRTLLIQGARSSLQRAKAASVEKATPEQLWIRSLVARLPFGKLIVAIASKHARQLWVMLAREVDYDAHAQYRHSMHRAEGTAKVFRFSSPSARQG

SEQ ID NO: 319035 - protein, 355 aa, unidentified
MNDAKYIGLDVHQATISVAVRDSAGKLVMEAILETKAETTLQFLRGVRGSLHVTFEEGTWAAWLHDLLKPHVTRVVVCDPRKNALLKVGNKNDRIDARKLSELLYLNKLSPVYHGEQGIRTLRELARSYLTITRDLTRVMSRLKAIYRGWAIPCAGQQVYAPHYRGEWLAKISEAGVRRRAELYYLQFDTLAVLRQGVRRELLAESRKHPATKLLRQIPSIGPIRAALLIALIQTPNRFRTKRQLWAYGGLALRTYTSGEYRFVSGELKRSKKVLAVRGLNLNHNHDLKNIFKGAATRAAATAGPFQNFYEACVARGMKPHLARLTLARKIAAITLLVWKKGERFDAEHLKQQAA

SEQ ID NO: 319036 - protein, 391 aa, unidentified
MFYVGIDIAKNNHEASIIDSNGKLVTGSFSFSNSVRGLEKFKRIISSFSLSSNNCIIGMEATGHYWVSLYSFLIDLGFTCIAINPIQSDSFRKMYIRKTKNDSVDSFIIAQILRFGEFSVSHFSDEDTFALRNLSRYRFALVDEVSDWKRKLVAILDQVFPEYSSLFSNIYGVTSKELLSKYPLPEDILSISANELAELLSKCSKGRFGIDKAKEIQDKASNSFGIKFALKSFSFQIKQIINQISFLEDQILDIEEEISSMLNYLCPVITTITGIGDILGASIFSEIGDISRFEKASQLVAYAGLDVAVKQSGNFNATDTKISKRGSPYLRRAIWIAANVAAFKDPALSLYYQKLRQRGKAHGTAIGAVARKLTNIIFAVLRDNKAYIPNI

SEQ ID NO: 319037 - protein, 340 aa, unidentified
MTITTVGIDLAKNVFAVHGVDQNGRTVLVKPKVSRAAFPEFIAGLPPCVIGMEACSGAHYWARLFRQYGHEPRLMAAKFVSPYRMAGKSGKNDAADAQAICEAVRRPHMRFVPVKDESQQAMQCLHRTRQGFIEEKTATYNRLRGLISEFGVIAPQSTDALRHIVSVQKSSLPLQVQQCVDDLLEHIDRIEANITEYDRILSRMAKTDHRSQRLMELKGVGPTTACALVASIGNAHDFKNGRQLAAWLGLTPSQYSSGGKSKLGRITKAGDSYLRTLLVQGARSVLIGAEKRNDSFSRWVCMLVERRGYWRAVVAIAAKNARLCWASLHYGDDFRLYSAN

SEQ ID NO: 319038 - protein, 337 aa, unidentified
MGLYCGIDLHSNNHMLTVIDEADRRVYERRLPNELAITKAALEPYRAELVAVAVESTFNWYWLVDGLMEAGYAVRLVNTAAVQQYEGLKHTDDKHDAFWLAHLMRLGILPTGYIYPKSERGLRDLARQRMRLVQHRSSLITSVQNQVWRSLAVRLRSETIKGRGKQPWPEISDPDLALSVKAGRAAIDTLTVQIERLEKLILKRVDRSPRFRMLKTVTGIGPILAMTIALEVGDIGRFAGVGEFASYCRCVDSQRLSNGKKKGEANRKCGNRYLAWAFMEAAHFAIRNLPAAKRFYERKRRQRHALLAVKALAHKLARACFYVLRDQVPFAPERLFV

SEQ ID NO: 319039 - protein, 337 aa, unidentified
MKRYLGVDLHRTQFTVCVRQAGEVVERRQWRIEQLPQFVEQLNGDDEVAVEAMGTTARFYDAVVGRVARVVVVNPHQFKVISDSVKKTDRGDAEQLALFLEKGLLPEVRMKQERHRELQHLLETRDLLVKQRSALKAKINNLLAAQGINLKREALSSRKALQGVLAVKASAVVKLEVRILVEQIGHLSGSIAEVETRIEEEGEALPGHKNLTSIKGIGSLSATVLLTAIGPIQDFADENRLAAYFGLVPKVQNSNESERSGRITKRGNKLARTALVQCGLVAQRYSPYLKRFYERIKQRRGGGKAKIALARKLVKIVHDTLKNDWVFTDFPSFTLAA

SEQ ID NO: 319040 - protein, 347 aa, unidentified
MLYLGLDVHSKWFTLAGFIEETGECVKMPRIDNNLEAISAAFDELPTPRSGVMESGTNSIPMYRLLRPYFDNLIVVAQNKVWDRQRDARPKTDGLDAHTLAEELAFGRLKPIYIPDDMLRSYRTLCRGRVQLTQDTTRLVNTLYALLRSWGYQIEKKLLTKGGRDWLDTVNIPDHAKPVLDLQIKRLKDLIRQEGELDTRIAEIAQTDSVCQLLRTIPYVGPLTAVVLRAEIGDIKRFSSADKLVSYVGLDPRVYQSGEHCRYGRLSKHGNSYLRFISVLFAQNAIRGRKDTTFKRRFYRLCHTHHPNEIKIMVARDFLAVVHSMWRTNTTWRGLPQVTKPAKSSVA

SEQ ID NO: 319041 - protein, 351 aa, unidentified
MRTSQNSLEAICTIGIDVGKNTFHLVGLDKRGAIVLQRKVTRQKLGRLLTNIPRCLIGMEACSGTHFIARQLTVLGHDVRLIPAQYVKPFLKGHKNDYRDAEAIAEAVQRPTMSFVSIKTPEQMDLLALHRVRSRLVRQRTGLVNQIRGFLLERGITVRQGLMPLRRALPEILSSNSDALSPRMISLIGELIQDWRRLDERIASASTDIEALAKQNESCQRLMSVPGVGPIVSSAVVAAIGNGAGFKQGRDFAAWLGLIPKQESTGDRTILGKISKRGNKYVRTLFVQAAHVVLERRPRSAKQGLWPWIAQASKRLHRNMLAIALANKLARIAWAVLARGHAYQPRITANA

SEQ ID NO: 319042 - protein, 347 aa, unidentified
MNFYNNTHPHYCDIDLHARVLYVCIIDQEGNTCVHQEIPADPDKLRQLLEPYIGNIVVGVECMHCWYWVSDFGEDIGVDFILGHALYMKAIHGGKAKNDRIDSYKIASLMRGGNFPLAYVYPKEMRATRDLLRRRMKLVRHGANLKAHVANTTSQYNLPPNKVNLKNVCAREQLRSTFPDPVVQRNIDFDMSMLEHYAKELSKLEWFLEQQAKQHNPVHYHILRSISGIGRILALTIIYEVGDIRRFDSVQKFASYARLVKCKAESAGKSYGTQGNKIGNAHLKWAFSEAAVLYLRGNKKAQKYLQKLQKRMTKAKAISVLAHKIGRCVYFMMKNEKVFDENRFITG

SEQ ID NO: 319043 - protein, 444 aa, unidentified
MHYQKVLKMPESIPYLSVGFDVGADFTWMSIMLPNGILTGKPFKIIHSDPQSRELAISKIKEAQEMYSLESRCFLESTGIYHIPLLCFLRDKGFDCAVINPIITKNSTNMNVRKLHNDKFDSKKAAKVGLDASLKASIVPDDAIIDLRNLVRDYYYFKDLQSSIVLKLHAELKVSFPAYLNVFSKVTTQTSLKLLEAYPLAADMLAAPKDELVETIRSTARFGETYALARYDAICTAAKDAAVFGRALPSNALRIRLYIKMYREYQAHLDSILEELHQAVGKLEGTPDYDRISLIQTLHGVGFLSAVVLIAEMGSFDLFSSPKKLYAYFGLDPGVNDSGKFHGDRVHMSKRGSSLARRILHMVAINNLKVDKATKTPVNPVIYDYYTRKCASKKKSVAVGAVMHKICNIIFAMLRDNKPFELITPEEHRERYAAEHPESVNTAA

SEQ ID NO: 319044 - protein, 343 aa, unidentified
MTYFTGIDVSLRSVSICIVDETGAVRLEAKVAAEVEVIVAALRRFSEEIRQVGFEAGTLTQYLTYGLREAGFDVICLEARQVAATLAAMRNKTDRNDARGLAQILRTGWYRTVHVKSVESHQERALLASRKAILTKCVDLENEMRGLLKVFGVRLPGHLPHGSFDTTVRERLSTLPQLARTLLPLLDACTMLYATYLKLDNAVKAIVRHDRLCQRFMTVPGVGPVTALTFKSAVDDPMRFRSSRLVAAHFGLTPRRYQSGETDNPGRISKAGDRDVRQALYTAAHAMVTRSYAWSTLKAWGVRLAKTRGLRRAVTAVARKLAVILHRMWVQGTTFRLTQETTA

SEQ ID NO: 319045 - protein, 342 aa, unidentified
MNSFYLGIDLHLKRTYAVLMDHQGQVFAERRLPNNEMATYLKENVPKETYAVLEATRNWPFFYDLLKENVERVELAHPKELKAISAAAVKTDKIDARTLAHLARLNFLPIAYAAPADIRDLRLELRHRDNLVGQRTQAKNRVHAVLARYNLVSPKSDLFGASGRKFLAEVMQSSLRPAAARAIQRDLGLIDYLTELITDIEQSIHLDPEQERMVKILRTMPGIGRLGAVILLAEIGDVQRFKSPKALCNWAGLTPRVRNSDKIIRHGRISKQGPALVRATMTRAATVAYRCSKYWYRIHDQITNHSGSKVAKVAVARRMLTVIYFMLKRQEPYQENYLSKDR

SEQ ID NO: 319046 - protein, 363 aa, unidentified
MTVQYVGMDVDKQKIVLARLGAGRDTHPVEQVIANTPSAVKKYFASLLGASEVHATYEAGCFGFGLYRQLSAMGVTVVLAAPGLIPRRPADRIKTDRRDAHSLALALRAGQLTGIYIPTEQDESVRDYLRMYESLRGDLRVCKQRVLQFLLRRGISYDGGGPWTVKHRHWLSALPFPQARDRLTLDMYMSQMQELEAKCKEAAAEVESIAAQDCYRQQTKKLTAFKGIKTLIALSFVTDIGDFRRFSNARQFMAYLGLVPSERSSGNKRRQGGITKAGNSHLRRLLVEAAWHYRSYHPSSRDLTERRRGVDPAVLSYANRAGRRLNRKYLHMLLRGKRSQVAVTAVSRELAGFLWGAMTDQVA

SEQ ID NO: 319047 - protein, 369 aa, unidentified
MPHVTSIGLDVHARSVAAAAFNPFTGEVVRRSFGTDASEIAEWALGFEDPRACYESGPTGFHMARELRALGLDCAVAAVSKMQRPAADARRKNDRRDAEFIARMLATHNIVEVPLPDMAVEAARDLDRALDDATRELRRSRQRLNMFLIRLGHVWDERNADGARKKAWTRAHWRWVSEIRLEGPQRDALEYYVTAARCAESDRRQLERRVVALAGTDRWRATVEALSCIKGVDTLTAFRLAAEAGSFSRFRSAPAFASWCGLVPSERSSGETERRGGITKAGNALARTALIESAWHYSTCSPRPKAPAPGTDVPPAIRSRADDCTARLHRRREALAAAGKSACKANAAVARELACWVWEIGCRSEGTVL

SEQ ID NO: 319048 - protein, 349 aa, unidentified
MEHLGIDVHKKESQVCILTAEGELIERRILTTPAALAALLGERAPAKILLEASTESEWVARCLERLGHTVIVGDPNFAPMYATRSRRVKTDRRDARALAEACRLGAYRPAHRLSDAQRHVRARLAVRDALVRTRTRYISLIRALLRQQGWRLRSGKAERIAARVLDLRLPGRLLSEVAPLLAVIQHVNAQLEYADAAIAHSTRADARVQRLQTVPYVGPVTAAAFVATVDEASRFQHAHQVEAYLGLVPRELSSGETQRRGRITKTGNVRVRWLLVQAALSIRRSRDPRTAALAAWAIRLAARRGKKIATVALARRLAGILYAMLRDGTAYAPRPGALGAPELLEVARA

SEQ ID NO: 319049 - protein, 387 aa, unidentified
MSQPNDLSRSLVPFEQEATLVAVIELSQSSWLIAGTVPGIERQPLKKIMPDETALLRLLHRWRDEASQSRRVVTRIAVAFEAGRDGFWLGRWLVKHGVEVHVIHASSVAISREHKRAKTDRLDTAMLMRVFLGWLRGERGHCGMVAVPTIEEEDAKRPSRERESLVGERTRVVNRMKAALTRLGIRGFKPELRKAPQRLDALRTPEETPIPPNMLDEMRRDLARLGVLREQIATIEQARLQRLEQGPPSGPNAMVRLLASVIGVGVETADMLVQEVLSRNLRDRRAVARYAGLTGSPDESGSKRREKGLAKSGNARVRRGLIQLAWRFLLFQKDSALAQWFQGRTEGVRGARKTKMIVALARKLLIALWRMVTFGEVPQGVVLRQPA

SEQ ID NO: 319050 - protein, 357 aa, unidentified
MGKSILNLAAVRRVGLDLAKNAFQVHAVDAKGAIVVARKLTRGRLIAFFAGLPRCLVAMEACPSAHHWGRQLLSLGFEVKLIPPAHVKPYVRRNKNDAADAAAICEAAGRPGQRFVPVRSIDNQAEVMRHRARELLAGQRTSLLNALRGHMAEIGIVAPQGAQHAYDLKRLAADSFGEDGEIVVPESVRAALRPLIEQIDALDERIAAIDKELAASVKADETARRLMTIPGVGPVTASAITATIQDISAFASGREFAAFLGLTPRQSSTGGKERLGRITKMGDRYLRKLLVVGACATLRHRRGHNDALRRWASGMLERKTVKHKFKLTAVALANKVARIVYALMTKGGEYDGQPIAA

SEQ ID NO: 319051 - protein, 343 aa, unidentified
MSALPSPYHLFVGIDIAATSASVACATDPRTVAAAFTIAQTPAGFTDLQTRLERHGIPRREILVVLEATNTYWMSLALHLHNAGYAVSVINPAQAHQFAKALLKRAKTDAIDAQTLAQLAATLQPKPWTPPPAIYEELRQRLQQREDLLRALTQEGNRLNALRHRPTVIASVQERSERWIAWCEAEIAALDGELAALLDQAGAWQAAADRLRSVPGIGTITAGWLLVETLAFTTCATPQQAAAGCPLGRTGLAPHPYESGTSVRRRGRIGQGGNAALRRALYMASLSAGRHNPHIRAFYERLRAAGKPVKVARCAAARKLLHLCWAVVTRDVDYDPHYGIGTT

SEQ ID NO: 319052 - protein, 380 aa, unidentified
MDRSPLESWPLWATMVRSTIDNRSEEGLTLKVTTVGIDLAKNVFRVHGCDARGRTVFSKQLTRRQLPGFLANLPRCLVGMEACAGAHYWAREIQKLGHEVRLMTPRFVRPYVKANKNDASDAEAICEAVRRPTMRFVAVKSPAQQDVQAVHRARHQLVKERTALNNQVRGFLAEYGIVMPKGFASLRRALPAMVEDREGELSGVMRELIADIGERLKFIEQRLRRYDLRISQLFRQDERCRRLAEVPGVGPLTATALVAAIGNAREFKSGRELAAYLGLVPRHRASGGHTVMLGISKRGDCYLRTLMVHGARAAMRTVERRRDLSSVWASRLKLRHGGNVAAVALANKNARVMWALLTRSDRYRVTIPAAPLPARVPQVG

SEQ ID NO: 319053 - protein, 413 aa, unidentified
MEKVYDKCCGIDVHKKLIVACFKCGKKQEVREFGATTRELLKLADWLGSGGCEMVAMESTASYWKPLYNILESSGLNAMVVNARHMKAVPGRKTDVKDAEWIADLLQHGLLQASYIPDKDQRELRELVRYRKSLVGERTRELNRLQKMLEGANIKLSGTVSDINGKSARSILEYILTGESFDDAKYDEMYGNKIIAHNLKATKEQIIDDLNGIISPLQRKMMRTLLKHLDELNSHIHELDDDIDSFMKPEEKQASAAIQDVTGIGNTSAQAVISVIGTDMGRFPDDAHIASWAGLCPGDNESAGKRKSGKTRKGNALLRETLVNCAHAAVKNKKSYFYAQFMRISAHRGKKRAYVAVAHSMLVAIYHILKDGVVFKDLGADYYNQFNKERKIKAYLKKLKALGWEDSAAGQPA

SEQ ID NO: 319054 - protein, 427 aa, unidentified
MTIFIRRSFLFKIIKKNCCGLDVHKTWIFACIGITDSKDRTEYKQARFSSFTKGLQELCDWLAKYHCKDVCMESTGKCWIPVFNVLEKNNLWVTLSHPKYTKPLKGNKTDRKDAKWICDLYMCGMVKPSFIPPADIRQLRDLVRYRFKLTCMITGEKNRAQNCLTVSNLKLDDVFSDVFGKSSRSITEHILAHPGENFDVTPFVDKRCKTPIEEIQSAVDGAVSPEQAVKLRQCLDHIDELEKHIKNVEQEILRLSEKYSVALDLMRTVPGFDKNPMTAIQVLSEIGGDMSVFPTAKHLVSWAGCCPRNDQSNKKIKSTRISRAGSYFKPILVQVANGLLRSNKHPEILTRYRRIKARRGHKKAIIAVCRMLLTAIWHILSDLKPYTPDGYLEPRPVNEAKTLTTSQALNLLRQRGYTIKDDPVTAA

SEQ ID NO: 319055 - protein, 340 aa, unidentified
MSEITTIGLDLAKHVFQVHGIDAQGTTVVRKRLRRGQVLAFFSRIPRCVVGLEACATAHYWARELRALGHEVRLMPAQYVKAYIKRNKHDAADAEAICEAVGRPTMRFVPVKTAEQQATQLLHRGREQLVRQRTMLVNALRAHLAEFGLVAAQGLRNVGELIAIVRDDGDKRLPAVARQVLQVLAKQIEQIEAAIAALETQLLAWHKANAVSQRLASIPGIGPIIATAIATTVADPNVFRSGREFAAWLGLVPRQNSTGGKIRLGGITKRGNRYLRRLLINGASANLLRSKATKADPWVIGLRRRRPPLVVAVALANKTARIAWAVMLRQKEYQPRAVAA

SEQ ID NO: 319056 - protein, 453 aa, unidentified
MVQRKQKISIKPGKSREPLTITHPNAAGVDIGSSSHYVSVPPDRDDEPVREFSSFTVDLNAMADWLDACGVDTVAMESTGVYWIPLFELLESRGFKVFLVNARHVKNVSGRKSDVLDCQWLQQLMTYGLLRGAFRPTEDVCVLRALWRQRGMLLRGQGRQVQHMQKALTQMNVQLANVISDVVGETGQKILRAIVAGERDGQVLAAMKNVRIRATADEIAKSLQGNWRTEHLFALKQALDMFDFIGTQLAECDREIEGQLQNLQVHDGEPARGKKRGRARNAPKFDLRTQLFKMCGVDITRIDGIDVTTALAVISETGTDMSRFPTAGHFASWLGLCPGTKITGGKVMSGKTKRVANRAAQALRLAAAALRSSQSALGAYFRRMCARMDKPKAVTAAAHKLARLIYTMLTKGEEYTDQGQDYYEERYRERVLRQLAQRAEKMGMRLVVNEQPV

SEQ ID NO: 319057 - protein, 345 aa, unidentified
MHIASIGIDLGKTTFHLIALGERNKILLRKKFSRAQLLAYTANLPTSLIGLEACAGAHFLGAALREQGHEVRLIPGQFVKPYRKSNKNDFLDAEAIAEAVTKQNMRFAQLKTQEQLDWQAMHRVRDRLVQRRTALINEIRGFLLERGITFAAQPIHLRKNLPTVIEDADQNLSPRLRWLLDRMWQEWKQIETDVEAITDEIERISNEDARCRQLRQIPGFGPLVSTATVAAIGNGSAFRRGHDFAAWVGVVPRQYSTGGKQKLYGISKRGNVYLRRMLIHGARSVLFRVKYDTGGFGQWVHRLAQRAPHNKVIVAIANKLARIAWAVLSSGQDYRHQPLQQRAAA

SEQ ID NO: 319058 - protein, 350 aa, unidentified
MIIIGCDYHPGFQQIAYVDTETGELQERALQHREEAEKFYRELADQGLKVRVGMEASGHARWFERLLAELNFDLWIGDAAEIRTKRVRKQKTDRQDAQLILKLMLKDDFPRIWVPSWENRDLRQLLWHRHRMVQARTRLMNQLQAVALNEGLRCKKRLWREAGRQQLEAFRLAPWASRRRQDLLELLDRLNPTIAELTQAIEREVEKCPEARRLQTHPGVGPLTALAFVLIIGRADRFRCGKQIASYLGLVPLEDSSGSRRRLGHITKQGNSLLRFLLVEAAQVTVRSDPGWRSKYHHLMMRRGRKIAKVAMARRLAVRLYWMMRQEWNYEQLKKFGSHAGQPVHRDGAQ

SEQ ID NO: 319059 - protein, 401 aa, unidentified
MRFVGIDIAAERHVVAVVDETGTILLRATPVTEDAPGYQQLLQLLGSAQDCLVAMEATGHYWRNLYAALVTAGFTVALFNPLRTRRFAEEELQRTKTDAIDALGIARFAAQKRPAATSMPEEALLELRELVRLRQQIVQQLGDRVRHLHRAVDLGFPEFTRYVRGLQSELATSLLSHYPTAAAFRRVSVKKLTKLIYDVSHHVGEELERTLIEEAKQSVGAHHGEPYQLQVRYACEDISLLRSRLGALEGDIEHRLMQHEVGKLLTTIDGIGPQTAACIMAETGDPSRFHSLAALASYVGVIPRLHESGKRKKTNALRVPLGNARLRRGLWMPALSAIKCNPWLRAYYQRLRSAGKLPKVALIAVIRKLLAAVYSVAKHRRPFTLPPIFPPVAGGTVSHGS

SEQ ID NO: 319060 - protein, 421 aa, unidentified
MKKKVRIVGFDCAEDEHAAVLLDASGEFERRVDVINERGQIQESLAELMLAVGPNAQLVVVVESKRSHGRIVADVASELGCEVWQVNTVALNHYRDLEGQPRKDDEWDAYLAARMVYLRMGGCRVAIETTEEERVLSRLTRTYSRLIEDRKRQVARLRAVFLELAPEMLHASWAGPQPGSKAMLYLLERWPGFEGLERAQMRSIEKILRRCRYGSRATQVAKLIRKMARGISVPAEERSAITMELNFLVRQIRFCNESADQVYIEITHRVERHPVAQKLLEMHGNGPVITGVLVSELLPVARTSTEPKSATYAGVTPLSRKSGKSLDKDRLTQGVNKRVLHGLYTASVVAIKNSAVDRAYYQKKLRDYAGHPKPHVAAFIALSRQRHKLVYKLMTTDARYDKEILIATHLARLEQERTAAA

SEQ ID NO: 319061 - protein, 402 aa, unidentified
MTYDYVIGMDACKYFHHACVLDIDGTQVLSKRINQNEQSLRALFSAFSAYDHKVLVVVDQPNNIGRLTVAVAQDIGIDVRYLPGLAMRQLSRIHAGNAKTDIRDAYIIAHAAKNLPESLRNVDRVEEAFLQLKVLNGIDEDLARSYTRLINQIRSALVGCYPQFEQALRGQIIHRKWVLHLLARYGGPTKIKRLGKAKAAAFARRYKARNPEPVLDAIFAAISEQTVTIAGAHYAEMGVAMSAKDALLKLEHRQQIEKEVIELINDIPHTQFLLSMPGIGPKTAAQILMTAGDMSDFPSAGHLASYAGLSPRTNQSGTSIMSNSLNRAGNKKLKNALWQSSSASIRFHERSRQFYERKRREGKRHNAAVVALARRRLNVLYAMMRNHEHYHDPAPSQEDLAA

SEQ ID NO: 319062 - protein, 367 aa, unidentified
MKKNSTVKQSPKRAGVLARGPITIGLDLGDKTSRYCVLDENGEVEAEGSVATTKKGMAAKFGCLGRCRIAIEVGIHSPWLSRLLSSLGHEVIVANARQVRLISASSRKDDRMDAQTLARLARVDPQLLRPIRHRGEKAQQDLLVIRARAALVDARTGLVNAVRGLAKSAGERLPSCDTDSLGVERLEPLPEKLREPLRPLLQEVESLTEKIQELDQKVEQIARTEYPETQLLRQVSGVGPLIALTFVLTLEDRDRFEKSRDVGCYVGLRPKRSESGESPPQLRITKEGDIYLRKLLVQGAHCILSRRGPDTDLKRWGLKLAERGGKNAKKRAVVAVARKLAVLLHRLWVTGEVYEPLRNSAAKKAAA

SEQ ID NO: 319063 - protein, 358 aa, unidentified
MKVKNSDVRFDGQDFYLGLDVHHKNWKVTIRTMGTEVRTMVMPPDPRKLHEHMTRNYPGGRYRSIYEAGFSGFWAHRQLLDIGIANSVVHAADVPTSDKERRQKEDARDSRKLARCLENGSLEPIHIPDPHIEQLRSLCRLRERSRSHLTRLKNRIKGHLKYYGIPVPEDSAYRHWSGAFIARLEALCSEPGPRSDYLSITLDALREESRRQALITRKLRVHCREGESARIISLLRSIPGIGPKTAFSLYTELQDIKRFPNLDKFNAFLGLIPSTDSSGDEEKVTGITPRSNRQMRVLLIEASWVAIRHDPELLRAFSKLSSRMKKQAAIVRIARKMAARVAYVWRTGTPYKPAIPNG

SEQ ID NO: 319064 - protein, 354 aa, unidentified
MAVMPPDDQDVIGGVDTHKDVHAAAALSPTGRLLGTALFPTTHAGHIQLLSWLQSHGRVICVGVEGTGSYGAGLMRHLRSAGISVVEVNRPNRQLRRQRGKSDTVDAEAAARAALSGTATGTPKSQDGKVEAIRLLRLARRSAMKARTQTANQIQAIIEAAPPALRESLRGLSFAKLIPIARRLRWRAPMTPLSAARLTIKGLADRWAVLDAEIRQLDSQLESLVQDAAPRLVALPGVGSETGGALLVAIGDNPDRLRNEAALAALCGASPVDASSGRHQRHRLNRGGNRDANRALWVIVMCRMAKDATTRAYVERRTGEGLSKREIVRCLKRYVARQIYRTLLPALPVATATA

SEQ ID NO: 319065 - protein, 349 aa, unidentified
MNQIMRIGMDTSKYIFQLHGVDGSEQVVLRKRLSRKAMLEFFARLSPTVVVIEACGAAHHVARELGKLGHTAKLIAPQLVKPYVPRNKNDGRDAEGLCEAASRPRMRYVPVKTAEQQASLMLLGIRDQLVARRTQLSNTIRGHAAEFGLIEAKGLDKLASFLAAIEQDESVPVLARELFAMLACEYARVQVELKAIEVKLLAWHRANALSRRLAQIPGVGPVTAAALVMKAPDPQAFRSGRLFAAWLGLTPKDHSTAGKTRLGKITRAGDERLRQLLVVGATSVVKQAKAKGRGPRWLIELLKRKTPKLAAVALANKMARIAWKLMTTGEKYESARLDAQTDAHVAAVA

SEQ ID NO: 319066 - protein, 299 aa, unidentified
MTRMHQAATEPAPPPAVSTSRVVFGGIDTHKELHVAAVVGSGEVVLGTASFSTTRAGYRALIRWLRSFGDVRRVGVEGTGSYGAGLTRHLTEAGVEVLEVDRPDRSDRRRRGKDDDLDAISAARAALHQRRTSIPKSKDGAVEALRVLRVTRQTAIRARRNALQLLRMSIVSAPEELRDQVRNLTRMRLIRTCAAWRPDVTDAADPVSATRIALKSLARRILELGDEIAMLDELIEPIVTALAPQLLARVGIGVEVAGQLLVTAGDNRARMRSEAGFAMLCGVAPLPASSGMTQRHRLM

SEQ ID NO: 319067 - protein, 418 aa, unidentified
MYYVGIDVAKQFHIACVLDDSNKYLVKNFRIESEISEYSHLNSLLINIDQDSSKFIIGLEATGTLFENLYLFLKVQGYHVVLLNPYQTTKFREMDTMKYVKNDNIDSQMIAALLKSGRYSEAYVSEELYQSIKSLYRHKATLMQEMKSAKRQVSTTLVVVFPEFEQIIKDPFSVSGMALLEKYPTAKHYKGASPDRILKVFRNIKGNNFNLQKANDLLDLARLTIYQGNAQEERAYVILSNLRRIRFLKEEIEACETQMFTLLNDVNKTIETSKEDEVYIADLVDNLRSIDGVADKTIFAVLSECGDISRFRSGQSFIGFLGLYPTLHQSGNSTKYGKLAKRGAKLAKLAIYQAAIACVRHNDELKKIYLDKKSSGRAPKECVIVVARKLAMIIYSIYKNNIPYNPARVFNTQANLSH

SEQ ID NO: 319068 - protein, 409 aa, unidentified
MQALLDRCAGLDVHQATVVATVRVSDDQGKRQVITHTFDTTTASLLALREWLQAHGVRQVAMESTGVYWKPVYYVLEEGFEVLLVNMRHLTLVPGRKSDVRDSEWLAQLLEAGLLRGSLIPPEPIRDLRDLTRYRKKQIQDRTAEVNRLYRILEDAGVKLASVLTDVMGVSGRAILEALLKGTTDPTALAELARGRLRRKLPALRAALAAPFRPHHAFLVGQILTKIDFLEETIATLTEEIDRQLAPFEATLARLDAIPGVNRVGATAILVETGADMRRFPTAGHLCSWAGMCPGQDESAGKRRSGKTRKANPYLRGALIQCGLAATHTKGTSLAARYARVKRQRGHKKAVVAVGHQILEIAYYLMRDGVEYRELGAGYFDARQRERARQRHIRQLEALGFKVSVEEAA

SEQ ID NO: 319069 - protein, 408 aa, unidentified
MNTLYVGIDVSSKSNVIYLMLPNGDKHSNFSVANSHEGSTQLVKRILSALTSHSLDTVLIGLEATSIYGYNLVYFLREDATLAPFNRKIHVLNPKQVKKFHDAYNDLPKNDYVDSFVIADCLRFGRINKEVYMGDYRYKALQNLTRARFFAVQNLVKEKQRFMNVLFKKYSTMTQEKVFSDTFSTTALAVYDEFESAEALANMDLHELTDFIIEKGKNRFPDPDAVAKAIQKAARSSYRLPKTVNDSVNQVLSISITSMKALESQIKEFDKAIKAQMELLPNVLISIPGIGPVYSAGIMAEIGDINRFNSQAALAKYAGLAWKQHQSGGFESEVTRLIPSGNRFLKYYLCEAAFSLVRCDKEYSDFYRLKYKEVNRCQHKRALALTARKFVRLVFRLLKDNRLYCPAK

SEQ ID NO: 319070 - protein, 350 aa, unidentified
MIAVNKDIITTIGVDLGKNTFHICAMNDKGTIVLRERLTRASLPKRLANIPRCLIGMEACAGSHHIGRQLATLGHDVRLMPAKYVKPFLKGHKNDYRDAEAIAEAVQRPTMRFVPFKNDEQLDLQALHRVRSRLVGQRTAVINQIRAFLLEHGVAVRQGPGALRRALPSILAQRTDVLSPRIIHLIEDLTDDWRRFDQRIADVTREIEQLAKQDEHCKGLMGVPGIGPMTASAMVAAIGDGAAFSKGRDFAAWLGLVPKQISTGDRTILGGISRRGNRYLRTLFIQGARSVLQRSNGWEKKSFGRWLIAASKRLHKNVLAAALANKLARFAWAVLSHAREYDAAFALKAA

SEQ ID NO: 319071 - protein, 354 aa, unidentified
MIIIGADYHPSFQQIAWVDTDTGEFQERRLEHREEAEHFYRALAAAGMKVRVAMEASGHARWFERLLGELQFELWIGDAAEIRTKRVRKQKTDRQDAQLILRLMMEDRFPRIWVPSWENRDLRQLLWHRHRMVQARTRLMNQLQSVALNEGLRCKKKLWRDAGRAQLEAFRLAPWASRRRRDLLELLDRLTPTIAELSTAIEQEAERCPEARRLRTHPGVGSLTALAFVLIVGRAERFQCGKQIASYLGLVPSEESSGDRRRLGHITKQGSSLLRFLLVEAAQVTVRSDPAWRSKYFHLAMRRGRKIAKIAMARRLAVRLYWMWRKGWDYEQMQKFGSHAGEPGNRDGVQQNTE

SEQ ID NO: 319072 - protein, 371 aa, unidentified
MNHVTSIGLDVHARSVTAVALDSITGEVRSQKFGYSPAEIAGWILQLDSPKAVYESGVTGFHLVRELREMGVDCIVGAVSKMHKPASDRRKKNDRNDAEFLARQLMAHNIVEVFVPDVETEGARNLSRALEDIRDDLTRAKHRLTHLLIRWGYIWNEFNEDGKRRGSWTHAHWEWIRGIELPDAAARESLDYYISEVRHIESQKKAIEKRVAQCASRPRWRDRVEALRCMKGIETVTAFSLTVEAGVFSRFDSARAFASWLGLVPSEHSSGERASRGGITKAGNSHLRKLLVEASWHYTRATKERKRSLYDESVPASISNHAAVGVKRLVERRRHLSCELRKRPAVANVATARELACWIWALGRMSEGALA

SEQ ID NO: 319073 - protein, 400 aa, unidentified
MVRRELLFTLEVIFMVFVGIDVAKDKHELYAVDSDGVVLCDHLTFANSAVGFASLLERVSAWGKIKVGIEATGHYSSNLLSFLKAHDFEVVVFNPLSVSRLRSANSLRRTKTDKNDSRYIARLLMTGNANPYQSQSYDISVLKSLTRARFRLFQEIQPLKNRFRRLLHILFPELQGFFSNLYGNTSLNLLSALPSAKDIAECNILKLTKILSVSSHGKLKRSRAEQLKSLAKSSIAAYNYGDAFELKQTVQRILFLSSQMSEIERKIDSVMSQLNSPITSIPGIGNLLGATILSEIGDIKNFDNPDKLLAFAGCEPSTYQSGKYTATNTPMVKHGSRYLRRALYCAADMAYVNSISFRSYIDRKRAQGKHYYVAMSHGMKKLVRIIFAVLSRNIPFSEPA

SEQ ID NO: 319074 - protein, 358 aa, unidentified
MAVNEGTRRIVGGVDTHKDLHVAAVVDEQDRVIETRSFATTRQGYRQMLAWMRAFGDLQRIGVESTGSYGAGLLRFMQQAGIAVLEVTTPDKQDRRRRGKNDDLDAQNAAHAAFTGQRTVTPRSRDGMIESLRVLMACRKTAVSARRVALQMIHNTIVCAPDGLRDQLRSLTRMQLVRTLASWRPDLTAYRDLESAYRIGLKSLARRYLELHDEIADLDAMIAAIVDELAPNLVARNSIGHVGAAQLLLTAGDNPERLRSEASFASLCGVSPVPASSGKTVRHRLNRGGDRAANSALHIIAIGRLRTDQRTKDYVARRIAEGHSKLDAIRALKRYLAREAYTLITQRRREINATRIAA

SEQ ID NO: 319075 - protein, 352 aa, unidentified
MKKGITKVVAVGTDVGDKTSQVCAKDATGAVVWEKKVKTTEAGFRGALGKAGPYRIVLEAGSQTHWIKACLEGLGHQVKVADPRKLRRIYQSESKSDVRDARELAEEALWRWDRMSEVTLRSQRSQEKLAVLKARDALVRARTALVNLARSVLKQEGVVVPKGTPEAFPKKAEPLVPEGQRAALGPVVKQIAMLTEEISGYDRWIEKAGLAEGPVRLMRTTTGVGPVTSAAFVWTLDTPDRFAKSRTVGAFVGLRPRRDQSGDTDKELPITKTGNAFLRRLLVGCAQYILRRSSPKSALKDWGLKLAGRGGKRAKRRAVVAVARKLAVILHRMWVTGEEYVPFPQRARAHAA

SEQ ID NO: 319076 - protein, 356 aa, unidentified
MEKIIRIGIDTSKSVFQLHGVNASEEPVQKKQLRRSQLASWFAKLEPTKIGLEACGGSHHLARMLKALGHEVVLVPPQHAKPYVARGKNDAADAEAICEAMSRPKVQKRFVPVKTVDQQAAQMLVQTREQFIRRRTQLSNAIRGYAAEFGLVVPKGFFHLEPLTARLEEDADVPRLAKELFRLHKSEMAQVQAQLRRIDAMLMAFHKHNELSQRLVRIPTLGPIGATMLAARVSDPERFKSGRDFAAWMGLTPKDHSTAGKRRTGGITRAGDEALRSTMVVGAMAIIQQIKRGNTRQASPWLIELLKRKPPKLVAVALANKTARIVWKLMVSGESYNARKGKHAPQPDADQLKQAA

SEQ ID NO: 319077 - protein, 346 aa, unidentified
MTIVGCDFHPGWQQVAVFDSETGEVRELKLVNGNGEAERYYRQLSSPALVGLEACGNTQWFEDLLERLGHEVWMGDAAAIRASYVRKQKTDRRDAAHILKLLLEQRFPRLWRPSAGERDLRQLLIHRHKLVGIRARVKNGLQHLMLNRGVQMKRKLWSEAGQKALRALPLEGWAAQRRQDLLHLLSGLDPQIRQLDAAIQHAAQENVRARLLMTQPGVGAITALAYVLTMGDVSRFQRGKQVASYLGLIPSERSSSNRRRLGSISKQGNSFMRMLLVESAQTVNRLDEGFRKQYHHRCHRMAKGVAKVAAARRLAVRLFWMLRTNIGYPEIAHIESSPRYGVVGES

SEQ ID NO: 319078 - protein, 346 aa, unidentified
MRKDIKVLGIDLAKNIFQIHGTNAHGKKVLSKRLKRKELPEFIGNLTPCLIGIEACTEAHYWARTFENYGHEVKMMAPQFVKPYVMSNKNDKNDARGIAEAVTRPTMKFVSHKTLAQQDLLLIHRARSLSMNNRTAQANQIRGLLADYGVVIEQGIYHIRKLPVILDENKEQLSEEALAIFTNLHEQFKHHDEQIAYYDKRIDSHVAGDANCQALLEIEGVGPLSASGLVATIGDPGVFKNGRELAAWLGLVPKQCSSGNKIRLGSITKRGDNYIRSLLIHGARCALKYAKNKNDRKSQWACSLLTRMAFNKAAVALANKHARIIWAILTTGESYRKDEVALCTAA

SEQ ID NO: 319079 - protein, 408 aa, unidentified
METIFERVAGLDVHKAQVTACVRVPAGSGRREVAEFATTVRGLVALRDWLEAHHVTNVAMEATGVYWQPVWHVLEDAFELMLVNARHVKQVPGRKTDVSDAAWICQLMEAGLLRGSFVPPKPQRALRTLTRYRKTQIQERQREASRLHKALEDTGIKLDCVASDILGVSGRAMLDALVSGTTDPAVLADLARGKLRAKLPALREALEGRFEAHHSLVIGAILAHLDFLDEQIDLLSDAIEDQLGPFATGVRLATTITGVAARTAEVMVAEIGTDMNRFPSAGHLASWAGRCPGNDQSAGKRRSGHTRKGSRWLGIALEEAALAATRTNAGYLQAQYQRLRPRIGHGRALGAVKHSILIAYWHMFTTGEVYTDLGDDYYQRRDPQRQIRRLVTQLERLRQNVTLKAAAT

SEQ ID NO: 319080 - protein, 340 aa, unidentified
MPHYVGLDVSQKTTTICVVDEQGQRLWRGVCATDPAAISARLLRYAGVDARVGVETGSMTPWLVHGLRGAGLNVECLDARRVKAALHMRLNKTDENDAEGLAQIMRTGWYRPVHVKSLDAHRARALLGARAQLVGMTTRLSNMIRGVLKTFGLLPGAGRGVRFDQSVEALLEGAPEIALVVRPLLVTWRQLRQQITAFDKAVRQQVKMDPVCRLLMSVPGIGALSSLMYVSTVEDPGRFSRSRAVGAHLGLTPRRYQSGETDRTGRISRCGDGLARTLMYEAATVILYRVKRSLRLKDWAEAIERRSGPGKARVALARKLSVILHSVWRSGEPFRWASPV

SEQ ID NO: 319081 - protein, 451 aa, unidentified
MNKTKIAAAFDKPASDPKNNFASASEEPEFGPKKEPEVKPLVRLPVGVDLAKKYIQVCFKDPVTGKIINKQLTRAQFAKFLAGSKYGPMMVGMGACGTCTYWGHFCLDHGHIPVILPAQLVHANNTGNKDDANDARCIWRLLFLPDIETKKIRLRSTDNQDLMSMMKLQESLAKIETQIENIVRHYLLERGVTSNKGAESVMNSLKKYCEDTIEVLGLENERSAMLSVVSSSFCGLMKANISSEQAITDYIISWAASNEKCKLLMTIPYVGPIAAAAIAIYMEDPSYFKNGRQFTALCRMVPYHTGTGGKVEILGIHRNGCSWIKRILFEVSMGMYMRVMKALKEGQNAADGKVPEPLSEWIVNMAKRKPIKKVVCAIAGKLCRISWAVLSSGTPYEQSKSSLIQPSVASPEGKVKSCRTVRKSNFNGVMSSIEAVESFWAAINDEAQQAA

SEQ ID NO: 319082 - protein, 414 aa, unidentified
MDVLHERCAGLDISKKDAKACVRTPSTKRRGSFTTETTTWGSTTNAVLALRDHLLNAQVTLVVIEATSDYWKPFYYVLAEGLNVILVNARQAKNLPGRKTDVSDAAWLAQLGAHGLVRPSFVPPEPVRELRDLTRARTTATRERGRVVQRLEKLLEDTGIKLSAVASDIMGVSGRAMLEALIRGETDPQTLADLAKRKLRNKIPELTEALTGRFREHHAFLTRLHLDQYDQLTTMIDQLTGRIEEAMAPFRGALDLLDTIPGINHPTAEVIIAETGGDMTRFASAKHLASWAGVCPGHHESAGRTKNTKVRPGNPYLKGALGLAAFGAVRTKDTYLQARYKRLTARRGPLRALVAVEHSIITAIWHMLTDNVAYQELGGAYFTQRDPERTTRRAINQLNQLGYTVTLNPRETAA

SEQ ID NO: 319083 - protein, 351 aa, unidentified
MGKALKQKAVEQLFVGIDIHKRKWHVTVQTDEVELFCVSIPGNWPSLKRILDRYPDYRIKAVYEAGYFGFWLHDHLQESGIDCLVTPPSLLPMEYGNRVKTDKRDSRKLSRLLSKGMLKRVHVPSKQERYHRQVGRRRRQLIRDRVRFQSRIKAELRFYGVQIPEPPGKWSQVYFENLNRIRFRNRFMNQSFKQLLQCYAYMDKQVAKQTKLLKELSLTEQYRDRVNILTSIPGVGLITAMEVLLELQDVDRFQKADQITAYVGLTPSQYSSADKVRMGRITRIGKNSLRSVLVEASWTLIRKDKELRLKYERIKRRAGGKRAIVAIARTLLIRMRRILINEEFYIPRLSN

SEQ ID NO: 319084 - protein, 321 aa, unidentified
MTYVGIDVSKATFVVAYSSAKSSETKTFKNTTKGIREFIRTISPEENHCVLEATGNYSMLLVYLLSKAGFTVSMENPLKIKNFARGMLSVVKTDKLDARLIALYGERMQPAPFKLRSESLLLLKQKRTVLRQLKKQLTANRNLEGSLKILPFIDSKCKKVLEKTIKFLEKQIEEMEEELTSLAEIEYKKQMDLLTSIKGIGATLAAALIIATGGFTYFDNAKQLTRYLGLSPTYQQSGTSVNVKGHINRNGDAYLRSQLYIGAMASLRCNTECKACFDRLRSNGKPGKLAIIAVANKLIRQAFAVVTHEKKYIDGYKSVKP

SEQ ID NO: 319085 - protein, 307 aa, unidentified
MYIGIDVSKDRLDVHIRPTGEAFSVTRDETGLGELVTRLGVVGPALIVLEATGGFETIVATTLAAEGLPLAVINPRQIRAFAQACGQLAKTDALDAAIIARFAEAVQPQPRAVPDEAARALGELLARRRQIIGMTVAERNRRRQLTQPRLVKTVDRVLATLQKQLSAVETDIDTAIRDTPAWREKEERLTSAPAIGPKIARTLIADLPELGTLSRRQISALVGVAPFSHDSGQRRGRRAIAGGRPCVRAALYMAVLVTIRRKLPLATTYQRLRAAGKPAKLAIVATMRKLLVILNAIMRDNTAWRAA

SEQ ID NO: 319086 - protein, 369 aa, unidentified
MGKYKEVFVAFDVAKKKHAVAIAEGGRAGEVRFLGDVENSPLPIERTIRRLADRYERLHVCFEAGPTGYGLYRQIQALGHECMVVAPALIPKRSGERIKTNRRDAVTLARLHRAGELTGVWAPDAAHEAVRDLVRAREAAADDLRRKRQQLLSFLLRHSRIYSGGGHWTMAHRRWLASQKFEHAAQQIVFQEAIDAIEDALQRLRRLEKQLALIVPEWSMAPVVEAYQAMRGASFLVAVTFAAEIGDVRRFDTPRQLMAFLGLVPAERSTGDTIRRKGLTLAGNRRARRALIEAAWTYRYPARVSETLRARLEALPKPVRDIAWKAQIRLCARYRRLSATGKKLPVVVAAIAREIAAFLWAIGREVAPA

SEQ ID NO: 319087 - protein, 352 aa, unidentified
MTVTIVETPTQARAITGGVDTHADVHVAAALDPIGGLLGVAEFAATRAGYARLLQWLGGFGTVCLVGIEGAGSYGAGLARHIAAAGVRVVEVDRSDRQDRRRAGKSDPLDAVSAARAALSGRAVGAPKGRDGQVEAIRALMVAKRTARSEPIQTINQARSLIVTGPDDLRARFAGHAADDLVAELAALRPRPGSMIGYHTLLSLRELGRRVAFPGGQLRRLDALIVPLVTARAPGLIALYGAGHDTAAKLLIAAGDHPERLRSEAAWAHLCATAPIPASSGKITRHRLNPGGDRQANHALYRIVITRMSSHPATRAYVARRSKEGLSKKEIIRCLKRYVAREVYPHLRPGPG

SEQ ID NO: 319088 - protein, 347 aa, unidentified
MKHYAGIDVSLNSSSVCVVDESGKIVREVKVASEPVALIHCIQSFGVRVERIGLEAGPLSQWLYGALRECELPVELLETRHVKAALSAMPVKTDRNDARGLAQLMRLGWFRPVHCKSMAAQEVRALLTARKLVQSKLYDIEMSLRGILRGFGLKVGPTTSRSFAARINHLAAGHPSLEMVAEALLSTHAAALCAFKNLEKNVRQISRADARVRLLMSAPGVGPLVALTYVSAIDDPKRFTSSKRVGAHFGLTPKKYQSGETDISGRISKIGDSSVRAVLYEAAHIILTRPIHGGALKSWAMRLAKRAGMKKAKVALARKLAVVLHRMWVSTSIFDFEKANGCMHAAA

SEQ ID NO: 319089 - protein, 309 aa, unidentified
MKEELVYLGVDIAKSYLDAAIGNEKRRFANERIGHRELIKWVKQLKVPVQVICESSGGYERALVQALVGAQLKVSLVQANRVRQFARAAGILAKTDRIDAKLLCHFAKAMQPGTISASELEQEHLRELESQRRHLTHLLVMEQNRAARASDGCVRRLNRSLLNQIKKQIEQLDLLIKEHIEASPELSAKAQKLTAINGVGARTAALLLAQMPELGQLNRREVAALVGVAPFNRDSGKMRGKRAIYGGRRPVRHGLYMAALVAARHNPTLRSFYLRLRAAGKPAKVALTATMRKLVIVLNSALKPELNYA

SEQ ID NO: 319090 - protein, 393 aa, unidentified
MFYLGIDVGKFSHSLCLLDDEGQESIWQINNDKTGFETLQEKLSFVNLLTEKSFLIGMEATGHYFLNLYDFFLQLGIDSKQIALLNPLQVKSFRNTNLRGAKSDNVDAKRIAVLLKFGNFDRCNVSVGEMMNLRELTRLKADLIANSSDLKRKMIAVTDRIFPEFMPLFSNRFGKTVIALLNDFSTPEEMAELSLSELTSIIKGLSRRGIASAKIEKLHDACRNSIGISFGKEAFKIELNLLLENLKLLQNQIDFLEEKIAGIVSKLNSPLFTIPGIGKSTGASILSEIGNIQNFGSAVKLIAFAGLDPKLTESGTYQGRTPISKRGSKYLRNAIWYSAMVICRVNPTFKKQYTERRDKGRSHRYAVTAAANKLTKIIYHVLKNNCPFNPELV

SEQ ID NO: 319091 - protein, 444 aa, unidentified
MNKTLFLGIDVAMAENACCPLLDDGTEASRRFTVLNNLPGAEQLVREIVTLMERHHLNRLLIGLEATNLYWWHLACFLISCPELAPFQPRVYAFNPRLVRAFKKALTDTGKSDIGDAYVVAERLRFGRLPAPFILNEVYQPLQRLTRFRCHLMHQITREKNYFLSFLFLKFSEYQNLDPFSNTFGAASQAVLTDFLTVDEIVAAPLEELASLVAKEGRNHFPCPEAVAAAVKRAARDSYRPHPSLNEPLNLILGATLENIRTLSQQVKKIDKAIERELRKFSNTLSSIPGLGPVFVAGILAEIQDINRFPDHAALAKFAGLFWRTKESGSFQAEETLMGKSGNPYLRYYFIEGANSVRMHSAEYGRYYRTKYDESTKHKHKRALVLTARKLVRLVDAMLRRSQLYIPPPTNLTEEVSKQGITRARPAKQHRYRLPASHSLAACA

SEQ ID NO: 319092 - protein, 370 aa, unidentified
MQEINKFHVGLDVHKDSISVAVAEPGRTAGRLVGKVVHDVSKLLKLLSKIGTAEQLHLVYEAGPTGFGLQRALSAKGYCCEIIAPSQIPRRAGDRIKTDGRDSIELAECSRAGQLSAIWVPDPEDEAIRDLSRAREDAVNARVQARHQLKGFLLRHDVRYTGKTSWCGAYYRWLATLNFGAGPAQTAFTEYWLAVTSADERVERLTQSLQACITNWRFAPVVAALQALRGVAEITAIGLVAEIGDLTRFEHPRKLMGYLGLVPSEHSSGARVSRGSITKTGNAHARRLLTEAAWNYRFKARIGKEALQRQQELPEQIRMIAWKAQLRLTQRFAALSARGLQVNKACIAVARELVGFVWAIGQQALHASKT

SEQ ID NO: 319093 - protein, 342 aa, unidentified
MPFFVGLDMSKATTSICVENERGERVSEGTVPTDPSSIISFLRGEGRRYRRVGVESTSFTPWIFERLAKAGLPIICIESRHARSILKDRRVNKTDRNDARGIAEIMRAGIYKTVHIKTKTSQEGKLVLTSRAHMVRAKRNIDNLIRGFLLQFGLKLEAGRRMTFEARARALLKGDAVVARIVRNLLNVRASIIAEFKSLDAMVIRLATGDPICRRLMTAPGVGPFVALTFRCGVDVPERFTSSRTVGVHFGLTKPSRQSGKSDPDGRISRLGDRTVRSALYMAAQGTLRASARPTALRSWGLSVRASRGGGRAVVAVARRLAVILHRMWISGTDFYEPSGAH

SEQ ID NO: 319094 - protein, 413 aa, unidentified
MKYVGVDLHKQTISVCVMAEVAQKRKVEQRRSLLCKDVQAIRRFFEELGTFRVVVEATSSYEWFLLLIEDLADRCVLAHPKKLRVIAESKHKSDKIDAQILAEFLMLDMIPEAYRPSPRVRQHRVLVRHRNRVQRQITKVKCQLRHKAAGYNADIVGLFSTRGLIHLAKIAMSHADRFECRALQDQLEFLQQQLKAADQELRAFAQTGPVAEREARAILATVPEVGTVTTDVILSETADVRRFRGAKRIVAYAGLDPAIRESAGKSKQLSISKEGSPLLRWALIETAWRLVRKTTRWRRLFERLRASTGHKKKAIVGVARRLLCLLYAMLRDGKAAAAEFQKFIDHRGLVGNFQWGALARLGLARACALDAAKDPASRDKARASYQDFLTLWNEADPGIPILKEAKAEYARLQ

SEQ ID NO: 319095 - protein, 415 aa, unidentified
MALKIVYKICCGIDVHKTFVVACIASTDSNGVTIYEHHRFSTYTKGLKDLLQWLLKHNCKDVCMESTGKYWIPVYNVLENDCSIVLAHPKYVKAIRGKKTDKKDAKWIADLFKHDLVAGSFMPPADIRQLRDLMRYRFKLTCFMSSEKNRLQNCLTVSNIQLGNVVSDTFGKSAQAILDTLLENPADTSFDLEPLVYKSLKKKLPELRDAIDGYITPEQAGKLKVIKAHYENLESRKAELEELILALAAPYQQELAILQTAPGIRSDFTAIGIISEIGTNMEAFPSAKHLCSWAGLTPTNNESAGKKKSVRVSKAGCYIKPLLVQCANAVITSKKHPEIRNRYLRLKKRRGHKKAIIAIARMLLTALYHMLKNGENYNAELYRKSDLPSVDREITVEQAIIIARKQGYKIKSATA

SEQ ID NO: 319096 - protein, 364 aa, unidentified
MKRKVYVGMDVHKETIQIAILPSNTKALVKEQQIKHEEGQIKKFIQKLKSEGTEIHCCYEAGVTGYPLYRYLKTLGVNCIIAAPGKIPRQSSDKIKTDKRDAIKLARLLRSGELESIHVPSEEDEAVRDYLRSRDSLRLDLGRNRQRLMKFLLRKGITYSTTKYWTASHYKWLNNLHFENEILQATFNDYYSRVRVQEENLKAMDQKIQEIAKSEPYREKVGILRCFRGVDYLTAMFLLSEVNDFKRFKTAGSFMSFLGLVPGEYSSGSKRKQTSITKTGSPRLRRILVEAAWQHRFPGTGSKVVVARRVGQSALVVSLAEKASLRLHKKFKSMQLRGKTPQVMITAVSRELSGFLWAAMNLVA

SEQ ID NO: 319097 - protein, 437 aa, unidentified
MKHLAIVDPRAAFVDVGSEHMHVSVAGDEPVVFGTVTSQWHALRDWLKSQGVRSVAMEATGVYWLPLFGVLEAAGFDVRMVNGRQTRNLPGRKTDMQDCQWGATLHAHGLLHAGFVPPADIRRLQDYLRLRADHVASAATHVQHMQKALERMNIKLHDVISSLAGLSGLAVIRAIVAGERSPEALLARCDQQIRRAKAEQVKESLRGTWGAEHLFALRQALQSWEHYQRQILECDREIEATLPPHDPDTTPLARPKAVKRAGVNSPDIPKLREILAQMCGGRDLTQLPAHTHYGVLQLIGEVGTDLTKWPTEKHFTAWTGLAPGSHDSGKRKGRVKRGRNRAGRLFCMMAQCLARSKDIALGGFYRRMCARRGGLVATMALARKLAAWFWRVMVKGDDFVEQGIAHYEAQVLQTKQRALKRLAKELGQQLVPVVETP

SEQ ID NO: 319098 - protein, 327 aa, unidentified
MISIGLDVSKLKLDLGWLRDSQSGKVKTKVFENNYKDFKKISDWIIKNTKADPADILITLEATGVYHEPICYFLHKLGFQIYVANPAHAKSYANGMGITHKTDKSDSIMLAKFAIDRRETVRIWQPDPIEVRELKSMIARLNALESDFQREENRLGSSEFSIPSERVLDSLNLMIKTLKEEIERLKSDIDDHVDHHPKLKETYKNLITIPGIGPVLARMMTLLLVSKDFKNAKQVAAFLGLIPRIKESGLMKGRSALSKTGSPLYRAKLYMAAISASQWNPDIKRQKENLLANGKSKMQALGAAMRKLVQICYGVYKSQKEYQPQVV

SEQ ID NO: 319099 - protein, 371 aa, unidentified
MNTITIGVDLAKSVFSVCEMDDSGHVLRRRDLKRDAFAAWLAQVPAGTVVAMEACSGAHHWGRCCLEFGLQPRLMAAQFVTPFRKNRTAKNDRNDAEAIATAARQGNMRFVPVKTIDQQARLSWHRVREGYKVESLAIGNRLRGLLAEFGIVVAKSDHALRRVLADLDQQTALPSEMRELLRNLSAHWGQVRTAVDACSARIDAHARADERCVRLRAMGGVGAITADAAIATLGDAKEFRNGRQVSAWLGLVPTQHSSGGHARLGAISCRGDGYLRTLLIQGARSSLQRAKAVSVDKSTPEQIWIRQLACRMPFGKVLVAIANKHARQLWAMLAHDETYDADAWLKHPTGWPRAMVQRPAGKHAITMSTAA

SEQ ID NO: 319100 - protein, 316 aa, unidentified
MNETIVEKFVGIDVSKSTLDVCIEPPGQTLHVAYDEAGISQTVERLKEINPTLIVIEATGGLEVRIATELAGKGLQVAVINPRQARDFAKATGQLAKTDQVDAAVLAAFAKAIRPQARSLKDAGTRALDDMVSRRRQLIGIRVQETLRLGTAASKPLQKSLKQHIAWLDKRITEVDNSLSKQLRESDVWRAKDDLLRGIPGVGAVTTLTMLAKCPELGTLNRREIAALTGVAPLANDSGKHCGKRFVWGGRADVRAVLYMATVSAIRCNDTIKTFAERLKKAGKPPKVVIVACMRKLLTIMNSMLKNNAPWNPRNA

SEQ ID NO: 319101 - protein, 458 aa, unidentified
MRKPVEIDSEEDGPVIARAAAIDVAKASGMVCTRVPHASKPGRKVTKVWEVDATTDAIVELAGYLAALGIERVVLEATGDYWRCWYYLLSAAGLECWLVNARDVKNAPGRPKTDKLDAVWLCKLNEKNMVRRSFVPAEPMRQVRGWTRDRFDLVADRTRVRQRVEKLLEDALLKMSVVITDIFGVSGRAIMAALIGGQRDPAKLVALAVPRIIKNKRAALTQALTGRFTGHHAARLEMLLAQHDQLTALIDQVTAQIDQAITALPPTPAGDATSGPGAPAADPSEPDTAAACGAYLSAVQRLSEIPGIGPETARSIIGEIGLDVAGVFGTAQRLCSWAKVSPRTVQSGATKRGGKTGKGNFYLKSGLGQAATGAAKTDTFLGARYRRLVKRMPKAKAKTAIARSILVIVFELLADPTKRFQDLGPDHYTKRMDTGRRTTKLASELRALGWSVTLTPAA

SEQ ID NO: 319102 - protein, 339 aa, unidentified
MNCVGIDVSKGKSMIAVMRPFGEVVVSPFEVLHTDSELSELAGLLKSLDGETRVVMESTGNYHAPVAWLLHDAGLYVSVVNAMLVHDYGNNSLRRAKTDKKDAVKLANYGLDHWLILPRYVPEEDTRLMLKTCYRQYQQYSKVQTMLKNNLISLLDTAFPDANRLFTSPPRADGSEKWVDFVAAFWHCECVCGLSEKAFTAKYQKWCKKHGYNFSEDKALDIYASSCGHFGVMPKTNTAKLLVEQAISQLRATSAALAALKQEMQSLAASLPEYPVVMGMFGVGPTLGPQLLAEIGDVRRFHSKKALVAFAGIDAPPYQSGQIDVRSRSISYQSPYPYG

SEQ ID NO: 319103 - protein, 342 aa, unidentified
MILVGCDLHSRTQQVAVLDTRTGELVEQELAHDGDAVERFYRALPSPVTIGIETTGYTQWFHALMHQLGHTVVVGEAAKIRAMVVRKTKTDRRDALHILDLLRHDRFPTIWVPDPATRDLRALRTHRMRLVCIRTMVKNGLHAIALNSRLTCGSKLLRQAGLVQLQALALPPHTAQRRDQSLELLAGLTTQIRVLDDAITTAAGGHPEAPRLMTHPGVGALTALTTIVVLGPTSRFHDSKHVVSYVGLAPALNASADKYHLGHITKQGSPLLRFVLGQAAAHAARMDPDLKRTYGALVHRRGRPKAKVAVARKLLVRLFIMLRDRIDYDEFRRRGRPAPAAA

SEQ ID NO: 319104 - protein, 345 aa, unidentified
MPIVGGLDIHRKQLTFDYLDTVTGEVKRGQIAPADRAHLRAWLVRFAGRDDVAFALEGCTGWRYVAEELAAAGVSPHVAEPADTAFARGRKRHAKTDKTDSRHLRELLAEGRLPECWIPPSVIGECRALLETYHDLRREHTAWVQRIHAVFFRQGAPALGEAVLRTGRDLQAVRASAEAYLSPAGQLQVAAALEMTGALEARLEVVRHELLAAARHLTGARVLAARLYGAGPVTALAMTCWLAGAGRFSSSRKAVRFAGLDITVYSSDSRRSPGRLSRQGPAVLRWAVYEAGKAHARSSAPDHRYYAQVKDRKDGKRAALSEARKILRQACHILAELGDDALTAA

SEQ ID NO: 319105 - protein, 352 aa, unidentified
MSKQVTTDSPKLFIGLDIHKKSWRFHFTTDLFSGSGHTFPPGSNLIQSYVLKNYTGYEVSIAYEVGCFGYMPARDFESFGWDTLVVNPADIPRPSKSKFMKTDKIDAKNIAQQLKSGNLKKITIPEPVRESLRALTRQRTALVRDYRRIKTRIKSLLMYYHIAIPEGMDSPKWAKRFLEWLTELELDYDNTKRTLGSMLRQYHYIDQEIKELSNEIRKYCKQHHKKDYMLLRSVPGIAGLTAAYILSELGDLRRFTSFKRLASYVGFIPSMQQSGEGLYTGGSTPRANRHVRNMIVEASWQAVRKDPVMQNYFRSHAGKNSKAAIFKVGRKLLSKIHAVIRTEIPYSVGVLS

SEQ ID NO: 319106 - protein, 454 aa, unidentified
MAKRPRVLRSKRKIIGDLVVVNPDAAGIDAGSEEHWVSVPEDRSDQPVRSFGTFTADLQALADWLVECRITTVAIEATGVYWIPLFEILEERGLNPKLVDSRSIGSRKKKSDVVDCQWIRQLDTYGLLNGAFRPGADMLPLRALMRQRDMLIRYAADHIRHIQKALDLMNVKLHLAVSDTVGVTGLRIIHAILSGKRDPMEMAALREPSCKSSEETFVKALTGNYRAEHLFALKQAMDLFTTYQSKIKECDAQIEAALSKFDKTPATASLAPKPAKRRRKNQPHFDGRTLLFEITGIDLTSVPSLEASTILTIISETGTDMSAWYNGKHFAAWLNLSPNNRITGGKRIYKKMPVIRPNRAAQAFRIAAQTLERAQCALGAFFRRVRSRLGRSGAIKATAHKLALIFYSMLKNKTQYREAGVDYYEARYRERLVNSLKKKAAEFGFNLTPIQEVH

SEQ ID NO: 319107 - protein, 343 aa, unidentified
MTLKVSFKWVNPQDINVLGLDVAKAKIDICFLGSNHSQFYQIANNSQAISQFSQELKTLGLNATIPFVLESTGSFHLLLATLLKNDGWNVKEINPIITHQYIKHTVRGTKTDTTDAQLLAKIGLIEGDNLKSFDRDLNIIKLRMFISFLAHLETLIQQSKASFNALEKGLTTLGLWKSQELEKMKEAIKILEQRAKGLEKEILNIQLSPEAQKQVDCLDSIVGISPFTAKVAYALFAHNTFSSKREMLAYVGLDPKLKQSGTKTWALRISKRGHPYMRKRLFQSAFCSLQHSPYFKSIYDKHIQKWKHHFIAVLAVAKKMIYIMRALLKNNTQFDHNYHLLTT

SEQ ID NO: 319108 - protein, 473 aa, unidentified
MRKAQMKVKSRAKAKSKAWRWKKQSSLLEQINFNAAGIDVGSREHWVAVPAERDPQPVRCFGTFTSDLEALADWLLQCGVKSVAMESTGVYWIPVFQILESRGLEVLLVNARQVKNVSGRKSDVSDCQWLQQLHSYGLLAASFRPAAEVCVLRSYLRHREHLVQQASTQIQLMQKALTQMNVQLHHVLSDVTGVTGMAILDAILAGERDPLKLAQLKDPRVRSSVETIAKALTGDYRAEQLFVLKQARESFQFLQAQIAECDVEVNKVLSGWDAKVDLEQQPLPPTRKKNRSQSKHKPLPFNLREQLYRVTGVDLTEVDGLDVLSAQALISEIGLNMQRWPSEKHFASWLGLCPDHRISGGQVLHNRTRPVINRAADVLRMAAQSLKDSQSALGAFFRRLKARLGPAKAITATAHKLARIVYQLLKYGHHYVDPGAQYYEQRYRENILRGLKKRAASLGYTLVENAALNVQVS

SEQ ID NO: 319109 - protein, 341 aa, unidentified
MNITVLGIDLGKTLCSLVGLDREGAVVLRRRIRRPSLAAFVEKQPRCIIGMEACCGAHHLARQFASLGHDVRLMPPEYVKPYVKSHKNDDRDAEAIAEAATRPTMRFVPIKSEEQLDVQTLHRARERLVGTRTALINQLRGVLFDRGIVIAKGRPKLNLWLRENLPNCTILTARMQQLVEDMVDELHALDHRIKQLDQEFEALAKSDERARLLRSVPGIGALNATALAAAVGDVSAFAKGRDFAAWLGLVPRQITTGGKPRLTGISKRGSTYMRVLLIQGARAALPYLARMDTQLGAWLRALLQRAKRNVVVVALANKLARIAWAVMSKQRPYEAVTASKG

SEQ ID NO: 319110 - protein, 401 aa, unidentified
MVSDFMKGRYNLMKIFVGIDIAKLNHFAAAISSDGEILIEPFKFTNDADGFQLLVSKLESFDKNSIIIGLESTAHYGDNLVRYLVAEFYQVCVLNPIKTCQMRKNNVRKTKTDKVDTFVIAKTLMMQDVLRFITFFDLDMMDLKALGRFRQKTIKQRTRLKIQLTTYVDQVFPEIQYFFKSGLHQNAVYALLKEAPSPKEIASMHMTHLANLLKVNSHGHFTKEQAKELRILAQKSVGANDSAISIQITQTIQQIELLDSQLEKIEAEMTDIMKFNDSVIMTIPGIGYINGGMILGEIGDIHRFSNPNKLLAFAGLDPSVYQSGNFQAKTTRMSKRGSRVLRYALVNAAWNVVRNNATFKAYYDAKRAEGRSHYNALGHCAGKLVRVIWKMLTDEVEFNLE

SEQ ID NO: 319111 - protein, 329 aa, unidentified
MKEFLVIGVDVSKATLDICFKPSGLSQQISNDRPGFAAWYRQSRQLIRSFANVMVVMEHTGSYSNQFEKFLLSKGVQYCKISALQIKRSLGVIRGKNDKVDAIRIAEYGWLRRDQLKAEEPCSGDIIRMKSLLGLRSKMVRERSGYMCRVKEISHAGEFGKADPIIRIHRRLIANLTTEIKAVEKQIRELIGANDELKKTSDLIRSIKGVGELVAAHMICYTNNFKRFIKARKFNCYAGLAPFKSESGTSLRGKARISHLANKEAKTLLNLAASCAIRYDRELKKYYQKRVAEGMKKMSCLNIIRSKIVARIFAVAKRQTPFVDLSLAA

SEQ ID NO: 319112 - protein, 343 aa, unidentified
MDHFAGLDVSVKDTSVCIVDGTGKIVREVKVASEPDALLAVLRNPAYRFKRIGLEAGPLSQWLFSALAEVDLPAICVETRHMRAVLKAQINKTDRNDARGIAQMMLVGLYRPVHVKTLRSQKLRMLLTHRKLLQSKAIAIENDLRATLRNFGLKVGMVGTVKFEVRIKELVENLPDLILLVEPLLVVRRVLREQLDLLHRRLLAIVRDDAVCRRLMTTPGVGPVVALTYRATVDVPARFRKSKSVGAVFGLTCSKYQSGEIDRNGRISRCGDEMMRVMLYEAAQSMLRSKKWSWLKAWAMQIARRRGMKKAIVALARRLAVIMHRIWVDGTEFRWTREATAAA

SEQ ID NO: 319113 - protein, 386 aa, unidentified
MNGTQACIAIDVSKGISHICAYVSKDSMVQKPIEILHDREGFKVLDDLYHRLNTGEGSPPIFIYETTGIYHRPLKRYLKDKQYPQTEVSPLLAAKHRKNSGIRVPKSDKADPKSLARLFYDVEMPLYSNSNEMYYELLQLDRNYQALTKLLVTCKVHFKEKLDILFPRFEEHFGNAYLTYFLNLLEAYPHPELIHRKRCDAIKRRLIEDGLQSSRAQHIVVELKDYCQNCISGTSAESVDTQILKWFIQQIRFYTNERNRIIEQMTSIAKELLLFEQLKSVPGIGPLLAVRLIAELGDLSRFRNVRQLTAYAGLDPLVYQSGKNDGNHLSISKKGNRYLRSLLYQVICISANVKTDHPIIKNTFKRKSRLIPLSLLGLPDVLSYYA

SEQ ID NO: 319114 - protein, 403 aa, unidentified
MNSVGIDISKGRSTIAVMRSFGEVVISPFEVRHTGSELSELARRLKSLNGETRVVMEATGNYHASVAKLLHDAGLYVSVVNAKLVHDYGNNELRRVKTDRKDAVKLANYGLDRWLTLPRYIPEEDTRLLLKNCYRQYRQYSKVQTVLKNNLISLLDTVFPNANRLFSSPIRGDGSEKWVDFVAEFWHCRCVSEKSERAFTSKYLRWCRKHGYNFSEAKAHTIYAEASGHIGVMPKSETTKLLVEQAVSQLRATSTALAALKHEMQSLASQLPEYPVVMGMFGVGPTLGPQLIAEIGDVRRFYSKKALVAYAGLDAPPNDSGDVTGRHKSMSKIGASSLRRTLFLVMSVYLQTAPLDEPVYQFMDRKRAEGKPYRVYMMASANKFLRIYYATVKAYLESLEHTA

SEQ ID NO: 319115 - protein, 400 aa, unidentified
MKKRIALTEEAGKKIELMGGEMVEVGVDVHRRDYRVTLWSEMRRRVVGAWVQPSDPSILIGVLTPQKAQVERIVYEAGPTGYGLVRALRAAGFRADVIAPSRTPQATSQEAKSDRLDSRKLAMYSAKNLLQAVQVPTEEEEGDRQIVRMRGAISKKLRRIKQQIKSFLLQHAIAQPEGLEHWAIRSVAALRKIRLSRQLRFCLDCLLDDLVHFESQLKKLNLALRSLAKTKRHKEKVQALETTPGVGPITAMTLRTELIAPERFRDGREVSAMLGLAPLVRSTGQTRREGPLMKTGNTRLRTVLVEAAWRWVAKDPWAAQRFGQLVQNTGGKKKAIAAMARRLGIILWRINVSEEAYRPKPCEGPDAAEATAKKKRRQPSLPSTKKKKAPSTTRQSLVLA

SEQ ID NO: 319116 - protein, 347 aa, unidentified
MTTVAYMAIDAHARNCVLGVMDESGRYRDDWRFATTESELIRHVAAVKASTKCLAIEEGPLAWWIAQTVRAYVDEVFICDPRENALIGQSAHKSDEVDTPKLCRLLRLGELKRVYHPTEDHRAVFKAAVQAYLDLVDQQARLKQKIKAKYRAWGVRVHDTAKVYHPKRRGSYLMQVALAPVRAQLLRLYAVLEVTRQAKREALAQVQELGGRYPEIAQFQKIPGVGVVGAHVYDAWVQTPERFADKRSLWRYSQLGLCDRSSDGKPLARKRLDRAGNSVLKAVSYHAWLGALRGRGQNEVKQYFAASLERTHDKTHARLNTQRKILATMLALWKRKEAYSPERFSGS

SEQ ID NO: 319117 - protein, 410 aa, unidentified
MVAVACGIDWAQDHHDVAIVDEAGVVVASVRINDDAAGLSQVLALLAEHDPTGGKLPVAIETSQGLLVAGLRAAGRQVFAINPLAVSRYRDRYRASRGKSDAFDAMVLANILRTDAAAHRPLPADSELLQSLRVLTRAQQDAAWDQVTLTNRIRTLLRMFFPAALAAFERGGRHRLDSPAARVILAAAPTPTAAGALTPTELAALLRTAGRQRGIAAEADKLHGILRSERMHQPAAVEQAMGLHLQGLVRQLDAVCQTLQQLEQRIDEVFTAHPDAKIVTSIPGLGVQLGARLLAEIGDDRSRFADARALRAFAGAAPVTRASGKSSFVRARRAKNDRIAATGYVWALAAIRHDSHWNARYRSRRAAGDRHVAALRRLFHLMLGKLHHCLRHNTLYDPGKAFAETAATTA

SEQ ID NO: 319118 - protein, 367 aa, unidentified
MKKHTPMSVGLTLNRKCEQLTTGLDLGDKWSYYCVLDASGDVLLEQKVSTTPKAMREVFGAISWCRIALETGTHSPWVSRLLSELGHEAIVAHARSVRLIGESKRKDDRLDAFTLARLVRIDPQLLCPVKHRSAEAQADLIVIRARAALVRNRTTLVNAARGLTKSYGEKLGRGNARSMKPKAAQDLSPELKNALGPLMREIQSVSERIRDYDELLESMADNKYPETERLKQIKGVGTLIALTYMLTLEDPHRFRKSRDAACHVGLQPGRRNSGQSEPQMHISKEGDPYLRALLVQAAHHILGPWGADSDLRRLGMRLAEHGGKRGKKRAIIAVARKLAVLLHRLWVSGDVYVPLRRMSQAAVPAVA

SEQ ID NO: 319119 - protein, 334 aa, unidentified
MSKFKHFVGIDVSKDYFDAVVVILEGAKEKSIHNQFVNDYKGIKLLCKWLKEHGSTSEDTLVCLEHTGMYGKLIIKYLIGFNFSLWVEMSLKIIRSIGVQRGKNDKVDAERIAYYAKKNQQEAVIFKMPRKEVDKIRNLLSLREKLVITKASLLRNAKELKSFDLEVAKLSEKLQKNTIKGITSDLKNIENQLNEIIFEDENLTRIYELVTSVIGIGKVTALFLICFTNEFAMYSNPRQLACYAGVVPFEHTSGKSVRLKPKVHYMANKKLKKQLHMCALSAITSDPELKHYYKRKVEEGKNKMLVINNVRNKLVHRISACVKNNKMYERREVA

SEQ ID NO: 319120 - protein, 481 aa, unidentified
MARTQSTVTRNTPPPIPTLAHDALYVGIDIGKRRHLAGFVSSTLLSRHQRFEGCPALPFDNSREGFRLLIDRIRAYVPLEQCSVLMEKTGHYHKPLEGYLLDMDVTVYVMHVQSRPQGIVKTDKRDALGLANHLYNQLEKGIQVGDSAQLVRRALPPTEAAAALKTMMGHRFELVNEATKRRNQLTAICDQLFPEFTMIFVDPNKPIALAVRAAFPTAHAVATASAEALCHAKGGRGPNRADMAHLQELAARSIGITDGARVRSLAFEQGQLIRELTVIREHIAQIDAEIGQIVAHAREGRILLALPGIGVTSTAAILAAIGHIDNFPDAAHLKAYFGWAPKVTQSGMTKDSASLTRAGERTMKQVMYMVALRCIKDDTEFAPIYKRLVERKCAYDERTRAYKGKRVVIARIAGQLTRMVYAFLKADADLLARTPAGQQPPEPMLYDRVLHRSHIAGNYHSMKPCPVRGDLIQLPKRDVSS

SEQ ID NO: 319121 - protein, 363 aa, unidentified
MNYVGIDIHKRYSVLAAQDEAGRKLKEARIEGNSVQDYARFFQSLEGPSRAVLEACWNWGLTHDVLEEIEEVEEVVLAHPLKTRLIADAQIKTDRLDAFALGTLLRGNLVARAHIPRRETRARKNLLRQRLYWARLRTMLRNRIHALLDRQHGLELPVCSDIFGVRGLGFLRRLELAEPDHTLLREALALHDLIAEQMRAQEKRIALEFKSESSYRHLLSVPGIGPTLAAVIGCEIDQIKRFPSADKLCGYAGVVPTTYSSGGKVHHGRLLPSCNKWLRWALIEASWVAIGCSPYFGALYRQQRARGKKANTAITIVARRMCRILFQLLHEKRSFEKRAAKAQTPFVPGCSAHRLTAISTMRS

SEQ ID NO: 319122 - protein, 327 aa, unidentified
MLYVGIDVAKATLQCCALDGAEQAARQRSVRNDREGWKSLLKWLREVQGSHAQVHVVMEATGVYHEAVAHHLHAAGVMVAIVNPAQVRDFGRGLAVRTKTDRMDSWVLARYGQTVQPAAWVPPSPEVLELQALLARSRAIAEDLQRERNRLEKAAATLTPALVQQSLSESIGFLTEQLKRLQRDIDDHIDRHPRLREDRALLESIPAIGAQTSKHMLSVLHARQFTCAEQPAAFIGVVPVERQSGTSLHGRPRLSKAGPAHLRAILYMAAVVATRFNPHVKALYQRLLAKGKSKMAALGAAMRKLVHLCFGVLKTRRPYSPTFAVNA

SEQ ID NO: 319123 - protein, 341 aa, unidentified
MMGKIVKQVAGIDVAQKELVVTLGHLLDDFSIELFAYKVFKNSDSGFKSLVEWANKLTDNQVDVLYVMEATGVYHQKFAYFLTDNNYKLSIVLPNKISNYMRTLELKTITDKSCSQAIAQFGLERKLDKWSKPKPTYKELQQLTRERDQIVQERSIIKNQIHAEITEAEPNQRSMERMQARIRFLNSQEKEIKEDIEWIVKENPDIRQIIDRITTIPGVGELTAVIVLAETNGFELIRNKSQLSSYAGMDVKEKQSGTSVKGKPRISKKGNRALRKSMHLPALTAVKWDDNFRETYARLVSKHGIKMKALVAIQRKILQLIYVLFKNETIYDKDYSIKKIA

SEQ ID NO: 319124 - protein, 356 aa, unidentified
MIYVGIDVHKHKCHSALMNENGTILDELTFQNTTQGLSELIQRIRPLGEAKAVLESTGNLWIKTYDALEAATIQTTLSNPLKTRAIAEARIKTDKIDARTLAHLLRTNLVAASYVPNKETRMRRSLLRHRANLVKTRTEIKNRIHSLLDKYDLKSEFSDIFGKQGLEWLRGLQLPTIDKTILNSDLALLDSLETQIQNMNIEIAKLACNQEDAKLLMTMPGIDYYSAMIISSEIGDVKRFSTAEKLASWAGLAPSIRQSGSQTKRGHITKQGSRMLRWILVQSAQISHRSDPRFQHMYQRIAARRGNNKAIIAVAREMLTVAYYMLTRREEYRGMNMERYKEKLKRLERTANRGLQ

SEQ ID NO: 319125 - protein, 274 aa, unidentified
MFIDELKNIIIDATLIEHNKNEFDNLFNSIKNYSNLILVMESTSIYHLPVENYFRSKGIDTVVMNPKLVKQFKDTLNKSKTDKLDCFKIARCYLGTIDNFYYKNDEYFMYNPLARQYWSLFERQTRLKNRYKQLIEIVFPEFNLVFNDLYDDLALNFIHDFPHPILFVNTRFDDKYQFVSFLGIDSVTSQSGISAYHGAISKTGCKFGRTILFNVVTIILQISAHANTSNSIYLFFRKKQSEGKHHYKCIIACETKLYKIIYKLCSSNCLYENK

SEQ ID NO: 319126 - protein, 419 aa, unidentified
MKIVYPICCGVDVHKKTIVATIAVTDQNNITRYFTETFSTLNSDLIRFRTWLSDHKCFHVCMESTGKYWIPVFNILEEKNFHVLLTHPKYVRAIKGKKTDKKDSKWIADLFKFDMVRSSFIPPKDIRALRELARYRFKLVCMRSSEKNRYQNCMTVSNIALANVLSDPFGKTASSIMKHVLSSSVLDEELCKKLIQKSAKKKTELILESVRGCQIESDQRFKMNESNAHMDYLDQAIVRTEIELFTRIQPHMPLVEHLAAQLPGISQLSASLIIAEIGVDMSVFESSNHLTSWAGLAPTNNESAGKKKSVRISKAGHFLKPLLVQCALAASKDKKKPYFAIKYQRIKKRRGHKKAIIAIARMMLTCIFHMIQNGEAFNPSDYWEFQSPAPRKQVLSDEIAIAFLAAQGYDVSSLVKKAG

SEQ ID NO: 319127 - protein, 346 aa, unidentified
MDYFVGIDVSLELSSLCVVDATGRIVREVKVRSEPEALNAFLAQLGLPLTRVGLEAGPLSQWLHAGLAAAGHEAVLLETRHVKAALSAMTVKTDRRDARGIAQLLRMGWYRPVHRKSVPAQEIRALLGGRKLLQSKLHDVELAIRGMLRGFGLKMGKTTPAQFGGRVRELVSGHTLLGQVTDPMLRARDALRAEYAALHKQLLTLVRDHHVCRRLMTAPGVGAVVAITFITGVDDPARFTRSKAVGAHFGLTPKRYQSGETDVAGAITRVGDASVRVALYEAANAILTGQARFSALKHWAMEVAKRRGMRRAKVALARKLATVLHRMWVDDTEFRWSREAAGPTTA

SEQ ID NO: 319128 - protein, 339 aa, unidentified
MKRIFVAGDISKEKIDFCIYDGESFLASKVVKNSKSELSTFLKQVDTIFTDGKKENVYNECVFAFEYTGVYNNIVLKLLEKYNFKVALLYPGSIKAVVNFNRAKNDTIDAQKIAEYAYRFYDKLNFYSPLSNEMQELKALITERSALVKVKSQLISKKDDQNKFLPSNISMFLKKNNEKIEKELDEAINNIEVRILKVIKSDEKLKENYEIAISVPGIGSATAAVLIACTNNFNRFKNAKQLGCYSGVVPFQRSSGAYKGKNKVSPKANKQLKTLLHLGAVSVLNSKNIFGEFYNRKTGEGKNKMSVINSVRNKILKTVFACVTNKQKFKPDYKFQFAA

SEQ ID NO: 319129 - protein, 372 aa, unidentified
MWHAGLDLSRKRLDVHVLDDAGATVAVTAVSPDAESLRRLAADFVQRAGCIRAAIESMTGARFVHDQLELAGWDVEIADAQKTRGLAPLACKTDHIDAFVLAELSRRDLVPAIWLPTPAVRAERERARFRLHLVRHRTALKNRIHATLMTFGKPNAFSDLFGMAGRKHLAALKVPEPWLGDLTAALSLVDTVQEQIEGCERELRRLGADHRYVPLLMTAPGIGYVLGYTIASEIGDITRFASPAKLCGYTGLCPRVYQSGNATIVDPSPRTAPSTCAGPSSRPRRTPASIRCTPTATNERRNASADSAGQRWLRSTWRDDSRTQSGSCCIGRSHLLGRRRARFWPRRGPSLEMRRRARSHSTWSSGKEAIER

SEQ ID NO: 319130 - protein, 346 aa, unidentified
MQNDTLVAVDLAKEVFEIAVSDRPGRVAARQRLPRDRFLEFFAQLRQATVVMEACGSAHYWARRIEELGHVVVLLPPQYVRPYVVRNKTDRTDTNGLLEAFRNEQIRPVPVKTVPQQIIATLHRLRSGWLADRVRSINTLRGLLRELGHFIPEGRKHVLPDAWEIIQDHSRGLPDALRPSLAALCEEIASLSTRIDDVEAQLEVLAREIPAIARLRSLPGIGLLSATALYAFVGNPSRFPSGRHMASFLGLTPREYSSGLRRRLGRISKRGDAYLRMLLIHGARSVLWHSKRMKHRDRLRAWALRLEQKIGHNKAATALANKLARICWATWKHERNFEPIPEPQPA

SEQ ID NO: 319131 - protein, 309 aa, unidentified
MDAPVVGIDVARDRLDIHVHPSGANFAVDRTTEGVEQLCERLRPLKPKLVVLEATGGLEAMVARALTTWRLPAVIVNPAQVRAFAHALGQRAKTDRIDATVIARFAAATNPPVRARADAKTQALADLVTRRRQIVGLIASERQRASQAPPCIRDSVRRVIEALEQEQSVIDRSIDAEVDRSLEWRRKETLLTSVPGVGPTIARTLIAELPELGSLNRKQVAALVGLAPWTRQSGQWRGRSFIAGGRAPVRTALFMGAMVASRHNAALKTFRDRLIAAGKPKLVALIATARKLITILNAILRDGTPWQPA

SEQ ID NO: 319132 - protein, 391 aa, unidentified
MIYVGIDVAKDKHDCFITNSYGEVLFKSFTIPNNRDGFETLFQKVQSVSDDLTKVKVGLEATGHYSYNLLGFLLDKGLTTFVINPLHTNLYRKSLSLRQTKTDKADARTIASMLMSDMNLKSYSDTSYHNEELKSLTRYRFDKVQERAKLKTSISRLVCILFPELEKLVPTLHMASVYALLSEFPSAHAIASVHLTRLTNLLSDSSHGRYGKDTAVIFREAARNSIGSDMPAKSLELKHTIKLIQELTSEIDEIEAEIKSIMDEINSPILTIPGISYNMGAMIIAEIGDFSRFDSADKILAYAGMSPSTYQSGQLDNCYSHMEKRGSRYLRYALYNATKYVCHWDESFGTYLAKKRAEGKHYNVAISHAAKKLVRTIYAMEKSKQSYNLVA

SEQ ID NO: 319133 - protein, 454 aa, unidentified
MEAFESRKRRRQARLSAVNAHAAGIDVGAEFHVVAVPPECDDAPVRTFQSFTGDLHRLADWLLACRIETVAMESTGVYWIPLYEILQARGMKVLLANARDVKHVPGRKTDVNDAQWLQQLHTFGLLRGSFHPPAEIAALRAYVRQRERLLEYAAAHVQHMQKALTQMNLKLQHVVADIAGQTGMRIIRAILAGTRDPQALADLRDGRCKRSAEEIAKALDGHYRPEHLFALEQALALYDAYQERIAACDRQIEAALAPLSAPEAPAEPLPPPGGKTRHKNALAFDVRTALYGVVGVDLTRIHGLGPSLALKLVAECGTDLSAWPTAKHFVSWLCLSPGNKVSGGKLLSARTRRTSNRATSLLRLAAVTVGKTDSALGAFYRRLGLRIGKAKAITATARKLAILFYNTLRHGMDYSDPGASSYEERHRERVLYHLERRAKLLGYVLEPAPAAGVS

SEQ ID NO: 319134 - protein, 375 aa, unidentified
MKEKLRFLGLDVHAETIAVAIAEPDGEVRSLGTIPNRAESIRKLVKKLGPVEKLRACYEAGPTGYVLYWQLAELGVKCEVVAPTLVPVKAGDRVKTDRRDAEKLARCYRSGDLTAVWIPDEGSEALRDLVRAREAAKQDQLRARHRLSKFLLRSGQRPAPGVKAWTQIYMAWIRQIHFTQMAQDSTRLDYLHEVEHMGERVMRLEQAIAEAAKLASPELREVIQGLQALRGIAHISAITIAAELGQISRFEGARQLMGYSGIVPSEDSSGNRKQRGSITKTGNSHLRRIAVEAAWSYRLPPGVGPALRKRQEGVSQEIKEIAWKAQHRLHKRYCRLAAARKDQRKIITALGRELLGFIWAIGIKAETAARQRIAA

SEQ ID NO: 319135 - protein, 351 aa, unidentified
MQIVGALDVHRSQITTKTLDLDSGEVRYGRISPVTRESVREWLSRFVPGEAEFALEGTTGWRFVVEEIHAAGLSAHLADPAETAARRGRKKRAKTDKADCDLQLELLVAGRLPESWIPPAHILELRTLVRTRKALLDERTGWQQRIQAQLFHQGVPRGIKLRTAAGRAALAEAGLSAAGRELVTLGLRMLDVLDRELDPLDRRLRAFARRQPGCKALIAELYGVGALLAPAILAELGDCRRFSSSDDVVRHSGLDVTVHESDSRRAAGRLSHQGPELLRWALYEAAQCAARPSSPDYGYFLEVQERIDSDRAFLSVARKLVRRAYHILRKLGDEAIAPVDDPPTGEVALAA

SEQ ID NO: 319136 - protein, 423 aa, unidentified
MDTMHERCAGLDVHKAMIVACVRLTSGGKVNRECRTFDTTTAGLLALLAWLTESGCTHVAMEATGVYWKPAWNILSDGAFELILANAAHIKNVPGRKTDVNDAMWIADLVACGLIKASFVPEQAIQELRSLLRARKQLTREQTSHIQRIQKTLEEANIKLDSVISDILGLSGRRMIEAMIAGVRNPAKLAELADRRIKASPKELYDALHGRLTDHHRFLLRLYLKQYDALDDAVAEIDRQVDASVTRMDEEAKSGRPPFRSLIALLCTIPGVSTLGATVTLSEIGSDMSRFPTAGHLLAWAGLCPGQNESAGKRKSSRLRKGAPWLKTLLVQCAWSATRKKDSYYKAQFNRLRAKRGPKKAICAVAASMLTAIYHMLKDGTEHRDLGAAYFDRRSTKVKTNRLVAQLTKLGFKVELQPLAEAA

SEQ ID NO: 319137 - protein, 341 aa, unidentified
MKKNLFFIGLDIAKADFTASIYQTPDKPIVTKEAIPNDPKGFEMLLLWLYDHHINKKNSRICMEATGVYSQAIAYYLLFQGFPVSVEPPLKVKRAFDPVGHKTDPVDSKQIAEYAYRFQDELTSWQPRDEILEKIRQLLSVREQFTKQKVALDNSIQAYSKQRVQVTLIRKAQKETLNQLKKQIARIDKELEKLIKQDPEIFQRANNLDSIPGCGMLLAAHLLVITENFTKIQNSKRLAAFIGIVPYQHQSGTSVSKRAKIRHFGPGPSRKLLRLAAQSVATHNVTFRHYYLRKLDQGKAKPLVLNNIANKLLKIACTIIRNNTRYIKDYRSIHPMYLKSA

SEQ ID NO: 319138 - protein, 438 aa, unidentified
MSNKVIFNLDELFISVGIDVGADFSWMSIALPNQQFVGKPYKILHNSIDSLTTAVSKIKEAEELYSLESRIFLESTGIYHYPLFCYLRDKGFNCSVINPIITKNSTNINIRKVHNDRFDSKKAALVGLKPDLKVSLMPSDLALNCRNLCREYYDLMDNRSAYVNKLQGELRMAFPQYLGIFSKVTINTSLTLLETYTSPSAFLKADKQEIIDIIKSTARFGLTYAQNKYNAIIQAATDANQFGYIIDSNIKRIRLYISFIRKYDEEINNILESLHELVDANEDADFVKQIHLIETFKGAGFLSAVSIMGEIGDFSAFSKPKQLFAYFGLDPAVKQSGKFEGTKVQMSKRGSAIARRVIHTLTLQSISISRNGEAKNPVLREYYLKKCDSKSKLVAMGAVSHKVCNMIFAILRDNKPFKIIAPQEHIKQYNAAKCDIAA

SEQ ID NO: 319139 - protein, 333 aa, unidentified
MQNFYFIGIDVSKKKLDICVMSNSKVLKEEQVSNHPQAIATVIAGIKEELSMSNDCFIICAEHTGQYTYPLICACKSVGSKLWLENASQIKYCSGVTRGKNDKVDARRIAEYAMRFFDKAKPYQRPIEELMRLKQLEAERSLYLTDLAKYKAQLSDQEGFMEDKIFKRKAKRLKEMIKSLEKTLKEIAQVMADVIYSSEELSRQMRLLKSVEGVGPVVAMNMIIATEAFTRFDNPRQFNCYVGVAPFAYTSGSSQHSRNRVSQRAVKYIKCLLHMAAVAIAHKKTGDLKTYFERKVAEGKNKMTVLNAVRAKLVARMFAVIRNNRVYQPILSV

SEQ ID NO: 319140 - protein, 424 aa, unidentified
MKTTTTNPQSQNNSMAILAFDISKERLNLAASVAGRLSDHEFANRTPVIEEQLKTWQRRAQMAGHDQILVVCEPTGCYHEPLLQTARRLGLETAWVSGEAVCKMRAIETNDSGKTDIKDPHVISTLAQMGKTLICRHYDEPYSLLREWHGLYDQADVGVVRAKCLMASQIKALFPDYSFQKDFLYSKSGSALLANYGGNPYRIVRSGKTRFARVMRKHAPRIRQTTLDRLYTEAESSVRNQLSPRLNHIMERRLVQSWEDYLHYEERKEEAREQMELLYQEAGQLDPRLPTAEKGVITTFHLARILAETGPVSDFDSLRKFMRYAGLNIREKQSGTFRGKNKLSKKGRSLLRKALSQIVLPLVKKTGLFGPYYHGKKAQGMSGTKAMAAVMRKFLKLFYGWYKSGGAFDRARVFACESQYGLAA

SEQ ID NO: 319141 - protein, 428 aa, unidentified
MTDQPHSTAETNLVAIDIAKQWNVVLVQEASGQKRSFKVANNAADHDQFLLYLSSLPGRTRIAFEPTGDFHRPLAFRLLTAGFEVVSISSVAQARFREARYGTWDKNDPKDARVILAMLAHGLVQTYHDPLFHGDHDLQELSNTYYQVTLARTRLQHSLLLHYIPLYFPEFGRYWYSTRSEWFIRFLIRFPIPSAVRMVDRDAFIAEAWDIVGKKWDKRAKLEEIYDLAARSIGLPVALDSPAVETFRLQLERYAEINERRAWLDRRAQEVLASNSDFQRLIKLPGVAAITALTILAEAGDMRRFGHHRQFLKYCGLDWAKSQSGQSRGKDTLSKRGNKRLRMIFWMAGLRAVHLRENEFRAKYQRYLGANPLDADRKRKALTAIAAKMARVAYGIVKNGTEYQPFFEQRLPSGSIPLTRAVEALATS

SEQ ID NO: 319142 - protein, 367 aa, unidentified
MKKVSTAAGKATKNFQDHKLTIGLDLGDRTSWYCVLDEAGEVLLEQRLGTTPKAMKEVFGVMPRSRIALETGMHSPWVSRLLSDLGHEVIVAHARNVRLIGESRKKDDRLDARTLARLARIDPQLLAPVKHRSVKAQVDLTVIRARAGLVRARTALINTARGLTKSYGERLRGCNPRNMNPEKAQGLSPELQAALEPLLAAIEALSERIHEYNQQIEKIAKESYPQVARLEQVKGVGTLIALTYLLTLEDPHRFRKSRDVGCYVGLQPGRRNSGQSEPQLHISKEGDPYLRTLLVQGAHHILGPFGVDSDLRRWGLKLAERGGKNGKKRAVIATARKLAVLLHRLWVSGEAYEPLRNSRQILLPAAA

SEQ ID NO: 319143 - protein, 332 aa, unidentified
MKPLFAGLDVSYQTTSICIVDAAGSVALETSTATNPDAIAKALKPYRRRLKLVGQESGNLAAWLEKRLVQAKLPMVCLDARHANSALSARINKTDANDAQGLATLLARGIYVTAHIKSDEASRLQSLLVVRDALLRRTRDLERMVDMTHRKIPEKAVVDFPSTNAEVDEALLFALRSLKDTIKSLERNCRALTQLATRLAKDSPLCARLMSIPGVGPITALNFVAAVDDPDRFKASRDVAAYFGLTPKQYQSGAYARSGKISRMGSSTMRRALYNAANALLARSKSDCALRRWGLRIARDRGHKFACVACARKLAVVMHRLWVTGETFDETR

SEQ ID NO: 319144 - protein, 409 aa, unidentified
MKILFERCAGLDVHKETVVACARLMIGRRVKTVVEQFGTTTSELLRLAGWLREQGCTHAALESTGVYWKPVWHILEGEIGLTLANAKDVRNVPGRKSDVSDAAWLADLLAHGLIRSSFVPPRPIQELRDLTRTRKQLSRQIAQTTQRIEKVLEDANLKITSVITQLLGTSGRAILRALVEGETDPEQLLARTTGRLKAPRERLIEGLRGSVTDHHRFQLRLFLSQIDSLEQLLSDLDAEIDRHLEPFQSQIQRLSTIPGVSNYVASVLIAEIGTDMTRFPSADHLISWAGLCPRMDESAGKRRSTRTRKGARWLRSTLVQAAWPARRSKGTYLQAQFLRLRSRRGPKKAAVAVAASILTAAYHILKDEGVVYLDLGGDYFDRRDKERTAQRLVKRLHDLGYAVTLEQAA

SEQ ID NO: 319145 - protein, 341 aa, unidentified
MKTKSFVGLDVHRKLVVATAVNPLGKRIRQSSFGPKPKELTRFLSRLPKPTKVVLEACSVWERYYEAAVSTGAEVVVSHPLRTRLIAEASIKTDKVDSAALANLLRLDSILLTFVPPPEIRALRRLYLERDFYARMKSSIMRHAYARLSERGVDYGKGVLQHRPQREKLRKQGIREFDRAIDTMDDLERKCKELDAEIHTAFLESEDAQLLKSIPGIGELMAVGIAGFLCPIDRFPDVDKLTSYVGLCPTTHQSADTLYHGKLKKDVNRRLRAILVAASWTHRVHAPKGEVSKLVRRVVRRKGKMRGTVVGAHKLLRIIYAILKQRRPYLPSAPEGYASGQ

SEQ ID NO: 319146 - protein, 366 aa, unidentified
MRAQARLHPNGELSMRFYKRQHRFYCGIDLHARSMYLCIRDHDDVVLLHQNLPAQADDFLRAIAPYRDGLVVGCECMFAWYWVADLCADHDIPFVLGHALYLKAIHGGKAKNDKLDADKLSALLRGGNFPIAYVYPKGLRETRDLLRRRLFLVRQRAHFVAHIQNTNSQYNLPVFGKKLVFARNRDELDVAERFKDPSVRLSIETDLQMIDKLDEQIYAVELHLERHAKVDDPNTLARLRSIPGVGKILALIFLYEIHDIRRFPDVGQFLSYARLVRCAHESAGKKKGSGGKGAKKIGNAHLRWAFAEAVCLWLRQSDRAKAWMKRHEKKRGKAKALAILGAKLARAMYHMLRKKEVFDEAKVLGG

SEQ ID NO: 319147 - protein, 334 aa, unidentified
MQTKSFFLGFDISKLTVDYDLINGQDKSLLKGQIANSEAGCKQLQKALMVNGFKDFNLILFGMENTGSYCNPMKLFCVKNKLDVVVANAYDVCRSKGMQRTKSDSIDAFVVAQYLRKNLPLTKLYAPDKKAVELLKKLQSARSLLVKMKTQLSNHLGEAKDFFDPKDYKILEKNLKKTLINVQVSIVNLEKQMNKVLCSDESLKQNAEIMESLPGVGRQTALRLITATNNFQTISDPRKAACHAGVAPFKNESGTSRNLRPKVSKMADKGLKKTLFLAAMSAVQHCRPIKLYYEKKVAEGKEKMSVLNAVANKILHMIFAMISKKQLYEETKFQ

SEQ ID NO: 319148 - protein, 382 aa, unidentified
MEEAIKQCVGIDISKATFTACVCQKFADGRIRLSSVESFDNGNKGFNQLVKWSRKLGAPQLELLFLMEATGCYFEPLAYHLHRLNQPVSVILPNKVKHYGKSLNVKTKTDAVDARVIAQLGAERQLPLWEPPLPIFRQLRGITRLRADLVQERTAFQNRITSGESAESVERLVSRGLKAVVKELDRQIDRCDQEVEKLARKEDWLWQKMTNLQSIKGVALLTVATVVAETQGFALVKSRKQLASYAGYDVVQRDSGTSIKGKTRISKKGNSRIRGALHMPARSAARHNDRLREFYQRVNEGKPSKRVGEVAVARKLLLLMYTLWKKDEAYQKKTFGNQEAKALLRQGEESEKRVGSPTELPTQDGLSFNQSAEVLLRRPQVT

SEQ ID NO: 319149 - protein, 356 aa, unidentified
MQTQVTKKIDFKGKDLYIGLDVHKKSWSVTILVEGMEHRTFTQPPDPLVLFNYLQKMFPDGTYYSAYEAGFCGYGIHRELNDLGIKNIVINAADIPSSQKDQLQKRDPVDSRKIARALEKGLLRAIHIFDRDMEELRSLNRTRFYLMRDFRRSKNRIKSFLQYYSIFIPAEFDNNQWTLKFIGWLKQIQMKTSSGQDAFSNLIRSFEYNREQILILSRQIRIRVREYDKELYNLLKTISGIGPLTSSALITELGDINRFPHINHLSSFVGLVPRVKQSGETSYNGGMTFRCNEYLRTLLIESSWQAIRQDPALMQYYHQHVINNKGQKVIIKVARKLLNRIRYVMKNRQPYVTGVA

SEQ ID NO: 319150 - protein, 415 aa, unidentified
MLILGCDIGSETHYMRAIDTRGRELSKSAFSFNNDPEGFRNALEWAVQLAAKHNKSQIVLGLEPTGHYWFCLAAWMISKGISVVQVNPYAVKQTKEIEDNSQLKDDRKDPKLIANLVKDGNYGMPYLPEKVYAELRRLSMFRDQLMEDRIRFINRLHRELKIYFPEYKDALGKVDGVFSLELLKEAPFPADLLALGEDGIRQIWRNAKLKGRGYSRAKEIIQYAETSVGIKDGADAGSQAVKWFVERILELSKKLADIENQISRKCRELPHAENILEISGVGETILSGILAEMGDISRFDDAREIQKLSGLSLVACNSGKHKGETKISHRGRKRLRYWLFQAAKSAVAHGEEFKGLHVYYTTRAENPLKKMQSLIVIACKLLRIIYTILKKGVAYDPQKMLKDIKRMSPQETWTL

SEQ ID NO: 319151 - protein, 342 aa, unidentified
MDKIEACGIEVSAKELVVAMSGKKREAVLRRFANTPVGHRQLLQALTRGGKRVRACMEATGLYGLDVALLLSAHAGIELMVANPRAVRHFAKARMQRSKNDQLDAVMLREFAMRMEFTAWTRPDPSTLSLWAIARRLEALTKQCTAEKNRQHAAGISQAMPACVRASVARTLRSLQREIKTLRDSARRCIAGDAGLQRRYQLLCTMPGIGEISALQILAELALLPADRDVRQWVAYAGLDPREHSSGSSVKKHARISKVGNRHLRCALFMPALVASHCEPHLRGFYEHLVAAGKKKKQALTAVARKMLHAIFGMFRWDRPYDGARVYPLPLHGLATQATKIA

SEQ ID NO: 319152 - protein, 437 aa, unidentified
MSQNKNHAKKSVCLQSLPLIHPHAAGIDVGAKEHVVAVPADRDPPPVRSFKAFTPDLYELAEWLQQCGVKTVALESTGIYWITLYEILEERGFEVRVVNARHVKNVPGRTKTDVLDCQWIQKLHSFGLLSGSFRPDQQIRTLRSLMRLRDNLVVQSTQSVHHMQKALFEMNVQLSNVISDIVGESGMRILEAILAGEHDPARLATLCTPRIKAARETVAKSLHGNWREELLFSLRVALDSFRFAQGKIAECDARITEHLAQFADRAVLETPPSSLKSELHRVCGVDLTKIPGIKEQAAQIIISEVGLDMTRWNTEKQFSSFLGLCPNNSISGGKVLRRSTRKVYNRAADALRLCSQSLTHSKTALGANYRRLKGRLGAPKAIVAMAHHLARLVYRMLRYGRQYVEKGIAEYEIKFRLQRLKWLKHEAKSLDMQLLPA

SEQ ID NO: 319153 - protein, 319 aa, unidentified
MLSSNVKYIGLDVHKEAIAIAVLNGAGKFVMESIVETKACTLLDFLHGLRGELHVTLEEGTWAAWLYDVLKPHVKEIVVCNPRRNALLKEGSKSDKVDARKLPELLRAGLLRAVYHGENGLRTLRELARSYLTISKDQARVMSRLKALYRSWGIPCAGRQVYAPRHREQWLSRIAQPGVRRRAEMFYQQLDGLSVVRHTVRGELLAESRKHQAVKILRQVPLIGPLRAAVLLALMQTPHRFRSKRQLWTYSGLGVETHDSAQHRYVDGQLQRSKKPQQIRGLNQNHNHEMKRIFKSTAMSASRCAGPCRTFTQDCWPRG

SEQ ID NO: 319154 - protein, 378 aa, unidentified
MSRTPTAAVDSINPTLYVAFELGWKTWKLASTVGLGQKPRITTIPARDQKAVIKEISKALERFGLSPDSRVVSCYEAGRDGFWIHRFLTHVGVENIVIDSASIEVSRRSRRRKTDRLDAIKLVTMLVRWDLGEKPWSVVRVPSVEGEDSRQLHRGLKTLKKDGTRHINRIKGLLAIHGIRINTIPKNLKPWLEEQRLWDGSPLPHGVAVRVLLEFDRLRFIRSQILAVEMERRRLLSERKTKDAQVAHKLHRLGGIGVNGAWTFSTELFATREFKNRKQVGSLVGLTPTPFDSGESYREQGIDKAGNKWVRSMAVEIAWAWLRFQPRSALSLWYQRRFGAGSKRLRKIGIVALARKLLIALWHWTEHDVLPKGATLKA

SEQ ID NO: 319155 - protein, 411 aa, unidentified
MDVLHGRVAAIDVGKKELVVCVRLPPAGDGGERLQEVRTFGTTTRNLLQLRDYLIGEQVSIVVMEATGQYWRGAFYLLEEAMETILVNPAHVKGLPGRKTDVLDAVWLCRLAECGLVKPSFVPPAPVRQLRDLTRHRSVLLGERTRSAQRLEKTLEDAQIKISSVLTDLLGASGRAMIDALIGGERDPGVLANLAKGRSRARIPELTDALDGRFGEHHAFLCGQHLRLFDELTVLLDDLARRIGDAMRPWERQIDLLQTIPGVGRASAETIVAEPGAVMEQFPTPGQLASWAGATPGHYRSAGREASSRTGPGNRWLAAALGLAALSAGRSKHTYLGARYRMLAPRIGGQRANVALQHDILTAVWHMLRHDQPYRDPGGDYYDRKDPDATRRKAVAQLRRLGFHVELSKSM

SEQ ID NO: 319156 - protein, 402 aa, unidentified
MNCVGIDVSKGKSMIAVMRPFGEVVVSPFEVRHTANELSELAGLLKSLDGETRVVMESTGNYHAPVAWLLHDAGLYVSVVNAMLVHDYGNNSLRRAKTDKKDAVKLANYGLDHWLTLPRYIPEEDTRLMLKICYRQYQQYSKVQTMLKNNLISLLDTTFPDANRLFTSPPRADGSEKWVDFVATFWHCECVCGRSEKAFTTQYQKWCRKHGYNFSEDKALDIYASACRHFGVIPKTDTAKLLVEQAISQLQTTSAALAALKQEMQSLAASLPEYPVVMGMFGVGPTLGPQLIAEIGDVRRFHSKKALVAFAGIDAPPYQSGQIDVRSRSISKRGSASLRRTLFLVMGVLLQCAPMDEPVYQFMNKKRSEGKPYRVYMMASANKFLRIYYASVKAYLDSLEHD

SEQ ID NO: 319157 - protein, 448 aa, unidentified
MNPMNSTNDTNDTNDTNDTNDTNDTNATHPLGPYAAFVAVDWADAQHAFTLQAAGQHKKEAGTLEQTPEAIGLWVATLRERFGGRPVAVGVEQSRGALIHALLNYDFLVLFPIHPTTVAKFREAFKFSGVKSDPLDTGQILEILTQHLELLKPLCPDTEATRLLARLVADRRKTVELRASHIQALQASLKEYFPQALAVLSGNVTSRLAYDFLKKWPTFGAFQQAKPSTVKRFFYGHNVRRPELIEQVQEVARKSQALTTDPAIVDSGVRLSQMHAEVIHTLNPLIEQYERKIESVFHDHPESGLFAALPGAGPALSPRLLVAFGTDRSRYAAAGNLHSFSGVGPVTRSSGKTRVVYARCACPKFLRQTFHEFARLSVARCQWAQNYVEYYTGKGKKYHTVIRALAFKWIRILFRCWQDRTPYDDQKHMKTLAQRGSIFATLHLQKNP

SEQ ID NO: 319158 - protein, 423 aa, unidentified
MDVIHQRVAGLDVHKETIVACVRIMVDARVSRECRTFDTTTAGLKDLLAWLTASGCSHVAMEATGVYWKPVWNILSDGTFELLVANAAHIKNVPGRKTDVNDATWIADLMACGLIRGSFVPDQAFQELRTLLRTRKQLTREQTRHVQRLQKTLEEANIKLDTVISDIMGLSGRRMVEAMIAGERNPQKLAALADRRIKASPKALYDALHGRLTDHHRFRLRLHLAQYDVLAAAIGAVDQEVDAAIDQMDEAEKGGQAFFRSLIRLLSGIPGVNTLSAQTILAEITPDMTRFATAGHLVAWAGLCPGQNESAGKRKSSRLRKGAPWLKTTLVQCAASAVKKKDSYFKAQFQRLKSRRGPQKAICAVAAAMLTTIYHMLKDGTQFQDLGAHHFDRRPPEAKARHLVAQLTKLGYTVQLQPLAEAA

SEQ ID NO: 319159 - protein, 387 aa, unidentified
MSRNARVPVPVTTLDQDSTLVVVLELSARSWLVGARVPGIGRMSRYALAPSAEALAAWLGTAKARAGAAGRTVVRVVLAYEAGRDGFWLARYLEARGVEVYVIQPSSVLVDRRARRAKTDALDVEMLMRTLLAWLRGEPGVCSMVPIPEVAEEDGRRPVRERQGLIGERLALLNEIDGLLATLGITGYRPLRRDRRAQLAALRTPEGDPLATNAAARIGRILARLELVMQQIAELEQARDAVLAKEAASGEAETMIRGLARLKGIGAELATVLVWEAYVRSFPNRKALGAYAGLTGTPFASGSTTREQGISKAGNRRLRSSLVELAWLWLRYQPDSKLAAWFRGRTGSAGSRMRKVMIVALARKLLVALWRFCRDGVLPEGAALKAT

SEQ ID NO: 319160 - protein, 345 aa, unidentified
MRKVVKQVAGIDVAQKELVVTLGRMLDDFSIELFSYKVFKNNDSGVKLLVDWVNKLTDYEVPVRYVMEATGVYHQKFAYYLVDNGCEISIVLPNKISNYIRTLELKTITDKSCSQAIAQFGLERKLDKWAKPKSIYKELQQLTRERDQIVQERSVIKNQIHAEKTESEPNQKSLERMQARIRFLNSQEKEIKADITDIVSKDSDLKQVINNITTIPGVGELTAVIVLAETNGFELIRNKSQLSSYAGLDVKEKQSGTSVKGKPRISKKGNRNLRKSMHLPSLTAVKWDENFKNIYARLISKNGIKMKALVAVQRKILELIYILFKNETVYDKEYITKNSAQTQMV

SEQ ID NO: 319161 - protein, 349 aa, unidentified
MRFYSHQHQFYCGIDLHARSMFLCIMDQAGEVLLHRNYRTNPDALLRAIAPYREDIAVGVECIFTWYWIADLCSREGITFVLGHALYMKAIHGGKTKNDKIDSQKIAALLRSGMLPMAYVYPQGMRSTRDLLRRRLYLARQHAELQAHIQNTNTQYNLPYFEKRIDRRSNRASIGLRFTDPVVRTSVEVDATLMDALHEQILAIERQINAQVPEHDPVAVHLLRSIPGIGKTLALVILYEIHDISRFPAVGNFISYARLVKCTHESGGKRKTSPNNKIGNVHLKWAFSEAACLFLRRNERGKLYHQRLVSKYGKAKALSIIAQKLGRTVYTMLKRRTPYDARQFFETVG

SEQ ID NO: 319162 - protein, 396 aa, unidentified
MLTSTMVNNSLIGKAGVGEASVASRTDTSRRREFGRVQASEAVTEREPRRTRETSPNSRLNRRRPARTASSHLQVREITMSEPVYVGIDVAKETFHVATCPNILKTCLPNTPEGHRQLCQTLKNQTIALIVLEATGGYERPIAAELLNVSLPVVVVNPRQVRDFANGMGQYAKTDPIDAQLLATFAQIVKPASKTHSTPQTDELSEFVRRRRQLNDLRTQESNRLLMIHHPKVKKSIQKMVKTLDFQINEIDRLIREYIDTDDDFKNKDHILQSTPGVGPQTSAMLIANLPELGQLNRQEIAALAGLAPWDRSSGKYDGKAHIWGGRKDVRSVLYMAAFTACRFNPVIHALAHRLKQKGKAYKVILTACMRKLLIILNTMVRNQTLWSPKISIKNP

SEQ ID NO: 319163 - protein, 336 aa, unidentified
MHAVDAAERVVVARALRRDKFAQWCAQLPAGCIVAMEACSSAHHWARKLLAMGLAPRLIAANFVTPYRMEGKGGKNDAADAAAICEAASRPKMRFVPVKTCAQQGILSVHRLREGYKEERNACINRIRGLLAEFGLVFAQGPKALGEQLAGVLEDATNELPGVARLALERAFAHWRALDAEMAWCDARISQHVKEDPQAQQAQRVMGIGPTGASALAASVGDFKQFRSAAQFGAWLGLVPRQNSSGGKASLGRITKRGDEYLRYLLVQGARSAVAAAAKKSDPISRWIVQLQARVGWQKTLVAVANKNARILWAMLSRGHAFDPHHVPTKPAPATT

SEQ ID NO: 319164 - protein, 366 aa, unidentified
MGWTPLDGIECANMVVLTATTEETSEMNVSMMGLDLAKNVFQVHGSDTAGAVVFRKQLRRDKLLAFFAGQPACIVAMEACSSAHYWAREIGKLGHTVRLIAPAYVKPFVKRQKNDAADAEAICEAAQRPTMRFVTVKSEEQQASAAVFRARDLLVRQRTQTINALRGHLAEYGLIVAQGPSHVTRLVWHVEDPRSKLPEAARMALAILVDTLTSLDQRIQKLDVEIARRAREDEDARRLVTIPGVGPITATALIALAPGAAGFKRGRDFAAWLGLTPLQRSTGGKQKLGETSKMGERTLRRLLIIGASAVVLQARRRGTPEGSWLGRMLARKPPMLVTVALANKMARIVWALMAKGGVYKAPAVAA

SEQ ID NO: 319165 - protein, 483 aa, unidentified
MKSKPEEQNKRATNHPTQHQWHEMNRKQRREITRQIQSEDLSLEVIHPDAGGIDIGNESHYVAVPPGRDNQSVRRFGCTTAQLKAMAAWLKQCRIRTVAMQSTGVYWVAVYDILEQAGLEVYLVNARDTKNLPGRKSDVQESQWLMKLHTYGLLRNAFRPSQEIREMRTYWRQRNDLVQSAGRHILRMQKALTQMNIQLANVLTDISGTTGQAIIKAILAGERNPHKLAEFRDPRVKASEEQIAQSLEGNWQEDLLFVLKQEHKGYEFCQKQMAECDRQLKQYLQQREDRSHGAPLPEEKRKGRLKKKKGNAPQFDLREGLFRMTGTDLTQIDGIDVMTATTIISEAGWDMSKWKTEDHFVSWLRLCPDNRISGNKVIGKGRLPTNNPITIALKMAATTLRLSKTYLGAQFRRLRTRLEAPIAIKAMAAKLARLVYRMLRYGMKYVDQGAAVYELRHRELQIKRLKAKAQKLGYRVTPIPAAA

SEQ ID NO: 319166 - protein, 349 aa, unidentified
MTTMASTARAVIGGVDTHAEIHVAAVCDGLGAVLGTASFPTTAAGYRLLLGWLRGYGSLRAVGVEGTGSYGAGLARHLAAEGVETIEVNRVSRQTRRRHGKTDVVDAIAAARAVISGDASAVPKSGDGGVEALRVLKVVHRGAHKARTQAINQIRAMVLTAPDQLRAELRELKRPALLATCVAFRPLDRDDLISTTKTALRMLARRITDLDTELALLDTKRRRLTTTIEPALCAAYGVGPDTASGLLLAAGDNPQRLRNERSWSSLLAANPIEASSGKVTRHRLNRGGDRQGNSALWRIVIVRMANDPTTKAYVERRTKEGKSTPEIIRCLKRYVARETYDLLPRELRI

SEQ ID NO: 319167 - protein, 355 aa, unidentified
MKQVKTLSFAGQDIYCGIDVHKKDWSVCIRDDERELRVFSQPPHPDKLFEFLSRNYPHANFHAVYEAGFCGYWIQQALNCLGIDCIITHAADVPTSDKDRRQKTDVVDCRKLAKELSDGSLKAIYIPCQQILEDRSLVRGREQLVQDQTRFKNRILSWLHFFGITIPEGYKKSTHFSKRFITWLEQLKINENSKLALQVKLGGLQCIRHQLLLANRNLRKLAQSERYRKQVELLRSIPGIGITNAMIFLTELDNITRFKTFDHLCSYAGLKPDIYSSSDTVIVKGITPRRNSWVREALVESAWKALADPALLMAYKEYKKRMNYNNAIIRVTKKLLSRIRYILLHQTPYVTAVVG

SEQ ID NO: 319168 - protein, 389 aa, unidentified
MDTISLDTFGQTSRNIESDIYISIELSRLSWLVGVFCPALGSKIHVHSVSSRDSEELLKIFSKYRAKVTEKNHSGIRVFSCFEAGYDGFWLHRLLCANGVENHVLDGASLPVDRRAKHIKTDRIDARRLVNALFRYIQGDSESCRVVRPPTPEEEDAKRLHRERKRLVQERTAHLSRIKALLMAQGIRALRITDATWLKRLDNMHTGDGRPLPERLGVEIIREWHRLKVVAAQIAEIEEERNEQIKVAPSNGLEVTSKIALLTKLRGIGPDFASILMREVFYRRFENQKQVASYMGLTPAPYSSGDSHIDQGLDKSGNARARCAAVQMAWMWLRHQPQSELSQWYMRRVGEMQGRIRRIMIIGLARKLVIALWRFVHSGLVPSGAVIQA

SEQ ID NO: 319169 - protein, 400 aa, unidentified
MLNPHQALQLRVGVDVGSRCHSVAVGLTDGRLLEEFEIPHTADGFREFFTRVEACGRRHAVPIAVAMEGYNGHVRPLDSLVRARGWRLFNVNNLKLARFKEIFPAAAKSDRIDSRKTLELFQLRDHLPMADEVLQEVMATPEDNNVLKRLSRRRRRLVNERGRVANALQADLQAVCPGLLEITRDAGNLWFLNFLTCRTGLLKLAGVRRASLLKVSGIGATFADAIQAWQSRAYFAPDAGLVGDMIQQDAARILELKQQIKALEEQMAHVAESSSIAGQLASIPGYGSVCSAELAGEIGTVERFRNEASLALYLGMATLDNSSGKYRGSKAPKHVNARAKAAMMFALDHHRKLVPQSQRYYQRKRAEGKKHNQAIRALGRHLCRVIFKMLSQERTYRIDP

SEQ ID NO: 319170 - protein, 355 aa, unidentified
MKRGSSAVPKLTTGLDVGDRWTALCAVDETGAAIERGRIATTPAGVERRFRQGPVQRIVLEAGKQSPWMSRLLASWGHEVIVANPRRVRLIAAAANKDDPRDAETLARLGRLDPQLLQPITHRSAEAQQDLAVVRARDALVRSRTLLINHVRGVVKSLGSRVPRCSAHAFARQADRVVPDAIRPALAPMIAIIEQLTGEIRRQTRAIEALGQTRYPEALPLQQVQGVGPITALAYVLVLEDPTRFATARSVGPYLGLVPRRRQSSRADPQLRITKTGDGLLRRLLVQSAHYVLGPFGPECDLRGYGERISARGGKNAKKRAVVAVARKLSAVLYHLWVTGEAYEPGHGAAPKVAA

SEQ ID NO: 319171 - protein, 373 aa, unidentified
MPKYSTAFGMDVHLRSTTVCALDADTGEAVTRRFPGNPWGEIAGWMDGFPGPSLAAYESGYLGFAPQRELAGLGVECVVAAVSKIPRSAADSASKNDRNDAARMAKAILAHDISPVWVPSPEVEGIRDLAGAYDGATARLATAKQRLLAFLARRGFVYGGTTPAGNPRKYWTYDFLRWLDKVRSEDDGGVRALAALRNEVEAAAEARADLLSEYRAAVDASPIAAEVAALQSIKGCAFALAAAFSAEVGDFTRFRSGRQVTAYFGLAPSQRSSGDSVRLGGISSAGNALVRKLAVEGSWCYAAARHQPKLMPRDTGVPLEIRMHGRKGSERLLRRREEMLARGMPQAKANAATAAELVRWLWALGMMCREGAE

SEQ ID NO: 319172 - protein, 391 aa, unidentified
MPMYFVGIDISKYKHDCCILSADNQQVVAKFVILNNKDGFNELQAALQSLSNPEDIRIGFEATSHYALNLKLFLEKAHHSFMEVNPILISKHKRSTTLRRTKTDTVDCESIARWLMTVEYKPHPKGFYHAYSLKSLTRLRDRLVRQRSFYLVKITNVLDHTFPEFKPFFKDRFSRTATYLLENYGSAEKMARMNSASYEKLRSLSHGKFTPKHFLALKSLASNTVGVGNDIFDAELKCLLMLHKSLAEQIDVLESQITELVMEIRPRCMTIPGIGPVSAAVIYAEYGDVTNFSSPAQMLAYAGLEPGVSESGTESHKGRMVKRGSSHLRYVLLNCALPLIRYDMTFAIYYEKKRSEGKPHRVAMSHVAKKLVRVIFALERQNIDFNIQALR

SEQ ID NO: 319173 - protein, 376 aa, unidentified
MKKHGEAFVGIDTAKARNAVAVAEGGRDGEIRYLGEFDNTPDGVLKLIRKLADRYETLHVCYEAGPTGYGLYRQVLALGHACTVVAPSLIPRRPGERVKTNRRDAQSLARLLRAGELTAVWVPDETHEAVRDLVRTRAMAVEDYRRKRQHVTSFLLRHGRMYTGQASWKGRHLRWLDEQNFAHPAQRLAFQEMLNAVRATVERIDRLEAALVEIVPSWTMAPVVSAFQAMRGVRFMTAATMVAEAGDLRRFDHPRQLMAFLGLVPSERSTGETRRQGGITKTGNASARKALVEAAWTYRHSAGVGRNHQQRQAKLPQQVRDIAWKAQTRLCARYRRLTAKGKRNTVVVTAIAREIAAFLWSIARHVDPLPLPVTNG

SEQ ID NO: 319174 - protein, 338 aa, unidentified
MTIVMGLDQHRAQITAEWLDTSTGELSRSRIAPAHRAGVRRFVDRFRGRELEVALEATTGWRFVVEELRRVGAVVHLAEPAETSARRGNKKRAKNDRADARHLRELLMAGRLPESWIPPAHILDLRARVRLRHTLSAQRGEWQQRIQAVLYHHGCPQRRNLLTGEGRSWLAAQPLPACAGEQVTVALAMIGALDLQLAPLNRELRAYARRQPGCRALMRHFGIGELTAVTILAELGDAGRFSSSREAVRYAGMDVTVHQSDQRRAPGHLSRQGPPALRWALFEAAQSAARAGSPDRDYYTQAAERLGANRACLSVARKLLKRSYHTLRELGEEALQPA

SEQ ID NO: 319175 - protein, 343 aa, unidentified
MEAYEGKQYVGIDLHRRRTVIVRTTEAGEVLEAVRIVNDVQRLATVMARAGQCPEVVLEATYGWYWAVDALQAGGASVHLAHPLGVKAFEYRRVKNDFRDAQDLADLLRMGRLPEAWIAPPPTRELRELVRHRAKLVGLRSHCKAEVHAVLAKCGVQVLMSDLFGVWGTELLDGLELPAPYAARIASLRRLMDDVDFEITVFAGIIRGRMAHEPGYTAVQKIPGIGPTLAAVLVAEIGDITRFASAQKLTCWAGLTPKHHESDTHVRRGRITKQGSRLVRWAAIESVKTVSKNSEVGVLRERVADRRGRNIGSVAAARRQLELVFYALRDGHVRALEHLPRVA

SEQ ID NO: 319176 - protein, 421 aa, unidentified
MTQSYSNTGEKVLVAIDIAKQRNAVLIQFPDESRQKFIVANKLSDYQEFSAYLKSLRFPCLIGLEATSNYHRPLAYYLQQEGFDLKLVSSVAAARTREAIYNSWDKNDPKDAQVILHMLKTELTQTYYDPLIQRINDIQEISKTYYQVSLRKMRVQHSIMTHFLPLYFPEAQKYFHTSRAEWYSSLLLRFPNPSSVVKYSQKTFCKVAKDLVGRKENKSTWLIDFYETAASSIGLPVAEDSEAMHMFRIVLQEHQDLCLLRQSIEERANLYLKDNADFNRLRTIPGIGPVIALTILAEAGDLRRFSHYKKFLKYCGLNLSTQQSGNFRGISKLSKHGNARLRCVFWMAGTVAIRMRENTFRKKYENYIKADPGNPDLKRKAYTAVAAKMARVAYGLIKSGRDYRCYYESSVPSGKIPSAGR

SEQ ID NO: 319177 - protein, 377 aa, unidentified
MSKIRFVGLDVHAETVAVAVAEPGGEVRSLGIIPNRLESIRKLLGKLGPVQHLKACYEAGPTGYVLYWQLTQLGVACEVIAPTLVPTKAGDRVKTDRRDAEKLARCYRAGELTGVWVPDAAHEALRDLVRAREAAKKDQLRARHRLGKFLLRHGQRPIDAGKAWTKKYLEWIKTHVRFDQPALEVTLAHYLHEVDHAAEQILKLEKAIDEAVSQASPEIRSVIEALQALRGVAQMTAATIVCELGSLSRFPSPRQLMGYSGLVSREHSSGNRIQRGAITKTGNAHLRRVLVEAAWAYQHRPNITGFLLRRQKSLALSDEIKQIAWKAQYRLHKRYQVFAARGKNKNQIVTALGRELLGFVWAIAIHTEAQHKLGKAA

SEQ ID NO: 319178 - protein, 340 aa, unidentified
MDTIGLDLHKRESQLCILTEEGEIVERRIVTSRERFTAVLGGQPRARILLEASTESEWVARHLEALGHEVIVADPNFAPMYATRRRGVKTDRRDARTLAEACRLGAFRRAHRASDGQRHVRAELAVRDALIRTRTRYVALIKALVRRDGLRLPSGEAVHTETKLAALPLPPALAAELAPLRALWAPMNTQIAAADARLAHVAAGDPVVVQLMTAPGIGPVTAVAFVATLDDVTRFASAHQVEAYLGLTPREYSSGEQQRRGRISKTGNARMRYLLVEAAWRVLRTKDPAAAALRAWAEGIAQRRGRSIAAVALARRLAGILYALWRDGKDYRAPPSAAAA

SEQ ID NO: 319179 - protein, 368 aa, unidentified
MEITTIGIDLAKSVFAVSGADRRGKVVMGRQLRRAQVLEFMGKLGPCVVGMEACGGAHHWARAIGKLGHEVRLLSAALVRPYRSGPNKHDRNDADAICEAVRRPQMRYVAVKSVAQQDQLALHRVRAQLLKQRIGQSNLIRALLHERGVVARLGAAGLRQALTQALQAENSELSGAMGELLLELSGGLRELERRIAVLTRRIERAAKDDERCARLMEVPGVGPLISSALVATVGNAREFKRGRELSAYLGLTPRQHSSGGKTVMLGISKHGDRYLRTLLIHGARALLYRQGRGRAHPRAAWAARLVARRGPNVAAVALANHNARVLWALLSRGDGYRPPTSSFPSRPSAGAVIKRAREGKLLLATKRA

SEQ ID NO: 319180 - protein, 408 aa, unidentified
MTVVGIDVSKGKSMVAAMKPGGELVTTPYEVKHSDIELSRFALDVLCMEPDTRVVMEATGRYHEPVAALLHSEGIFVSVLNPLLIKQSGAGSLRKVKSDPKDALKIAKYGLDNWSTLREYTPMEAIRQQLKLCARQCDLYSKNIVMLTNNLISLSDKTFPGVNELFSSPEKENGHLKWVDFYRTFWHCDCINRMSPDAFEERYKKWCKRKGYHFSADVADALYAASCGLYTTLPRDNNAKLLVTVATDQLIALRENQSKLETEMLNLCKQLPEYETVMAMYGVGKSTGPHLMAELGDIRRFPHRSSIVAFAGVDPGVVGSGKMQLSSVATSKRGSPQLRKALFQVVSAYVKRKPENEAVYQFYAKKRDEGKPYYVCTTAAANKFLRIYYARVKECLNAAESATQAEEG

SEQ ID NO: 319181 - protein, 281 aa, unidentified
MNKLSRVGIDLAKNVFQIHGVDRHGKTVWHRRLTRDKWLGVLLEKVESGCEIGMEACAGAHHWARQLQAKGFTVKLIAPQFVKPYVKSNKNDANDAEAVCEAMSRPSMRFVAVKTVEQQDIQAAHRIRSELIGHRTAKANQIRGLVAEYGLVAPQQLARLRAAVPQWLEDAENGLTSRFRGLLSSLWNDLMTLDQRVAELDHEINMIAQSDPVAKRLQQLRGVGPMVATALVATVGSVEQFANGRQIAASLGLTPKQHSSGGKDRLYWASVNGAMPICEAY

SEQ ID NO: 319182 - protein, 338 aa, unidentified
MTYYAGIDVSLESASVCVIDAAGKTIREGKVASEPEALADWLKGVGVSLDRVGLEAGPLSQWLYAGLRQGGIAAELLETRHVRRAFEIMPVKTDRKDARGIADLIRMGWFRPVHCKSIDAQETRAMLTARKLVQKQVFEVESSLRGILRGFGLKVGKTTPGKFEGRVKELVAGHPSLERIADALLASRAVLRREFNGFERQLRAMARNDTRTRLLMTTPGVGTIVGLTYAAAIDDPARFKSSKTVGAHFGLTPKRYQSGQIDYTGRISKLGDASVRAALYEAAHVILTKPLKGCTALKSWAMRIARRAGMSKAKVALARKLAVIMHRMLANGTPFQPA

SEQ ID NO: 319183 - protein, 338 aa, unidentified
MECPTIPRWFGVDVSKATFDIALYEEGSRKPPHDKFPRSRKGCRDCLGWLQKHLPPGHHPSLVMEATGGYGKEMALWLLAMDHALKVAIAQPVKVHHFAQTCGLANKTDLQDAIMLARFGELHKPPPFQPMSETYEKLRALTRERAAMVKAAIRLGNRNEIPSQSREAQKIRERMIANHEKAVADLEKAMKALIVGDPALSKDCRILQTIPGIADVVAPTLMGELGDLRDYPHPKTLPAYTGIAPKLRDSGTSVHETAHMTKHGSARVRHVLYLAAMASLRGNNTFSRSYDHLVAEGKPPMVALGAVMRKILVVARVLLITEKNYDPNYVKNPPSQEG

SEQ ID NO: 319184 - protein, 346 aa, unidentified
MLHVGLDLSRKRVDVHVMNDAGETVDTWAVLPDRDGLHALARRLEQHGTPVYAAIESMTGARYVHDELELAGWRVDVADAVRVKGLAPLACKTDKIDARVLAELCRRDLVPAIWLPTPEHRAERERSRWRLHLVRHRVALKGRIHATLLTFGHQCPTSDLFGVSGRRRLEEMRLPEPWLGTVQASLRLIDQLEAEIDSCERELRTLGADHPYVPHLLTVPGIGWVLAYTIASEIGDIDRFASPKKLSGYTGLCPSVYQSGGKDRRGALKKNGPTYLRWALIEAAVHAARHPAYYEHYEATKKRLGKQRGSKVARIDVARRLAEAIWHMLTRNQAFSPAGPPGCLVA

SEQ ID NO: 319185 - protein, 411 aa, unidentified
MSLGPHEEPAAIQTHIGAIFISLELSRSKWLITSLVPGGGQRMSKHWVEAGDLAGLLARFWAIRDKVSARTGITYPIVVIQEAGLDGFWIHRSLVKEGIESHVVDAASIAVSRRRRRAKTDKIDGEALLRALLAFKRGEPRVCSMVRAPTPRDEDRRRICRERETLIAERIRHVNRIKGLLFSQGIGDYEPLRRDRRRALEAARTGDGRALGANMKAQIGRELDRLELLLDQIAAVEAERDAMLARQPEAGTAPGAETVPEAEAAAGVQSAQSAARVQKLIDLNGLGAEAVAKLETEAFYRSFDNHRQLAAFVGLAGTPWKSGKIDHEQGVSMGNQRLRQTMIQLAWLWPLHQPNSALTRWYLERTKGASKIQKKKMVVALARKLLVALWRYVDAGVPIEGAVLKRAARAR

SEQ ID NO: 319186 - protein, 391 aa, unidentified
MIYVGIDVAKDKHDCIIKNSVGEVVFRTFTIKNNLDGFNDLYQKIESVMEDVSKVKVGLEATGHYSYNLLGYLIDKGLPTFVINPLHTNLYRKSLSLRQTKTDKVDASTIASMLMSDVNLKSYSDTSYHNEELKSLTRYRFDKVKERAKLKTSISRLVCILFPELEKLVPTLHMNSVYSLLYEFPGAKQVAFAHLTRLSNLLSESSKGHYDKDVAITFREAARNSIGSNMSAKSLELKHTIKLIRELDSEIDEIEGKIKAIMDTINSPILSIPGISYRMGAMIIAEIGDFSRFESADKILAYAGLSPSTYQSGQLDNCHPRMEKRGSRYLRYALFNATIYVCHWDPTFNAYLARKRAEGKHYYVAMSHAAKKLVRLIYRLEKSNQPYNKAV

SEQ ID NO: 319187 - protein, 455 aa, unidentified
MPRKKVKSKNDGAMPMVHPNAAAIDVGATLLMAAVGADRTSEPVRSFGTFTTDLHRLAAWFAECGVETVAMESTSVYWIPIYELLDARGFTVFLVNARDAKHAPGRKTDVSDAQWLQRLHSHGLLRASFRPKGHFIELRGYVRQRERLLEYAASHIQHMQKALTEMNLQLHHVVADITGATGLRIIRAILSGEHDPKLLARLRDYRCHSSTKTIEKALTGNYRAEHLFALEQALALYDAYHEKVLACDIRIEAVLKELSIGRGHKCDALPSSRRRTDQVNGLAFDARSALFALLGKDIARIDGFGPYLALKLIAECGDDLLAWPSAKHFTSWLGLAPNNKISGGRVLSSRTRRTGSRAAALLRLAAVTVGRTDTALGAFYRRLSARIGKAKAVTATARKIAALFYNAVRHGMEYVDPGASFYDTRYRQRVVENLHRRAKTFGFVLQPIELASAVS

SEQ ID NO: 319188 - protein, 348 aa, unidentified
MALTIVEDTRAVTGGVDTHADMHVAAALDPVGGLLGVGEFPATAAGYARLLGWLGGFGTVCLVGIEGTGSYGAGLARHVTAAGIRVVEVDRSDRQDRRRQGKSDPLDAVSAARAAQSGRARGAPKGRDGAVEAIRALMVAKRSARSERTQTINQARALIVTGPDNLRARFARHTAAGLVSELAALRPRPGATVGYATRIALRELGRRAEFLDGQLGRLDELIVPLVTARAPALLALHGVGPDTAALLLIAAGDHPHRLRSEAAWAHLCAVAPIPASSGKRTRHRLNPGGNREASHALWRIVITRMSSHAPTRAYVERRTKEGLSKKEIIRCLKRYAARQVYRHLRPAG

SEQ ID NO: 319189 - protein, 335 aa, unidentified
MKKIYVGIDISKEKCNLCYRSGLEIVREEECPNDVKGLKKAFKAALKVLGASFEDALVCAEYTGRYIYPLTVACQELGIFLWMDDPTRIKNSMGLTRGKNDVIDAARIAEYAYRYSDKAVRYYIQDAVLVSMKNLLSDREFLLTDRKRFQSQLSDQKKYMASGDYKHKSARWKKVIKSIDEQIAAIDAEIEALIAADPVLARQKELLVSIDGIGERIAINMIAITGGFTRFQNARQFCSFAGLTPYKYDSGTSVRSKAKISRRANQTMKALLHMSAVNVATRMKSGEYKDYYERKLKEGKHVMCILNVLRAKLVHRMFSVIRRDTQYTKEYKPAC

SEQ ID NO: 319190 - protein, 350 aa, unidentified
MIIIGCDYHPGFQQIAFVDTETGDCGEQRLEHCEGAQKFYRDLATLGKKVRVGMEASGHARWFERLLGELKIELWMGDAAVIRAKRGRKSKTDRQDALHILNLLLTGDFPQIWVASWENRDLRQLLWHRHRMVQARTRVMNQLQAVARNEGLRCKKKLWREHGREQLEAFRLAPWANRRREDLLELLDRLNPTIAELTQAIEQEAEKCPQAQRLMTHPGVGALTALAFVLIIGKAERFQCGKQVACYLGLVPLEDSSGDKRRLGHITKQGNSLLRFLLVEAAQVSSRTIPEWRSKYLYLTMRRGLKIAKVAMARKLAVRLFWMMRQGWDYQQVMKFGSHVEQSGHRHGVQ

SEQ ID NO: 319191 - protein, 388 aa, unidentified
MTQVDDLSRSLIAFEQNSTMVVVLEMSQSSWLAAGVVPGIERRPLKKLDPDPTALLRLVEGWRDHAMKAGRMITRIVLAFEAGRDGFWLARWLRARSIEPFVIHSTSVAVSREHRRAKTDRLDTEMLIRVFSGWLRGESRHCKMVAIPTLEEEDARRPSRERESLIGERTRIINRMKAALIRLGIRGFKPELLKAPQRLEAQYTAEGVPIPPNMLDELRRDMARLAWVRKQINAIEQARLERLEQAPSTGPHAMVRMLASIIGVGVETADMLVQEILSRNLRDRRAVARYAGLTGSPDESGVKRREKGLAKAGNARVRRGLIQLAWRFLRFQNQSALGQWYRARTEGAAGKRKTTMIAALARKLLIALWRMVTTGEIPAGVALRTAAA

SEQ ID NO: 319192 - protein, 407 aa, unidentified
MELEPLYKRVVGLDVHQAQITACAILERDDGTSRVEHRQFGSFKRDRRALAEWVVEVGAQEVIMESTGIYWKSPYAALEAVGIQAKVVNARHVKTVPGRKTDIGDAQWLAILGRSGLLRGSFIPPARFRDLRMLSRQRQKLTSQLSSEKNRLNKVLTDAGIRLGVVVSDLHGKAARAMTKGLIAGEPPELVVTYAGNRLQASQEAILDALQGDLNDVNRFILRELVANIEATEAQIERFDRKLLSELKPESGLLDLLETMPGVERIGAAMLLVEIGTDMGVFGSAERLASWVALCPGNHESAGKRTSGRTRQGNRYLRRLLVEMAHAASRTRSALRQKFDSLLPRRGYKRAISALGHKILRIIYRLLERREPYRDSAMDYEAIHVQRNAPRWLKALIKHGYITPATA

SEQ ID NO: 319193 - protein, 448 aa, unidentified
MKQKKSKSKSMVSLSLVNPNAAGIDIGDTIHAVAVPEGRDEEQVKLFGAMTCDLESIIKWLIKCKVDTVAMESTGVYWKPLFGMLIKAGFEVYLVNSKQIKNVSGRKNDEDDAKWIQKLHSCGLLRSSFLPDNEQESLRTLVRYRKTLTHDCNRFILRMQKAMEMMNIKLHTVIRDITGKTGTAIVEAIINGERKAENFLIYVDRNIHASKEEIEKSLQGNWRSEQLYLLEDCYRNYQYYKKRIEACDEAIEKQLLQYYKECFPAKELKLDIKPSKQATKNKPHFNTSGYFKAILGTDITKIFGISDISALEILSETGADMTKWESSKHFVSWLNLCPNNKISGGKLVSSMLMRKKPNAASQAFRNAANAVQRSNNWLGDYFRRMKSKGGNKYAMVATANKMATIYYKMVLNKVEFNPLDLNDYQKRYRQVKISYLERKLQELKKEAA

SEQ ID NO: 319194 - protein, 351 aa, unidentified
MEAYAGQQYIGIDLHRRRSVIVRTTNTGEMLDAVQITNSPLALAEVMTRAGEHPEVVLESTYGWYWAVDVLQAVPCEPGLHLAHPLGVKAFEYRRVKNDLRDAADLADLLRMGRLPESWIAPPAVRELRESVRHRAKLVALRSNCKAQVHAVLAKCGVPVAMSDLFGVGGTELLDGLDLPKVYAARIASLRRVIDLLDFEIDVFGTLTHGQLARDPGYAAVQTIPGIGPILGAVLVAEIGDVRRFSTAEQLGCWAGMTPKHHESDTKVRRGRITKQGSRLVRWAAVESVQRLPKHTVLGAFRDQVAARRGTNIGVVAAARRQLEYVYYALRDHHVRGLQPRPTAPTAAAAS

SEQ ID NO: 319195 - protein, 425 aa, unidentified
MQILSGVMNMNAAGIDVSSSKSTVAVLRPFGEVVKLPFDVRHSAEELASLAKQLKSIEGETRVVMEHTGRYYESIAKVLHEAGLYVSAVNPLLIKEYGNNSLRKVKTDKADAMKIAKYALDNWSELRDYTPMDTIRYDLKTMNRQFQLAIKQKTATANSLIALQEQSFPGIRKLFDSPVRSDGTQKWVDFTHDFWHVDCVRSGSLNAFTERYRKWCKRNRYQFSTEKAAKVYALAKSAVVLVQKTSVTKTFVQAAADQLTAISRSVETYRSELNKLASQLPEYSVVMEMYGVGESLGPQLMAEIGDVRRFERKQSLVAFAGIDPAPSESGDYCSCSNRTTKHGSSYLRRTLFNIMKVHLQRAPADEPVFQFMDKKRAEGKPYYVYMIAAGNKFLRRYYGKVMAYFSSLEDLPPVDMESTGLHLTK

SEQ ID NO: 319196 - protein, 343 aa, unidentified
MYYIGLDVHKKTISYCVKNAAGQVLSEGKIGSTRRELDAWVRTLPEPRMMAMEATIFTGWIYDHLLPHAEKVKVAHPLMLRAIAAAKRKNDKIDASKIADCLRCDFLPESYMIPTEMRDRRRFLRYRNLVLRQSVQMKNRISGMLMETGVSYEKLRLHRKGYFDQLMATNEEVSDSIRPLLKLCREQIDRSILLDATLLRTLERDPLLSGRLERLRTIPGVGPITALTWVLEIGDVSRFRSIKQAISYCGLCGEEVRSADKVMRTPISKQRNKHIQSMLVEAARLAPRYSPELAELYDRERQRGDGNRATLAVARKLVAHMVAVERRQSSFLPAGEFKQTAAA

SEQ ID NO: 319197 - protein, 341 aa, unidentified
MKVMRVGIDLAKSVFQVHGVDRNERVVWRRKLTRASWLKVFLETVEPGCEVGMEACGGAHHWARALQAHGFAVKLIAPQFVKPYVKSNKNDANDAEAICEAMSRPNMRFVAVKSVAQQDLQAAHRVRAELSNQRKAKANQIRGLVSEYGLVAPKELVHLRVAIPMWLEDGANGLTGRFRRLLNALAHDLRELDHRMVELDREIAVIAGEDPAAQRLQQLRGVGPLIATALVATIGDAKQFTNGRQMAASIGLTPRQNSSGGKERLLGISKRGDKYLRTLLIHGARSALRTAKHKDDRLSRWVCRIAETHHHNVAAVALANKMARIAWAMMKNGTEYQPNLT

SEQ ID NO: 319198 - protein, 345 aa, unidentified
MEHYAGIDVSLESASICVVDASGRIVREARVASEPEVLIGWFDGLGIAVARIGLEAGPLSQWLYAGMRDVGLPVELLETRHVRAAFKAMPVKTDRKDARGIAQLMRLGWFRPVHCKSLPAQEVRALLAARKLLQTKNHDVEMSLRGVLRGFGLKVGPTTPRTFPNRIRELVAGHATLSTIAEALLAARGTLFEQCQKLEKRLRSLARQDRRVRLLMTAPGVGPIVGLTYASAIDDPGRFRSSKAAGAHFGLTPKKYQSGETDVTGRISKIGDGGVRTALYEAANVILTRPVKGSTLKSWGMRLAARAGMRKAKVALARKLAVVLHRMLANGTTFLADKAAPAAAH

SEQ ID NO: 319199 - protein, 351 aa, unidentified
MTMVGGFDVHRKQITFDYVDDDGLVRFGEIRPATRKTLRGWLSEHCPEGDAELALEGCTGWRYVVDELAAAGVAAHLGDPAEIAVARGPKKRAKTDRADARLLRTLLLQGRFPESWIPPAHVLEVRVLGRLYCTLMDERRAWQQRIHAQLFHQGCPPIRALLTEAGREALARVELSAAGRQYVDSALRRIDELSAEIGPLRTQLVNFAKHQAGCRALQVHYGIGWLCAAIMWAEIGDARRFASSDQLVRFAGLDVTVYSSDRKCAPGHLSRQGSPELRWAAFEAAKCAARRGSPDYGYYHKLAAKHDGHNGKNPTLAVERKILRRCYHTLRELGDAALGLPDTQPHQEVAA

SEQ ID NO: 319200 - protein, 342 aa, unidentified
MKYYVGLDVSLKQTSICVVDQAGLVVREGVVGSDPEAISVFVRSKAPGAVRIGLETGPTSTWLWTELKRLDLPVICIDARHAKAVLKMQINKNDRNDAIGIARIMQTGWFKEVHVKDIDSHSVRALLASRALLVKIKRDLENHIRGLLKNLGLVIGRATFNVFAVRAEELIEDRPDLVAAVRPLLEARNAVEQQVSELDRKVMKLARRDAQVQRFMTVPGVGPITALAFKATIDDPARFARSRSVGAYVGLTSRRHASGEIDWSGRISKCGDGMPRSYLFEAAGVLLTRVPKWSTVKAWGTRLAKRNGLRKAKVAVARKLAVILHRMWIDGTEFNWSKEVAA

SEQ ID NO: 319201 - protein, 359 aa, unidentified
MQTQRKELNFEGQSIYVGIDVHLKSWSVSIFTEKLHHKTFSQPPKAELLFNYLKLNFPNASYFSTYEAGFCGFWVHFKLKEFGINNIVVNPVDVPTTQKDQVRKTDAIDSNKLGRSLRKDELKGIYIPQPETLEDRTLIRVRFTIVKDMVRHKQRIKSFLNLYGIEYPDEFQNTNTHWSKRFINWLKTVQLQFPTGTDALNLLIKEAEQQRLILLEATQKIRILSRTERYTNNIELITSIPGIGLITGMMLMAEIEDIKRFDNSDKLAGLIGVVPDCHSSGPSEKKGEMTKRGQYFMRKGIIECSWVAACKDPALSLAYYEYCKRMEPNKAITRIARKLINRIFSALKNEKKYEFGIVK

SEQ ID NO: 319202 - protein, 401 aa, unidentified
MREFTATEGRIESASAMASVGNAEAGERYAAYLGLDVHKDTIAVAVATPGREDPAYRGEIANTPKAVQKLLVKLGEAYGGGLLLFCYGAGPCGYVLYRQILTCGHDCQVVAPSRIPRAAGERVKTDRRDALKLARLLRSGDLTPVWVPDQEQEQMRDLSRARDDMKAQERKARQQLNAFLLRHGHHWPSDKARWSKAHESWLTGLKMERPWQQVVLEEYIQAERAASQRVAQLTDHLLRALPEWSLAPVVSSLIALRGVDKITAIVLLAELGDISRFESPRQLMAFLGLVPSEHSSGQRRRKGGITLTGNGHARRVLIESAWTYRFPARQTRHLKAKAHEASETARRIAWKAQTRLCGRYRTLTRAGKNTKLVCVAIARELAGFIWDIVRQEMPRVVSQAA

SEQ ID NO: 319203 - protein, 406 aa, unidentified
MVEQQRAVYGGADTHKDFHVAAVVDEAGRILGTETFPATASGYAALVRWLRRHGDVVKVGIEGTGAYGAGLCRAVTGEGIEVVEVNRPNRQMRRRRGKSDTVDAEAAARAALNGEASGAPKDSTGIVESIRVLRLAFCSTRVARVRIANQIRDLVLTASDGLRSELNPLETPERVARCARMRPAGDLADTDVATKAALRTLARQYQSLTSDLDELRTSLEELTVRANPALCASIGVGPDVASILLIAAGENADRLHSDAAFAALCGASPIEASSGKHVGHRLNRGGNRQANHALWRIVMTRKTCHQPTRDYVERRRAEGKSPRHITRCLKRYVAREMYRHLTNPAAPGPTGADLRQARTAAGYTQQQAAEAIGTHGPRISNIENDHGRHPVLAERYRTWLETTCTS

SEQ ID NO: 319204 - protein, 337 aa, unidentified
MDRQYVGIDFHRRRSVIVRISADGERLAVHRIVNEPFELAKVIGLCGEAPEVVIEATYGWYWAVDLLQDLGAVVHLANPRALHWGDRRVKNDVNDATDLADMLRLNRLAEAWIAPPALRELRELVRYRAKLVQLRSGLKAQVHSVMAKEGVVPGVSDMFGPAGTRQLDQLELGPPFARRLRSLRDLIGGYDRQITALERDVHQHLKSHRGYEAVQAINGIGKVSAAVLVAEIGDVSRFPTAAHLCSWVGLTPTHRESDLKTRRGHISKQGSRLVRATLIEAISRYHGGPVLAGQYHQIAKRRGPNKARVALARKVLTLVYYGLRDGEIRCLTHADAA

SEQ ID NO: 319205 - protein, 368 aa, unidentified
MITRFHGIDRHKKYSTVSVLDRDGREVRFLRSCSLEDHLSDLGPEDAVVLEASCGCFYWADRIEASGATCFVLDPRRFRIVTDSWNKTDRQDARNMAKALWVFLVTGEFGIPTVYKPTETIRTLRRLFATYNLLNRQIRMLKNAIQAMLTDDGVVLTSTQLSRLFTGRESVADALSEYSLPPTIVSAIEVQAALLRQVNESKDRLAREIVVHSEPLAEQIELLVTIPGVTPLTAAAFLADIGDIGRFKSLRQMNAYLGLVPRCHDSGGKSRSGHITRESRKLTRTILTQSIYQAVKSTPSWQRDYDELKGRRGSGRARIAMIRRLCGVMRRMLLNREKYHWLKEELHQRKLRQYRQTLENAKNERNAA

SEQ ID NO: 319206 - protein, 326 aa, unidentified
MIKNTNYFGIDISKDVFDVTGSDGKHYQFKNDISGFKKMWSLTNEFSHCVMESTGVYHLRLAYYLYEKAIAVSVENPLSIKRFIQMRLTKIKTDKKDSQMIYEYAVNSGSELRLWKGQSTTQIACSQIISLTNLYTKQITALKNKLQTEEAMGAPCSQVIRALKRSLKHLKKEIDNLEESLLDLIKQDNQDLLTRVESIPGIGRKSSMLLIVLTGGFERFNKASELCSFAGLTPMIRQSGSSIRSRSRISKMGNRRLRKTLFMCSLSAKKHNKACKEIFDRIVAKGKSKKIALIAVCNKLLKQAFALAKSGLKYDRNYRSVLNNLN

SEQ ID NO: 319207 - protein, 420 aa, unidentified
MKFVYSTCCGVDVHKTFLVATIIKTTKGVQPSYQKKRFSTFNSDIRRFKQWLLDNSCFDVCMESTGKYWIPVFNLLEDRINVTIANPKWVKAVKGNKDDTKDSKWIGDLFRLGLVPGSFIPCKEIRILREYTRYRFKLTCCKRSEKNRFRNAFTVCNVALDAVVTDMFGKSASSITDYLITSDEFDPETCKSFLQKSLKKKADAVIESIEGYQMTSSQKERMLMVRSHLEFVQQSIDSLDSKLDELIAPYENAVSLLCTIPGVDRACAITIISEIGTDMTQFNSSKRLCCWAGITPGNNESAGKKKSVRITRAGVYLKPVLVQCAHAAVKSTATPYYKNKYERLAKRRGKKRAIIAIARMILTAIYQMLLTGETWNPCDLYKIDMPKEMQDKQKAKAVKQALKLLISQGVISPESAPTVV

SEQ ID NO: 319208 - protein, 358 aa, unidentified
MQTQSTQGDFTGQDVYVGLDISNKSWKVAIFLETEIHKRFVQEPSPGQLMRYLHKHFPGARYHVVYEAGYGGFWAHDELVALGADCIVVNPADVPTSDKERRHKSDRIDAGKLGRGLATKTLRPIFVPQRTWTEDRLLVRTRIRFVQKQTRVKCQIKALLAFYGYQIPEEMPRRYWSRRYIRWIESLAMTRPSGDYALKALLGELHFLRQTIVDLTRRIRSLAHEERYRMLVACLQTIPGISLMTAMTLLTEIITIDRFKKSEHLASFVGLVPGEHSSGEQERTTGLVPRGNKMLRYMLIECAWIAQREDPVLLQAFTELTKRMAKTDAIIRIAHKLLNRIWFVLKHQQPYVTGVQTA

SEQ ID NO: 319209 - protein, 330 aa, unidentified
MKNYKEAVGIDVSKKTLDAYCYQGEVHKAFVNDISGYKSLLKWVLKVTKASEVFYCFENTGYYSLKLALYLHSQGIIYVEESPLKIKRSSGIVKEKTDRLDACLIARYAWFYREELQPSTVKSTSHLELGRLLALRDQLVRNNAGLKGTLKEMQVLLSSPTTDAGCIGLTRSIAYLQKQIKGIEVRITDIIAADVSMSKNYQLLSSLKGVGLVVACQLIYHTGNFTRFNSWRAFSSYCGTAPFEHRSGTSIHRRKQCHYLGDRKMKSLLSMASVSAIQHDSELRLYYKRKLAEGKDKMIAINNVRNKLIARAFAVIKRGTPYVVLQQHAA

SEQ ID NO: 319210 - protein, 428 aa, unidentified
MDEVNRNRLDEFRQLRQEVRHSDQYLIVGIDIAKDRHYAFFGTPTGKTLLRRLVFSNDHEGFRRLLEQAEALRVQHGLKKVVYGMEPTANYHKPLGEYLIGLGRTVVLVSGVTVARNRESLDGRWDKHDGKDSANVADLISQGKCLYYEHPSAELRGLRGLLSLKKRLKKQEHGYKVRIRNHLIAQYYPEMDREYERLGAEGLSVVRWCLPASEMAQLDVGPFIERVTSRRIRMEKRRRLEAVWEKAGESIGCDGVPGVEHEAKVMVEGLRQVREMIKETEDKIEELCKLFSEYHYLLTIPGFGPDVSAKVLAAIGEPDRFQSGRQVLKMGGLDLSADRSGKDSDKAIPEISKRGKADLRYALYQAALIASLKNRDIMIYYTNKIRGREKEKGIQIKMRVKLAAKLLVIAWTLMKKKENFNPAYLNAE

SEQ ID NO: 319211 - protein, 412 aa, unidentified
MRRIVGIDLHRTFGEVVIWENGVLRHAGRVDMTRTGVEGFAKSLRATDEVVIEATGNCFAVCRVLSPFVKRVAIANPLQVKAIAHAHVKTDKVDAGTLANLYAAGYLPEVWTPDAATERQRRLVARRYQVVRHRTRLKNEVHAILHAHLIPKCPHADLFNGRGRVWLCRQPVPDDERAAIERHIRELDRLAEDLDLLDREIAESALDDAAIKRLMTITGVNLTVAAGLMAAIGDINRFNSPQKLVSYFGLNPRVRQSGLGAAHHGRISKIGRSHARAMLVEAAWTAAKTPGPLHAFFVRIRARRGHQIAAVATARKLAVLCWHMLSKEEDYLWARPALVANKMRAMELQAGRPQQKGNRRGPAYAYNIKALREQEMHLARQAERNYERFVGAWRPRPPADHVRGRLKPAGPE

SEQ ID NO: 319212 - protein, 408 aa, unidentified
MTVVGIDVSKGKSMVAAMKPGGELVAAPYEVRHSDIELSHLALDVLCMEPDTRVVMEATGRYHEPVAALLHSEGIFVSILNPLLIKQSGAGSLRKVKSDPKDALKIAKYGLDNWSTLREYTPMEAIRQQLKLCARQCDLYNKNIVMLTNNLISLSDKTFPGVNELFSSPEKADGHLKWVDFYRSFWHCDCINRMSPDAFEERYKKWCKRKGYHFSTDAADALYAASCGSYTTLPRDNNAKLLVTVAADQLIALRENQSKLEAEMLNLCKQLPEYETVMAMYGVGKSTGPHLMAELGDVRRFPHRSSIVAFAGVDPGVVGSGKMQLSSVTTSKRGSPQLRKALFQVVSTYVKCKPENEAVYQFYAKKRDEGKPFFVCTTAAANKFLRIYYARVKEYLNAAESATQVEEG

SEQ ID NO: 319213 - protein, 421 aa, unidentified
MENTAARKRKQVPEGYLIIGIDPHKKRHAAVAITQDFTIRDKFKFDNIREGLETMLGRTRTEMVKADCRGVMFAIETGGHYWRNIAYFLDEQGIPFRFINQYTLKRRREGKDINHKKNDYRDSEVAAQLLCTGEFTESTIPQGVYAELRTAHNAYRRLVKERTRITNLVKGLLDGLFPEFTQVFKDPCGLTSLSVLSACAIPGVIAGMTEEEFVATIEAKHQGRLMRKKLRELHYKAKASIGIAAGARSVSSEISFLVEKHELIRRHICIIERTLVSLVDETEEGKYLLSIRGLNYIAVAGLLAELGCFKAYRSAKQMIKMAGSNPTESESAGKRGAHTPMSKQGRPVLRYCAWTSVIPMLRFNSDFRAWAKQRRERPAHANPLNGREVVGAALNRLFRLAFAMVKNQTYYLSPQLVQVTG

SEQ ID NO: 319214 - protein, 316 aa, unidentified
MNETIVEKFVGIDVSKSTLDVCIEPLGQTLHVAYDEAGMRQIANRLKEVSPTLIVIEATGGLEVRIATELASVGLPVAVINPRQARDFAKATGQLAKTDQVDAAGLAAFAKAIRPQARPLKDADTRALDDRVSRRRQLIDIRVQETLRLGTAASKPLQKSLKQHIAWLDKRIAEVDNDLTKQLRKSDVWRAKDDLLRSIPGVGNVTTRTMLGKCPELGTLNRREIAALTGVAPLANDSGKHRGKRFVWGGRADVRAVLYMAAVSAIRCNDTIKAFAERLRKAGKPPKVVIVACMRKLLTIMNSMLKNNAPWNPKNA

SEQ ID NO: 319215 - protein, 459 aa, unidentified
MKILALDLGKFNTMCCFFDTKTRKHSFLNATTDRNYLSTIFKKHKIDLVVMEACGPSGWINDLAIGLGLKTLVCSTNEEAWKWSNVKRKTDKDDALKLARMAAMGELTSVHMPSEEHREFRSLVKYRKTLDWRINKTKCTIRAWFVNHGIAIDRGDKAWHTGRALINSFRKPLAECSANELWKGELDIELTQLDSLSQQMDVVVKKLEAIGKNDPRIVRLRTIPGVGPRTAEILVACIDDPHRFKSGRQVSAYFGLVPRQFQSGETDRNGRITKRGNPLARTILVECAWASLRYNPWAKGVYERICGKQKTRKKKAGVALARKIAVIAWAMLRDEKDWDPVTMIETTKSFGGRLPMDEETFQTMRPKENSDQRKSRLRREAREAHSVTTRRTEKNTGKSSGVSKSPSKAKSLSKRPTKLTAKQTNKPTAAQRKTSDSKPKQSTTKTATTRRARKPVCAA

SEQ ID NO: 319216 - protein, 335 aa, unidentified
MVQIYGIDLGMSSFDVSFLSESGSVRHLSGVKNTVHGISKFLLSLPSSAVLCAEHTGVYGDLLLRLCTLNRICLCFVPGYQIKHSLGLQRGKSDPLDACRIREYAERFYDLLRPCFYPGEEMSELQELYRTRSLLVESRKRLDTLNIGDNCKSSVSLAADHARRAVLAELNTQISGLDHEIEALIQNSSEFSRNYQILTSIVGVGPVTSCELIIKTENFRKLDTAKKCAAYAGIAPYPKESGKMKCGHKISPMGDKQLKTLLFLCARSAKEHNKEIRLYFLKKHKVEKKHFFVAMNNIANKLLRLIYSLIQKQQTYDRDYIQRDPRCVVISDTNK

SEQ ID NO: 319217 - protein, 369 aa, unidentified
MGKYIEVFVAFDVAKKKHAVAIAEGGRTGEVRFLGDVENSPLPIERTIKRLAGRYDRLHICFEAGPTGYGLYRQIQALGHECMVVAPALIPKRSGERIKTNRRDAVTLARLHRAGELTGVWTPDGAHEAVRDLVRAREAATDDLRRKRQQLLSFLLRHSRIYSGGGHWTMAHRRWLANQKFEHAAQQIVFQEGIDAIEDAVQRLRRLEKQLALIVPEWSMAPVVEAYQAMRGASFLVAVTFAAEIGDVRRFDTPRQLMSFLGLVPAERSTGDTIRRNGLTLAGNRRARRALIEAAWTYRYPARVSETLRARLEALPKPVRDMAWKAQIRLCARYRRLSATGKKLPVVVAAIAREMAAFLWAIGREVAPA

SEQ ID NO: 319218 - protein, 323 aa, unidentified
MNKDTKYFGIDISAAIFDVTDSDGVYHQFKNNSSGFKKFLKLLDFNSHCVMEATGYYHYKLAYYLVENMIKTSVENPLSVKRFIQMKLSKIKTDKSDSKLICEYAQQIDLKLWQAHSKHQMECLQITRLLSVYTKQSTMLKNKLHGETVLGNPSLLVVRSLKRSLKQVKKELKTLEYNLLKLVKEEYQTLLTHLETIPGIGRKTALMLIVLTDGFERFRSASELCSYSGLTPIIRQSGSSVKGRPRISKIGNQKLRNLLFMCSFNACKYNKACKALYDRIVAKGKSKKIALIAVCNKLLKQAFAVAKSGLIYDENYRSVLVKN

SEQ ID NO: 319219 - protein, 342 aa, unidentified
MKFYCGIDLSARDCHVCVIDEQLKIVVQQKLRNELPKIIKLLEPYKAQLKIVVESTFNWYWLIDGLQAAGFDVVLAHTLGLYLITGAKVKTDRRDAYSLAKLLLVGAVPVAYIYPVETRPVRDLLRRRMHLVQVRAGEYGSLRRLLLRQGILSSKQQEIKTATEAELAQWLEHPLVRLHASQELRRIELYSEQIAELEKTILGLAQTEQSYELLLQLPGVGQTIALTILYEVGELTRFANVKDFSSYCRVVPGIAQSGNVTRRGRASKQGNHYLKAAFSQAAVHAVRCYPKVRRYYERQLKRHQGRGRQMICYNIIAHKLAQAAFHVLKEQTEYREELLFGR

SEQ ID NO: 319220 - protein, 342 aa, unidentified
MKEFIRIGVDLGKRYIQIHALESKDGRAVKRKLPRSKFLEFFADVAPCLIGMEACGSAHYWARQLRAMGHDVRLMPPAYVKAYVKRGKNDAVDAAACCEGVSRPDMRFVPVKSEEQQATLTLHRTRELLVRQRTMCVNALRGHLTEFGLVAAKGIGRAGELIDMAGNDAELPEIAKSVVKIFAEQLAAIQALIAALEKQIAGVHAQSPMSQLLAGIPGVGKIIASAIVASVPDPQVFKSARDFAAWLGLVPRQNFTGGKTKLGPITKKGDRYLRKLLVLGATSALRVAGRRKGALRDWLAALLEKKKSARLASVALANKLARIIWAMMTSGETFRKDMFEPA

SEQ ID NO: 319221 - protein, 334 aa, unidentified
MEQITTVGIDLAKSVFSLHGVDGAGHVVFRRTVRRDQLVGVVAGLSPCLIGMEACSGAHEWGRRFQEFGHTVRLMAPKFVAPYRKSGKNDGNDAEAICEAVTRPSMRFVPVKSVEQQALLAMHRVRQGFVVERTATINRLRGLLTEFGVVLPLRSITVRRQAAVAAEGLPDLARRAIGDLLEQLRTLDERIGGYDREIEAQARLCEPAQRLMKIRGIGPTTALAIVATVGNAREFKNGRQFAAWIGLTPSQYSTGGKARLGHISKRGDAYLRNLLVQGARSVLNSAGMHQDRMSRWILELQPRRGYYRTLVAIANKNARIAWALLAKNETLRPA

SEQ ID NO: 319222 - protein, 338 aa, unidentified
MKTHIGVDLHQRFCYLTALDASGKTCKQGQVANEGFALRAWLRSLEQPRQVVVEASGFWPAFARSVWPESERLVMVHRQRVKAIASAKLKNDRVDSETLAHLSRCALLPEAWMADEATQQLRLLVRLRITLGRQRARAKNQLQAVLHQEGFKKPVSDVFGKRGRAWLTGLELSPAGRLVVDTWLREVDHLDVELAEQTRELERMARADARARWLQTVPGIGPYAAMVIVAELGDVARFQSKRALASYAGLTPMVRESAGKRKRGGITHQGSNTLRWIMLQVAQVAARCSPGARSYYAGLRARKPAQVAKIALARKMLTVVWALLRHGVCFDEDLFMRG

SEQ ID NO: 319223 - protein, 392 aa, unidentified
MVVFVGIDVSKDKHDCFILSSEGEVLADVFTIPNNLDGFRFLLRRIRDCTHAQDKIKVGLEATGHYSCNLLGFLLDNGLPTYVLNPLRTNIYRKSLSLRKTKTDRVDARTIASMLLSDVGLKPYTDTAYHNEELKSLTRYRFDKVKERAKLKTSISRLVCILFPELEKLVPSLHIASVYALLEEFPGAKQIAAAHLTRLKTLLETASKGRYKRDMALEIRDAARNSIGSWMPAKSLELQHTIRLIRELDDEIAEIEEQIQAIIDELNSPITTIPGIGFRMAAMIFAEVGDFTRFDSPDKLLAYAGMSPSTYQSGQLKNCYPHMEKRGSRYLRYALYNATKYVCHWDPTFAAYLAKKRAEGKHYNVALSHAAKKLVRLIFAMEKSRQPYCPAA

SEQ ID NO: 319224 - protein, 340 aa, unidentified
MQYKFYAGVDVSKATLDVALIDDQHREMIDHIEVSNDDEGIGQMLEWLNTHQGFAVDQTLFCMEATGLYCYPLLQFLHLQQSPTWVENAIQIKRSLGIQRGKNDKVDAKRIAQYACKNSDRVRLWQPRREVVEQLKQLAALRERLVETRKRLLTPVNEFRQYGNQAMAKMLEKSMSKSIRALEKDIEGVEQKLKAIIDGDDDLKRIFNLATSVVGIGLVTAINLIIHTNEFKMLTDVRKLACYCGIAPFEYSSGSSIRGKRRVHPMANRKLKTNLHMGSLVGVQLDPGLKAYYERKVAEGKNKMSVLNAVKNKMLARVLAVVKRGEPYEKIFSPKCFAVS

SEQ ID NO: 319225 - protein, 345 aa, unidentified
MQIKSIGIDLGKTTFHLVALGARSQVVIRKKFSRQQLLTYAANLPSCRMGMEAGVGSHFLGRALREQGHEVRLIPAQFVRPFVKSNKNDYSDAEAIAEAVERENMRFVPIKTEDQLDLQALHRVRERLVSRRTSVINQIRAFLLERGISFRKGPASLRRQMPEILENADERLTARMRRLLDFLWQEWKHLQLQIESLSEDLEKIANSDAACVRLQQIPGVGPLVATAVVSAIGNGAAFHKGRQFAAWLGLVPRQWSTGGKPKLLGISKRGNPYLRKMFIHGARAAVLRVKREGSCLGQWMSGLETRAARNVVIVATANKLARISWAVLSSGNDYRPMHRALRCSS

SEQ ID NO: 319226 - protein, 319 aa, unidentified
MLNNIDLVYVGIDVSKEYLDVYATTKDNCIRFSQTEQGLSGLVEYIKPLKPAIVALESTGGLENKAASMLASNDIPVAIVNPRQIRDFAKATGTLAKTDEIDAKIIALFAKAIKPNITPIPDKELSHLKALVARRAQLVYMLGQERNRLSAYPSDPMKSITKHIAWLEKELDRLDNDIDNFIKSSPIYCEKIKITESMPGCGPITAVSILAYIPELGKLNNKKIVLLAGLAPINYDSGKKRGRRFIRGGRRNIRSILYMSALTAIRYNPVIKRFYQSLISRGKPKKVAITACMRKILVTLNAMARTQTTWSLKEVSSPA

SEQ ID NO: 319227 - protein, 402 aa, unidentified
MNAVGIDVSKGKSMVAIMRPFGEIVSAPFEIKHTASDIHSLVELINSVEGESRIVMEHTGRYYEVLAHQLSKANLFVSAINPKLIKDFDNDSLRKVKSDKADAVKIARYALDKWQNLKQYNVMDELRNQLKTMNRQFGFYMKHKTAMKNNLIGILDQTYPGVNTYFDSPARSDGSQKWVDFASTYWHVDCVRKMSLNAFIDHYQNWCKRKKYNFSQSKAEEIYGKAKELVPVLSKDAITKLIIKQAVDQLNSASTTVESLRTLMNETASKLPEYPVVMAMKGVGTSLGPQLMAEIGDVSRFTHKSAITAFAGVDPGVNESGTYEQKSVPTSKRGSADLRKTLFQVMDVLIKTHPQDDPVYQFLDKKRAQGKPYYVYMTAGANKFLRIYYGRVKEYLASLPES

SEQ ID NO: 319228 - protein, 465 aa, unidentified
MNRQERKEWQQRLYAEDAGLQVVHPDAAGIDVGNASHFVAVPSDRDEQPVREFGSWTADLRRMAEWLKRCGIRTVAMQSTGVYWVALQEILEREGFVVYLVNARATKNLPGRKSDVQECQWLMKLHTYGLLRNSFHPPEQIRAVRTIWRQRDRLVKEAGREVQQMQKALTTMNVQLANAISDVSGVTGQAIIRAILRGQRDPQQLAKLRDYRVAASEAEIAHSLEGNWREDVLFELQQVVDAYDFHQKQIAACDVQLERYMSALPIRSGPGPSEQSTADALSEKPNKQRRHKLQKNQPTFDLAAELQRTMGVDVTAIDGVDVMTTQVILSELGPDLSASFPSEGHFASWLELAPRRDVSGGKVLRQKSRKSNNRVATALRMAAQSLWRSDSYLGARYRHLRARLGGQKAVKAMARYLACLIYRLLTKGKAYVDRGAAHFQSKRTERELLALRRKAAELGMELVAV

SEQ ID NO: 319229 - protein, 343 aa, unidentified
MQNKVKTISFQGQNIYVGIDVHLKSWKVTIMLDHSFYKTFSQDPEPSILSDYLHRNFPGGNYCSAYEAGFCGFSVHRELEKYGIKNIVVNPADVPTTDKERKQKEDKRDSHKIARSLRNRELEAIYIPDREMEELRSLVRYRKTLVKDIGMNKSRAKAFLHYYGIRIPPELDSASQHWSARFTSWLKTVETTTACGGFVLSEIINTTEQLRLRLLKVERQLREISKSGSLAKKIKFLTELGDITRFPNLDHLCSFVGLVPTTKSTSDKEKTGNITPRSNKILRNSIIESAWVSIRHDPSLALRYNELCKRMKPNEAIVRIAKKLLNRIKYVLKNEKEYVYSVI

SEQ ID NO: 319230 - protein, 352 aa, unidentified
MKIVGCDFHPRWEQIAVFDVETGEMSEHKLLHSDGEAERFYRALPAPALVGIEACGNSQWLIEMLKELGHEVWVGDAAQIRASYVRKQKTDRRDAGHILRLLMENRFPRLWTPSAEQRDLRQLLMHRHKLVEIRTRVKNGLQHLALNRGLQKKSGLWSVRGRACLEKLPLTGWTARRREDLLKLLAELDRHLGELDQAVDQAAQEHPQARLLMTQPGVGPVTSLAFVLTIGDAGRFRHSNQVASYLGLIPREHSSGGRQRLGAISKQGNRFMRQLLVESVQTVNRLDEGFRRQYAARCHHKAKGVAKVAAARKLAVRLYWMLRQNVGYPEIAHIESSSRVPLTGPKPGREIE

SEQ ID NO: 319231 - protein, 343 aa, unidentified
MQTVTTIGFDIAKSVFQVHGVDAAGQVVVRRQLKRRQVMAFFEKLPPCLVGIEACASSHYWSRQLQALGHGVRLMPPAYVRPYVKRQKNDRADAEAICEAVTRANMRFVPTKTPEQQSGLMLHRARHLFIRQQTSVINAIRAHLAEFGITAPVGRRGVEDLLRVVADPSDKRVPEVVRACLAALSNQLLNLKNEILNFDRMIMAWHRSNQTSKRLNCIPGVGPLLATALVASVADPKTFRSGRNFSAWIGLVPKQHSSGGKDRLGRISKQGDRYLRGLFTAGALAVIRYAKIHGTGHRPWLTALLARRPTKVAAIALANKLARMAWAMMAKGERYKEPAALAA

SEQ ID NO: 319232 - protein, 349 aa, unidentified
MHSTTVAVDLAKNVFELAVADSEGKIGERLRLNRARFSSFFVHRAPCRVLMEACGSAHYWARRIGTHGHTVQLLPAQYVRQYVRRNKTDRADAAALIEAARCADIQTVPAKSLEQQQVLVLHRLRSQWMCTRQRYLNTLRGLLREFGIAVPLGARLARTRIAHYLAQPPQELPAAVRPLLAQMLSEVKQLEQQIEQVERELTDLSRSDPVVQQLRQIPGIGLLTSTAIRATVGEVQRFPCGRRFASWLGLTPREYSSGERRRLAGISKRGDSYLRTLLVHGARSALLAAHRRQRTGRPLDHLRQWALQCERQRGHNVATVALANRLARIVWATWKHGRAFDGNWGCVTQ

SEQ ID NO: 319233 - protein, 354 aa, unidentified
MIIIGADYHPGFQQIAFVDTDTGEFQERRLQHREEAEKFYRDLAAQGMQVHVGMEASGQARWFERLLSEVHFELWIGDAAEIRAKRVRKQKTDRQDAQLILQLMLEDRFPKIWVPSGENRDLRQLLWHRHRMVQARTRIMNQLQAVALNEGLRCKKRLWRKHGRQQLESFRLAPWASRRRRDLLELLDGLNPTIAELSRAIEQEAEKFPEARCLMTHPGVGALTALAFVLIIGRADRFQCGKQIASYLGLVPLEDSSGNRRRLGHITKQGSSMLRFLLVEAAQVTARSIPEWRSKYFHLAMRRGRKIAKVAMARRLAIALYWMWRKGWDYERVKKFGSHAGQLETGRGVQSNTE

SEQ ID NO: 319234 - protein, 400 aa, unidentified
MISVGIDVSKGKSTVCILKPYGEIVSKPFNITHTQKDLSELSSMLFRLNDEVKIVMEATGIYHLPILTYLQEKGFFVSVINPYLMKSYRNESLRKAKTDKIDSRIIANYGIDHWFKMKEFQISGVIYEELKLLGQQYRHYMKLHLLSLAELTHLLDLTMPGIKNLLASWNETNRKDKRSDFVERFWHYDVITSMSEQEFTEKYILWAKEKKYVPSQEKAKVIYTLAQESIPTLPSETSSVKMLVTEAVRVLKEVDATLGLILSRMQEIAKTLPEYSVVREMGGVGNTLAPKLIAEIGDVRRFRNGKALVAFAGIDPPPYESGQFVGCNRKISKRGSASLRKVGYETMRSLKMRSRPEDPVYRYVVKKESEGKSKKSAKIAGLNKFLRIYYARVTELYKNI

SEQ ID NO: 319235 - protein, 319 aa, unidentified
MAMQVSQVILGCDVSQEWLDIGVYGEDEPAHIDNEREAIDAYLEHFPAAVLGVEATNTFHELLIERALKLGLEVYVIDGYQLSHYREALRKRAKTDPDDAVLLADFLARHRDSFRPYQPKSPKLRQLWTFLKRRAALVKFTDQLRQSMKELKDHDAQIASIGREVNKLIKRLERDMRILAKALGWRDDLARLRSMPGVGELTALALLVAYRSGHFVHRDPYVAFMGLDVRVRDSGKHKGKRKLTKMGDPEYRRLLHCASMAAVRSVFYKAHYEQLQARGLAKTEGLVIVARKLARLAFALLKNQTSFDPNRFKGACYAT

SEQ ID NO: 319236 - protein, 411 aa, unidentified
METIIRRCAGLDVHKASVVACVRLIDENGELQSLTQSFGTTTHDLLLLGDWLSTYAVTIVGMESTGVYWKPVYTLLETDFECWLLNAQHLRNVPGRKTDVADAAWIAQLVAHGLVRPSFVPPREIRELREVTRYRKSLIQERSREAQRLHKVLEDSGIKLSCVATDILGVSGRAMLEALIAGTHDADVLAELARGRLRKKLPALRKALTGGFSPTHRLLISEQLAHLEYIDEAIERLGGEIATMVAPFARAIDLLDTIPGVNRRSAEVLVAECGPDMSRFGSPRRLASWAGMCPGNNESAGKHFSGKTRKGSKWLRTALVESAQAAARTKPTYLAAQYARIKGRHGHNKAIVAVAHSILVIAYHLLERDKPYDELGGDYFIERQNKDAYQRRLVTQLQRMGYEVALTEKAA

SEQ ID NO: 319237 - protein, 346 aa, unidentified
MTIVGCDFHPSWQQVAVFDSETGEIRELKLENGNGEAERFYRELSSRALIGFEACGNTQWFEDLLDRLGHEVWMGDAAAIRASYVRKQKTDRRDAAHILKLLIENRFPRLWRPSAEDRDQRQLLIHRHKLVGIRGRAKNGLQHLMLNRGVQMKRKLWSEAGQKALRALPLEGWAAQRRQDLLKLLSVLDPQIRQLEEAIKSAAQQDPRARLLMTQPGVGAITALAYVLTMGDVNRFQRGKQVASYLGLIPSECSSSKRRRLGSISKQGNSFMRMLLVESAQTVNRLDEGFRKQYQHRCHRMAKGVAKVAAARRLAVRLFWMLRTNTAYPEIAHIEGSPRKGVVGES

SEQ ID NO: 319238 - protein, 471 aa, unidentified
MNRQQRRDLARRLAGNDPGLAIVHSNAGGIDVGNESHFVAVPPDRDANPVQEFGCWTADLKRMAAWLTACQIDTVAIQATGVYSIPLYDILTGHGIRVVLVNAQHTKNVPGRKSDVQECQWLMKLHTYGLLRDSFRLEEKMEGVRTIWRLRDRHVKDASRSVQHMQKALTKMNIQLANVISDITGVTGQAIITAILTGERDPWKLADLKHAMVKASRDDVARSLEGNWREDLLFELRQAVDSYYFAHQQMQDCDRKLESFLASLPTRTLERPSRSAEARTAATLPEKKARKKPKARRNEPTIDLKAQLKRICGVDLTSIDGIDVITAQTILSEIGTDISGFPTENHFASWLGLTPSKDFSGGKSIGTGKRKVQNRVAMALRMAATTLLNSNTYLGSRYRHLRKQLPSFAAAVKAMARYLAVLVYRLLTHGEVWVDRGAVKFEQRRAERELASLNSKARARGLKLVPITPAS

SEQ ID NO: 319239 - protein, 439 aa, unidentified
MRTKKPTGKQKRSVQKKVDWKALEIVHPAAAGIDVGGSEHWVAISPERDAEPVRRFGCFTADLREMGRWLVEKGVRSVAMQSTGVYWMPVFEVLEQHGLEVYLVNARHTKNMPGRKSDVQECQWLLKLHAFGLLNNSFQPTDEIRIARTLWRQRGALVAEAASTIQRMQKVLTEMNVQLSNVLSDISGASGMNIIQAALDGERDPWELAALVESGVKATPEDIAKSLEGNWREELLFVLRQHVELYRIYQEKITDCDLQLRKHLESLGSKVDLQTQPIGPRPKGKNKSRNAPAFDLRTELYRITGIDWSQINGMDVLTAQTVIAEAGADLSAFPSEKQFASWLGLCPSNETSSGKILNRRTRKVVNRATVAFRNAASTLVRSQSYLGAQYRRLRTRLGAPKAITAMARKLACLFYRLIKHGKPYVDKGTEYYEARYREQ

SEQ ID NO: 319240 - protein, 312 aa, unidentified
MNTIICGVDVSKAWLDAKVGPTGASDRFGNDPAGIAKLDAFCRHHGVELVAMEASGGYERLAFMMLWEKGQPCALVNARNVRRFAEAMGFLEKTDDIDAGVIAQYAEVKRVCPTPLPSAAQQRLKALVSRLSQVTGDLTVNKQRRSAAADAETIASLDEIIFLLKRQQRRIEGEITSLIDDDPLWARLNEAFREIKGVASRTVARLMAEVPEIGLLSNKAIAKLVGLAPIANDSGKRQGRRPVRGGREGPRSILFLIARGAAKYDPNLADFYQRLQQAGKPKMVARIALARKLLVILNAKARDARIEFANAT

SEQ ID NO: 319241 - protein, 369 aa, unidentified
MNTTTFVGLDVHARSIKAVALDAMTGEVRSATFAYDAAAVAEWVGSLDPAAKCVYESGVTGFDLQKKLTALGVDCVVGAVSKMIKPPADRKRKNDRNDAEFLARMLSVGNVVEVWVPDDECEAARDLVRALDDARDDLRRCKQRLSKFLLRHGLVFDETTPSGQRKGNWTAAHWAWINAISFEERADNEVLAYYIDAVRQKLEDKKRLEALVKDEASKARWRKRIDSIRCLKGIDVMSAADLVFEAGEFSRFKNARSFGAWLGLTPSEHSSGESARQGGITKAGNKHLRRVLVESAWHYLNASAHSKDLAKGQIPDPAARRHAAKGVRRLVKRREGMLERGVHKNKANVATARELAAWVWAVGCIVESA

SEQ ID NO: 319242 - protein, 342 aa, unidentified
MQITTIGLDIAKNVFQVHGIDAAEKVVVRKQLRRGQILGFFEALPRCLVGMEACATSHYWARELTKLGHQVRLMPAKDVKAYVKRNKNDAADAEAICEAVRRPTMRFVQIKSVEQQGQLMLHRARDLLMRQRTQLINALRAHMAELGIVAAQGREGVKELVKIIASEQDARLPVDAHTSLVVLAAGLQALQTMIGSIERRIIAQHRSDEASKRLRSIPGIGIVGATAIAATVPDPKVFRSGRDFAAWIGIVPREDSTGGKHKLGPISKRGDQYLRRILVVGAHAVLKRARHQPEKYPWVTRLLERRPFRVVAVAVANKMARVAWALLARGGSYRAPAFAAAA

SEQ ID NO: 319243 - protein, 370 aa, unidentified
MVNRSMFVGMDVHKESIDVSIAEEGRDGEVRHYGVITGDLEAVAKVVRALRAPNRRLRFVYEAGPCGFGIHRFLTAQGEDCVVVNPSSMPKRSGDRIKTDRRDGDALARLHRAGELTAIYIPTPDDEALRDLVRGREDAVGLSTQAKHRLKAFLLRQGRRYPGRAGWTRPYRRWLADLSFPLAPQHIALQEYRDTIDETERRVERLTDQLRQHTPAWRWAPVVAALQALRGVSFVTAVGLVTEIGDIRRFTHPRELMAYLGLVPSEYSSGPSVRRGGITKAGNPHARRLLAEAAWAYQGVPRIGRQMLYRQEALPKTICDIAWKAQLRLTSRFRKLVARGKAKPKVATAIARELTGFIWAIAREVPAPPA

SEQ ID NO: 319244 - protein, 339 aa, unidentified
MTLYCGIDLHSTNNYLGIYDQDDREVMSKRLPNDLATVLRSLEPYREELAGIAVESTYNWYWLVDGLRDHNYNVVLANPAANTQYNGLKYTDDHYDSRWLAQMLRLGILKSGYIYPPEERPIRDLLRKRMRMVQSRTAQILSLQNIISRNTGQNLKWRKIEEITDEGMEELFNENKLLVMAARVTSKAISTFNEQISVIEKTVKAEAKVRPEFKLLKSIYGVGTILGLTIMYETGEISRFSEVGDFCSYARCVGSRRISNGKKKGENNTKNGNRFLAWAFVEAANHACWKYVQARAFVQRKSAKANYTLAIKALAHKLARASYYVMRDQVEFDPARLFG

SEQ ID NO: 319245 - protein, 343 aa, unidentified
MQTITTIGLDIAKSVFQVHGVDAAGQVIIRRQLKRRQVLAFFQKLQPCLVGIEACASSHHWSRELQALGHTVRLMPPAYVKPYVKRQKNDMADAEAICEAVTRANMRFVPTKTPEQQSCLMLHRTRHLFIRQQTAVINSIRAHLAEFGIVAPVGRKGVTELLHIVADPSDKRVSEVARACLAALGNQLLSLKKQILEFDRMILAWHRSNQTSKRLHYIPGVGPMLATALVASVADPSTFRSARNFSAWIGLVPKQHSSGGKERLGSISKQGDRYLRSLFVAGALAVIRYAKIHGTGHRPWLTALLARKPTKVAAIALANKIARMAWAMMARGERYKEPIALAR

SEQ ID NO: 319246 - protein, 369 aa, unidentified
MMLIGVDPHKSTSTATAVEPESNREVASIRIEATLREYRRLLTWAGRWPQRRWAIENAEGLGRHLASWLLARGEQVVDVPTTATARVRQLSRGGGRKNDRIDAAAAACVAALQGDARPLEAEGTTDVLGLLDERRANLSQARVRAVNQLHALFRALLGGGAPTGLSAAAATGLLRTVRPVGPVEVVRKKIASDLVADIRGLDARLKANEKAMATLIKESGSTLTRTVGIGNITAARLIGRTGPPGRFPNSAAYAAYTGVAPIEVASADKIHHRLSRSGDRQLNSALHTIAITQIRTAGSLGDIYYQTKIAEGKSPREARRCLKRRLAEHVWRTMIVDEKRDRAKTSNSAPAQASPDAQGLKLGTTAPQP

SEQ ID NO: 319247 - protein, 437 aa, unidentified
MHREFAQVAIWEAGVVRQAGRIQTTPEALREFAASLCASDEVVLEATGNTYAIARLLERQVGRVVISNPQKTRAIAEAKVKTDKVDAAVLAQLLAAGFLPSVWLPDAATFALRRQIARRAHVVRQRTRLKNQVQSILHRNLVGRCPAADLFGHKGRAWLAAQDLPQDEHQAVTALLRQLDFHGQELRIVDAELGRVALERDEVRRLLTIPGVDATVALAIVAAVGDFGRFSSPQRLVSYLGLNPRVRQSGGHPAQHGRITKQGRAHARGMLVEAAWAAAKTPGPLRAFSQRVRARRGMQIAVVATARKLVTLCWHLVVKGEDYAFARPSLTDKKLRSLELRAGLPSRRGQKGTAAAYSRKEVRRRERALAEQAELAYRQLVGNWQPKPPPTQPTRKGVGVAAATGARRSSPQGGKAARQGFQPQGPALRSGVDHAQP

SEQ ID NO: 319248 - protein, 370 aa, unidentified
MSEPTTLFVGLDVHKDSIAVAHAEAHRDDPPHYVGSIGTRQADIDKLVRRLHAKTSKLVFAYEAGPCGYVLHRYLTGKGLDCWVVAPSLIPKRPGDKVKTDRRDAVEIARLLRSGDLTHVYVPSVEDEAVRDLCRARDAALRTLKAAKLRLKSFLLRLGLHYTGRADWNEAHRRYLAKVVCPTAPQQIVFQESVHAVDEQVERLRRVEKELLDVIPKWRLYPIVEAFQALRGVQWTVATIVASELGDITRFDNPRQLAAFVGLIPSEYSSGEKRRQGGITKTGNGRARRALIEAAWAYRHNPKISVHIQKRIESLPKPIQDIGWKAQLRLCKRFRRLTARGKHSNIAATAVARELIAFMWAIAREVPINN

SEQ ID NO: 319249 - protein, 340 aa, unidentified
MSIVCGFDVHRDQITFDLVDRVSGEARTGRVSPATRAGLRSWLGSVDASRLAVALEATTGWRFVVEELERVGAAAVLAEPADTRALRGPKRRAKTDRADARHLRELLERDAVPESWIPPLHLQELRILIRLRQSLADERHVWLQRVHAQLFHQGAPAPRGAVLGANAAASRAALSAAGRELVETAERMCEAIDREIAGLDHQLAVWARRHPACRALQRLFGVGPITAVALYAEIGDARRLSSSRKLVRLAGLDVTVSESADKRSPGRLSRQGAPILRWAAYEAALSACRRGSPDHADYQLLRERLGHGRATLTIARKLLRRAYHVLVAVGDDLLEPLPQP

SEQ ID NO: 319250 - protein, 345 aa, unidentified
MEIRTIGIDLGKTVFHFVGVNARGEVVVRKKGSRTQLLRFTSNIRACLIGMEACGGSHFLGRALREQGHDVRLMPAQYVKPYVKTNKNDYIDAEACAEAVTRPTMRFVPIKTDDQLDLQSLHRVRERWVVRRTAVINQIRGMLLERGITIRKGRIHIEESLPGILEDPDNKLSGALRVLLIQLRSEMQYLHGQIEETDKLIARICSELEQCRRLVAIPGIGPITATATVAAIGNGAAFKKGRGFSAWLGVVPGEHSTGGKQKLTGTSRRGNKYLRKLFVQGAHSVMLQSTKQSVGLSMWLSHLTARKRKQVATVALANKMARMAWAVLFKGEDYRPPTVSQVIAA

SEQ ID NO: 319251 - protein, 405 aa, unidentified
MRYYIGVDWADTAHAVWVEDTQGTRVLERAVSHTAEGLAEWGRWLDEQRARGAELWAAIERPDGRVVDFLLDHGVLVYPINPKALDRARDRYRMNASKSDPFDAHVLAAFLRTDHAHLHALQPNSEAAQELKLLTRDYARLVRDQTRLVNQLTATLKEYYPRALEICGDVTTKRAAAFLRAYPTPAALAACSRAKWLRFATSHRWNTEQAAAFWDLLRHPQLPVPDHVVRAKRRLVLVLLLQLETVVQAVDDYRKAVMEFFAQLPAAAWALTLPASQGTLVPTIWAELGDAAGRWASWQHLQGHSGVVPVTRSGGKSHAVCFRFACNLHLRRALQQFAFCSLKSSEWARAYYDQQRARGHWHQAALRALAAKWVKIIFVLWTSHVAYDEDHHLATMARHHLRQAA

SEQ ID NO: 319252 - protein, 387 aa, unidentified
MHKDTNSFCAYDSREDKLFAEHKSSSKFENTLHYLKNIQKSVGQDAVFLIGYEAGPTGYGLCRKLQKEGFACVIIAPSTIAKTPGQKVKTDRMDARLLAKTLAFKTYSPVCLPSEKLEAIKEYTRVRTAKITMLKKAKQNLLSFLLRMGLPYPQSGHYWTQAHMAWLRTVNFADKWLQESFEEYHAEVITLMDKVQRIEAKILELCKDDEVREKIDALVCISGISYVSAISIVAEIGDFSRFSKAKSFVSFIGLCPGEDSSGNRVRHTAITKAGNSRVRSLLVECAGSLRMHSVVTAKSVRVKERQKNASAAIVSYADKCTLRLRKRMLYLSQKGLPYNLVTTAGARELACFVWGMMNFVDNRKTVFNKIDEGDLSDIQKPVEEFIA

SEQ ID NO: 319253 - protein, 346 aa, unidentified
MENIALDVHKKYTWARVENAQGVRLYESRLVHAHGTIKNFVKRWSAGSLVAVETVGNWYWVVDEIEAGGGKPQLVNARLAKMMMGNVNKSDKLDAKGMNHLQRSGTLPTVWIPPSSVRDARELPRTRMVLSRQRTQLKNRVHATLGKYGYGVEGVSDAFGKRGRKIMSELLYKLPTHTHQALERVLNQLDHVEENLQGIEQQMQGVFGPCAQSGWLKTLPGVGDILAAVIWTEIGTIERFGRGEQLASYSGLVAREHSSGGKVRFGAVRRDVNVYLKWAFVEAANSAILNCERCGYNHISRLYQRIKARRGHNKAKVAVARHLAEASFWILKKGEPYREPMSSTQR

SEQ ID NO: 319254 - protein, 400 aa, unidentified
MRVVFGIDVSKVSSEVAILVNGEKVHGYTMSNDAIGFSRLLGDLKTVHKPEIIFEATGVYSRRLQTFLEDNGYAYTRLNPLEAKKQLDSLRVRKTDQIDAEKLAQSQFVLNRKTTYVQKEVYQNLRDLSRFYQNLTEDIVRAKNRLHKALQVTFPELENILSTPTGEQYWNLVIAFPCKDFVLDLSKDELSESIRQSTSKRISDKRVAYLAEKLIALANQSYCAVKKNSPMLEEVRYYTKELLRLSEQRQAVLDEMVELAQPLPEYDILLSIPGIAETTATSIIGELGDIRRFQSTNQINAFIGIDLRHYESGNFLAKEHITKRGNPYARKILFKCIHNIASASHTNPCHIADFYEKRKRQSQTTSTKPHTIASIHRLIRTMYYLITHNKLYDYTSTQNR

SEQ ID NO: 319255 - protein, 473 aa, unidentified
MGLGVQRIEAANRNRALQPASKFGLGAILEPKTVTRGDTEYEGETLFTLGAFHRTHRRKEKDMEIVYPRSCGIDVHKASVCVCISIKEGGAMEKHKRCFDTTTAQLRELAAWLGQYQVTKVAMEATGVYWKPVWNVLEEGFELLLVNPQHLKSIPGKKTDYKDGERIADLLQHGLLRGSFVPPQAIRELRDLTRMRATLAQERSSVISRIEKTLEDPNVKLGVVASDVVGASGRAMLEAIVKGETDPAKLAELARGTLRKKIPQLKLALEGNLTEHHRFMLRQWLDMLDFLDGKIAQLEAQIVDKSRPFETTVQTWMQVPGLRRINAYSLLAEIGADMKPFPTAAHLASWAAVCPGNRESAGKQTSGKIRPGNAWLRHTLCEAAWAASRTKKSYFRALYRHLARSRGKNRALIAVAHSLLVTVYSFTTASQPYRDLGLDYFDRLNKGQLEKSLVSRLEKLGHKVTLEPKTAAA

SEQ ID NO: 319256 - protein, 333 aa, unidentified
MNYVGIDVGSKELVMAACVKGMFRNAKTFENTAQGHKLIIKQFAKLKGNTQVCIEATGIYHLDLAVALSRAKNSDVMVINPKVSHSFAKVLMKRSKTDAIDAEILATYCERMPFESWQCPADELISLRAISRRIAALSKLKSQTKNQRHALTATEGTPHVVIEHTNDLILVLESQISSLRGSALSLILQFDELAEAYRLITSIKGIAEASAIQILSELMLLPKDMNHKQWVAHAGLDPRHFESGTSVSKKPRISKAGNKYIRQALYMPALVATRHEPHIKAYYNHLIDDNGLRKVQAVCAVMRKLLHAIHGMFKAKQTFDGRRFYAFPSQAQV

SEQ ID NO: 319257 - protein, 370 aa, unidentified
MSSITYIGLDVHTTNYTICSYNGYDGNYFGEVTVKPEYQQIEKYVRRLQKQYEPGHRFLCGYEAGYLGYSLYHELASVGIECVILAPSTMCDTKTNRQIKTDPRDARNIANCLAYGLYSAVHVPTEQDDAVKEYMRMRDSAAAEFKAIKQQILAFCVRHGKRFEGKSTWTKKHLDWLDKLDFENPILQNAFLEYLRRYYHAQEMQDIYDTQIAEYAQMEEYRQKVSELRCLIGIETHTALALITEVSDFRRFGKADQFAAYLGLIPGEHSSAEKTNRLGITKTGNKHLRRLLVEAAQHYGRGAVGRKSVSLKKKQEGNRREVIEYADRCNTRLRRKFYRIASHSPRNVAKTAAARELACFVWGIMTEHIT

SEQ ID NO: 319258 - protein, 417 aa, unidentified
MQILYTHCAGLDVHKKTVVACCLTPDPHGGWRRETRTFSTMTIDLLALADWLHSHAVTHVAMESTGEYWRPVFNILEAEFETLLVNAAHVKNVPGRKTDVRDAQWLAELLQHGLLRASFIPSVPIRELRDLVRHRSNFVRERATLVNRVQKVLEAANIKLASVATDVLGVSGRRMLEAIIGGADDPAAMAELARGRLRTKRAELAKALDGRVRAHHRFVLTELLCQIDSFDETIARFDEQIEEAARPFAPAVERLDTIPGVGREMAEVIVSEIGVDMTRFPSANHLAAWAGVAPGNHESGGKRLSGRTRKGNQALRKGLVQAAHAAAHTKNTLLAAQYQRLARRRGRKRAVLAVAHSILVIAYHLLARAEEYRELGGDYFERQRPEATVKRLTHRLEKLGYQVILQQLEPVGVGASA

SEQ ID NO: 319259 - protein, 349 aa, unidentified
MLADELDYVIGVDTHLDQHVLAIVVAPSGGMVAQQSVRASARGYAQAVRFADQHARGARVWSVEGTGHYGAGLARHLSHQGETVLEAGRGPRDERRLRGKNDPLDAVRAARAALASEKLVLPRTGQRREALRLLLVARRGAAEVRRRTLVQLRSVIVTAPDRLRGQLETLPERRLLERCSHFRRSSSCPVDELAVKLVLRTLARRIEAATAEANELEREILGHVRALAPQLLDEPGVGPIVAADVIAAWSHPGRVRSEAAFARLAGVAPVPASSGKTIRHRLSRGGDRQLNRALHTVVLHRRQHDPTTQAYIERRVAEGKSRREATRLLKRYLARHLYRLLQQTERLMT

SEQ ID NO: 319260 - protein, 381 aa, unidentified
MSNSFDYYVGLDVSQKTTSICVIDPLGKKLCEGKSLTRPEDIRGWLRNRIEDGKALKVGLEAGNMSSWLYSGLTKMGLDVVCMETFQAHRFLATYRNKTDKNDARGLAQLVRMGGEDFLKVVTIRSQASQETRVLLAMRDHLVSQKVSLENHIAGVLKPFGVVVERGNVTAEVFYKRTLEGLAEAERNGVQVRSYVLPSLHLYMEACEKIAPLTEKIRSIAAGIEMVRRFMDIPGIGPVTALSFYAAVDNPQRFKKSSDVAAYFGLTPRQFQSGESDYMGGISRRGDPGTRRVLVIAATVLLAHSNDWNSLKAWGVRLAKRIGFSKARIAVARKLAMIMHKIWLNNDRFRPKIISAAERTKLKNELSGAAMKSRPVASAPV

SEQ ID NO: 319261 - protein, 321 aa, unidentified
MTYVGIDVSKATFVVAYSSAKTGRTKTFKNTVKGVHEFIQAVSAAEHHCVLEATGNYSALLVYLLSEAGITVSLENPLKIKNFARAMLSVTKTDEIDARLTALYGERMQPTPYKLSSDSILILKQKRTVLRQLKKQLVATRNLRGSLEILPSFDPECKKTIEKTITFLEKQIKAMEETIASLAQGEYKKQMDLLTSIKGIGATLAAALIVATGGFTYFDNAKQLTRYLGLSPTYQQSGTSVNVKGHINRNGDSNLRSQLYVAAFSSLRCNSECKACFDRLRSNGKPGKVAVVAVANKLLRQAFAVVTQGKPYVDGFKSERP

SEQ ID NO: 319262 - protein, 346 aa, unidentified
MSNSNPKSELVVLGIDLAKNSFQLHGVDASGQVVIKKKLSRNKLSPFIAQLPRCVIGIEACGGSNHWTRGFEKLGHTVHMIAPEFVKPYVKSNKNDAADAEAICEAVQRPSMRFVPAKSIEQQDIQSLHRIRSQAVARRTAQANQIRGLLTEYGIIIPQGISYVRQQLPLILEDADNQLTYLFRELLLGLYEEMTHLDQRIKALEVKLETLCAQNEDCQRLLSIPGVGLLSATALVAAIGDIGVFKSGRELAAWLGLVPRQHSTGGKPTLLGISKRGDAYLRTLLIHGGRTVVRVATNHQDRRNRWICKLEERRGKNITAVAVANKNARTAWALLSKKTTYTALAA

SEQ ID NO: 319263 - protein, 331 aa, unidentified
MYVGIDYHKRYAVATSMDDNGQVVETVRLKNEPGDLIGFVDRLPEDSKIAIEATGNWYDFFELLEGKSPEIHLAHPLKTRAIAEARIKTDKIDSTILAHLLRTDLLPESYIPPREIRDIREVLRYRASLVSLRTALKNRIHAILSKNGIIVEYTDILGKGAKAQLKALEVRSCYRLGIDGYIRLTETLQQLIDEVTKTIEGIVENNPQAKLLTTIHGIGYYSALLIVSEIGDITRFPNAKKLCSYAGLVPSVYSSGGKTRHGNITKLGSKWLRWILIELSQHFSKSCNRLERMYARIAYKHGKNTARVAVAREMLKIIYSMLTHNRPFLKE

SEQ ID NO: 319264 - protein, 362 aa, unidentified
MSDYRTFVGLDVHARTIVGSALDATTGEVLRHRFGFDLNEVVAWTRSLPGPQLATYEAGPTGFGLYRRLVESGTACLVAAPSKLQRPSGDRVKTDARDAFHLMRLLHLEEITAVTVPSVEEETARDLVRSREDTRQDLMSARHRLSKLLLRHGFVYDDGAAWTRQHDRWLREHRSGDLAYRTAFDANYEAVVQAAARRDRLDKAITTMAEDSPFTPLVNRLGCLRGISTLTGFALAVEITDWHRFTGSTIGAYLGLVPSEYSSGQSRQLGGITKTGNTHARRLLVEAAWHHRRDYRPSPTSVLQARWDKAPVAAQLRGQAGNERLHHQWVAFTARKKRPVVANVAVARELAGWCWSLAVMDT

SEQ ID NO: 319265 - protein, 347 aa, unidentified
MKKIIIGIDISKEKIDASAIDVRNSLLGVLKLDYQAFENRPMGFRRMLVWARHLVKGITLEEVMFCCETTGGYDRCLCDYLYAKGLDIWRESSLQIKKSNGLRKGKDDKADSLAIAEYAMRHMDKAVYYVSPSETVRELKALLLYRRKLEQEKTSKKVRVAELKATAAKSKSVSFILRDAQKSIRALEKSIKECEKQILALYDRDEELKSSYDHLTSIKGIGIVNATAMIAYTNNFKNITTSRKLASYYGIAPFREKSGTSVDRKAQVKCYSSSMLRAYLTQAAQWTIKEHGIYRDYYLRMSAKGKCHGIIINNIKNKLLHLSVSLIANDMDYEENHEFLRVQRMAQ

SEQ ID NO: 319266 - protein, 372 aa, unidentified
MPDVSSIAPTHVRLWVALDVHKLSIVAATLPAAGGKPEVCRIETTDKAIRRLIERLGGPDGLAVCYEAGPGGFALWRLLTKLGVACDIVAPSLVPVRAGDHVKTDRRDAKKLVTLHRGGLLHYVAPPTPETEGLRDLLRCRDDVRCARTAARHRVSKQLLRHGRIYREGLKAWTVKHRAWVARQRLDDELAQLALEHMLIRLDGTDRQLATLDAQLEQIATRERWAWQVDRLRAFRGIQTLTALGLIAEIGDFARFSHPRELASWLGITPSEYSSGDQQHRGHITKAGNRHARRLLIEGAWHYRHAPRRPTKGPEPSARAWRAQVRLHHRYRHLTEHGKRSTVVTVAIARELVAFLWADLTNQPCREEVLAA

SEQ ID NO: 319267 - protein, 363 aa, unidentified
MSTITIGVDLAKNLFSVCEMDSAGHVLGRRDLGREAFARWLAQRPAGTVVAMEACSGAHHWARRCLEYGLQPRLMAAQFVTPFRKSRTSKNDRNDAEAIATAARQGNMRFVPVKDVDQQARLAWHRVREGYKTESLAIGNRLRGLLAEFGIVVAKGDVALHRVLAALDQHAALPGEFKELLRDLSAHWAQVRAAIDACGARIDAHARQDARCVRIGAIVGVGPITVDAMVASIGNAREFRNGRQLAAWLGVVPTQHSSGGHTRLGTISCRGDAYLRTLLIQGARSSQQRAKSVSVEKSTPEQIWIRQLDGRMPFGKVLVAIANKHARQLWAMLAHDLDYDPYACVKHPMAQRFADQHTLTAMA

SEQ ID NO: 319268 - protein, 414 aa, unidentified
MNQEKYIGMDVHAATISAAVKNAEGKLLMECVLETKAATILEFIQGLRGTLALTFEEGTLAAWLHDLLKPHVSRLVVCDPRKNALMRDGNQNDRVDARNLAELLRTNQVKAVCHGKHGIRTLRELGRSYLALTKDSTRGMNRIKSVHRSWAIPCGGTSVYSRRHRAEWLAKLVQPGVRMRAEHLYEQLDSLKPLRQAARRELLRESQKHAAVKLLRQIPAIGPIRSALLVVLLQTPHRFRTKRQLWAYSGFAVQTYDSGEYLVVRGKLQRNRERITVRGLNHNHNHDLKNLLQGAAISAIERPGPLQDFYAALVEKGMRPSMARLTLARKIAAITLINPMSSPTSLTSVWATITSMPSIRVRSTPVMRCSSLRSSNRGAFLAGFILFLLGSASGEGSGVGQSSPVAPAIVGHTR

SEQ ID NO: 319269 - protein, 410 aa, unidentified
METIVERCAFLDVHRDTVMACARTPDGDGRREEVVQFATTTSQLLLLADWLVERRVTLVGMEATGVYWKPVHWVLEDAVDEVWVINARHMKNVPGRKTDVADAQWGAQLLEHGLVRPSFIPPKPFRQLRDLTRYRRVVIEERGRESQRLHKVLEDAGIKLSSFTSKVLTKSGREMIDALIAGQRDPDVLAEMAKGRMRSKIPQLQDALAGRFDEHHALLCKAMLARIDQAETTINELGDAIDVLLDPYEAAVTLLVTIPGVQRRTAQVILAEIGADMSRFPTSGHLASWAGMCPGNNESAGKHRSGTTRHGSKWLRIALIEAAHAAARTQDTYLAAQYARLRAKRGPSKAAVAVGHSILVIAWNLLSTGGTYNDLGGDYFEKRRNSTARQRRLVAQLEAMGHNVTLEPAA

SEQ ID NO: 319270 - protein, 340 aa, unidentified
MAIVAGFDVHRAQITFDALDDGTGELSRGRIAADPEAVRRWVERFAGREVHVAVEACTGWLFVCEALEEAGAVAHLAEAGEARALRGPKRRAKTDREDARWLRTLLAEGRLPEAWIPPPHVREWRTRTRLRKTLIDERTRWLQRVRATLFHHGVGGVPAELRSAAGREFLERLELPAADRERVEVALALVDAVDRELGPLEQELRRLARRQSGCRALQRQFGIGELTAPMILCELGDVTRLSASRKAVRWAGLDIGVHRSDRRSRVGKLTKQGSPQLRWALFEAAQSACRAQSPDHADYLALKARGLSHTRATMTIARKLARRSFHTLRHLGPSALEPVN

SEQ ID NO: 319271 - protein, 324 aa, unidentified
MVTTALGIDVSKDRLDAEIAACGKPRSKYFANSPDGWRQLLAWLKELKIKRVHACLEATGRYSLGIALALWEAGHIVSIVNPAQIRDFARTKLGRNKTDAVDAGHIRGYAEIFKPQPWTPPSPAMRRLGELQTIRAGIVSSLTEWKNRCGSGLADDTALALVKATITHFAAQLAEVDKAIAQTIDNDRDLSAKRDLLLSISGVGEVLAGLVLSELPGTDILRSGTQAVAYVGLNPRSHRSGSSIDRPTRISKIGNATLRNALYMPALSAMQHNPVVAALAKRLKAQGRLKGKQIAVAAMRKLLVLCFGVLKSGKPFDPALAMPN

SEQ ID NO: 319272 - protein, 347 aa, unidentified
MTIIVDTQRALTGGVDTHADVHVAAVIDPDGGLLGVKSFATDLAGYKQLSDWMGAFGEIGLVGVEGTGSYGAGLARHLHRVGLVVVEVDRPNRQERARQGKSDSLDAIEAARAALSGRAFGVAKTRDGNVEAIRALMVARRSARESRTKAINQIRQLVYTAPDELRERFVGVPSWRIAEGVAILRVHADADPVRMATKSALGTLGRRAVALGEEGKRLDVLIARLVDKVAPELVELVGLGPDTAALLLIAAGDNPSRLRSEATWAKLCGVAPLEASSGKVTRHRLNRGGDRQANHALWRIVLTRMSCHEETKLYVARRTAEGKSKREIMRILKRYVAREVYHYLPRD

SEQ ID NO: 319273 - protein, 356 aa, unidentified
MDSIASAAPEGTIVIGVDTHKHLHVAVALDELGARLGELTISADSAGYAALAGWAEGLGRPREFGIEGTGSYGVGLASFLRRRGHAVIEVNRGDRRGRRANGKSDTLDAEAAARAVLAGEARAVPKSADGACEMIRQVKIARDTAVKARTQALITLKCIVVNAPAELREQLAHLSDKKLIDRCAALRPGPIDSTTASAKHTLRALARRWLTVAEEIQGHDRVLEQLTAAVAPSLRDGFGIGADTAAEMLIVFGDNPERIRSEAAFAKLCGVAPIPASSGKTTRHRLARGGHRQANSALYRVVIVRMRFHQPTIDYVTRRSQEGRSKREIIRCLKRFLAREIYRRVMADSALIAAST

SEQ ID NO: 319274 - protein, 519 aa, unidentified
MASTLKSRRSSRRQAPVTLGKPAGVLHPRVQLVGPDHFGIVCFDCHKASSKFLLADFYGRCLVPPTVVEHTRPALDSAIAHIRQAFDQHQLRDGLVAIEGTGRYHRLVQRSFAAAGFETRILHPFVTKQYRQPIDPGNKTDDKDLAAIHRATVTGCALLEASRDEAWTTLQLVTRHRRDLVVKGAALNCQIRDHLEAALPGFAACFDKLWESPIPWHLLRHYPSAAQLRNAGLTSLCHSVRQAGIRFQQRTLQAVLDWAEQAAPGEVAAGQHLRIALALYDDRQRKTQEIEALERESAGRLAQTPYVLLLSIPGINVVSAAAFAGEMGPIEHYANAKCITGRAGLRPSRYQTGQVDHAGPLVRNCNRSLRAAILGIADNLILCNHHFQHLATGWASQGKDPRDIHIRVGLRFCRIAFQMVAGRQVFRHPCIQGRHYILDKLNAFHREHGTGMAEVLRDLQSAIGQLPSREYAAEAKPLQQEMQRIQEGRRRGPQLLGDILPIVFARLGVGVVQSNESGE

SEQ ID NO: 319275 - protein, 401 aa, unidentified
MPEQLIIQRWIGLDIHKAYFVAVGVNAEKSTVFGPHKIPNEQLEDWIAKHLLPTDAVVLEMSTNTYLFYDTLLPHVGSVIAIHPPHVLLVTGVKVKTDKKAALTLAQLYAAGLLTGVWIPPVEVRELRAVIAQRSKMVRLQTQAKNRLTSLLHRTHRERPTQPFKPEQKAWWESLPLSAIEKYIVASDLETLAFAGKQIDAIGEVLRQEAAKDERVPLLTQLPGIAMLTALAILSAIGPIERFEDASHLVGYAGLGASVHDSGQMHATGHITKAGRRDLRGAMVNAANAAVRHHPYWKKEFERLEYRLGRSKAIVAIARRLLVAVWHILTNGVADRHADETGVAASMYKLAYEIKVNNLPKGTSARAFTRQQLDRLGIGQNLDVLPWGGKKVKLPPSQLKT

SEQ ID NO: 319276 - protein, 333 aa, unidentified
MDHCAIDLGGKKSQVCLRSPDGRVLLEARYDTLSLPDFLRQLPHSRVILETAAEAFRIADAAKTAGHEVRVVPATLVRTLGVGARKTKTDRRDAQMLSEVSCRIDLPSVHIPSARSREWKTICGMHDALISSRTKLINNLRGWLRGQGLRLSNGRAETFAGRMAEIESLPKYVASQVAMLALLTENIRTSERRIEDLAKSDELCKRLMTVPGIGPSTSARFVAAIDDITRFESAHKVEAYLGLAPGESSSSERQQRLSITKAGPSTVRWVLVQAAWSLQARCRSMAARPLQLWTTEVAKRRGKRIATIALARKLAGILYALWRDGTTYELRQQ

SEQ ID NO: 319277 - protein, 420 aa, unidentified
MPATFSIPRTNDLERAMTAVMIGVDPHKGSHTAVVISPAEEPLGEIRVRASAAQAGKLAEWASAWPERTWAVEGAAGLGRLLAQQLVAAGERVLDVQPKLASRVRLLQAGDTNKNDPNDALSVAIAALRSRTCREVAAEDHPAVLKVRAERHRDLARLRNQVACRLHAVLCDLVPGGIAKEISAAQAARILGQATPSGAVEVARAELAAEFLEDMRRLDAQLRGTRKKLAAAVKVSGTTLTQVFGVGPVIAGTIIGDIADVSRFPGRDHFASYNGTAPVEVSSGNRKTHRLSLRGNRRINHAIHMAAITQLRHKHSEGRAYYEKKLAEGKTHKEALRSLKRKISDAIFARLQADARQAAAAAPKGPGGHPGNDSASSAAGSHPARQLFGQATPGPGTSLRPATPAGTPSKPVPRKTQATT

SEQ ID NO: 319278 - protein, 453 aa, unidentified
MKDKRRSKVKIAVMTHVTEANAAGIDVGSTEMYVAVPPDRDAQSVRHFATFTSDLIRLAEWLKQCGITSVAMESTSVFWIPLFQILEERGFRVCLVNARHVKNVPGRKTDVLDCQWLQYLHSVGLLRASHRPSQSICALRSIWRQRESLVQSAAVHIQHMQKALDQMNLELHHVISDITGTTGMAIVDAILAGERDAQKLSELRNKQIKASPETVRQSLIGDYRAEHVFVLRQSLTAYRQYQAWIVDCDREIEKQLAKLESKVDPNKKPLPKSKDRHKPRRNEARFDLRTHLYRVFGVDLTAVPGISSITAQVLLTEVGPDLTKFATPSAFASWLGLCPDNRISGGKILSVRTRHVVSRLSAALRMAAQSLHRSHSYLGDCFRRMRTRLGTPAAITALAHKLARILYHLITTREPYAESVFAAAERRGQERKLNHLKKQASVLGFRLVENCVP

SEQ ID NO: 319279 - protein, 409 aa, unidentified
METVVERPAALDVHKESVTACVRVPGAGGRREQHLHAFKTTVAGLLTLRDWLRAHGATQVAMEATGVYWKPVWAILEDDFDCLLVNARHVKQVPGRKTDVQDAAWLCQLLEAGLLRRSFVPPKPIRTLRNLTRYRKAQLRERQREANRLHKILEDTGIKLDCVASDILGVSGRAMLEALAAGTTDPAVLAELARGRLRKKLPALREALEGRFTDEHALVVSSILAHLDFLDEQIERLSEAIEQAIAPFANAVELLCTIPGVQRRTAEVIVAEIGVDMSQFASAGHLVSWAGLCPGQDESAGKRRNAHTRKGSKWLRSALLEASLAATGTTDTYLAAQYRRLKPRRGHGRASIAVCHSILAACWHMLTTGELYREPGGDYFQRRDPEHTTRRLVRQLEALGHTVILEAAA

SEQ ID NO: 319280 - protein, 322 aa, unidentified
MNKYKETFGVDISKDVFDVHGSTTGHNQYKNDESGFKKFLKRLPDDCLVAMEATGYYHYRLAQFLYKNAVVVSVINPLSIKRFIQMKLAKVKTDKSDSKAICEYALINEVPIYSALTDLQSECLQLFRLLDVYIKQRTAIKNKMHGEQTLGIPSNFVYRSLKRHRKWLDKEIKSIEEKLLSLVKEDQQQQLSLLKFVPGIGPKTALFLIVITDGFSKFETASQLCSYAGITPTTRESGSSVRGRPRISKVGNKKLRNLLFLCSFNACKHNKACRELYERIVNKGKSKKLALIAVANKLLKQCFAIAKSGRPYDESYVSVLPK

SEQ ID NO: 319281 - protein, 395 aa, unidentified
MFIVGIDVAKRSHEVCMITSDGQTVQRPFSIRNNCTGYNLMLEKIRKHTNIKSQIVFAMESTAHYWLALFTRLRKDGYHVILLNPIQTSAMRDMFIRKIKTDAKDSFIIAELIRFGRYAESNVAQDRLLALKELCRNRFYLVDMAGDLKRKLVALIDRVFPEYEAQFDTIFCKSSVALLKKYPTPQKLSNAHLDKLTELLWNSSNGHFGEWKARELKELARNSFGVEDCDGAYSTLILLMLDQIQSLSGKADALEKEISRLFQSFDTTVTTIPGVGPIIGAVILSEVGDISRFSSADKLAAYIGVDPSVNQSGEFQAAHAHMSKRGSPYLRRCIWMASQVAVQRDPMFRAYYEKKAAEGLKYMTIIGHVTRKMTAVVFATLRDHKVYEPVLPTAA

SEQ ID NO: 319282 - protein, 338 aa, unidentified
MKLYGAIDLHSNNNVTVLIDEQDQVVYQKRLPNDLPLIAQQLSGYRDRLQGIVVESTFNWYWLVDGLMDQGHRVHLANTAAIQQYEGLKYTDDHSDARWLAHILRLGVLPQGYIYPKEERAVRDLLRKRGQMVRQRTANLLSIQNLITRNTGSSISSNRIKTLDSETVDALLPNPDLALAVKANLAMIKCADGQIDILERTVTDRVKLRAEFSFLKTVPGIGQILALTIMLETGEIKRFSTVGDYASYCRCVGSQKLSNGKKKGSGNTKNGNKYLAWAFVEAANFAIRYNARIKSFYQRKKAKSHGVLAIKAVAHKLCRACYYIVRDQVPFDVAKAFA

SEQ ID NO: 319283 - protein, 410 aa, unidentified
MDVVYGRCCGIDIHKRIAVACVIVSEKKGRTGKEIRTFGTMTDDLLALADWLASEGVTHVAMESTGVYWKAPFNLLEGQFEVLLANAQHIKTVPGRKTDVKDAEWIADLLRHGLLRASFVPDRPQRELRELTRYRTSLVRERAAEANRLQKTLEGANIKLGDVATNVLGLSARQMLDALVAGTAEPATLAQLARGRMRAKIPQLERALSGRFAAHQRFIVGQQLAHIDYLDEVIERLSAQVAERLAPFDTMIERLDAIPGIARRTAEILLAEIGSDMSRFPTAAHLASWAGMCPGHHESAGKQYDGKTRKGSPWLRQALIEAAAAAGKTKDTYLAAQYHRLVPRRGRNKAAVAVGHSILVIVWHLLQHDCPFVDLGSTYFDERDRAATERRLVRRLEQLGYSVRLDRPAA

SEQ ID NO: 319284 - protein, 369 aa, unidentified
MAKNGTLAKSHELQPSFRTTTEQITIGIDLGDRFSHCCVLGPDGKILTEGRLKSTPETMARHFKDLPPSRIAIEVGTHSRWVSQLLGQWGHEVVVANPRNLRMIADSIRKSDRVDAHMLARLARVDPKLLSPIVHRKQESYPDLIQLKARDLLVKNRTRLMNAVRGVLKSAGLRVPASGTSCFPSKAAMCIPEELKVSLTPLLETISHLNKQIYLLDKAIESTAQNRYPETCRLRQISGVGSITALQYVLAIGDPGRFAHSRDVPAYLGLTPRRHQSGSVEQQLRISKAGNKQLRSLLVQCAQYLLGRFGPDSDLKRWGTRMFERGGKNSKKRAIVAVARKLAVLLHRLWVTGDTYHPLYSAGISSVAS

SEQ ID NO: 319285 - protein, 429 aa, unidentified
MRNRNIEKLEAITPGTLIVGVDIAKDLQWARFVDYRGMELGKALKFHNNKNGFDSILTSIETIYKNKKLDNVIVGMEPTGHYWKPFANYLIVQGITVVMVNPYHTKRAKELDDNSQTKSDKKDALTIAKLVRDGRYYEVYMPQDIFAELRVLTNSRISLMKRFNALKNTITAVMDEYFPEIVTVFKEPLEGKASMQILKSCPFPSLILEMGVDGALIEIKKAVKKTVGRKRAEQLVEAARNSIGVNYGIVSAKLKLGLMIEELELLKKQLEQLEVAMGQALEDTGIKDVVIRIPGIGVVTAASFFGEIGDPMRFDDPRQISKMAGYNLIEDSSGKNKSGTAISKRGRKNLRSVLYQMALTMVAVNKEMKEFYVYLKTRKNNPLKKKQALVVISKKIITLIYNLVKKQAEYKAELLFGDFRRNQIKQEAA

SEQ ID NO: 319286 - protein, 403 aa, unidentified
MNAVGIDVSKGKSTVAIFQPGEKVVLKPRDFRHTQSGIGSLIEIIKGLDGDTKVCMEHTGRYYEPVATWLSDAGIFVSAVNPTLIRSFGDDSLRAPKTDKADAKKIARYTLDRWTKLKQYGHMDETRNQLKTMNRQFGFYMDQKTAMKNNLIALLDQTYPGANAFFDSPARSDGSQKWVDFVYTYWHADCVRGKSLNAFTEHYKSWCKRKGYNFCAAKAEKIYNDSADLIAVFSKNANTKMLVHQAVEMLNLVSKTVESLREEMNRLAATLPEYPVVMAMNGVGPTLGPQLMAEIGDVTRFEKRGSLTAFAGVDPGKNDSGQHSQKSVPTSKKGSPHLRKTLFLIMESLIQRAPEDDPVYAFMDKKRAQGKPYYVYMTAGANKFLRIYYGRVNEYLSSLAKCK

SEQ ID NO: 319287 - protein, 326 aa, unidentified
MMHPAEAFKPAPTDALITIGIDVSKDHLDAARHPSGDSLRVPNTRKGHTELLRWLGNSGSIARVVFEPTGPYHRMLEERLASVGLQIVKVNPRQARRFAEAAGRLAKTDRIDALMLARYGALLEPVTRPVRSDVQNQLAELVAARRGLMRDRTATLNRLKTLTIELLKRHARHRLRQIEAQVASLDAAIDAIVLGDPVLCRRRDVLASIPGLGLITAHTLLADMPELGAMDEGQAASLAGLAPITRQSGTWRGRSFIQGGRASLRQALYMPAIVAMRFNPDLKRVCDRLIAQRKHTKIAITAIMRKIVVLANALLRDNRLWTPKTS

SEQ ID NO: 319288 - protein, 428 aa, unidentified
MSGRETVQSEVKFVAFVGIDWADQKHVWCLQKASSREREFGELEQKPETVEAWVGELCRRVGPGPIAVAVEQVKGALVCMLRKYECLHLFPVPSTMSAAMRKALYPSGAKDDPRDAGLLLDLLLQHRDRLRHLQPDNEATRRVQNLVEERRKLVEEKTAQLNRLIGYLKIYFPQMLDWFGRLDRKLVCEFLERWPSLEELKKVPLAELRKFFGQRQGRHHELTEERIHGIVHAMPAIQDGAVIEAKGVVVQVIAQLLRSLLEGIANLDRKIAEAAGAHPDFFIFESLPGAGAALAPRLLAALGSQRDRYGSADEVQKHSGIAPVTEASGKKKWVHFRWACAKFLRQSFHEWAGHSIAQSVWARAYYQQQRERGHGHHAAVRALAFKWIRIVFRCWQDRVAYDENRYLMALATRGSHLASAFAAATVSM

SEQ ID NO: 319289 - protein, 347 aa, unidentified
MEQYAGIDVSLDSASVCIVDAQGKILKEAKVACEPQALIAWLAAHGTPMARIGLEAGPLSQWLFAEMKAAGLPVELLETRHVRAAFKAMPVKTDRKDARGIAQLMRLGWFRPVHCKSLPAQEVRALLTTRKLLQAKRQDVEMSLRGVLRGFGLKVGPTTPKTFADRVRDLVAQHDTLQTIADALLKARAGLEQEFKTIEKRLYQLARTSAPTRQLMTTPGVGAIVALTFASAIDDPARFRSSRVVGAHFGLTPRKHQSGETDVTGRISRIGDHGVRVALYEAAKVILPRAVTGSDLKSWALGVARRAGMRKAKVALARKLAVVLHRMLADGTTFMVSKVAPSAAVAA

SEQ ID NO: 319290 - protein, 356 aa, unidentified
MTNSSKYIGMDVHKESISIAVRNTAGKIVMESVIETKTSMILEFVEGLRGDVHVTFEEGTWSAWLHDLLKPHVTRLVVCDPRRNALLQEGNQNDRVDARKLAELLQNNQLRSVYHGDHGLRALKELVRSYLTITKDLSRVMTRVKAIYRSWAIPCSGKQVYSSRRRAEWLGKIQEPGVRRRAEFYYQQLDALRALRQEVRRDLLAESKKHKIWKRLCQIPSIGPIRAAMLLGILQTAHRFRTKRQLWTYSGLGIEVHSSADHHTVKGQLERKKKHIEIHGLNENCNHDLKNLFKGAAVVAATKPGPFEEFYAVLLAKGMRPEMARLTLARKIATIVLIVWKRGVCFDANHLKPQTA

SEQ ID NO: 319291 - protein, 433 aa, unidentified
MHEVEDEPLFAERVAGIDIAKAGIEVTIRVPSDTRPGRRQQETRSFGTTRRELLALADWLRSWGVTKAGMEATGDYWKPVYFVLESQGLDCELYHAAQVKALPGRPKTDRADSVWLARITERGSLSSSFVPPEPIRRLRTHTRYRRHLTQARTAEKQRVEKLLEDGHLKLSSVISDIHGVSGRAMLEAIIAGERNPKVLAQLARGTMRGKIARLEEALDCSFLTEEHAAVLSMMLSLIDCYTAQIDELTAKIEVLAGPWLHQIEQLDAVHGTGRISAQDVIAEIGVDMTVFPTAAHLVSWARWCPQVRQSGGKRKGSNASGRGNPYLSAALGEISISAGRTQSFLGARYRRLVRRMPKKKALVATGNSVLTIFHALLSDPAVTYQDLGAEYYEQRMNIRRQARNHVRGLERLGYHVSIQAINPDTGELLTATA

SEQ ID NO: 319292 - protein, 399 aa, unidentified
MHNRQNYLYVGVDLHKEQHTAVIINCWQEKLGEIQFDNKPSAFSKFLLEVETYVSDGLSVVFGLEDVGGYGRALAKYLVDHKQVVKEVNPALSFLERKSHVTTQKSDSWDAECVARILVNKFNQLPDAKPNDLFWSIQQLVSRRNALVKAQSALKNQLHIQLNHHYPSYKKFFSELDGKTALAFWQQYPLSSCLEEANIKQLTAFLLDVSNNTCSVKKASEILKLVKEDGQTMKEYQETRDFLVRSIVRDIEFKKKEMKYIKRELKRLVNLLDYQLETMPGIELVTASALIAEIGDVRQFPNANKLARFAGIAPVYFGSGGKGKTHKSKQGNRALHALFYNLAVQQVQVAKGSKLARSPVFYAYYQKKLKEIKRGKNKRTGISMYYEKTGEHYIWHDET

SEQ ID NO: 319293 - protein, 314 aa, unidentified
MTVSTIGIDISKAWLDAHALPAGLARRFANDPAGQKALIRWLEKLGQPVARIVYEPTGAYHAGIARALEEAGFPLAPVNPRQARRFAEACGRPAKTDRADAAMLARLGVALEPPLRPLPSQTVSALKQLSLARQALIRDRTAAGNRQAGLALPMLKRHNAQRLRQIEAQLADIETAIAALIAGEPELARRLAILTSIPGIAETTASILLIEMPELGTLEAKQAASLAGLAPITRQSGTWTGHAFIRGGRAVLRRALYMPALVATRFNPDLKAKYHQLIAAGKPAKLAIIAIMRKLLILANTLLKQQRQWAAKAA

SEQ ID NO: 319294 - protein, 346 aa, unidentified
MEHYAGIDVSLELSSVCVVDAKGRIVKEAKVASEPEALVGFFKELGFPMKRIGLEAGPLSQWLHAGLTRAGFETDLLETRHVKAALSAMTVKTDRKDARGLAQLIRMGWFQPVHAKSIGSQEMRALLIARKQLLGKLIDVELSIRGFLRGFGLKVGQVTRKEFEARIRELVAGQATLERIAGAMLSARTTLKAEYEKLHKAVLAIVREDAVCRKLMTVPGVGPLVAVRFKSAVDNPRRIAKSKAVGALFGLTPKKYQSGEKDVTGGITRAGDEMVRTALYEAANVLLSRITRFSKLKRWGMDVARRRGSKRAKVALARKIGVILHRMWVDGTTYRWTEAEPIAAQA

SEQ ID NO: 319295 - protein, 358 aa, unidentified
MNGNKERPQVTAGLDLGDKYSYLCLLDTDGGEVIEEGRVRTTPEALRRRFSSEQPLRIAIEAGIHSPWISRVLKECGNEVLVANSRKVRLIYSNKRKTDEIDAENLARLARLDPKLLYPLKHRGEDSQAHLAIIRSRQALVGCRTQLVNHVRGAVKSFGGRLPKCPARSFHKRVAEHIPEALRPALGPILEQIGSLTERIKDYEHQLETISKEHYPETELLRQVEGIGPLTALTFVLTVEDPYRFEKSRCVGAYLGLVPATDRSGDRDPQKRISKEGDEMLRKLLVSSAHYVLGPFGSDSDLRRHGQKIASRGGKNAKKRAVVAVARKLAVLLHSLWITAEVYEPLRNTQRSSGGQAA

SEQ ID NO: 319296 - protein, 485 aa, unidentified
MSETENNNHDDHSSSVIPEDNGIIVMPARAYGVGLDVHRSMAQISVMVRNEDSVLEFQKQFDTDILSLMEAREWVIEIITSKSSPKINVSSKELTYNIESTAMYHMPVIAVWGGKPSVINPAIARTGLRKTDKLDAKNLCLQNMLGTWPPSYVAPERIQVLRMLVAERDSYSRLATRASNRINSNLLRFGDTSGREGSVTKNQTVRMHVESLLHGDEDLTGIHTLGIPEQAREMFLDEYEEYDRYMEKVRACDKQIITAVKDMEWETGSGKLKGNEMLHLLTTVPGIGEYTASIWLCRIVTPTRFPNAKAVTAYAGLDPSLKVSAGKVTSAVKRKGDKLLHAKLSLAASALLNRRSEPFGEWGYRIQLTSGRRAKAVTGIARRLAVSLYWVQKTGKPFTYEGYQIAREPEVVDMTIEELTNVNTAFRRYVKVLEKAGIHTTKEMVHEYYICRLHTVKGLGSKFFILVKEFINNQKPYRKHVKGKD

SEQ ID NO: 319297 - protein, 367 aa, unidentified
MKQQTSATTETGIKGRNIIDFTGKTIYVGIDVHQKDYQVAKVLNGFCLGNHRMESNREKLIEHLKSHYPGATFKCVYESCAWGFTLQRTLQASGMECIVVHAADVSTTDKEKRRKTDKVDALKLAHGYASGSLKGIHVPNEETQKDRSLIRYRKQLTGDINRSKNRLKSLLKYQGIDLPPQYAGNNWSRNFLNWVEQQAEKDALLKETLMLLLEQIKLLRQLLLKTERKLREMRKTKYAQKADLACSVAGIGPTTAMLFLLETGDINRFKGFDSLNDFVGLCPDTDSSGDTHRDRGITTRRHKQLRSALIEAAWQAIKTDPALMDSYQTLLKRMKGTQAIIRIARKLLRRLRAVLLSGRPYQKGVIA

SEQ ID NO: 319298 - protein, 348 aa, unidentified
MDTIGVDLHKRETQLCIGQADGTITEQRIVTSRERFTAVLGHRPPARILVEASTESEWVACHLESLGHEVVVADPNYAPMYATRSRRVKTDKRDARTLMEACRAGTYRPAHRLSAARRHVRAQLAVRDAVVRTRTRYVALAKALVRRDGLRVPSSAAERVGAHLEALAGSPTLAAELAPLLTLLPPLNATIAAADQRLAELEHTDPSVALLMTAPGIGAVTASALVATIDDVQRFASAHQFEAYLGLVPGERSSGELRRIGPITKAGNRRARWLLVEAAWRILRSKDAAGAPLRGWARPIVARRGSRIAVVAVARRLAGILYAMWRDGAPYDAGKIRRPRSARQSPAA

SEQ ID NO: 319299 - protein, 355 aa, unidentified
MTSVKYIGLDVHKESISICVRNSVGKVVMESVIETKASTILQFIDGLRGDLRVTFEEGTWAAWLYDLLKPRVSGVEVCNPRKNALLKDGSKSDRIDANKLSEQLYMNNIKSVYHGEHGLRTLKELARSYLTISKDLTRVMNRLKSLYRSWAIPCAGKEVYAPRHRAEWLGKISEPGVRRRAEFYYQQLDVLRLLRQEVRRDLLLEVKKHKAWKLLRGIPGIGPIRGAVLMAVMQTPHRFRTKRQLWNYCGLGLETHDSGEYRAVKGQLQRAKKQATVRGLNEDHNHDLKDIFKGAAMRASTAAGPLRDFYENLLAKGRKPTMARLTLARKIAAITLIVWKKEVSFDANYLKPQAA

SEQ ID NO: 319300 - protein, 347 aa, unidentified
MLYAGLDLSRKRLDFCLLDEAGELIERGAVPPDRDGLCSLAERVTAQQRQRVVAAVESMTGARFVHDQLESHGWRVEVADAARVRGLAPLACKTDRIDAWALAELCRRELVPAIWLPDGEVRGARERARFRLHLVKHRTALKNRIHQTLVGFGTPCPVSDLFGERGRRLLARLELPQPWAGSVAASLRLIDELDREINEIEAELRRLGASHRYVPLLLTVPGIASILGYTIAAEIGDINRFASPAKLAGYTGLCPRVYQSGEHDRRGPLSKHGPRYLRWALLEASIHACRHPLYAQRYQHTKKRLGRQRGPRVAQVDLARRLSEAIWHMLTRNQPFAPAGASQVLAA

SEQ ID NO: 319301 - protein, 338 aa, unidentified
MLAFLRLSPNGCTAARRIEYKEGKRAMEAKFVGIDVSKATLDVDCLPVSTPRQLSNDAGGIAALVEWLLGSGVERIVVEATGGYEIAVASALAAAGLPVVVVNPKRVRDFAKAQGVLAKSDRLDARVLALFGERIAPPVRALPQPAQRDLTELLDRRHQLVTMRAQEQARLATVLPVARRDVEQHIAWLDQRIRKHETVLLKRLRANEIWDAKVKLLDSVPGIGPVNLFTLVGRLPELGTLNRQQIAALVGVAPFNDDSGKRRGQRYIRGGRAEVRCALYMATLTAKRWNPVIAQMFERLIAKGKPFKVAMTACMRKLLTILNAILKSTQPWENRLAT

SEQ ID NO: 319302 - protein, 387 aa, unidentified
MYFIGIDISKFKHDCAIIDEAGDTVTASWSFANNCEGFSLLKQLLDALDGQKKIGFESTGHYGHNLKLFLEANNFSFMEFNPLLVSKFVRSKSLRNTKTDSLDAVSIAQYLMTVEYKPYPPSFYHMDQLKSLTRFRDSLVRQHSRQLVELTNILDKVFPEFKPFFDGKFSATALYILTHYQSPEKIANMNAKSYEALRKKSRGKFSMVKFAQLKTLAKNTVGRSDAFLLKQMEITIDIENQLDAKIDEIESQILECIHALNPPILTIPGIGELTAAIILSEYGNINKFENPAQLLSFAGLEPGYYQSGLAEHQGHMVKHGSSHLRYALMNACLPLITYEPVFAEYYAKKRAEGKPHRVALTHVAKKLLRVIFTLQTKNISYDPTLIR

SEQ ID NO: 319303 - protein, 404 aa, unidentified
MAENGRQRDFKLMGWMAPSRHLSAKMVVVEDHQQREPSMGEITTVGIDIAKYVFQLHGVDAAGEVVLGRRLRRSQIAAFFAALPPCVVGMEACGTAHFWAREIAAVGHDVRLMPPSYVKPYVKRNKHDAADAEAVCEAVRRPSMRFVPVKTPEQQAALVAHSVRDLLVRQRTMLVNALRGHLAEFGIVAPRGIHKAEELIAVIGDVSDERIPSAARRVLPVLATELAALGLRITAIEAEIVARTRADPVARRLATIPGIGPIIASRITATVPDPSIFQSGRDFAAWIGLVPRQNSTGGKIRLGGISKRGNGTLRRLLVGGAMAAMFRTKVLQNDPWLCQLRARKPAKVAAVALANKIARTAWAVMQHGQDWRPATALSSRPQEPAAVLAAVKTMPPSAMAFGQS

SEQ ID NO: 319304 - protein, 330 aa, unidentified
MKTYNVILGVDVSKLTLDISCAERLLHVKIDNNSKGFGVFKKWCKTNGIDLKEVLIIMEHTGGYEYRFIQFCQSLAIDYRRVPGLEIKNSMGMVRGKNDKDDSFRIGKYGEQRIKELKASKSLDDNMLNFKQLLSFRKRLVRETAGLEATVGERKHMFAPKKKDTITRIAIKKIEANKKHIIEVEKEIMELIRADEAMFLNYRILTSIKGIGPVNAWIALAYTENFTLFTDARKYAVYVGVIPFNNRSGTSLKGKDRVSHLANKEIKQELNQAARSAITYDSEIRAYAERKLKNKPYSLVLNNVKFKLILRMFSLVKRGELFVQNYNRAA

SEQ ID NO: 319305 - protein, 482 aa, unidentified
MVVPNQEPKKSAKPRKPTDPKKPAKPGESSQRSYPVPVPASAAALNVINPDAAGIDVHSNMHMVCVPADRDANPVRQFGANTVDLHEIVAWLKKCRIKTVALESTGVYWIPLFELLESQGFDVNLVEPGQLSRCGARPKTDVLDAQWIQRLHSYGLLRASFRPADFVLAVRAYWRLRQMQVRYAASHVQHMQKALEQMNVKLTEVVSNITGLTGMLIINAILEGERDPIELAELRHPQCHHSREQIALALEGTWRPEHLFELRQAYDLYQFHHRQIDECDQQIQAELAKFPNRAGEQRHTVKPRKRGRKSNDIGFEATGLLFKALGVDLTLIEGIEVGTALVILAEIGADVSRFPTEKHFASWLRLCPPQNQSNKTNRRHRNRKGTSRVTIALRMAAQSVGKTMTPLGLFYRRIRSRIGGLGAVKATAHKLACLVYRMLKFGQEYVVQSMEEYEAKMKDNMLKALKRKAAAMGLQLSPLPAQ

SEQ ID NO: 319306 - protein, 355 aa, unidentified
MNQSKYIGMDVHQATISVAVLDSSGKLIMECILETKAATILEFIQGLRGSLSVAFEEGTSAAWLHDLLKPHVSHLVVCDPRKSALMKDGSKSDRIDARKLAELLRGNQLKPVYHGEHGLRTLKELGRSYLTITKDLTRVMSRIKALYRSWAIPCSGTTVYAPRHRAEWLAKIVEPGVRLRAERLYQQLDLLQPVRQQARHDLVGESHRHYAVKLLRQIPAIGPIRAALLVALLQTPHRFRTKRQLWAYSGFALETHDSGEYRMVGGKVRRNRERLTVLGLNDNHNHDLKSLFKSAAISASTRPGPLYDFYVGLLQKGMRPTMARLTLARKIATIALTMWKKGVGFDAQQLNRQAA

SEQ ID NO: 319307 - protein, 409 aa, unidentified
MRVVGLDIHRVFAEAVMLDDGKVVRLGRVGMTREHLDIFARTVLTHDDHVVVEATGNATAVAEVLAPHVGRVVIANPRQVRLIAEARIKTDVIDATVLARLYASGFLPEVWVPDARTEALRRQVTRRMQIVRQRARLKTMIQSILHAHLVPPCPHADLLGPKGRAWLLAQPLPPDEADAVARHLREHDRLSEDLRVVEREIARDALANPDAKRLMTIPGIDMVVAVGLLAAVGPVTRFNGPDKLVSYLGLNPTVHQSGEGRPRHGRISKSGRTHARTMLVEAAWQAVRGPGPLRAFYERVARRRGVHIAAVAVARKLAVIIWHLLHKGEDYAWVRPALHAKKLRDLELRSGLPARRGERGQAYAYNLTRTRQEERRRGEQAELAYRRQTEGWTRRGPKAPTGAAKEERP

SEQ ID NO: 319308 - protein, 299 aa, unidentified
MQYLNNTELSSHEGTRCQFNGGRCAIKLGIDVHQDFYVVVEQVGGSNPKPPQRFAKAAFLHWAAKLKRQAREVYAVYEACGFGFALQRQLSALSIHCHVVCPQKLDEQNRRVKTDGLDAKALCLKLDRFVQANRDALALVRVPSEKEEQLRAVHRQREQLVKVRKQLEAQGRSLLVNHGIEPVKNWWKPRTFAALQVPEWMKELLQNSQPILLALQEKIAALTLQLQNAATTNQPRGLGALTSVIIDREIGDWRRFNNRRQIASYTGLCPGEYSSGNTRLQSCVTKHGNPRLRELRWWN

SEQ ID NO: 319309 - protein, 422 aa, unidentified
MLEQTQDEQEIIARVAALDIGKAELVCCVRVPDPGGGSRRVQEVTTYSTMTRSLQVMADRLMDLGVTRIVMEATSDYWKPPFYLLEAHGFDVWLVNARDVKNLPGRPKTDRLDAVWLCKVAERQMLRPSFIPPVPIRRLRDLTRYRIGLVSDQTREKNRVEKLLEDAQIKLSVVASDIFGVSGRQMLAALISGQRNPQVLAQMARTRMRTKIPQLEEAFVGHFTDHHAFLLAKMLARIDALDKDIADLDTKIEAHLAPFAGAVARLDQIPGVGATAAAVIIAEVGLDMTRFPTPAHLSSWARFAPGVKESAGRKKGTGSTGHGDRYLARVLGEAAAGASKTDTFLGERYRRIARRRGNKKAIVAVGRSILVIVWYLLSDPEVGFHDLGSGYYDSRINPEHKKRNHIRQLEALGYKVTLEPAA

SEQ ID NO: 319310 - protein, 324 aa, unidentified
MTAVLGIDVAKATYQVTLLVEGHNYKRSFGNQESAFPELLNWLHKHYTGQLLVGMEATGRYWEALAYYLHAQGHVVSVINPSRISYFARSKLVRNKTDAIDATLIAEYCLSQQPEPWTPPPAEVRELQALVRHLEALQGLRTQQSNRLQAAPPSCDVRASLQSLLSHLDDQIRAIECKIRGHMDQHPTLKQQSVLLQSIPGIGQITAARLLGENIQQFDSTRALTAYAGLTPRHNISGTSVHGRPHLCKTGNEHLRRDLYFPAIVAMRYNPVVNSFSKRLSQRGKHKMAVVGAAMRKLLAIALGVLKSKTPFDPRYSERNLVLT

SEQ ID NO: 319311 - protein, 315 aa, unidentified
MRFYNQQHDYYCGIDLHARILYVCILDSAGNTVLHKKIDANPDALLDVLAPFQDQIVVGVECMHCWYWVSDLCLDYAFDFVLGHALYMKAIHGGKTKNDRIDSYKIASLLRGGNFPLAYVYPKAMRATRDLLRRRTKIMRHGADLKAHVSNTFSQYNHSAPNLQLRYPYAREEVRNRFDKPAINRNIDLDLNVIAFYTKELASVEHFIEQNAKQHNPQDYQLLQTVPGIGRILALTILYEIGNIQRFPTVQQFASYSRLIKCKAESAGKQYGTCGNKIGNAHLKWAFSEAAVLYLRGNKKAKKYLNRLQKRTAMS

SEQ ID NO: 319312 - protein, 343 aa, unidentified
MLTITTIGLDIAKSVFQVHGVDAGGQAIIRRQLKRRYVLTFFQKLSPCLVGIEACASAHHWSRELQALGHTVRLMPPAYVKPYVKRQKNDATDAEAICEAVTRANMRFVPTKTPEQQSGLVLHRTRHLFIRQQTSVINAIRAHLAEFGIVAPVGRRGVEELLNVVADPNDRRVPEIARACLSALGAQLRRMKEQILEFDRLIRAWHRSNEMSMRLEEAPGVGPVLATALVAAVADPKSFRSGRNFSAWIGMVPKQHSSGGKNRLGNISKQGDRYLRGLFVAGALSVIRYAKIHGTKHRPWLTALLARRPTKVAAIALANKIARMVWAMMARGQRYKEPVALAR

SEQ ID NO: 319313 - protein, 360 aa, unidentified
MDVSRERPKATAGLDIGDRYSYLCLIDTESGEVVEEGRLRTTPEALRRRFVSEQQRLRVAIEAGTHSPWVSRLLEECGHEVLVANPRRTRLIYANKRKTDEVDAESLARLARVDPELLYPLKHRGEESQAHMALIRSRQALVGCRTQLVNHVRGAVKSFGGRLPKCPARSFHKRAQEHIPEALRAALGPVLEQIGSLTERIRDYDRQLEAISSERYPETHLLRQVEGIGPLTALAFVLTLEDPHRFEKSRSVGAYLGLVPATDRSGERDPQKRISKEGDEMLRKLLVGSAHYVLGPFGSDSDLRRHGQKIASRGGKNSKKRAAVATARKLAVLLHSLWMSGEAYEPLRNAHRSGGREEAA

SEQ ID NO: 319314 - protein, 316 aa, unidentified
MNSTPPIVGIDVAKDHLDIAVSSDSSPSRLANDPAGFDLLIQRLRDLHPSLIVLEASGGWEMPVAVALSTAGFPLAVVNPRRVRDFARASGILAKTDPIDARVIVRFALAVHLEPRPLKDLHTQELSALVTRRRQLLDMITAERTRFHSASPPVRADLSAHIAWLEKRLASLDALLARSIKNSPLWHENDSILQSAKGVGPVLSSTLLAKLPELGSLSARQIAALVGIAPFNRDSGLFKGKRCVWGGRASVRSTLYMGTLVATRHNPVIRAFYLRLLAAGKCRKVALTACMRKLLVILNAMIRDRSSWNPSHALSS

SEQ ID NO: 319315 - protein, 360 aa, unidentified
MRRSAMLVPNLTIGLDLGDRVSRICEVDAAGRVVNRASISTNNPVMIEGYFAKREACRMVLEVGTHSPWVSRRLEALGHEVVVANPRAVYGTRRRRKRNDDMDAEFLARQGRADPSLLHPIRHRGPDAQAHLALLRSRDQLVRARTKLINHVRGSVKSLGGRLPKGGAEAFPRRAMQAMPQELKLAMEPLLEMVTELTQRIRAMDHRIQKVIEAQYPEARRLQRIPGVGPVTSLAFVLLIEDPYRFERSREVGAYFGLVPKLDESSESRPQLRITKSGDGLGRRLLVSSAHYILGPHGPECDLRTHGHKLAERGGKNAKKRAVVAIARRLAVMMHRLWVAEADYDPHFLAKKRQQRRRVA

SEQ ID NO: 319316 - protein, 483 aa, unidentified
MKPKQVESNKKASCRPTPNRWHKMNHKQRREMLRKIQSEDLSLEVVHPDAAGIDIGNESHYVAVPGARDRQSVRRFGCTTAEVKAMADWLKQCKIQTIAMQSTGVYWVSVYDILEEAGFEVYLVNANETKNLPGRKSDVQESQWLMKLHTYGLLRNSFRPSQEIRTMRTYWRQRNDLVRAAGRHIQRMQKALTQMNIQLANVLSDVSGMTGQAIVNAILAGERDPYQLAALRNWRVKASEEEIARSLEGNWQEEHLFVLQQEQDGYQFCLKQMAECDQRLQQYLRQQEDRSQGASLPEEKRKERLRKKKKGNTPQFDLRTELFRMTGTDLTQIDGIDVTTTMTILSEAGWDMSKWKTEHHFVSWLRLCPDNRISGGKIIGKGRLPTNNRVTNALRMAASTLRLSNTYLGAQFRRLRTKLGAPVAIKAMAAKLARLVYRMLRYGMAFIDRGAEFYESQHRNLQINYLKRKAATLGFQIIEAPAA

SEQ ID NO: 319317 - protein, 420 aa, unidentified
MDTIVERPAALDVHKAQVTACVRVPVEDGKGREQHVAEFSTTVRGLLALRDWLAAYRVEQVVMEATGVFWKPIWHVLEDDFPLMLVNARHVKQVPGRKTDISDAAWLCQLLEAGLLRASFVPPKPIRNLRNLTRYRKTQIQERAREANRLHKALEDTGIKLDCVATDILGVSGRLMLDALVHGTTDPGVLADLAKGRLRSKLPALKEALEGRFDQLHALWIGAILAHIDFLDEQIDRLSDAIEEQIAPFAKAVELLCTIPGVQRRAAEVIISEIGVDMSVFPTDKHLVSWAGQCPGNDQSAGKRRSGQSRKGSKWLDWTLEESALAAIRTKDVYLAAQYTRLKPRRGHKKALGAVKHSIICACWHMLSTGELYSDLGGDYFQRRDPEREAQRLVRRLQALGHVVTLRPTSTSTAEEVAAA

SEQ ID NO: 319318 - protein, 328 aa, unidentified
MFYLGMDVAKAKLDCCLLLDEAAGRRKTKVVNNTKSGIAELLAWVAKLNVSAGELPVIMEGTAVYHEQAALALADAGVTVSIVNPAQIKDFGRGLAVRTKNDGMDSFVLARYGALVKPAAWTPPAPEARLLQALLARRDAIAQDLQRERNRQEKAEATDTPELIRQSLADSIEFLVKQLKQLQKDIDQHIDRHPGLKDDLALLQSIPAVGPQVGSNMLSVLHCHDFGSAEQLAAYLGLVPVERQSGSSVLGRARLSKAGPARIRAVLYMAAVVATRCNPHVKAVYERLLERGKSKMSALGAAMRKLVHLCFGVLKTRQPYQANYAKID

SEQ ID NO: 319319 - protein, 392 aa, unidentified
MLYVGIDVAKREHACFITNEDSEALTDVFMIENSKEGFLELQRQIIAHQPQPSHANTRVGLETTGHYSDNIIAYLRKIGLAPIILNPLKVSLYLKGQSLRKTKTDKSSARSIAKMIAAQKLTPHLPSSYHSDELKSLTRHRQRMVKNRSMYKVLYDRLLSIGFPELESFTADTLGKTILKLLLEFPSTEAISSCHLTRLTNLVRTYSRGRLDKDWAVGFKEVAKNSIGLVSSAKSYELKFIIRQIMSLTDEINHVEKEIKSLVINSGTTLITIPGIGYTLAAVILAEIGDITRFDTPAKLQAFAGLEPTQYQSGQYEGKRNHMVKRGSPYLRWALLMAARIIGRHDKTFSEYLDRKIAEGKHYNCAMGHVAKKLIRVIFRLMNTGEIYMAKA

SEQ ID NO: 319320 - protein, 426 aa, unidentified
MHRGYPAKKVAWVAIRSPGEKPWTRKTEVLEFRTFYGVLQAMGRELRRRGVTHVVMEASGIYTDPVYYALAEQDFEQVAVINPAHAKALKGHKTDARDCARLAELFECGLLRGSYIPPSELREVRDLTRYRMKTVQARTSEIQRLGKALESAGIKLGSVASSITGQSATAMIEALIGGERRGAVLADLAKGRMRAAGKLADLSMALAGRFTEHHALLCRLHLDRIAVFDDAVDGLDKRITGKAARWQREAGLLTSIPGFGDVVAQAWLGEIGPAPHLHFATHEKLASWVTLCPGNNISARKRKHGRTGDAGTYIKPMLVQAAWAAIRVRGRLQARYNRLVRRFGGAKNPAAKKKAITAIAHTLLKIAYQVLKSGVPYTEPGADFYTRRESPEQKQAWLERQLQKLHPGCTITVTISPPEAALPPGA

SEQ ID NO: 319321 - protein, 342 aa, unidentified
MTQPAPARITVGVDTHAEVHVAVAKDSFGRRLDAISVPTTPAGYAELLGWAQRLGPINAWGIEGTGSFGAGLTRFLHRHGQVVVEVNRPDRQTRRRRGKSDPLDAEAAARAVQAREGAIPKAGDGQVEMIRSLRVARATAMKARTQAINALKGLLVTAPDELREQLRALSAVRLVQTAAKLEPGPVTTPAAAATLSLRSLARRYQALSAELTILDTELDRLTVTAAPKLLALFGVGSDSAGALLVAAGDNPDRLRSNACFSMLCGASPIQASSGKTQRHRLNRGGDRQANAALYRIVIARLRHDQQTKDYLDRRIREGKSKKEAIRCLKRYVAREVFAALQP

SEQ ID NO: 319322 - protein, 353 aa, unidentified
MTIVGGFDVHRKQLTFDYVDTVTGEVRSGQIRPATRLTLRQWLGQHCPDGDAEFALEGCTGWRYVVEELTAAGAVAHLADPAETAGLRGPKKRAKSDRTDARLLRTLLWEGRLPESVIPPAHVLELRSLGRLYCALMDERRAWQQRIHAQLFHQGCPPITVLLSQTARDGLASAELSPAGRRYIEAALRRIDELTDEIEPVRTELVSLARRQPGCRALQARHYGVGWLCAAIIWAEIGDARRFASSDQVVRFAGLDVTVYSSDGKRCPGHLSTQGSPALRWAAYEAAKCAVRSGSPDYAYYHQVAQRMRGKRQTSGKNPTLAVERKLLRRCYHALRELGDAALAPPAAERQVA

SEQ ID NO: 319323 - protein, 354 aa, unidentified
MLYLGIDQHARQITVSLRDEDGDILLARQVSTQPAKIHAFFQQLTRRRLAHGESFAAVLEVCGFNEWLIRMLKDYRCHKVILIQPEERKKQRTDRRDAAALSELLWVNRARLLQGKPVRGLRQVDISSTTDQENRRLTTLRKSAGQAQTRIILKIKHMLRRYNLQWEMPTKTFPTQRAMAWLKKLALPEVDRWEMDHLLADLEHAQRRVEELEKVIAQRCATSDAAALLATTPGVGAYTAIALACRVGRVERFPRSHSLANYWGLTPGCRDSGETRRPGSITKAGSATARWLLAQMTRQVLRKDARLREWFKRIKRRRGSSIARVAVMRKLATTIWHMLTKHRTYAECRALSAS

SEQ ID NO: 319324 - protein, 339 aa, unidentified
MKYTPVGVDIAKHLIQVHFIDENTGEVVDKQLRGRDFLEYFSNREPCLIGMEACGGSQHWARELTKLGHNVRLLQARFVKAFVMGNKNDVMDARAIWMAVQQPGKEIAVKTEEQQSVLVLHRTRMQLVKFRTARINALHGTLLEFGETIHKGRAAMEREFPEALERMKERLPQYLITVLENQYKRLNELDSLIEDIEKQLASVAKQNETCKRLLDIPGVGPLIATAAVATMGEASAFKSGREFAAYVGLVPKQTGSGGKIRLLGISKRGDTYLRTLFIHGARAAALLTKEPGPWITELKKRRPASVAIVAMANKLARTVWAIAAHDRKYDRNHVSIRPY

SEQ ID NO: 319325 - protein, 397 aa, unidentified
MKVCGLDVHKDTVFCAVHNGKKTEGVKEYSTVTSSIRAMGEFLKGQGICRVAMESTGTYWIPIWNILEEQGFDLLLVNPFLIKQMPGRKSDVKDAQWIALLLHKGMLRGSLVPNARIRELRVYERKYRKLQGRMTSVVQEMDRTLVMSNIRLGSYVSDLNGKSFQRVVQAIANGSDSPEELLCHVHPRIRNKHAHTIKDALEGFICPHHRFALSLLLDEYGLLASQAEQCLTMMGDICAGHYARETEILKTHPGISDIAAMTFIAESGGDMGAFENSGKFSGWTGLRPRNDESAGKYKSTATTKGNKFLRTILVQIAWAAIRTKGSHYQGKYARLAIRKSKKKALIAIARKIGTVLWNMLDKKEMYNADMLPVYDPIKLSAKIAYHDKELLRLQSLV

SEQ ID NO: 319326 - protein, 278 aa, unidentified
MAEYVGLAVSIRRDGKRIWRGKCGSDPRLIAEVIRRRAPDAARVVFETGPLSVWFYHALTAEGLPAICIDARHAKAALDMAPNKTDAHDADGLAQLAEVGFFREVRVKGFDSMLGRTLVAARNRLVQITTELSNQIRGLMKTFGLVVPAGKGSRFEAHVRALLADQEGLAPILLPLLEAWRAVRLRAAELGRQLVASARRSEACQILMSVPGVGAVTATSFATAVEDPENFRRSRSVGAWLGLTTRRYQSGEVDYDGHISRRGDTHLRGLLYEAATSS

SEQ ID NO: 319327 - protein, 461 aa, unidentified
MKNSTAKKRKQVPAGYLVVGVDPHKKKHAAVFMTQDFMTHSKLKFDNSREGFETVLERARTEMLKTECRGVIFAIETGAHHWRNLAYFLDEKGIPLRLINQFTLKRRREGKDLNHRKNDYRDSEVAAQLLCTGEFNAARLSQGVYAELRAAYGSYRRLVKEKTRTVNLVKSLLDGLFPEFTQVFKNPCGQTAASVLCTCAVPQAIAGMTESEFAGAIKAACQGRVMKGKLRVLHHVAMTSIGIGAGAQSVSSEIAFLIEKLRLIEQQLRQINEALTRLVHETMEGKYLLSIIGLSYVSVAGIIAELGSFSSYQNAKQLIKMAGSNPTESESGGKRHSHTPISKQGRPVLRHCAWTAVIPMLRFNPDFRDWAKKLRERPAGANPLSGREVMVAAVNKLLRLAFALVKNQALYQIPESQPVEIAIKEVSNTSGGQGNTAGSFGSSYEPTRQKTWCPALLAKPV

SEQ ID NO: 319328 - protein, 456 aa, unidentified
MSRKKTRLQWVTEAPQVRTGVAGIDISPEVIYVAVDPQKDGRPVRSFGTFTGELYRIANWLQACGTRTVAMESTGVYWIPLFQVLEERGLEVFLVNARHYKNVPGRKTDVCDSAWLQYLHAVGLLQGSFRPAQEVCAFRTLLRHRSGLVQAASEQIQHMQKSLDQMNVQIHRVLSDLTGVSGLAILDAILAGERDAHQLAALRDGRVRASEETILASLAGDYRAEHLFTLRQSLESYRHDQKLIGECDRQIREMLNQFEDRADGQEPPAARKKMRTQADEELRQEFHRVLGVDLTAIPGVNVGTVQVLVGEVGPDLSRFRSAGAFASWLGLCPDNRITGGRVLSSKTRKIENRLAGALRMAAESLCRDQSYLGQHYRRMKSALQGGAPEAITAAAHKLARIAYTLITRKQEYDESRFQAAEKRNAERQRQRIIKQARKWGLVLVPEAPAPVVSTAG

SEQ ID NO: 319329 - protein, 432 aa, unidentified
MERIRENAAGLDIGARKVFVSIEGKEVKCFFTFTEDFEKLRDYLLENAIETVAMEATGVYWNILYEILEEAGLDVWLVDGSQTKQVPGRKTDVKDCQWIQQLHSYGLLNRCFVADSDIKELRSYQRLREDHIRSAAMHINHMQKALTEMNIRLAEVLNQIHGASGLAIIEAILKGERNKEKLLSLCNVRIIKNKKDEVLKSLNGRYTKSGLFALKQAFDSYYFYQSLIKQCDTMLGEVLKRISNGKSDQTISSDRKAIRHHKPDIDNLGTLMLKIFDGRDATALSGITDYTWMQLLSESGTDLSRWESEKHYTSWLGLAPGQNTSGKMKKNKRKSGRPKAGQIFRQIAQSLISSKHIALGAFGRRLRSRKGSPIAIKAVARKLAIMYWRIMVKGVDFVEKGIQNYETQLLAQKQRSFLRLAKELKMQVVNNV

SEQ ID NO: 319330 - protein, 482 aa, unidentified
MVRRLVGIDLGIASSHTVRVLDETGAQVCRRRCEPTMASLTRIEDAASRGAPPGTVLEVVLEPTGPAWLPVAVFFASRGHLVFRVSSAKSADLRRFLSKHAKSNGIDAETLARLPLIAPGGLLPLELADAEHAALDRRVRACDRLTRAASEHKTRIKDLVRQLLPLTPLTQDLGVGDLAVLERWADPRALLKAGPARLTSLIVKASHNHHGAERAEAWRHAAATAVELYGDHPAIAWADLAAEVVTEVRLLKAIQAELVVHAARREEAYRWADHGQLARSLPGIAEVGGPVLAAAIGRAGRFPTGAQFKSYAGLAPRASETGNTDRKGQPMSKAGSSLLRATFFRAADTARKQDPQLAKIYYTQIVECGANHVKALCVVAAHLAERAWAVMARGMPYVVCDINGEPVTAGAAKTIIAQQWTVPPLVRARRRSTKTTKAGKAPQRVRAGQVQPGYEGASDRGDLPHHRSSNTTLEQVKEPVPS

SEQ ID NO: 319331 - protein, 353 aa, unidentified
MHTHQQSTEPVATIGLDIGKNTFHLVGLDRRGAIAMRIKVSRSQLVHRLVNLPPCLIGLEAGSGSHHIARQIHSLGYDVRLIPAQYVKPFLKGHKNDYRDAEAIAEAVQRPTMNFVAIKTPEQSDLLSLHRVRSRLVRQRTAIINQIRGFLIERGITVRQGPGPLRKVLPEVLSSPPEALSPRLLHLISELDQDWRHLDDRLEVLSGEIESLSENDAACQRLMTVPGIGPIISSAVVAAIGTGSGFKQGRDFAAWLGLVPKQESTGDRTKLGRISKRGNKYLRTLFVQAAHVVLERRPAAAMRALWPWIAQASKRLAHRNLLAIALANKLARIAWAVLARGRDYEPRITPNAP

SEQ ID NO: 319332 - protein, 346 aa, unidentified
MILIGCDYHPSWQQVCWLNMASGETNNEKLVHASGDAEKFYRRLTVPVRVGIEATGNCQWFLELLGKLGHEVWVGDAAKIRACDPRQQKHDPRDARLLLQLLVENRFPRIWTPSSEEKDLRQLLLHRYKLVRMRVQVKNELQHLAMNKGITKGRRLWSAAGEKVLCELPLAPWASRRREDLFKLRSMLNEQVAALDEAVKKVAEQNDRARLLMTQPGVGPITSMAFVLTMGDVSRFPRGKQVASYLGLIPREYSSGGHQRFGSISKQGNRFMRMLLVEAAQCVVRYDAGFRNEYLHRCHRKPRGVAKVAAARKLAVRLYWMLRTNTAYPEIAHVGSSSRVPLGGAS

SEQ ID NO: 319333 - protein, 336 aa, unidentified
MSKITVGLDVGDRFSQVCAIDAEGVVLQESRVATTRAALRERLPGQPSCRVILETGPHAGWISRELSAVGHEVLVANGRKLRWLYANEHKTDRVDAQYLARVGRWDPTLLSPIRVRSASADGALRLLRARASLVRARTRLINHVRGAVKSVGCQLPAADATSFARRMAPRLPPELNEALQPLLTQLIASYDRQVDQLATRYPETSRLRQVTGVGALTALAFVLTIDDPARFRNGRAVGAYFGLTPRRADSGAQRPQLGITKCGDGLVRQLLVQAAHYILGPFGPDCRLRRWGLALSERGGKSAKKRAIIAVARKLAALLFSLWIHQSDYEAEPLEQ

SEQ ID NO: 319334 - protein, 344 aa, unidentified
MEHFAGLDVSVNETSICIVDDAGSIVREAKIASEPDALLQALCNPIYRFKRIGLEAGPLSQWLYNALGEAGLPVICVETRHMRAVLKAQINKTDRNDARGIAQMMRAGLYRPVHVKTLRSQKLRTLLTHRKLLQSKAIAIENDLRGTLRNFGLKVGVVGVAKFEARIKELVENFADLAALVEPLLIVRRALRQQLGILHRRLLTIVRDDQVCRRLMTIPGVGPVVALTYRATVDVPARFHNSRAAGAVFGLTPCKHQSGESDYTGGISRCGDEMMRVMLYEAAQILLTRAAKWSWLKAWAMAIARRRGMKKAIVALARRLAVIMHRIWVDGTEFRWTRQQTAAA

SEQ ID NO: 319335 - protein, 392 aa, unidentified
MRISVGIDIAKEIHWVTAIDADGAVQIDRKLPNTPADIATLSDELTALRGTVRIGLDVIGGIAGLAQAMLAEAGFALVHVPGIAVNRARQGTVGGENKSDPRDARTIADQVRTRPDLRPIEPATELDLEIRLLVSRRGDIVQAQTQRLSRMRDLLVGVFPGLEACLDLKTKGPLHLLTKFVTPAELRAVGKKRLVRHLQAAGGLPKVEDLADLVLTVATEQTVAVPAERMTARLIRELAYEALASRARLIELDRELETLLQRHPDAALIRSLPGMGAVLTAEFIAEAGSLSRFRSADALASAAGMAPVLRQSGRTRFLRRPNGGNKGLKRVFYQSAFCSLNHDDSRAFYERKRREGKRHHQAVIALARRRVNVLWAVLNSRTPFQTGFKAAP

SEQ ID NO: 319336 - protein, 340 aa, unidentified
MNEITTIGLDLAKHVFQVHGVDASGVTVVRKRLRRSEVLAFFTRLPRCLIGLEACATAHYWARELQAIGHEVRLMPAQYVKAYVKRNKNDAADAEAICEAVQRPTMRFVPVKTAEQQAALLLHRGRERLVRQRTALVNALRAHLAEYGVIAPLGLRNVARLIAIVRDEIDTRLPAPARQVLEVLATQVEQLEAAVAALEKQLMAWHKANPVSQRLATIPGIGPIIATAVAATVVEASGFRSGREFAAWLGLVPRQHSTGGKARLGGISKRGNRYLRRLLINGASANLLRSKATNADPWVIGLRRRRPSLVVAVALANKTARIAWAVMHRQENYQRMAAAA

SEQ ID NO: 319337 - protein, 422 aa, unidentified
MLGIGIDFAEEFHLVALGRPGEGVVEVVRVDHTPAALEALVTRIGVLEPDPAEVRVVLETNHGALVERLLDAGYVVVPVNPDLVARRRGPARKKDDATDARIACLLALDRHASLRPLIPHGELAAELRAIARDDERAARDERRLLNRLRTDLIATFPAALAIAGDDLGAPTMLRLLARWPTVGELTGAGRDELVAFARSAHHGWPERFADRVETALESEQFVARDYLVRAKAATIRLAADQLLLLGAQRRAWERRMGEILLGAPRRGRAHEPRADELDERFPGGEIYLSFPGLGDRLAARVAAEIGDHPEMFASPNGLQCYAGKAPVTRRSGKSEFVVSTRLACNGHLRDAVQQWAFCSLLYSGWAREFYDGQLAKGKRHHAALRALGNRWLEVLWHCLIRGVRYDEATHVANRNRALQRAA

SEQ ID NO: 319338 - protein, 409 aa, unidentified
MERLLERCAGLDVHKKTVAACVRVPGPGGKRGQHVHTFGTTAADLLALGDWLAAHEVTHVAMESTGVYWKPVYAVLEERFTCVVVNAAHVKQVPGRKTDVADCAWIAQLMEHGLVRGSFVPPRPIRDLRDLTRYRTTLTHERVRHANRLHKVLEDAGIKLATVASDILGVSGRAMLSALVAGTTDPAILAELARGRLRTKLPALRAALAGRFRGHHAFLVSQMLGHLDYLDEAIATVTTQIEEVLRPFAAVVTRLDTIPGISRRVAEVVVAEIGTDMTAFPSARHLASWAALCPGHHESAGRQKSGRTRKGNRWLRAALVQAALGAIGTRDCALGARYRRLVRHTGHNKAVVAVAHALLVTIYHVVARETAYTEQGAAYFDARHAERVTQRAVRALERQGFRVVLERAA

SEQ ID NO: 319339 - protein, 352 aa, unidentified
MPMLAECIDAVIGVDTHRDTHHAEIAHPSGAVIAACSIPSTSVGYAQLLAWARGHAPGPRLVISIEGTRSYGAGLARAATAAGLIVTECEQPTRKTRRGKGKSDPIDAHLAVLAALQLDTAKLAIPRADGDREALRILLCARAELTTTATGQANRLRALLRDGDDHDRDLARGRLTSTTLAALARRRLPAAASRAQAVRHREIRRLVQALRDATRALKDNNAELDAIVSDLAPGLTSRPGIGPVTAAQAIVSFSHPGRCRHDAAFARLAGTSPLEASSGQTTRHRLNRGGDRALNKAIHIIATTRMRSDPTTRAYITRRRAQGKSDREIRRCLKRYITRQLYRALTAAMPPA

SEQ ID NO: 319340 - protein, 325 aa, unidentified
MKLQTHYTGIDISKLFFDVAFEEGGKYQHYQFSNDQAGFNSLLDLLNKDCHVVMEASGPYYLQLACYLHGKGIAVSVINPLVIRRFSQMRMSRAKTDKKDARMIAEYGKTEHPLLWAPPLQHEVSLQQMEALLFSLNKEHTALSNQKGGFQSSGMLSPQLEKIICKELAHKEALIDKITAEMQALAEEHYSDMLKNLESIPGLGKKTAMMLVVITGGFKKFDDYRKLSSYFGLCPRIFESGTSVRGKARICKMGMSRIRAMLYLCSWSAKRYNKACRELYERILGKGKAKKVALIAVANKLLKQAFAIATKETYYNENYFKNICF

SEQ ID NO: 319341 - protein, 420 aa, unidentified
MRKIKAKRTKGVNGKTLIVAVDIGMVTHTGYYRCPDGTDVRAFEFFNNGRGFQTFWERISQAMRTHDLKDVVVGFESTGPYAEPLVHYLRKRPVRLVQVNPMHTKRLKELQGNSPNKTDRKDPKVIADIIELGHALTLVVPEGAAAELRRLTQARERESQRRTALFNQLQHLVFIVFPEFLQEMKDIKTKSAQYLLKHHPTPPSIVESGVQALSLILRKISRGQLGIERAQALVEAARGSVGIQQGGEGIRYEIKHIVDVIETSERFIADVEQKMSDHLKQIPYSRSILSIKGIGEVTAAGLIGEVGDFHQFRTISEINKLAGLDLFEISSGAHKGKRRISKRGRPLIRKLLFFAALNVVRRDGILHEPYQKYLQRGMLKMKALVAIARRLLGIIFALVRNHSEYVKGYTQTQNLLKEAA

SEQ ID NO: 319342 - protein, 473 aa, unidentified
MEQRNAVGIDPDAQGFVCAYVKRSEAKIATKGYMATDPDLKSFLKWVKGEGDVVVAIEGSNGMSKPLENVLREAGVIFYSFKPADTDKFRKAVLGQNKTNSKDAESVARYAMALEAQGKLEQYRRVWFVDMELQLLTRRHRSLTEQLTAEVNRLWKLLRYASADLYLALGGKNPEVQCGTKALKNKGILNLLISSPDVGQWKDLSDEQMREAMGGEDYKGRRELVQELRKVVGSFQPISESLAFLLRTSAQHIQKLKEEQQDIERMLEKVTAENAAVQALRQMKGIGTNTAAKMIAEIIDIRRFAREDSLACYAGLGMREHSTGQTTNMVPTRLFNHRLKDAFMTAARNVVYYNPESHIAGYYKNLVKAGMSPLAATKRVARALIRVIYRRLSALIAGTSDAPTTEAEEHQKGGESDMASGSTRRGQSHISDKSLSSPDNNRARGVSRVKRGVTSTRTKKSLGRSKTISEKNA

SEQ ID NO: 319343 - protein, 373 aa, unidentified
MPKYSTAFGMDVHLRSTTVCALDADTGEAVTRRFPGNPWGEIAGWMDGFPGPSLAAYESGYLGFAPQRELAGLGVECVVAAVSKIPRSAADSASKNDRNDAARMAKAILAHDISPVWVPSPEVEGIRDLAGAYDGATARLATARQRLLAFLARRGFVYGGTTPAGNPRKYWTYDFLRWLDKVRPEDDGGVRALAALRNEVEAAAEARADLLSEYRAAVDAGPIAAEVAALQSIKGCAFALAAAFSAEVGDFTRFRSGRQVTAYFGLAPSQRSSGGSVRLGGISGAGNALVRKLAVEGSWCYAAARHQPKLMPRDTGVPLEIRMHGRKGSERLLRRREEMLARGMPAAKANAATAAELVRWLWALGMMCREGAE

SEQ ID NO: 319344 - protein, 333 aa, unidentified
MYAAIDIHKQVFQAAVLDAVSGELVEARFAATREALGNWAARWQGKLTDVAIEATCGWRWVHRELEPRGFTVQLAEPARARALKGNTRQPKTDRLDARWLAQLLAKKMLPESWLPPKDIERLRDLTRLRQSLRHDRTRWAQRLHAVLQHEGWPCARRSLLSPTGQRWLAALALDAGVRRLVDAHQAMIGAIEEQLAQIDRELRTLARSDPRLVALQALYGIGPVIASYLLAEIGEARRFRRSRQLVHAAGLDPVVLESGDSHRRGHLSKQGSPHLRWALMQAAQQAARRDRSPDHARYVAVQKRIGAQRAALTTARKIARRAYHVLAALEDAA

SEQ ID NO: 319345 - protein, 421 aa, unidentified
MDKERKWFVGIDWGSQEHVVSLCDEGGSKIGQRKFPHGGTGLTDMIDWLLKATGGEPGEVHVAIETPHGPIVEALLERGFNVYSINPKQLDRFRDRFTVAGAKDDSRDADVLADSLRTDMRAFRKLSIADPVIVELREWSRIDEELKVEHGRLTNRFKHQLWRYYPQMLELADDVGANWFLDLFEAVPTPEKTAKVREKTIARILKDNRIRRFDAAHVLSELRKPALAVAPGTIEAATARIRGLIERIRLINGQLTEAGQQLDRLCKQLSEPLANEDGETTPGQKTEQRDAAILDSLPGVARTILATLLAEATDTLQRKDYHALRAVCGSAPVTRRSGKSCRVVRRYACNRRLANAAYHWGQNAIQRDPTSRAKYDALRAKGHGHARALRSVVDRLLNVACAMLKSGTLFDPEFAGKRTTG

SEQ ID NO: 319346 - protein, 396 aa, unidentified
MAVMIGVDPHKGSHTAVAMGAAGEPLDELRVGASAGQAQQLLAWAAAWPERTWAIEGAAGLGHLLAQQLVAAGERVLDVPPKLGARVRLLAAGAVNKNDRNDARSFAVAALRSASQREVKADDHAAVLKVWAKRHRDLGRTRTQVACRLHAVLCELIPGGVLKRITAAHAAGLLEHITPSGAVEAARCELATAFIEDLRRTGAQMRDAKNKLTAAVRASSTTVTEVFGAGPVVAATVIGAVRDVSRFADRDHFAAYNGSAPIEVSSGPRKIYRLSRRGNRRPSHAIHMAAVTQISHRHSDGRAYYERKLAEGKTPKEALRSLKRRVSDAIFARLQAGAHRAAARLTPKEPGRATGERLNRQRGRLTPPPPALRPSHSRARHHLTTRSPTLDPEGAS

SEQ ID NO: 319347 - protein, 346 aa, unidentified
MNATTVAVDLAKNVFEVAVADGHWKVIERARLTRPQFERWFQNRDVGLVVMEACGSAHYWGRVLRARGIEVRLLPAQYVRAYVKRNKTDAADAAALLEAARSSDIKPVAVKSVEQLALQALHRTRSAWMAGRTARINMLRGFCREFGLEVPVGAVRGLAQIARFVADDHCAIPTVLRTPMRLVLEEIRLMEARIESLERELAEIARQSEACRVLASVPGIGLLTSTAMVAAVADPRSFASARRYSSFFGLTPREFSSGASRYLGRISKRGNRYIRMLLTHGARSVLRAATLARRMGRSVDRLRAWALAVQDRTNHNKATCALANKLARIAWAVWVKHEKYQTTAAV

SEQ ID NO: 319348 - protein, 356 aa, unidentified
MINISKLDFSGQHLYVGMDVHKKSWSICILTKQFEHKTFTQPPDPSVLANYLYRNFPGAAYHAVYEAGYSGFWIHDQLREKGIECIVVNPADVPTKDKERAGKTNKVDCRKLARSHRNGELVGIYVPTRIKIEDRSLLRTRQSMVKKQTRCKNQIKSMLAFYGIHLPADIVYRNWASKFIKWLEAIRMEKASGNVSFMVHLQELHHIRGIIVELNRNIRSLSRTDEYRVNAQLLKKVSGISILTAMTFLTELCNIDRFGSLDKLASYVGLIPNTDSSGEKDTTTGITHRRNQLLRHLIIESAWIAVRKDPALLMAFERLCKNMPRTRAIVRIARKLLNRIRYVLKNQKEYVPAVIQ

SEQ ID NO: 319349 - protein, 310 aa, unidentified
MERIFVGLDVSKDRLDVHVRPTDDSFAVAYDEEGLAMLVSRLGLLQPTLIVLEATGGYEVKVAAVLANAGLPVAVVNPRQIRDFARATGQLAKTDALDARVTAWFAETVQPAARPLATEQAQVLGELVARRRQLVEMVGAEMNRRRQVRDRGLQTRITAHVTWLTRAIEELEGDIQRLIRSSPVWRETEDLLTSAPGIGDITAHALIAELPELGQLNRRRIAARVGIAPFNRDSGLWRGRRMIRGGRPAVRRALYMATMVAIRHNPPITDVYRRLTRAGRPKKVAIIAAMRKLVTILNAMLRDQRRWRPA

SEQ ID NO: 319350 - protein, 430 aa, unidentified
MAPIRGKCIMHEERRWIVGIDWASQEHVVTLCDSQGKKIGERKFAHGGTGISDMMSWLLKASGGEPGDIHVAIETPHGPIVEALLERGFNVYSINPKQLDRFRDRFTVAGAKDDSLDAYVLADSLRTDMQLFRKLTVADPLIVELREWSRIDEELKVERVRLANRLRDQLWRYYPQMLELGDLDEDWMLDLWETAPTPDKAARASKAAITRVLKKHRIRRFDAAHVLSELRKPALSVAQGTTAAATAHIRTVIERLRLVNRQLVDAELQLERLCKKLAEPISGDDGESVPGHWQEHRDVTILDSLPGVGRTVLATMLAEAPDALQRRDYHALRTMCASAPVTRRSGKSCIVTRRRACNRRLSNAAFNWGGVAVQHDPVSKAKYEALRARGHSHARALRSVIDRLLYVACAMLERGTLFDPSFAETKSAAA

SEQ ID NO: 319351 - protein, 400 aa, unidentified
MNSVGIDISKGRSTVAVMRPFGEVVISPFEVRHTDSELSELARQLKSLDGETRVVMEATGNYHAPVAKLLHDARLYVSVVNAKLVHGYGNNDLRRVKTDRKDAVKLANYGLDRWLTLPRYVPEEDTRLLLKNCYRQYRQYSKVQTVLKNNLISLLDTVFPNANRLFSSPIRGDGSEKWVDFVAEFWHCRCVSEKSERAFTSKYLRWCRKHGYNFREAKAHTIYAEASGHIGVMPKSETTKLLVEQAVAQLRATSTALAALKHEMQSLASQLPEYPVVMDLFGVGPTLGPQLIAEIGDVRRFYSKKALVAYAGLDAPPNDSGDVTGRHKSMSKIGASSLRRTLFLVMSVYAPLDEPVYQFMDRKRAEGKPYRVYMMASANKFLRIYYATVKAYLESLEHTV

SEQ ID NO: 319352 - protein, 454 aa, unidentified
MKTTKRSTTSSARNKPASQLESEPQPASPKSSRSYVLRSMPAAKKNSVVSANTVLPEPATRKSLPRRRPAATQATAKPSTPAVPTPASGNTIGIDLGDKKHTFCVLDTQGKVLEESVCANTREALQKLSTSYPAARIIVEVGMQSPWISRYLQGLGHEVFVANARKVRAIYQNERKSDAVDARMLARIGRMDPSLLHPISHRCETHQRHLLQIKLRDTLVRQRVNVITSVRFILKSLGLRLASPGTSTFAKYAREHLKEKEAGVLSIIEPTLLVLDTLNAQIRELDRQIETLCEESYPTTQRLRQIPGVGPITSLAFVLIVGDPARFKQARDVGPYLGLVPKRDQSGALDKQLAISKTGDAYLRTLLVGAAQYILGPFGPPSDLREHGLHLAARGGRGAKNKAVVAVARKLAVLMHALWSSESDYQPVRPRPKNAEPASATPAMRTSDEVVLSA

SEQ ID NO: 319353 - protein, 347 aa, unidentified
MNYIGVDCHISSLDFAVVNERGTTTKRQRVNTGVKELIGFIKSIPKPRKVIIEGGALANWLLETCTGYGEKLIVTDPKKNRWIGRAGTKNDAVDAEKLAQLARGGYIKEIHHPIGGRRRFRELVLSYHDTVKSQTRIKNKLKAKFRENGIRCLGKTVYCAPYRKEWKQRLPKDKVVHIIIGGLWRQLDQVEEVREEILGQIRKQSRGYSEIKRFKEIPGIGTIHAATVSAIVENPHRFANKKKLWMYAGLGLAERESGGKVYSRKLTRNYNRHLKNAIKQATEAAIIAKDNQFRRQYLRLTIEKGIASHRAKLTVARSILAALYGIWKSGEAYDPDIDKGRPEADKT

SEQ ID NO: 319354 - protein, 340 aa, unidentified
MSRPNALGIDVAKDTLVIYDTQTGKHETVSNAEAAINRSCVAHKWSPSEYIVGLESTGDYSLLVMKVLTALGFTIRLLNPILTQAGIKRTVRGIKTDATDSELIAELALKGEGYEVTETSLNIEKKSTTRIEQQLTLIGSNLKKIHNSINKKQESGVSMEAAEDIITELIEQVEEAKTKLWKAIASPELQNHLNLQEKIIASHVGCGVKLSTIISEEAGDIKRFESAGSLVAYAGIDPKVIQSGEMDVRGRMTKRGNSNLRHALYLAANIARIHDPELKQYFEKKRKEGKHFTVAVCAVARKMCERIYSTVTHDRMYEKREVVKEPAYASSSTGNLLTGI

SEQ ID NO: 319355 - protein, 433 aa, unidentified
MNTPHPYDLVIGLDRSDKKADLHLITTGTGQRRSVTIDTAPEALWEWLLELRQQHPQARVALCLEQPAVHLIAFLEAYEWITLYPINPITLQKFREAFVTSRAKDDAKDALYLAELLLTHHHQLQPWAPEDSATRAVQQLVFHRRAVVDERTGLTNRLIALLKQYFPQALVLCGEDLWRPLATRFLLKWSSLQAVQKAKTATLTQFYYLNGSRSAKLLEQRLALIQKAVPVTDETALIESFALRVQLIGRQLQLVQQTIRHYDQQIAQAYAAHPDREIFASLPGAGPVLGPRLLASMGSQRERFGTAADLQHYTGVAPVTKRSGGSCYIHRRYLCPKFHKQSFHEYAKESILWSRWAAAYYLQQRTKGCPHHTAVRALAFKWQRVIWRCWQSRTVYREETYEGALRKSGSPLVALFDRVELGKSPFKKPVKKS

SEQ ID NO: 319356 - protein, 407 aa, unidentified
MQMTCGVDWAEAHHDVALVDEDGALVARSRIDTGATGFSMLLTLIAEHGGSVGDTPIAIETDKNLLVVALAEAGFAVYPINPRAVARYRERHGQAGGKSDPGDAAVLAHILRTDLPMHRRLPDVSEQGRAVKALARQHQEAIWALHQTVSRLRSVLLEFYPQALQTFPNLKHRAALTVLAAVLTPAAATKLTRGRVVTLLKRSGRGNHPALVDQILADLRAPALRQPPRVEAAYGHTVRGLIEAVVAMQHAVEDLAAELALEFDAHPQAAILRSVPGLGPILAARVLGEIGDDPTRFTDPNNLRAYAGTAPVTIASGRSHYVKARKVRNKRLGDACHWWAFAMITKSAGAREHYDKRRAAGDHHNAALRNLANKLLGRLWWCLANNQLWDDNAAWPHRIEQEKSAAA

SEQ ID NO: 319357 - protein, 373 aa, unidentified
MIVFGADTHKTSHTISAIDELGKILGSITIENNLSGYQKMYEWFLTFDSDNKIVGSENTGSYGKHFAQFLLNKGIIVFEVTPRLTAKNRNRILKNEKNDYLDSIAIAMSVLREKDKLHQVQLENTISNQLKELSRFRKKLTQTRTKQINQLHKALLKLDTEYKENTGDLGTDISIERITNCYLKSKSKKYTVIENIYRQEIKSLINNLKSTEKEIKIYEKKINEIMKKENSTITTIPGIKTLRGASILGELGDISNIKSAAQIANKAGICPKENSSSKNNYKMVNPGGDRYLNSDIHELAIFLIGFDEISKAYYNKKKSEGMTSKMAIRCLMRRLCDIIYAIIKKNIPYKRPDNLLNIQTKIQPKLKLRKAVS

SEQ ID NO: 319358 - protein, 353 aa, unidentified
MSEFKRIAIDTSKSVFTLHGVGADERPLLRKTLSRSALLPFLSRLAPTEIALEACGSAHHWARQVQALGHAPRLIPPQYVKPFVKRGKNDRNDAEAISEAASRPGMRSVPVKTTERQAQTCTLGVRDLLVRQRTQLVNALRGHAAEFGAVAPRSVAGLATLKTALRDTDLPAEARETFDFLIRQIERLDQEIKILDARLTAQHKANPVTRMLAGIPGIGPIGALTLAARVDPAQFASGRHLAAWIGLTPQEHSTGGRQQMGGISRAGDERLRQLLVLGATSVIRHVVARQAAAAAGKSVPPGPLGAALEAWLVSLLERRPRKLCAVALANKMARIAWAMMTSGEQYRRRTAAA

SEQ ID NO: 319359 - protein, 400 aa, unidentified
MEQVVPRGWAGVDVGKGHHWVCLNDEAGATLWSSKVVNDESAILQAIAAVLGRAEQVLWAVDITGTAAGLLLALLGAHGQQVRYVPGRTVNRMSGAYRGEAKTDARDAYVIAETVRHRGDLQEVDVPAALVTELRLLVAHRTDLVTDRVRMVNRLRDVLSGYFPALERAFDYAHSRGALTLLTGYQTPAAIRGRGHSRLLAWLAKRKVRSAEQIATDALAAAKAQHTTVPGQDVAASIVADLAAQILAMAARINDLESRIATTFHAHPQAEIIESLPGMGPILGAELIAAAGDLNGYANPGRLASAAGLVPVPRDSGRRTGNMHRPMRYSRKLRRVFYLSAQASMMREGPNRDFYLKKRGEGLKHVQALIALARRRVDVLWALLRDNRAFQTTPPAIRAA

SEQ ID NO: 319360 - protein, 405 aa, unidentified
MYYVGVDIAKEKHYVCILDDTKELACKPFWIYSDILGLRELLKRLAELSLDMNDFIIGIESTGAFSENFYSYITDADYKVILLNSYQTSKYRDFSTLKKIKNDSIDAYVIAELLASAKYKASYISNEDYHNLKVLNRLKKSLDDKIKTIKREISTVVATVNPEIEKVFPNIFTKTAIAIIKAYPTAMDISKATPEKLTKIFRHIKGNSFNLEKAKYLIKLAKSSIYTGRANESRALMIKTNIKILELLNQEKDEVEKQILDLIDNQLDDDSTNIDNVKSIPGVAHKTVTAILGECGDLRRFKSAKAFIGFLGLYPTLYQSGKSSSTGSLAKRGIPIAKHALYMAAVSAVRHNNELHKLFRDKVSSGKSKKEALIIIAKKLASIIYSLFKYNQPYNPNRVLIQHKR

SEQ ID NO: 319361 - protein, 435 aa, unidentified
MQHAHAAGIDVGDASHWMCVDATPDGSDTVREFPAHTPGLRDLVAWLRQCGVTTVALEASGVYGHVLFLTLLEAGFATIVTAPQFTKQIKGRPKTDRRDCQWIQRLHKHGLLPSVFQPDESTHTLRSYVRQRANLVRLSGQHIQRMQKALEQMNLKLTTVLGDITGVTGLKILRAILAGVRDPAVLARLRDRRCKRDEPEIARALDGRYRPEYLCELRSCLTMWEKYQDVIGELDTVIAGQLRTMRRDSSWPPLSAKPRVRGRKPHDPKFDVREALYYVTGVDLTAIEGIDEIHALTLVSELGTDFTKWPTVKHFASWLGLCPNWQKTGGKVKSSRTRKGKNRAATALRLAAWSLMRSQSYLGAYLRRQRSRLGAPKAITATAHKLARIIYNLMRYGLAYMRQSEEAYAEQVRERLEEELRRRTPRTEGGSGRKG

SEQ ID NO: 319362 - protein, 410 aa, unidentified
MIERFFNKIKQCRRIATRYDKLANYLAFIKLASIRIWLRANDGVDAPPTASMCQSGVFEHHLREASVSEVITIGLDIAKHVFHAHGVDERGRTIFSKRISRGKLLDFFAAQPGCTVALEACGGAHHWARQLTELGHEVRLIPPAYVKPFVKRQKNDAIDAEAICEAAQRPNMRFVAVKSEQQQAAGLVFRTRDLLVRQRTQLINAVRGHLTEYGWIAPKGPSHVAELAHLIEEERMVSSLPAAALAMFRLMLDLLASLNGRIAVLDKEIARRAREDEVSRRLMTIPGIGPISATAITALAPPVETFAKGRDFAAWLGLTPLQRSTGGKQKLGATSKMGERTLRRLLIIGSSAVVQQASKRGAPKGSWLEQMLARKPRMLVTVALANKMARIVWALLVKREVYRAPVAASA

SEQ ID NO: 319363 - protein, 401 aa, unidentified
MDAIEHYDAVDVFIGVDVGKGEHHAVALSKAGKRLFDKALPNDEARLRTLISSLKEHGKLLLVVDQPTTIGALPVTVARAEGILVAYLPGLAMRRIADLHTGEAKTDARDAAIIAEAARSMPHALRSIRLDDEQLAELTMLCGFDDDLADQITQTSNRIRGLLTQIHPALERVLGPRLEHPAVLDLLQRHPSPASLAAVSEKSLANKLSKLAPRMGKGLAHEIYLALSEQTVIVPGTNAATIVLPRLAQQLAALRGQRDEIAQEVERLVQAHPLYSVLTSMPGVGVRTAARLLTEVAAKAFASAAHLAAYAGLAPVTRRSGSSIRGEHPSRRGNKVLKRALFLSAFAALRDPVSRAYYARKIGQGKRHNQALIALARRRCDVIYAMMRDGTLYCPASVTTA

SEQ ID NO: 319364 - protein, 392 aa, unidentified
MPYILALDVSMGHSYSVLYKDDTCLFEDEIEHTQRGFHALLEEIQHLPERPLIVFEATGIYSRPVEKFFQDHHFSYCLLNPLEEKKQMEESTLRSWKTDKSDAHRLAQTHLKNQRQPKEVQSNFYLEMRDLARFYQEIEKKITRLRMDLHNCLQLTFPELEQFFSNRLTPYALTLIRLFPHPDFVLASTRTKIKNKLINETRKKISANRAEQKADQIIHYAQCAYPAVEKDSIHCQKTIYYAELLQDLLEQKKALATQMIKKAEGSPCFLLYQTFPGIGALTAALLLGELGDITRFKTHKQLNAFVGIDIRRYHSGKYTGQDRINKRGNPKARKIIFFTIRNMIRQQRAAPNHIVDYYYKLKKQPIPKKDGSIIYGTDESELILQPHFYFRY

SEQ ID NO: 319365 - protein, 341 aa, unidentified
MEQFIGLDVSLKDTFLSVREGGRRIWRGKCPSDPKLIAEVIRKRAPNAERIVFETGPLSVWFYHRLQLEGLPAICVDARHAKAALDMAPNKTDANDADGLAHLAEVGFYREVRVKSFESMLTRTLVAARNQMLRATTQLSNQIRGLMKTFGLVVPKSAGRVFESHVRSLLASNAGLEQIILPVLEAWRSMRARAAELGKQLVASARVSEQCQLLSSIPGVGAVTACSFVAAIEDPENFRNSRSVGAWVGLTTRRYQSGEVDYGGHISRRGDNHLRGLLYEAAVVILTRTTADSALRIWGLKLKEKIGFKRAAVAVARKLAVIMHTMLRTGELFDRSIAAEA

SEQ ID NO: 319366 - protein, 462 aa, unidentified
MKKEKLASTAEKARRKKVDWKALEIVHPHAAGIDVGGREHWVAISPERDEDPVRRFDCFTADLEQMAKWLVEKGVRSVAMQSTGVYWMPVYEVLEQSGLEVYLVNARHTKNLPGRKSDIQECQWLLKLHTFGLLNNSFQPTDEIRVARTLWRHRSNLVAQASSAIQRMQKALTEMNVQIHNVLSDLSGVSGMAILKAILRGERDPWSLAALANPAVKASPADIAKSLYGNWREELLLVLRQEMELYQTYQDKIAECDHQLRRHLQSLAPKVDLQAQPLGPRPKGKKIPRGNAPKFDLRSELYRITGVDWAQVNGMDVQVAQTVITEVGVDLSCFPSEHHFTSWLGLCPMNEQSGSRILNRRTPKVVNRATVAFRLAAQGLLRSQSYLGAQYRRLRTRLGAPKAITAMARKLACLFYRLLRHGQPYVDKGAQYYETRYREQQIRSLVKRARKLGLELVQPETA

SEQ ID NO: 319367 - protein, 316 aa, unidentified
MSSSVAFGIDVSKRQLEMAAHDLDRTWTVDNDAAGHQVLLAACRELTPTLIVLEASGGYEREIVAALSVAGWPVVLANPRQVRDFARSTGQLAKTDRLDAQLLARFAAVVQPTPRPLADAETTELAALLTRRRQLVDMLVAERLRRRQAIAAVHADLTQHIRWLEQRVKRVDHDLDRWIQRSPLWRAKEDLLRSVPGVGPTIARTLLGRLPELGQLSRQQLAALAGLAPFARESGTWRGRRHITGGRREVRHMLYLAAVSAARCNPVLKARFTRLRTAGKPAKVALIAIARQLLSILNAIVRTQQPWAPTLDSQHR

SEQ ID NO: 319368 - protein, 447 aa, unidentified
MEYYLGGDVSKGYCDFIILDKNKSVVEEGFQLDDTQENHLKLYNILKELLNKEPKSKIYAAFESTGGYENNWVKSIQTFQYTLNVQVARLNPYGVSHSSKANMERIITDQISARNVAEYLVNYQNKVKFIEEDDYYSSLRKQWKYISLLKKQKVQYYCQLESIIYSSFPEILTYCKKGMPNWVLELLAKYPTSKKASRARVETLSKIPYITKSKAEEIITKAKNSVASSTDSATELMIQSIVEQIIRLEKLIKKQKKLLIGSVSNQRSPEVKLLTSFKGIAEYSAIGLLIEIGFIERFATCKKLASYFGLHPVFKKSGDGTYAMRMSKKGRSEPRNILYNVALTAIRDNKRIREIYVRHLRKGISKMAALGAIMHKILRMVYGMLKNNEVYNPDKDRKNAEVKTELKIKKIDKTRRFQDFDSKAPISNRQTKKRAKIKEELELNVPK

SEQ ID NO: 319369 - protein, 365 aa, unidentified
MTVSPQWTNRRFAKTLTANKGQKMIYVGMDISSKDFMIYAVNERKKVSFKGSIAPSKLALRKLIDDLGIEKKIFVFEAGNQMKWIADFFKKENQEIHVVHPNEVKWITQSSGKKTDKVDAKKLAELARADMLPRRVVLADGKARDLRELTAARQTLLSKRVSLMNTIRGYLKQEGVRLPAKFFVSNEWQVHLIGLKLRSSTESIVANLMYAVEQMQECEKGLNTEIQSIDDEQIKLIETIPGIGKLSARILFGALISAERFDNSKCVANYGALAPTIHQSGDTNHLGKINRDGRSEVRRAMLQCAHAVARTKTNAVKPLKEFFERIEKRRGKKRAIVALSRKLLTTVYGVMKSGEAYNPGKLVAA

SEQ ID NO: 319370 - protein, 355 aa, unidentified
MSKIKVDFSGQTIYVGMDVHKSSWNLGIHLNDTFIRNVHQKPSPQIMHDYLVQHYPGAKYKAAYEAGKFGYWIQRQLTAFGIECLVVNPADIPKSQKDTLQKTDQRDSRNLGFRLQSGVLRSIHIPDEQQEADRVFFRQRKKILKDLNRCKNRIKSLLAFSGIDIPEKYDNANWCHNLIVWLKELDCKQTSRRRALDYQVAQMEFLRRELLSISNEVRKMMREKRYKDNYYLLRTIPGIGPLTAGSILVEIGDVKRFETFYHLNSFIGFLPMEHSSGQSDLKTNLTVRKHKQLRSDLVESAWVAKRCDPAMSLYYQEQIKKKDSRVVIIKIARKLLSRIRYVLINQQPYEMGVVK

SEQ ID NO: 319371 - protein, 351 aa, unidentified
MKEVITVGLDIAKHVFQVHGVDQDGNAVLKRKLRRVEVVSFFDQLSPCLVGIEACATAHHWARVLINLGHEVRLMPVSYVKPYVKRQKNDATDAEAICEAVTRPTMRFVPVKSEEQQSVLILHRARELLVRQRTMLINALRAHFAELGIVMRQGSAGVGMLIGLIEDEEHDLVPTFTRRALLPLTEQLRELYRQIEHLDHEIIQWHRTSELSRRLETIPGVGPVTASALSATIADASLFKSGRQMAAWLGLVPRQCSSGGKERLGRISKQGDPYVRKLLVVGAHAVLRFSRKDGEGRRKWVADLLARKPHNVVAVALANKMARTAWAMMMSGDRYRSIPAQCRSLGSYRNW

SEQ ID NO: 319372 - protein, 378 aa, unidentified
MKKSFIRYGVGFDIGQKEVAVCFKALDEQEVEKILGTRKFPNTAKGFQELATWIEGKRKDKEIPCRMVMEVTGVYHENLIYFLHEQGYYVSLELGKRVKNYLNSLGYDTKTDKEDAKGIASMALYRKLPLWQPASKEFHKAKQLIRHRSRLVSNRVAYQNQLHAHQTGHHPEPVVGRSIKRHIKQLNKEIKELDQQIAKRMKADVEIWERVKLIVDTLPGVGLLTMAIVLAETDAFSNVYSAKQLTRYAGYDIIEKQSGKFSGKRKISKQGNARLRSAMYMPAMSHVRTVKEGNLLNLYKRLMPRTGGLAKKASTAVQRKLLCLIYSLWKSGQAYDPNHQPISPKKPAAAPQNGGSPATEAGLHGIDQPAAELPAAIT

SEQ ID NO: 319373 - protein, 337 aa, unidentified
MSAISKITDRVVIAIDPHKASWTAAVVDASSQPVATIRVPVSRDGYRALRRFADRWPDPTWAIEGASGLGAPLTAWLRTDGLDVVDVPAKLAARVRMLSTGHGRKNDDADAVSVGIAARSAPRLNSAAVDDTVFSLRGYGDHRDDLVNTRTQTVNRLHVVLTNLIPAGAQRDLTAERAAELLRGIRPRDTAGKTLRGLATDLTSEIRQLDRRIAKAAADIQTAVTASGTALTELCGIGALTAGKILGRVGTIDRFRSAAAFASYTGTAPIDVSSGDVVRHRLSRAGDRQLNLCLHVMALTQIRQDTPGRAYYLRKRTDGKSNKEAMRCLKRRLSDVV

SEQ ID NO: 319374 - protein, 389 aa, unidentified
MYRIIKIGMDVHSKNYTLCAMEPTIGAEDRIFGEVQVAPDYKEVICFIESLKMNLGFYDEYSIECGYEAGCLGYTLYHQLTGAGIKCVILAPTTMLTQQGNRIKTDKRDARLIAQCLSYGGYHPVYIPTGEDDAVKEYLRMRDDHKLALKKLKQQIHAFVLRHGYQYSGTKWTIKHVTWLKKLELDPMYRETLNEYLASYEEQEAKIERYDKRIEEIASERRYQENVKKLGCFLGIRTHTALSLIVETGDFKRFAKGNTYAAFLGLAPGERSSSDNVNRLGISKAGNTHLRCLLIEAAKGICKGAIGHKSKELRARQSGQPAEVIAYADKANTRLRSKYYKMIRHGKKTNVAVAAVARELACFVWGMMTGNISIRPTTAGTSMPAVRQE

SEQ ID NO: 319375 - protein, 433 aa, unidentified
MREAEDEPLFAERAAGIDIAKAGIEVTIRVPSDTRRGGRQQETRSFRTVRKDLLALADWLRCWQVTKAGMESTGDYWKPVYFLLESEGLDCVLYHAAQVKALPGRPKTDKLDSVWLAKITERGALPSSFVPPEEIRRLRTHTRYRRHLTQARTAEKARVEKLLEDAHLKLSSVISDIHGVSGRAMLDAIAAGERNPTTLAQLARGTMRGKIARLEEALDCSFLTGEHAAVLSMMLATIDYYTAQIGELTEKIAVLCQPYEHQIGQLDAVPGTGVITAQDIIAEIGTDMTVFPTPAHLVSWAKWCPQAARSGGKRKGSGASGRGNRYLSAALGEAAISAGRTQTFPGAKYRRLVKRMPKKKALVATGNSLLTIYHALLSDPEAAYTDLGTDYYERRANIRRQARNHLRGLERLGYKVTIESIDPATGELQAAAI

SEQ ID NO: 319376 - protein, 346 aa, unidentified
MEKITVIGLDLAKTIFQVHGANGQGKKVLSKKLKRSEVLHFFATLAPCRVGMEACGGAHEWARQIQSLGHDVKLMAPQYVKAFVQGNKTDARDAAAIAEAAVRDSIPRVTIRSHEEQQIQALHRAREAWVKHRTAIANQMRGLLAEFGQSLSPGMRHLRREIALWQEQSRGMLGILNSLVDESLQYLSELEERISKVEKQIKHVLQSNPACKLIETIPGVGVLTATAIIGSFGRAENFTEGRKFASALGLTPREHSSGGKQILLGLSKRGNGYIRKLLVHGARAVLQSRINKPVYAEDWVVQLAKRRGHNIAVCALAAKNARRIWAMLQTGEVFRTDYVQTKGACT

SEQ ID NO: 319377 - protein, 421 aa, unidentified
MTATRRCIGLDVHRDFAQVAIWQGGQVRQAGTFATTPEGVREFAAGLGPADEVALEATGNTWAIATLLASHAGRVVVSNPAKTRAIAEAKVKTDKVDAEILAQLLAADYLPSVWLPDAETSALRRQVLRRAHIVRQRTRLKNQVHAILARNLVPRCPAADLFGIKGRKWLAAQDLPADERAAAVALLRQLDFHAEELALIDADLGQAALGRPEVLRLMTIPGVDATVALSIVAAVGDFTRFRTPDKLVAYFGLNPRVRQSGGQPASHGRITKAGPAHARGMLAGAAWSASKAPGPLRAFYQRVRARRGMQVAAVATARKLAVLCWHLIIKGEDYAFALPSLIAHKQRKLELRAGAPPARGRKGQAARYSLAAVRAAERDLAAQGEAAYRTMVAAWQPARPERKKVTGAAASTGTRLIKPTG

SEQ ID NO: 319378 - protein, 331 aa, unidentified
MEKKWYVGIDISKLTLDVAIFDLLNDRNEDNHLRISNTDEGFKLLVKWFERKSLALTDILVCMEHTGIYSYLIRVFFEKKCVMYSMQSPLEIKRSLGITRGKNDKIDAFRIAKYCYLHRDFIKPSKMPPEVLLRLQRLSSEKKRYIKQLVGYKQCLTEKDEYESTSAVDRTNKMMKETESIIHEIEKEMEELICADLSIKKNYDLLLSIVGIGMVNAITTIVNTENFTSFQNARQYACYVSVAPFEHSSGSSIHGQTRVSKNGDKQAKADLSQAAKSAATWDKEIKRYFERKKEQGKPYGKIMNAIKFKLIERMFAIINRGTPFVRLQTYA

SEQ ID NO: 319379 - protein, 343 aa, unidentified
MQTMTTIGLDIAKSVFQVHGVDAGGQVIVRRQLKRRYVLTFFQKLSPCLVGIEACGSAHHWSRELQALGHTVRLMPPAYVKPYVKRQKNDATDAEAICEAVTRVNMRFVPTKTAEQQSGLVLHRARHLFVRQQTSVINAIRAHLAEFGIVAPVGRHGVEELLDVVTDPNDKRVPDIARACLSALGDQLQSIKKHVLEFDRLIRAWHRSNEMSMRLEAAPGVGPVLATALVAAVADPKSFRSGRNFSAWIGMVPKQHSSGGKNRLGNISKQGDRYLRGLFVAGALSVIRYAKVHGTKHRPWLTALLARRPTKVAAIALANKIARMVWAMMATGERYKEPVALAR

SEQ ID NO: 319380 - protein, 436 aa, unidentified
MTLINFVAANQKYYAFNLLSVFIMVFWSVQYLLQHLLVQTQVSHQLLQPLILILQLPQTPQFRHARPGKFFLPVNGMDYFLPLRLTVRNVLTRRITMNIVFLGIDLAKNVFQLCGLNQAGKPVYTKRTGRKELLQTLANIPACLIGIEASTGAFYWQREFEKLGHKVKVISPQYVRPFVRGQKNDGNDAQAIAVALMQPTMQFVPPKSPEQQDIQALHRARQRIVNHRTATVCQIRGLLLDRGIPIGSAVSRARRAIPLILEDAENGLSSRMRRTIAELYDLFNDLGRRIHFFDKEIETVFRQSEACPRIAKVKGIGPKTATAVVAAIGKGTEFKNGRHFAAWLGLVPRQHSSGDRQVLMNMTKKGDKHLRTLFIHGARAVVRVATNNNDGHMSQWVNQLKERRGFNKTTVAVANKNARIIWSMLRNDTGYQVVCN

SEQ ID NO: 319381 - protein, 343 aa, unidentified
MKLHVLGIDLGKMVFHLVGLDSTGKMVIRKKCSRTQLLAFTANLQVQLIGMESCSGSHFLGRALREQGHEVRLMPAQYVKPYVQTNKSDFLDAEAIAEAVQRPRMRFVPIKTEEQLDLQALHRVRERWVMRRTAVVNQIRSLLQERGLTLPKGRSYVDRQLPRILEDGELRLSGSFRVLLAQLKLELEQLTARIEEMDRVIQQTAKENEDCQRLTEIPGVGPVTATALVAAVGNASTFRKGRNLSAWMGIVPGEYSTGGKQKLLGISKRGNKYLRTLFIQGARSVLQQRHRQAPGLSSWLAQLLARAHQNVVIVALANKLVRMAWAVLCKNQRYRAPVLAVTA

SEQ ID NO: 319382 - protein, 391 aa, unidentified
MVCVGIDVAKDKHDCCILDSEGTTLVDCFTIPNNMDGFKSLLQTIQDCSQKSDKIKVGLEATGHYSYNILGFLLDNDLPVYVMNPLHTNLYRKSLSLRKTKTDRVDAKTIATMLLSDVDLKSYTDIAYHNEELKSLTRYRFDKVQECAKLKQSVSRLVTILFPELEQLVSSIHGTSIYALLSEYPGAKQISEAHLTRLANILVKTSRGHYRKDKATHIRDAARTSIGSVMPAKSLELKHTIKLIQELTSEINEIEDAIRKIMDELKPPILSIPGMGFHSAAMILAEVGDFSNFNSPDKVLAYAGCSPSTYQSGKLTNCYAHMEKRGSRYLRYALYTATKYVCYWNPVFTEYLTKKQAEGKHYNVALSHATKKLVRLIYALQKSGKAYLAVT

SEQ ID NO: 319383 - protein, 414 aa, unidentified
MTSSLKKFSAYVGLDWASKKHDVCIQTKDSRERKFEIIKHSPEAIDEWLTHLHSEVEGPIAIAVELSSGPIVYALQKYAYVTVFPIHAATLARYRQAMFPSGAKDDPSDAELALDLMLKYPEKIQPLQPSSKASRTLNLLVEQRRMLVEDKRRHVNRLINALKQYYPLPLTMFSHRGSDLFCEFLIKWPTFKQLKRARENTIRMFFGQRGGNAVTNTDKRIHAIESAMALTEDSSIIEPYSLLVVSLCNQIQLLNKSIKAFDSEVESIFKQMPDADIFSSLPGTGPCLAPRLLAAFGEDRNRFLTAQEIQNYAGLSPVTERSGNKEWIHWRWQCAKFIRQTFIEWSAKSVHQSYWAGLYYEKQRAKGKAHQAAVRALAFKWARIVFRCWQTRTPYNETKYLKALRERNSPLLNT

SEQ ID NO: 319384 - protein, 345 aa, unidentified
MECYVGLDVSLKLTAICIVDRTGKIEREGTVPSDPEAIATFVKTHAPHVARVGLETGATATWLWTELNKLGLPVICIDARHAKAALKMQINKSDRNDAVGIARIMQCGWYKEVRVKDLNSHAVKALLVSRALLVKIKRDLENQIRGLLKNLGFVIGRAKMNVFAVRAAELTEHRPELAAAVAPLLNARAAIELQIADLDRKVMRLARNNAQARRFMTAPGVGPITALCFLATIDDPTRFKRSRSVGAYLGLTTRRYASGEIDWTGRISKCGDKMLRSYLYEAANVILTRVARWSALKAWGIRVAKRTGLRKAKVAVARKLAVVLHRMWIDGTEFRWSKEAANQPA

SEQ ID NO: 319385 - protein, 340 aa, unidentified
MFTNFVGIDVSKSKFDLALIKGQDKDHVIQGLFDNTHKGIKSMSKFLEREHKVQLSETIFCMEFTGVYCYPLTDFFVKKDCHVWIEMPVNIIRSLGLQRGKNDRVDAHRIALYAYKNRDDVKLWKPQREAILKLRDLLALRERLIVAQKSLQMPINEKISMGDKKGAEMVRKGCQKSMSSLENEIGQIDKNLDDIIKDDPQLKELFQLATSVPGIGKLTALFMICFTNEFSMYTNPKQLACYCGVAPFEHSSGSSIRGRTRVSHMANKVLKRMLHMGAMSVISRDPELRDYYQRKVAQGKNKMLVINAVRNKIIHRLCAVIKRGYAYQPENIFKERLVLS

SEQ ID NO: 319386 - protein, 355 aa, unidentified
MSQNLDVSPAAIGIDIGKNSFHIVGQNQRGAIVLRQKWSRGQVEARLANLPPCRIGMEACVGAHHLSRTLKALGHDARLMPAKYVRPYSKGQKNDYRDAEAIAEAVQRPTMKFVATKTADQLDLQALHRVRERLVGQRTGIINQIRAFMLERGIAVRQGLRFLRAELPNILATRTDALSPRMLRILEDLSADWRRLDARIEDLSNEIEALARQDKGCERLMTVPGIGPIISSAMVAAIGTGDAFSKGRDFGAWLGLVPKQLSTGDRTILGSISRRGNRYLRTLFVQAAWVVLVKVGPKHWDRYGLKSWIEAAKKRLHHNVLAIALANKLARIAWAVLHKGRAFECVKTNEAYRPA

SEQ ID NO: 319387 - protein, 430 aa, unidentified
MKSNTQNAKIEAITEKTLVLGIDVGSETHYARAFDYRGIEYSKKPFKFSNTEAGFVTFKEWILNLKERHEKDKVVPGMEPTGHYWFNLGKFLQDNEMKPVLVNPHHVKKSKELDDNNPTKNDRKDPKVIAGLVREGRYMIPYLPDGVYADLRTASNIRFQLQAELTRIQNRISRWFNIYFPEYKTVYGKPDAKSGMLILKAAPLPEDILTLGIDGVNQIWRDAKLRAVGKARAKTLIEAAEHSVGSKEGAVSARMEIRMLLEDYESRNTRLQEVMVLIEELIRKIPMAEKLLEIKGVGIRTVSGFLAEVGDISRFNNPKELQKLAGLALVENSSGKHKGETTISRRGRKRLIYLLFEVAMSLVSKNQEFRELHNYYTTRRLNPLKKMQSLMAIAAKLIRVFYAMLTKGVDYDPKKMVSDIKKPAVYLQAA

SEQ ID NO: 319388 - protein, 336 aa, unidentified
MYSGIDLHSNDSVVAIIDDADRIVAQKSVPNDITKIVGFLARWQDDLAGVVVESTYNWYWLVDGLQDAGLHVHLANTAAIKQYDGLKHSGDETDAQHLAHLLRLGILPTGTILPREHRVVRDLARKRMQLVNCRTTHVLAVENIMARQLGERMTSNQIKQLTADTIDSLPLAADVGLAIKANVAVIATLQSQIEVLENRLQERVKPRPQYGLLTSVPGIGQTLATVIFLETGPIDRFADVGNFASYARCVDSVHTSNRKKKGEGNVKNGNRYLAWAFVEAANFARRFCPEAKRFHERKKARTNNIVATKALAHKLARASYHILKEGKPFDATRCFA

SEQ ID NO: 319389 - protein, 428 aa, unidentified
MIKINPLSTLYVGIDVSSKSNYVCALDFYKNKYINSSFANNQPGAEELAQKILECLKEHPDLNTVVAALESTSVYSIHIANYLSSCEELMHMKPYVFVVNPKCMANYKKSFIGLGKSDPIDAFIIADYARGGNIETEPWRGSQFLALKRLTRHRLHLVECMTREKTYLVSNLYLKFSELQMLEGENQPFCDIYGATSSSVLVEYLSPEEIIDSSEEDLVSFLAEKSRNRIKDISKTADLLKKAARDSYRLDKTLYEPLNVSIASSFNCIETFKREIKTIDQAIEREIKGLNPNAFIILQSIDGIGPVFAGGIVAEIGDIAAFSSSDALAKYAGLCWRSNQSGDFDGEDTPMTKAGNRYLRYYLGEAANSMRKHNIEYGEYYRKKYNEVPKHQHKRALALTSRKFVRLVYGLLAKNQLYSGVSLDTSTK

SEQ ID NO: 319390 - protein, 315 aa, unidentified
MTEPAVFVGIDVSKDRLDVAARPGPSWSCRNDPDGIAALAARLAAAPPALIVLEATGGLEAPAAAALAAAGLPVAVVNPRQARDFAKAVGRLAKGDRLDAAVLAHFAEAVRPAPRPLPEAEARALDALLTRRRQLLEMLTMERQRRAGCAAAVRADLEANIAWLAGRLAGLERELAEAIERSPAWRAKDELLRGIPGIGPVTSRTLLAALPELGGLGRRRAAALAGLAPYDDDSGRHRGARHIAGGRADVRSALYMAALAARRHNPVLKAFAERLRAAGKRPKVVLVAVARRLVVIADAILRSGRPWDPALAMPA

SEQ ID NO: 319391 - protein, 371 aa, unidentified
MLIIGCDYHPSFQQIAFVDRETGECGERKLTHKEEAESFYRDLNGRSVRVGMEATGHARWFERLLAEQNFELWIGDPAEIRAKRVRKQKNDRQDAEHLLQLLVEDRFPQIWVPSPENRDLRQLLWHRHRLVQMRTRVKNQVQAIALNEGIRRKKGLWSKLGRVQLESLSLAPWSARRRQDLLELLDRLNPKIDELSTAIQQAAEQRPEVQRLMTHPGVGPITALAFVLILGVPERFQCGKQVGSYLGLIPCEESTGGRQRLGHISKQGNTLLRFLLIESAHAVVRYDPDWRRRFLHLAMRRGRPIAKVAMARRLAVRLYWMWRKAWDYQQTLKFGSQGRKLSSSYCSSDHGFDLVAEATEFADHSICAVSS

SEQ ID NO: 319392 - protein, 474 aa, unidentified
MNVKGKNKKNQVVVANIFEQQELIAKAEVIKTQLMASTWHELETNGKFDKNDKLSFITDDMLILGCDIGSEMHYIRAIDIRGRELSKSAFAFENHSEGFQSALDWATKIAAINEKTQIVMGLEPTGHYWFCLATWMIAKGVSVVQVNPYAVKQTKEIEDNSQLKDDRKDPKLIANLVKDGNFGMPYLPEGIYADMRRLTMFRDQLTEDRIRCLNRLHREMKIYFPEYKDAFGKVDGVFCLEILKVAPFPEDLLKLGVKGIEQVWHDAKLRGRGYNRAVTINGFAEKSVGLKDGANASKVAVKWFVERIVELDKQLSDIEEELKQKCKEIPYATNILEISGVGEHILSGILAEMGDISRFDDVKEVQKLAGMGLVACSSGKHEGKTKISHRGRKRLRYWLFQAAKSVVAHAAEFKELHTYYTTRPDNPLKKMQSLIVIACKILRVIYAILNKGGTYDPNKLLTDIKRPKQITQAA

SEQ ID NO: 319393 - protein, 431 aa, unidentified
MPPTAGPTPLFPLAALIGIDWADQHHDVALQVAGTVTVEHSRLTHEPNALAAWLTGLAQRFAGQRVGIALETSRGPLVHALLEAPFVVLYPVNPRSLQCFRETFTPSGAKDDAPDARLLLELLVKHRDQLAPWVPADAATRTLRALVERRRTAVELRTQLTLQLQATLKDYFPQALTWAGTDLTSPLACAFLTQWPTLAALQRARPSAVRRFYLTHRCRRPALIATRLAEIATATPLTHDPTIVEPNALFVQLLARQLAALGPSLAALDAEIAACFAAHPDAELFRALPGAGAALAPRLLVAFGTDRTRFPSAADVQQCAGIAPVTVRSGRSCQVHWRWSVSTFLRQTFHEFAHHSILHTPWARAFYHAQRARGKTHHVAVRALAFKWIRILWRCWQDHTPYDDARYTRALILRGSPIAAHLQLAATEAAA

SEQ ID NO: 319394 - protein, 320 aa, unidentified
MSSESAPVPACSIIYLGMDVHKESITIAVLPVGAKVPTRLERLPNDLPKLKKWIDRVARDGEIRACYEASGAGYVLHRALQEWGYPCHVIAPSLIPKRSGVQRKHDKRDATDLARLYRAGELVAVRIPSEADERVRDVVRCRETFQREILKSRHYILKFLARRAFVFRDGTNWCTPHRHWLQHLTTDSSPLAAHDRLVFREYHALLMYKLQRRDELDHQIDELALLPALAPMVGRLQCFRGISLHSAMVLATEIVDWRRFERPAQLACHLGLVSREDSSGDRARLGSITKAGNSHCRHVLVQAAWRYRHRPQTSVDLTSI

SEQ ID NO: 319395 - protein, 322 aa, unidentified
MNKFSNIHDNRPCIGIDTGKDQLDIYADLTQQLFTCDNRPKDLRRLAKELKEMNPRLIVLEASGGYERAAVTAFSELSLPVAVVYPKRVRQFARGLGIIAKTDKVDARVIAYYARVADPAPTPPRTDELSALEALTSRRAQLIEMRLSEQNRIELAHPSIQKEIKQHVAWIERQISKTDAEIERRIRESNTWRQTDELLRSVPGVGPVLSSTLITDMPELGSLTSKEVAALAGVAPFPRESGRWKGKRICQGGRYYVRRVLYMATIAATRFNPVIKNLYDRLCQRGKPKKLAIIACARKLLVILNAMTKNNSPWSPKTFVTG

SEQ ID NO: 319396 - protein, 415 aa, unidentified
MDASTTAEFAAFVGIDWGDRKHDVCLQAGGSTKREFSVLPHRPEVIDQWADALRQRFGGRAIAVCLEISKGPLVSVLQRYAFLVLFPVNPTTLAKYREAFHVSGAKDDPSDAQLALDLLLTHPERLAQLHPYSAAMRTLQLLVEQRRALVQDVGRLTNRISATLKQYFPQTLEWFKDKDTLVFCDFLTRWPTLKHAQRARQARLRAFFQEHNVRYPHIIEQRIRAILSATALTADRAVIEPNRLLVEALVPQLRVLLHAVERFDRQIDVLAPTLPDFAVFASFPGAGPVFTPRLVAAFGERRERYANAGEIQMYSGIAPVTERSGNKCWVHWRLQCPKFLRQTFVEFAALSIPHCYWAKAYYEQQREKGSSHQAALRSLAYKWIRIMYRCWQNRTQYDEATYLNALKSHGSPLLN

SEQ ID NO: 319397 - protein, 327 aa, unidentified
MDAIIGIDVSKAKLDCLWLRDSQTLKVKTKVIENSPAGHQRLSQWVQQQTGRSVTDCCFVMEATGVYHEALAYFLHDAGAKVCVVNPAQVRDFAKSLGGRTKTDKKDSMVLARFAVSHGPRAWQPEAPEIRTLKALLARLEALEKDIQREQNRLEKAEVSQASEDVIESIQLMLQVLQAERKRLEKMIDTHLDNHPDLKSDRGLLESIPGIGPVLSRLMLAVIHSRTFESARQCAAYLGLNPCIWESGSSVKGRPQLSKAGSSAIRAKLYMGAIVASTWNPDIRAHYERLLERGKCKMSALGAAMRKLVHICFGVLKQQTKYVPQVA

SEQ ID NO: 319398 - protein, 426 aa, unidentified
MNYKQNEKILQVTEKTLVVGVDIAKETQFCRAFNYRGIELGKVYSFSNDRFGFDNFKEWSEYLMKQNGLDKLIIGMEPTGHYWWNLGEYCRDNTMKIVLVNPFHVKRSKELDDNSPTKNDRKDPKTIAKLVIDGRFVETYMPTGIYAELRGAVRMYDHVIGCKSVVENKILQWLDNYFPEFTDVFGNWDCKSGMITLREFPLPSMIVDFGEVKVLEIWKKELKQGVGKKRAQKLVEAAKRTVGSKEAHKMGVKELQYLINEYDVYVKQIDEIKIEMESLLKQIPGAKEALKIKGMGFVTVAGIIAEIGDISRFQDARQIQKYAGLNLVETSSGKHKGETTISKRGRKRLRMILFRVMMPMVANNAEFKQLHKYYISRKENPLKKKQSLILLCCKLIRVLYAILTKGVEYNGSKLMKDIRRPLEQVA

SEQ ID NO: 319399 - protein, 341 aa, unidentified
MEEVVMVGIDLGKHVFHIHCQDRSGKALLRKKMSRAQLFEFFATLPPCSVAMEAGAGSHCLSRQLRSLGHTPKLIAPHFVRPFVKSNKNDSIDAEAICEAASRPSMRFVTPKSEDQQILSALQRLRESLIAERVRIINQLHAFLLEAGVATSRGPQTVKRLPVLIETHHFSPGFTLIFEQLATRFESANAEIGLIEKELTRRLNNDEAGQRLLSIPGIGPITACALVCAIGDGKQFNCGRDFAASVGLIPRQHSTGGVTNLLGVSKRGNKSVRTLLVLCARFYIFRLSKEKGPLADWVRTLATRRHPNVVACALANKYARIAWAVVAGQGQFDANRSAKRE

SEQ ID NO: 319400 - protein, 387 aa, unidentified
MPQQNDLSRSLIPFEQATTLVAVIELSQSSWLIAGTIPGIERQPLKKIAPDETDLLRVLHRWRDEATRSGRTVTRIAVGFEAGRDGFWLARWLTGYGIETHVIHSSSVAVSREHKRAKTDRLDTAMLMRVFLGWLRGERGHCGVVAIPTIEEEDAKRPSRERETLVGERTRIINRIKSALARLGVRGFKPQLRKAPQLLESLRTPEDSPIPPNTLDEIRRDLTRLALLREQINAIEQARLARLEQAPQVGPNAMVQMLASIRGVGIETADMLVQEVLSRTLRDRRAVGRYAGLTGAPDESGSKRREKGLAKSGNARVRRGLIQLAWRFLLFQKDSALAQWFRSRTDGVKGARKTKMIVALARKLLIALWRMVTTGEVPHGVVVRQAV

SEQ ID NO: 319401 - protein, 342 aa, unidentified
MDQYAGIDVSLECSSVCVVDASGMILREARVASEPEALIAWFRWSGFELERIGLEAGPLSQWLFAAMREAGLAVELLETRHVRKAFEAMPVKSDRNDARGIAQLMRLGWFRPVHCKSMSAQETRALLTARKLVQSKLHDVENSLRGILRGFGLKVGKTTELQFAGRIEELVVGHPQLQVIAKALLSVRAVLRNEFAAFQKQTRKLAQSDTRTRLLMSTPAVGPIVALTYASAIDDPARFTSSKQAGAHFGLTPKKHQSGETDYTGRISKIGDSSVRTALYEAAHIMLTKPLKGCTQLKSWAMRIAKRAGMSKAKVALARRLAVIMHRMLADGTPFNPAAAAA

SEQ ID NO: 319402 - protein, 387 aa, unidentified
MPQLNDQSRSHTALKPDSTLIAVLEMSQSAWLVAGLVPGIERHPLKKIDPDEAALLRLLRRWQEEATKAGHPITRITLAFEAGRDGFWLARWLRAHGIEAHVIHPTSVAVSREHRRAKTDRLDAALLKRAFLGWLRGERGHCSMAEIPTLEEEDARRPTREREGLVRERTRLVNRIKGALARLGIRGFKPTLRQAPERLSALRLPEGAPLPPNTLAELRRDMARLRFVLDQIREIEAARLEQLEQHPETGTHTMVRVLARILGVGIETADMLVHEVLSRNLRDRRAVARYAGLTGAPDESGRRRREKGLAKAGNARVRRGMIPLAWRFLRFQPESALTRWYRARTADARGTTRKTMIVALARKLLIGLWRLVRSGKPLEGVVLRPAA

SEQ ID NO: 319403 - protein, 374 aa, unidentified
MTMMQHRQIRYIGLDVHKVSITVAIAEESGAPTSYGSIANDPSAIRKLMTRLGGPEVELRVAYEAGPTGYALHRQLAKMAIDCIVVAPSLIPKQPGNKVKTDRRDALKLARLLRSGDLTPVWVPDEAHEALRSLVRARADAKADQLRAKHRLSKLLLRQGCRPPSGVRTWSQRHVQWLRQLEFEHLPDRVVFADYLAEVTAAGERIKRLEAALHQCAQSSSQVAVIRALEAFRGIGFLSAVTLVAEAGDLRRFRTAPQFMAYAGLVPSESSSGGKQQRGSITKTGNSLLRHVLGETAHHARHAPRVSSKLKQRQADLPREIVELAWRAQLRLHARYRHLSSRIGSLKALTAIARELAGFIWAAGQVLQEVPTAA

SEQ ID NO: 319404 - protein, 398 aa, unidentified
MTATATTTTTGTILAIDLGKFKCVACAYDRAATSPPRFDTFTTGRDELLRLLEHFQPAVVVIEACLLAGWVHDLCVARGYACKVANTASEAWKFKHQKRKTDKDDALRLAQLEALGQLPVVVLPDPPTRQWRQLIAYRQTLVGRRVAAQNRLRALLVGQGLPAPRGARAWTVTGLRGIGQHAKPLTECGPDELWRGLLDLTLADYRQVRQLLDQAEKRLDELAKVSAAVRLLETVPGVGPRTAEAIVAHLHQPERFATGKQVSAYGGLVPRQYQSGETDRRGRITRRGAGAAAQVAGGVRLGDAALQPLGAGGVPAAEPGQGPQEAGDRGAGAQAAGALLGDAARRHALAGRADARARHGGGHPLKGQRRQPAPGSSRALRFREHTEGSAAGTSRVSS

SEQ ID NO: 319405 - protein, 326 aa, unidentified
MDVLGIDLAKRSFDATLLMGSGAQHYASFANTAEGFTELAAWLAPLCAAPLHACMEATNVYWIDLANFLYAAGHTVSVVNPARIKGFALATLQRNKNDKLDSALIAAFCLKHQPKPWQPPSEQERHLRALVRHRDDLLQTKLQQQNRLRDATDEAVKRSLQKLLELLESELEAVEQDIQAQLQAQSTTKSNLALLDSVVGIGLLTAAKLLAEMPNLAEYESAKAAGADAGLNPSEYQSGTSVRRRSKMSKIGKATVRAALYWPAIAAKRHCPAMRAFAERLAARGKPKMVIIGAVMRKLLHICYGVLKHQTPYDPAKAFPRSAPST

SEQ ID NO: 319406 - protein, 338 aa, unidentified
MIAVGVDTHKDRHHAVALDQVGRPLGELVPAADAAGYAELQLWAERIGGTEELVFGIEGAGSFGAGLCQYLQHAGHSVVEVERPRRADRRAGKSDRIDALAAARRVLEGSVSTPRRRGVLSAIRALLVARRSVVGERTRVLNQLHALNTTAPITLRERVGGGTGRQIERRILSMRSRSGVDLEERVTFAVMRDLAAHSRALGADAGRYEHELAELVAEVDPTLLRKPGVGPISAAKLLACDPARFKSEAAFARCNGTAPIPASSGKTVRHRLNRGGDRQVNNAIHTIAIVRAKYQPETRAYLDRRIHEGKSKREALRSLKRHISRELYRHLTAVPLTS

SEQ ID NO: 319407 - protein, 324 aa, unidentified
MTTYIGIDVSKDSLSVAVPKPNSGWKVNEYTNSPDGIRTLIGQLPDQAHCVLEATGSYSVLATYMLTHSGVTISVINPKQSHHFAKMHLSITKTDPRDAVLLAEYGKAIQPPVYQMSSDSLLLLRQKRTLLRQYQKQRVSLLNLFASLQPLPLKDSTVQQSLQQMIAHFVAAIAQLMAEINQVCQADFAEQYKRLRSIKGISYAVATALIETTNGFRDFASAKALAKFIGVAPVIYQSGKVGITKGINRSGDAHLRSQLYMASLSAIRYNKSCRECYQRLKAAGKVTNVALMAVVNKLLRQAYAVVKFNEDYDPNYQPILRSMA

SEQ ID NO: 319408 - protein, 478 aa, unidentified
MAASNKKKNVMGAPAPLAGPAQRGGEATEVAEERVEVVTYAAAIDVAKASGMVCTRVPGSRSDRKRQAVWQVDATYASVIALMDHLRCEGIQRLVLESTSDYWRCWYYLAEAVGLEVWLVNAKDVKHLPGRGKSDRKDCVWLCKLNERGMLRRSFVPPEEIRDLRALTRTRSRLAQDQVRHQNRAGKVLEDALLKISGVISDLFGTSGRRFLDALVAGERSPTALAALGDRRLKASPQRLADALTGRFRDIHAFEIATHLRLIDTINDEIARLDERIEQQLAAVAGVAPACTACGLIGGGHAPGCASDGTPVLSLVERLDEITGVGVRNAQVIIAELGTDMSVFPTAGHAAAWARLTPRTLQSGNTTRPGRTGKGDPYLRGALGQSVMAAARTDTRIGEQYRRTARRRGKQKGIVAVSRVICEIAWLLISDRDARFTDLGPDYYSIRSPQSQTRSRIREIERLNPGMKVTLTPAATAA

SEQ ID NO: 319409 - protein, 325 aa, unidentified
MLAKTDTALNTKTGAMHFGIDVSKAHLDIHCLEANQSWRIANTPAAIRAFIREQRALLKDALVVVDGAGALEYEVCTRLAKAGIRVHRANTFQVRNFIRSFGQLAKTDRLDARMLARFAAEREAHLRLFVPEGRTQRRLRLLARRREELVRMRASEKNRLQAPEGKEMAASIRRIIETLTKEIARIEAEMERLVMREEALRRRREVLLAIPGIGKVTAHVLLATMPELGTLDRRQVAALAGLAPFARDSGMQQGRRHTGAGRSLIRRTMFMATLSAIRFNQTIKEFHERLTQNGKKSIIALIAAARKLITIINAKLRDAHAAQLS

SEQ ID NO: 319410 - protein, 360 aa, unidentified
MTGTMTWAAMDVHARSTYASSLDVMSGELSRQRFDTGAVVPVVGWLTGLPGPVRCCYEAGPTGFGLYRAAAAAGIDCQVIAPSKTPRPSGDRHKSDRRDSELLVRQLMAGALTPIAVPSPSAEAARDLARAREQVRLDLMRCRHRLSKLLLRHGRVWDRTAWTKVHREWLSAQTFAQQNTELAFIDNLAACDGLIARKDALDERLSWVATDPEFWPIVRRLRAFRGIDTLSALIIVLEVSDFTRFPRAVQLGSWLGLVPSREQSGESDVHGSITKTGSKYARRILVEAAWHYARAPRVGRTLYERQEGLPDHVLQIASRAQHRLYRVHKRMRERKKPGNVITVACARELSCFLWAAATAP

SEQ ID NO: 319411 - protein, 406 aa, unidentified
MYVGIDVSKDSLMAHAMDQDGKDIFHSFKVRNNKTGCNKLIDFMHKHAKQSDFESIKVGMEATNVYWEHSHRLINNSKKLNSNFKLITYILNPKVVKKFKDAYNSLPKTDSIDAWIIADKTRFRVPKPTIPEEVYRPLRELTRFRYKLVKNIRSEKNRALSLVFLKFSDLKEDVPIDIFSEASMTILESFTLEEIADKDLEELAAFLHENSNNRLGGSTPLNEIITDLKKAARNSYRLKPKMNQAITQTLSMTFDNIRFLQSQLNRSKKVLARELKAIPQTLDTVNGIGVVLTSGIIAEIGDIDRFHNQAALASYAGLTWTKHQSGSFVAEETSMTKTGNKYLRYYLVEAANSLRVHNDEYRSYYYKKYHESQKHKHKRALVLTARKFVRLVFALLSKGEIYQPRR

SEQ ID NO: 319412 - protein, 392 aa, unidentified
MKDLKSDFFSLKENVEEKKKQLKVGIDVHKSTSVIYALNEKGERVRSKSINTCFEEFKKFFSPYLKDYDIQAAVETGNLAFWLSRRLEAIGISVYVVNTLANKLISGSSKKTDKRDAGTLALQLLKDMLPEKVYAPNEDEQNLRSLVQHRKQIVKSKTRVTNRAHALLLRNGIFVSKANLKKYKKFWVETLEEKIPDKTRHIHIEFKFYMEEFDLLNRQLQEIEQYILEEVDRMYEEENNLLMSIPGVGFAISSAALAYGGDGRRFENTRRYQGYWGQAPGHQESAGKKLGNGGITKVGPSIMRGYLTQGALSVLKHKHKEENRPLYEFYEEIRKRKGWKKARVALGRKISSIMYGVLKNRTPYDPRLLYRGCKEDAAPAEEACSQSDAVKR

SEQ ID NO: 319413 - protein, 343 aa, unidentified
MYYIGLDVHKKTISYCVKDAAGQIQQEGKIGSTRRELDAWIRTLPQPRMIAMEATIFTGWIYDHLLPHAEKVKVAHPLMLRAIAAAKRKNDKIDAGKIADCLRCDFLPECHMASTEIRDRRRILRYRNLVLRQAVQMKNRVSGLLMETGVSYNKLRLHRMGYFAELMSTNEEVSQSIRPLLRLCREHIDRSIRLDTTLLRSLERDPLLSDRLRRLRTIPGVGPITALTWALEVGDTSRFRSIKQAISYCGLCSAEKSSADKMMRTPISKQRNKHIQQVLVEAARLAPRYSEELALLYEKERQRGNGNRATLAVARKMVALMLAVERRNTDFVPAGEFRRTAAA

SEQ ID NO: 319414 - protein, 390 aa, unidentified
MLLLGVDIAKLNHVASLVDSSSGELIFSNFKFQNNILGFSSLLEKISKFSINEIVIGLESTGHYGENFINFFFQKGFKIAVINPLQTSHLRKANIRDSKNDRLDSINIAKALLFGEHRYISQKNLTNFALKKLTRFRKSLIKQKSKTKIQLVSLLDIIFPELQYFFKSGIHSNAVYTLLKKYPSTEKIAALREKSLFSILNKASKGHYKEEHALQLKSLAKSSVGIKDTSVSMHIPQLIELIEMLDSQIKSIEKEIDSSIDEESPILTIPGINTVAAASILGEINDIDNFDSSSKLLAFSGLDPKIRQSGNFSASSCRMSKKGSPYLRYALIFTAWNLVRNSETFNRYYLSKRAQGKSHYNALGHTAHKLVRVVYTLLKKNISYQENLIV

SEQ ID NO: 319415 - protein, 344 aa, unidentified
MQSKAISFKGQKVFIGIDVHKKTWSVTTLLEVGMPKTHSQKASAKELFDFLNRHYPEAEYHAVYEAGFSGFSTYYALKEYGIECTVVNAADVPTTQYESVMKSDPIDSDKMARALRAGMIRGIYIREKDNLDDRGLVRLRKSIQQDLTRYKNRVKHLLHANGVEIPELFDRSPNWSKAFINWLREDVVLLSSSRVSLDMLIEQVETLRQNLLIVTKKVRNLRFKEEYAEKYDALTSIPGIGPICAITLLTEIYDVKRFRNERQFASYLGLVPTCHSSGEKASFGEMTFRGNKHLGPLLIEASWVAIHWDDALSVAFTNYRRKGLMPQESIIRVARKLSNISSQC

SEQ ID NO: 319416 - protein, 359 aa, unidentified
MGSIAFDPADVIVGVDTHKHQHVGVALDGLGRRLGQWLVPATPAGYAELLAWATGLGRVAVVGVEGSGSYGLGLARFLRRHDVTVLEVARPPRKGQRRLQGKSDPVDAEHAARQVLAGAGAVTPKTGEGAVEAIRLLKVARDTAVTAHSQAMITLKATLVTASDALRAELEPRTDFALVTACAELEVTGELADPEVAMRHTLRALACRWLALHEEIKLHTRQLKTLTNKTAPALVATFGIGFDSAAELLCAAGDNTARVRSEAAYAKLCGACPIPASSGKTTRHRLNRGGNRQANAALFRIVVVRLRWHPPTIAYAQRRTAEGLSKREIIRCLKRYVAREVFRLLPAPAATPAQSLQAA

SEQ ID NO: 319417 - protein, 363 aa, unidentified
MYDSTTVAVGMDVHARSIRLAAVRADELLEERTLPYDEEAIERVLRRWPGVRCCYEAGPTGFGLQRHLVERGIDCLVVAPGLVPQRPGDRVKTDSRDARKLARLLAGGLLAPIHVPTPELEAARDLVRAREDARLDRMRDRHRLSKFCLRHGRMLPTNSWTVVRRRWLSEQRFEFAAQQQTFDSYVHTVDLVDARIEQLERAIRETAEQAPWRELVARLRCLRGIDTLTALALVAEIGDFYRFKTAEEFMAFIGLVPTERSSGEQRRQGSITKVGNSHVRRLLVESAWHARRRPKVGYELARRQRGQDAIVLERAWRCQQRLYQRWQRMAGRGKPQQKIVVACARELAGFVWAIATDQPLRSN

SEQ ID NO: 319418 - protein, 344 aa, unidentified
MSTFAALDVSQEATAVCVVDDAGRVVVERKIPTCPEAISSFLTRHAPGLDRVGLETGPLAVWLWNELHDRGLPIICIDARHANAALKVRPNKTDRNDAAGLAQIIRTGWFKQVRIKSRISYELRSLLAAREVLVRSRVKIENEIRGLLRTFGVLFGKATGGFANRTDQIVAGELDASPMMRAVIGSLAKARAAMLERIKDLDRQVLATARVDTTVRLFMSVPGVGPITALSVASAFDDASRFKRSSSAGAYLGLTPKRYESGEISRNGRISKHGNKMTRKHLYEAATTMLTRTTRFCSLKAWGLKLAKKVGFKKARVAVARKLAVILHAMWKTKTPFRWSAVAP

SEQ ID NO: 319419 - protein, 386 aa, unidentified
MKEQNFVPREFDIFGGLDVDKKSIAVTFMNHEGMLQSFSVPYRAEHLLSYVRKHFGGKKVAFAYEAGPTGWGLYDKLTAEGHPCMVAAPSMIPKVPGQRVKTNRLDSQKLSPHLRGGQLKSVHVPSEPYRQLRHLTQLRDTFVKDVVAMKLRIKGLLLFEGMEFPPAPPGSQWSFLVKSKLKKLPCSASVRFKLDRLLESLEYSEKQALQTIKEIRRFSKQDRELCQVMAHLKSIPGVGEIVASHLLARVGDPKKIGNVRQLAGFIGLAPREHSSGERVACGQITRTGDGRLRSKLIQAAWSAIRQDPELREFYRSVFQRHPRDRAARKAIVAVARKLTTRIYAVLKQQRPYVVREKVHSAPLTQEETVPQGTTRRQAEAGESLTP

SEQ ID NO: 319420 - protein, 360 aa, unidentified
MTTNTGSGHVVAGVDTHKLTHHGAVLDADTGKLLSEREFPATWAGYRRLLSWMRSHGTVLKAGLEGTGSYGSGLQRFLQAHDVTVIEVSRPNRQDRRRRGKSDPIDAINAARAVLSEAANSMPKCREGFVESVREIRMTRRSAVKARKAALHQIHGLLWCAPDDLRAKLSSYDRAALVARCARLRIPTNGALEDPTVTARKMLRRLAKRIQLLDEEIAEANHELESILTEHTPNLLAVNGVGTEAAGQMLTTAGQNIDRLKSEASLARLCGVAPIPASSGTTTRHRLHRGGDRDANSSIYLIVVNRLRWHQPTQQYVARRTQEGKTKKEIIRCLKRAVIRELYRALQADLQRPTQALDAA

SEQ ID NO: 319421 - protein, 408 aa, unidentified
METLIERGCGLDVHKKSVAACVMRFPEPKGTRQSHVRTFGTMAAELAALREWLESQGVTHVAMESTGVYWKPVWAVLEEAFTCLLVNAAHVKQVPGRKSDLLDGAWIAQLREHGLVRGSFVPPAPIRELRDLTRYRKRLIEERTREANRRPKRLEDTGIKLASVAPDMLGVSGRAMLEALGQGTTDPARLADWARGKLRAKLPALRQALAGRFRPHHAFLVSQRLAHLDYLDEAIDTLSARLTEVMAPFTAELGRLDTIPGVAQRTAEVLIAELGVDMTQFPSAGHAASWVGLCPGNHESAGKHKSGRTRKGNRWLRAALTEAAHAATRTDSALAAQYRRLMHRGHKKAVVAVAHSMLVIAYHLLSRQTTYRELGADYFDRRHAERATRRAVRQLERLGYRVTLQPAA

SEQ ID NO: 319422 - protein, 371 aa, unidentified
MAESSKTLFVGLDVHKDTIAVAYAPEDRGAEVVSLGMIGTRQHDIDKQIRKLEAKGATLAFAYEAGPCGYWLYRYLTRRGLTCSVVAPSLIPRKPGDRVKTDRRDAVTLARLLRSGDLDSIYVPTVDDEAIRDLSRAREDAVRDLKRSKVRLKAFLLRQDIRYEGRANWNAAHLRWLARVVCPTPAQQIVFQEYVHTVTEQTDRLRRLEGELHTAEKTWRLHPVVEAVQALRGLDLTGAVTLIAEVGDLTRFDTPRKLMSYLGLTPSEYSSGASRRQGGITKAGNGHARRALVEGAWAYRYPAKVSRHLQLRLEKVPTEVRAIAWKAQVRLCKRYRLLSARGKHVNQVVVAIAREMAAFAWAIARTVPIAS

SEQ ID NO: 319423 - protein, 320 aa, unidentified
MRNTVGLDISKLTFDATAIVGNAEYSAKFDNDSKGLNQFSDRLKSLGCQNLHICMEATGNYYEEVADYFAQYYSVYVVNPLKISKYAESRFKRTKTDKQDAKLIAQYCRSAKESELVKRQKPTDEQYRLLRMTAAYAQIKSECAAMKNRHHAAKDEEAAKAYAQIIKAMNEQLEVLKEKIKEQTEKPNCKEGVKRLETIPAIGRMTAAVLFHHLTSSKFETSNKFAAFAGLSPQQKESGTSVRGKGKLTKFGNRKLRAVLFMPAMVAYRIRAFPDFIKRLEEKKKPKKVIIAALMRKLAVIAYHVHKKGGDYDPSRYKSA

SEQ ID NO: 319424 - protein, 428 aa, unidentified
MIAVSEPVPPDSSVFAAFVGLDWADQKHDLVLYDPRGGQPEALQLPHTPEAIDEWACTLRRRFGDRPVAVCFEQTRGAIAYALLKYDFLVLFPLPPARLASYRESFSNSGAKDDPTDAALLVDYLLRHRDQLRVWKPDSPATRELFLLAEARRSMVDQKTRLSNQLTDLLKHYFPQALALVGHDVDTPLAGDFLAQWNTLAAGQAALPATLRKFYYAHHCRSEERIQERLALVKSAIPLTTDLALIQAGTLQVQCLVAQIRVVRKAISRYDARLMELMDQHPDAALFRALPGAGAALAPRLLVAFGTDRERFQSAQELQTLSGAAPITKRSGKRYTVLRRWACPKFLRQTFHEFAFCSCRRSLWAKAFYLQQRATGKGHHAALRTLAFKWIRILFRCGKTNTPYSEDRYLESLRRRQAPLLAFLPAAP

SEQ ID NO: 319425 - protein, 477 aa, unidentified
MEVIHERVAGLDVHKNSVVACLRSHSGKSAARECRSFGTTTDELLALLEWLTTSGCQAVAMEATGVYWMPIYKILGDGDFPVLVANAAHIKAVPGRKTDMNDAMWIADLAAFGLIKASFVPGEYVHELRTLMRTRKQLVREQTSHVQRIQKTLTEANIRLDSVISDIMGLNGRRMIEAMIGGQRDPRKLAALADKRLKATAKELYDALHGRLTDHHRFLLKLHLKQWDALDVSVQTIDREVDARLGKIQAARPTVDTQPAANAEAVEAKPIKVKRTKTKTAKTEEVKTEEVKAEEVKTEEVKAEEVKANDNGVSKLVDLLSTIPGVSRVSALTILSEIGPDMSRFPTAGQLVAWAGMCPSQNESAGKKKGSRLRKGAPWLKTMLVQCAWAAKRAKSSYYRAQFYRLQARRGPQKAICAVAASILTAIYHMINNGSPHKDLGIDYFDRRTPETKAKRLAAQLGKLGYQVTLTQAAQAA

SEQ ID NO: 319426 - protein, 430 aa, unidentified
MKSNTQNAKIEAITEKTLVLGIDVGSETHYARAFDYRGIEYSKKPFKFSNTEAGFVTFKEWILDLKERHEKDKVVPGMEPTGHYWFNLGKFLQDNEMKPVLVNPHHVKKSKELDDNNPTKNDRKDPKVIAGLVREGRYMIPYLPDGVYADLRTASNIRFQLQAELTRIQNRISRWFNIYFPEYKTVYGNPDAKSGMLILKSAPLPEDILTLGIDGVNQIWREAKLRAVGKARAKTLIEAAEHSVGSKEGAVSARMEIRMLLEDYESRNIRLQEVMTLIEGLVKQIPMAEKLLKIKGVGIKTVSGFLAEVGDISRFNTPKELQKLAGLALVESSSGKHKGETTISRRGRKRLRYLLFEVAMSLVAKNPEFRELHNYYTTRRLSPLKKMQSLMAIAAKLIRVFYAMLTKGVDYDPKKMMSDIRRPAVYLQAA

SEQ ID NO: 319427 - protein, 464 aa, unidentified
MMHPRQNQLPPDSPTDPDGFPVLRPNVAGIDLGSTSHWVCAPTLDGSAREVAQFGATTPELQKLVCWLQLRHVVSVAMESTGVYWIPLHELLERLGFEVLLVSTRDLAHVPGRKKTDRIDCKWIQRLHSCGLLRGSFRPAELVCMLRTLVRDKATLAAAQADWIRRIQKSLDQMNVRVHRAVSDIQGATGMAIIRAIVAGQRDPAALANLRDPGCRKSPQEIAQQLTGHWREDHLFSLQQSLKMYDAIGETIAAYDKEILHRLGELQRVELTGKQAPPLRNPNKAKMIRQRGEDPLRQALYRMSGVDLTAIDAIGVGVVQTVLTEYGPDLSRFPTENQFVSHVTLAPKTPFTGGKPIKNKKRRGGASSRVAAALRSAALSLRHSHTALGAYFRHTANRLGADVATFATARKLATLIYRLLRWGTAYVDEGAEAFEKRYQTARVHRLLTNAKDLGFQLIPSPQNP

SEQ ID NO: 319428 - protein, 370 aa, unidentified
MGNRSMFVGLDVHKETIDVSIAEGDRQGEVRHYGVIASDLEPLDKVVRALRAPDRRLHFVYEAGPCGFGIHRHLTARGEDCVVVSPSMIPKRSGDRIKTDRRDSQMLARLHRAGELRAIYIPDATDEAMRDLVRAREDAVVVGTQAKYRLKAFLLRQGRRYPGREGWTLPYRRWLTDLSFPNAAQHIALQEYRDAIDETEQRIDRLTEQLRQLAPTWRWAPVVAALQALRGVSFVTAVALVAELGDLTRFGHPRELMAYLGLVPSEYSSGPSVRRGGITKAGNPHVRRLLAEAAWAYQGVPRIGRQHAYRQEALPKVVCAIAWKAQLRLTARFKRLVARGKAKPKVATAIARELAGFIWAIAQEVSPTPQ

SEQ ID NO: 319429 - protein, 419 aa, unidentified
MGKQRSKVCGIDVHKKFLVATITDRTGNRETKKFFNEIEPLLRLREWILEEHCEAIAFESTGEYWYSLHDVLNGYVEIIVANAYHIKWIPGKKTDTIDSEWIAELALNDLITSSRILPKEQREIRALSRLREKLVKERTDHKNRVHKILDSACIRLSVILSDIFGKSGLTILKGILSGVPLDDIIKKLPKRYQSRSDEIKGEIQSELSERQMIQLQTSLVMIEYLNEKIKEIEQVTLNEMRKQRRELQILMSVPGIGYIGATTLLAEIGDVRDFPSPDKLTKWAGITPRVYQSADKLHTGSITKQGSKHLRWILVEIAHACVRVKNTRFRTFFDRIFARSGYKKAIVAVARKILKLVWHLLSNDELYEEENAPVHKSSRLPNLKKSPSFTLSEAIELIVKAGFHIVEHDNLVNKRSLGN

SEQ ID NO: 319430 - protein, 386 aa, unidentified
MQVSNARTPIENNLIRIFVAIELSRKSWLVTMHSPDKDRMSRHKVESGDHAGLLALIERIRERAARALGAAPAVVSCYEAGYDGFWLHRLLLAAGITNHVFDPASIMVDQRARRAKTDRIDGEQMLRTLMAYCRGEPRVVRVVRVPSPEQEDARRASRERDRLVKEQTAHTTRIKALLRLLGMAVGNPHRRDWLSWLSAQRDWQGQAVPPRIKAELEREHARLMLVRQQLDALAPVPAGAELTAAAAEMAQRSDLLLRLKSLGPVFATTLTNEAFYKDFRNRREVASYFGLTPSPWQSGGTDREQGISKAGNRRAREKTIELAWLWLRHQPDSALTQWFRQRTLNASKRIKRIAIVALARKLIVALWRFLTTGLVPAGAVLKAAKA

SEQ ID NO: 319431 - protein, 407 aa, unidentified
MEKLFVGIDVGSCDNTVHIMLPSGDKHSAFTVSNNLGGALEISKRVVSAMTQLGFSSVSMGIEATGIYGTHLMNFLREDGALGQFNRSFYVLNPKQVKKFKDAYPDLPKTDSIDAFIIADSLRFGRITKAIYEADYRFKALQTLTRSRFHLVKDLAREKQRFMNCVFMKCSGLAQTKIFSNNCGAAALALFEEIDSVEALIAMSDDDLTAFLIDKGKNHFVDPVCIANSIKAAARGSYRLPKTVNDSVNQVLSVHISSMRSMQAQIKILNKSIEQQMALIPNTLTSVPGIGAVLSAGIIAEIGDINRFDNHPALAKYAGFAWTKHQSGKFEAQNTRLINSGNRFMKYYLTEAAFSLVRCDTEFKRFYDLKYKEVNKYQHKRALALTARKLVRLVFKLLKDNRLYKPA

SEQ ID NO: 319432 - protein, 342 aa, unidentified
MGSVKGRRRSRHTMSAVVCGLDVHKDSTYATILNPEGKIIDQTRMINEKVLSYLSHFKVGEVAMEASTSVASLYRQLASEEFDVVVSHPKKTRYIAEARIKSDRVDSKVIAELARLDTLPLAYVPSKETLDLREKVRRRAFLVRERVKLRVKIKSFLTYEGIKWPVDNGLFSRKGVEWLGSLKFESVDSYLRIMEIFDEEIRLLSRQLEGLAREDEDVKLLMTVPGIGYYSALLVKSEIGDVNRFPFGERLCGYAGLVPSTHASGGVVRHGGITKEGSRWLRWVMVEAAQTHVHKYDTSITRAYQGIAERRGRRAATVAAARKLLLCCYSVLKNKRPYYDQA

SEQ ID NO: 319433 - protein, 409 aa, unidentified
MKIAGIDVHKKVLMVVVVDTSAPEEKPARRRFVTLPSELQRFRIWLQEQGVEEAVMESTAQYWRSVWLELEPHMRLHLAQAFSNRAPRGRKHDFKDAERLARRLIADELILSFVPNGEQRIWRSLTRMKVQLTRDRVRLQNQMECLLEEMRIKLSIVVSNLLGASGLRILHALAQGESDAKKLAELGDERLHCTEEQLVDALTGRVQPMHRGMLALQLQRLQLIDQQMTQLNHMIAQAMKSHQDTVIRLAEVPGLGVDSAQQIIAEVGAQASTFSSAAELTAWVGTCPGKEESAEQNQSSRCAKGNKYLRRVLNQAAHAAVAKKGCHFQVVFRRLMPRLGYKSAIWAVAHRLCRVVWKILHEGVRFIEQGHEVGPREKKQRAQMLARALRKLGYEVTITPINQLAPKPA

SEQ ID NO: 319434 - protein, 410 aa, unidentified
MQTMVERGCGLDVHQATVVACLLIVLKKGKVQKQIRTFGTTTRELVSLREWLLSEGCTHVAMESTGVYWKPIYAILEGAFEIVLANAQHVKKVPGRKTDVKDAEWIADLLCHGLLRSSFVPPKPIRELRDLTRYRRKLVESRSAERNRLLKLLESANIKLASVASDVFGVSGLLMLQALVEGKATPHEMAELAKRQMRKKIPELELALEGRVEEHHRFLLRLQLRRLQSVEQDLGVLEQRIQEKLKPYAAQLTLLDEIPGVDWTLAAGIIAEMGVDMSVFGSVSQLASWAGICPGNNESGGKRKSSRIPKGNVYLKTALVEAANAAAKAKGTYLRDKFYRLKARRGYKRAAVAVAHKILVAIYHMFSHQVCYNELGDLYLDKLNKHHLTRNLVHRLERLGYTVTLEQKAA

SEQ ID NO: 319435 - protein, 362 aa, unidentified
MRFNNEPIQQGGAAMYYAGIDYHKRYSVVNIQDQSGAIVLEQQVPWNNPAIFSQIFARLQGEVSVVFECGLNWAWLYEVLEKIPSVKRIVLANAYKVRLIAEAQIKTDKLDAKKLALLLRLDVVPACHVPTRETRRRKDVLRQRAYWVRLRTGLRNRVHRLIDQQHGLAMPQVSDLFGKKGKAALRKAVLPDPDATLLAQNLDVLEQLDSAIKADEQRIQTESKPDKDMEFLVSMPGLGLITASIISTETEDINRFLRCERYTAYAGLAPTTHSSGGKTYNGRMMQGCNKWLKWAFIEAAWVAVGCSPYFGGLYRKHRDRNKKASVAITIVARRMCHIAYQLLKEKRFYEDRSFAPAALVIA

SEQ ID NO: 319436 - protein, 368 aa, unidentified
MSDIIRIGVDTSKSVFQLHGVDAAERPVLRKKLRRRDFLSFFAQLPPTKVGLEACGGSHYWARELMALEHEPKLLPAQHVRPYVRRNKNDKQDADAVCEAMSRPRMSFVRIKSAEEQAAQMLMTTRQRLIDYRTQLINTIRGHAAEFGLTAAKGPAHVEPLLARLAKDVTVPALAKELFAIHGQEYDRLKIELREIEAKLKAWHRGNEMSRRLAEVDAIGPIGGCLLAIKAADPQAFRCARNFAAWIGLTPKDHSTAGKMRLGVITRAGDEALRRTLVVGATSVIKQVRNGKAHPSPWLRDLVARKPPKLAAVALANKVARIAWKLMVSGERYDAARAGIVSPTARVAPCSRRQGRCAPPAAVACGQP

SEQ ID NO: 319437 - protein, 344 aa, unidentified
MQIVRIGLDLAKYVFEVHGVDCHGKTVLRRTLRRGAVMSFFANLPPCLVGMEASNGAHFWAKAISELGHDVRLISPQFVTPYVKSNKNDRNDAEAICEAVSRPSMRFVPVKSAEQLAVQAVHRIRSRLVADRVRLVNQVRGLLGEHGIVVAKDIGNLRRALARIAGEDEDRALNPLVRSLMRELREELAELDARIAGYDRKIRELYRNSEICQRLGKVEGIGPVTATALVAAVGDRSSFKNGRQFAAWLGLVPKQRSSGGRARSFGISKRGDRYLRTLLIHGARSALGRVRDKQDPRSLWLGKMRQRRHPNVVAVALANKNARIAWSLLTSDNVYDASLSVGAA

SEQ ID NO: 319438 - protein, 339 aa, unidentified
MELYAGLDLHSRNTYIGIMDKTFNRVFKKRVPNHLELILQTLDPFRDQIKGFVVESTYNWYWLVDGLMDAGYSSAHLANPSAIKQYEGLKYSDDQHDAFFLAQLLILGILPQGYIYPKKERPVRDLARKRMFLVQHKTAYILSLQSLLQRCCARKVRANDMRHLTVKELEMWLEEEHLVLSAQANLDSINFLKQKIKQLEKAIIQKVKLNKAFKYLLTVPGIGNILAMTIMLEVGNINRFPKVGNFTSYCRCVPSRRLSDGKSKGHGNRKNGNRYLSWAFTEAVHLGRRYNEQFRRYYNRKVAQANTSLATKALGNKLARICYYIMRDQVPFREELFCH

SEQ ID NO: 319439 - protein, 353 aa, unidentified
MKKVIMCSADVHEKNISVEIAVHRETSMVKDYPYAVKGRQKLLSDLKTLAKKNQADRIVVVYEASSLGYGFYDDCQAAGVECHVLAPTRMAKSAQDRKRKSDRWDAKKMMELLRGHVLAGNELPSVWVPDHPLRDDRELVRTRIDIGEKKSAVKAQVQMLLKRTRAKRPPECKNWTLAYRAWLKMVELPSGTRTALDSLLRQLHHLEEESDQMDAGIETLSQTPRYLKLVEALQKVKGIGVLAAIVYLTEMGDLSRFANRRKVGAYLGLAPACYESGERSDRKGHITREGPSRLRKILCQAVWSRVRCDKQEQVAYDRIVSRNPKHKKIAVVACMRRLGVLLWHKGLEVKAAA

SEQ ID NO: 319440 - protein, 354 aa, unidentified
MSGKHNSVIAAIGIDIGKTWFHVVGLDGRGAIALRQKWSRGQVEARLANMPACLIGMEACVGAHHLSRRLRLLGHDARLMPAKYVRPYSKGQKNDFRDAEAIAEAVQRPTMKFVATKTTDQLDLQALHRVRERLVSQRTGVINQIRAFLLERGVAVRQGRHFLRAELPGILATGCAVLSGRMVHLIADLAGDWRRLDERIEGLSGEIAALARQDAGCERLMSVPGIGPIISSAMVAAIGVGDTFTKGRDFAAWLGLVPKQFSTGDRTVLGKISKRGNRYLRALFVQAAWVVLIRSKNWERYGLKPWIEAAKRRLHRNVLAIALANKLARIAWGVLAHGRSFEAAKLAEAATLPA

SEQ ID NO: 319441 - protein, 342 aa, unidentified
MTQFTFFVGVDIASASFMACVGTAPWKLTVKPVKFDNHEEGFASFLTWLKNNSLPPEKTVVCMEATGVYGEGLAYFLFASEYTVAVEPPLNIQRKFPANASKTDELDCQYIAEYACRYVDKLALWKPRADILEKVKVFLTTRQHFSVQLTGHKNALIAVHRKKVTSELAKQVHQDMIEQINKHIKAIDREIRRLIDDDPTFKQTFLLLMSVPGIGLQLAAHLLIHMQETLDPKVLAAFIGICPIKHESGTSVYSAPTSRHYGPPVMRKLLYLGACSVRTHKKQFQQYFFRKVAEGKHKKVVLNNIENKILKIACAVVRSQKPYIPNYVSVNPLVFQKTLTAS

SEQ ID NO: 319442 - protein, 375 aa, unidentified
MEQATKIHVGLDVHKDSITVAAAEPGRSAARVVGKLVHDVNKLVKVLDKVGPPQRLHVVYEAGPTGYGLLRSLRARGYPCDVIAPSQMPKRPAAARVKTDGRDSVALAECSRAGQLRAVWVPEPGDEAIRDLTRAREDSINTRTAARQQLKSFLLRHDVRYAGKTSWSKMHYRWLAELNFGAGAAQTAFTEYLLAVQAADERVQRLTQALQESIKGWRFEPVVAALQALRGIDFVNAVGLVAEIGDLSRFEHPRKLMGYLGLVPSEHSSGERVRRGSITKTGNAHARRLLTEAAWNYRFGARISRRAQLRQEDLSEPIRAIGWKAQLRLTKRFATLKARGVQINKVCVAVARELTGFIWAIGTLAQQQAAAQPAP

SEQ ID NO: 319443 - protein, 349 aa, unidentified
MEVLIGVDPHKATNVVAAVDEQGEVVGQETFPANRKGMRALERWAKGFPERRWAVEGAAGIGRPLAQKLLAGGEQVVDVPPKLSARVRVLSTGNARKNDRLDATFTALAALRNGRLASVQPEDGPDGHAEILRLLTERREHLVAERTRSLNRLHVLLRDLLSDPVGKQLSADAAAKLLRRARPKHPAGRVRRRLASELVRDVRALDRRIAELDERIAVEVEASGTTLTLLFGVGPILAAKIVGIVGDVGRFPSKAHFASYAGVAPIEASSGEVVRHRLSLAGNRRLNKVMHMIAVCQARSDPRGGAYHRKKLAEGKSRREAMRCLKRRVSDAVFGALVADSARASLAPT

SEQ ID NO: 319444 - protein, 425 aa, unidentified
MQYAQIQVLPPTPPGGVTAGIDWATADHVACVVDGAGKVRSRFSAVHDRDGIRKLVAGLRAAGAAEVAIERGEGILVGALLAAGLTVVVITSRQVKNLRSRYGSAGAKDDRFDAFVLAGVLRTDRARLRPLVPDSPATLALRAAVRARRDLVAHRVAACNQLRAHLAVSFPAGTCLFSELDSPISLAFLSRFRTQDAADLLSEDDLAAWLKTLPNRGRTSGPGQLLGRLRAAPAGATGTDGTARGVVTSALVATLTTLTAQVKTLEAEIAAQLAAHPDACVFTSLPRAGTLRAARLLAEIGDCRGRFPDPESLAGLAGVAPVTRQSGKHSAAGFRWAVSKPLRDAVCDFAGDSRHASPWAAALYDAARDRGKDHPHAVRITARAWIYVIWRCWQDGTAYDPAKHRALQRILDQQHSGDGGTGDRQ

SEQ ID NO: 319445 - protein, 424 aa, unidentified
MAGVMIGIDPHKGSHTAFVIDGREKPLGRLRVRASSRQVDGLLKWADTWPRRTWAVEGARGLGHLLAQQLIAAGEHVLDVPPKLAARVRLLDSGQINKTDENDARSIAVAALRAGDRLPELTVEDQTVVMRVWSRRYRDLGRLRTQAVCRLHTLLCELVPGGVRKQLRTSQAIAVVDAIVTDSPTAQAKLELARDLVTDLQRIDAQRREVKRRVARAVAAAHTNITDVYGVGPIVAATVLGYVRDIRRFPTRDRFASYNGTAPIEVSSGDRKIFRLSRRGNRQLNHAIHVVAVSQISHRGSEGHAYYQRKRAEGMTGKCALRALKRKISDTLYEQMLHDTRPSQDPGGHSRNDAASSAAGSHPDTPALRTSHSRADTNPRTAEATPAMPNPRPAPASRRTSRSAAGVQVEPRQRPRSGRRQERP

SEQ ID NO: 319446 - protein, 394 aa, unidentified
MILVGIDIGKHQHIFSIIDKQTGKILSNPSVFHNNQEGFLSLIGKLSSYAKSQLLIGMEDTGHYHFALLKYLLDRHYTVALINPTTTDLTRKLQGGITKNDPLDSLTICDVIGSNQRKKPYRITKVNRFDLYEQKQLTRHHHNLKEELNIYKNRLQKCIDIVFPELNSLFRSKYGIVYMNVLKTFASAEKIANSDIRIIRKCFEYEGRGKRIQLSAEQLKTTAKASVGISSVAEEIQIRHLVCQIEMIGEQLSEIDKKIEEFSLQNNSPILSIPGISHFSGTSILAELGDICNYTKASQIIKFAGIAPYHYESSQFLARHTAITKKGSRYLRKTLYQIILPVINHNRVFTAYYSKKLAEGKGHRCAQGHCIRKLLRVIYHLLSTGQSFDPALLI

SEQ ID NO: 319447 - protein, 402 aa, unidentified
MRYYLGVDWADQEHAVWVEDETGAPVTARTLPHTAAGFADCGRQLDAWRQAGIELWAGIERPEGRVVEFLLDHGVVVVPLNPKVAARTREQFRPSAAKSDPLDARVCAYCVRTRQHEVEPLRPSSEAMQELKLLTRDHQRLQRQHTRLLNQATVALKEYYPVVLEVFGDFGSVAAQNFVRAYPTPSDAGGMRRTTWEKFARRYRLRPELWEQLHEPMLAVPPHVVRAKARLVQNLLEQLAVVARQLRTSQQEIERFFAAMPVARQVAPLPGSRSGVTLPSVWAEIGDAVQRWRSAEHLQAVGGTAPVTQQSGKMRVVHFRFACNKHLRHHAQLFAQTTLLHCEWARRYYRRQRERGHSHQRALRALAGKWLKIFYVLLSRGVAYDEALHLKTIGQQAIRQAA

SEQ ID NO: 319448 - protein, 387 aa, unidentified
MRTVSGLDIHKDSIFMCILDEQGKKTEEKFGVTTREIKRLGSVMRSHFVSEVCMESTGIYWIPVWRLLENDFQLRLVNAQFLKQLPERKSDVKDAEWIATVLLKELVRDSFVPDGNIQSLRQYGRRINEINKDLVRCQQRIDMILQRCNIRLSNYVSNVDSKSYRKVVDALIKGESSSCELVKLVHGRTINRFSKSIIEDALEGDVKQSDRDLLEQYTQMLDLYQLQKQQCVDSMIQKCRELYPKAFSILLGICGIDKLSAAIIISEIGDNMKLFATAAALVSWAGLRPRNDESAGKIHSRKITHGNKYLRKALMECAWGASRNIGSVFYCRFWHLKEMKKHHNAIIVAIARQLLTIIWALLSKEEKFDNQYHLKKNIPSITSIKVG

SEQ ID NO: 319449 - protein, 334 aa, unidentified
MENIALIGIDLGKNSFHIHCQDRRGKAVYRKKFTRPKLIEFLATCPATTIAMEACGGSHFMARKLEELGHSPKLISPQFVRPFVKSNKNDFVDAEAICEAASRPSMRFVQPRTESQQAMRALHRVRESLVQDKVKTTNQMHAFLLEFGISVPRGAAVISRLSTILEDNSLPLYLSQLLLKLQQHYHYLVEQIKDLESQLKRKLDEDEVAQRLLSIPCVGTLTASTISTEIGDGKQYASSRDFAAATGLVPRQYSTGGRTTLLGISKRGNKKIRTLLVQCARVFIQKLEHQSGKLADWVRDLLCRKSNFVVTCALANKLARIAWALTARQQTYVA

SEQ ID NO: 319450 - protein, 367 aa, unidentified
MEARTVSSLPTAAPHHDVVRCLLAIELSKASWIIAVHTPLSDKISRYTLEGCDWKGLLELIERIRKRVTREFSPSVEIISCYEASYDGFWLHRLLEGHGVRNHVIDPASLQVDRRARRAKTDRIDAARLPRSLMAHVRGEPKVWSVVRVPSVAEEDDRRLHRERDRLINERGQHVNRIKGLCAVHGIYDYEPVHSKRMPRLERLRTPTGDQLPRRFKEEIKRELQRLELVLQMIKAIETERDAVASAKASTHTNAKKIQKLVKLRGIGSEFATVLVGEVFFRPFSNRHQIASYVGLTPSHFQSGSMSRDQGISKAGNPKARTTMVELAWMWLRHQPGSSLSAWFRERVGTLRAAFDASASWQWHVNC

SEQ ID NO: 319451 - protein, 351 aa, unidentified
MTLSRRLALGIDISKADFHVALVAADGNANTPVLGSATFANTSKGFGQLNRWLKSCSKALLKGEKKGSVSLQYHACMEASGYYSNALAFYLHDRFADTTDCVSVVRGQLPKAFMQSSGQRTKTDKQDAIGIARYCAAQTPEPWRPPTAEEQELKALTRYVDELKTNINQERNRLEGATVAAVRKQIKEHIAFLDKQIKELDTQVQELLKKSQTFSEPLRLLLSIPTIGLVTAARILAEIPDIHNFDTAAQLVAYAGLNPTQHESGTSVHGKSRVSKQGNRHLRTPLFMPALVAMQGCNPALNPLIDRLVAAGRPHMVVVAAVMRKLLHIVFGVLKSGKPFDPNHAQNTVPT

SEQ ID NO: 319452 - protein, 442 aa, unidentified
MAMRTRSELTVQHPDAAGIDIGGKSHFVAVPPGRADTPVREFGCFTEDLHAMAAWLLALGITIVALESTGVYWVPVFEVLESYGIAVVLVNAHSVKNVSGRKSDVLDCQWLQQLMSYGLLAAAFRPPADVCALRAVSRQRDTLLREQARCVQRMQKALTLMNVQLANALTDIAGQTGLAILRAIVAGERDPQALARLRNYRVKASEADIAKSLEGTWKDEHLFCLRQALSLYDTYRALIAEADAKLEALIAPLRRAQAQAAGAQSKKRGGKNAPGFDVREALREWAGVDLTQIGGIDVSTALKVLVELGPDLSKFKSAKHFCSWLGLCPGTRISGGKRLSGASKRIPNRVARALKLAAQGLHHSQCGLGAYYRRMAARLGKGKAITATAHKLARLVYAMLTGGEEYVEQSQAQYEEKFKARTLNYLQQKAKTLGFDLVPAAV

SEQ ID NO: 319453 - protein, 355 aa, unidentified
MQYVGIDWAYRHARWCAISEHGELTAETTTPADEQGLLRLVARLGPNVKACVEMMSGAVWVRDRLEQAGWQVEVADARKVKALAPLAAKTDKVDARVLATLAFRDLVPAVWVPSLSERALREQLKRRAHLIRLRSSAKNRGFGLLSQWGLRLSLSRLREPDAMELLESHGVPEAWRRSVFEAVALVDHLDRRLEPLERELVTLARADCRVQLLESIPGVASILGLTLAVEIGEVARFATARKLVGYSGLTPSVRQSGESSRTGRLSKAGSHPALGGGRGGPARLARVQPLAPPLPRRQAAQRQDQRRQVGGGPQGPDSRLARCSPEASPSSLAAHAALSRQAPRSPWPPNGPAVN

SEQ ID NO: 319454 - protein, 401 aa, unidentified
MTVPTHEQIEVFLGVDVGKGQHHAVAVSRTGTILFDRTLPNDETRLRELIDTLTHHGPTILVVDQPATIGALAVAVAQDMGITVGYLPGLAMRRIADLYPGEAKTDKKDAAIIADAARTLPHAIRHLKTTDTQVAELSILSGFDDDLAMQITATSNRLHGLLTQIHPALERAIGRHIAHPAILDLLEHYPTPAQIRRLGHSRLATRLSKKAPRMGARLADDITTAISEQNVVVIGTSAAETVIPKLAEQLSSLQRQRSDVAAKVEALVEAHPLYPVLTSMPGVGIRTTARIITETSGKHFATAGHLAAYAGLAPVTRRSGSSIRGEHRSRRGNKKLKRVLYLSAFAALQDPDSRDYYDRKRAQGKSYNQALVALARRRCDVLFAMLRDGTTYQAHPRPSAA

SEQ ID NO: 319455 - protein, 347 aa, unidentified
MGKSITDLSSVTTVGLDLAKHVFQVHGVDASGRVIVAKALRRKDVLAFFAQLPECLVGMEACSSAHHWARELIKLGHDARMMPPAYVKPFVRRQKNDAADAAGICEAVTRPSMRFIGVRTLENQAALMHHKAREMLVAQRTQLINALRGHLAEMGVIAAQGLKNARELARLILAEGDETIPACVRMALVPLVRQLHVLDQEIACSHRTIAAMARDDEMARRLMTIPGLGPVTASAMASSVQDISAFSGPREFAAFVGLTPRQHSSGGKERLRRVSKMGNRYLRRLLVVGAHAVLFHRKPHEDALRSWAKKLMQTKPFKLVTVALANKMARIAFAIMRGKTSYSVDPA

SEQ ID NO: 319456 - protein, 402 aa, unidentified
MNAVGIDVSKGKSMVAIMRPFGEIVSTPFEIKHTTSDINSLVELINSVEGESRIVMEHTGRYYEVLAHQLSEANLFVSAINPKLIKDFDNDSLRKVKSDKADAVKIARYALDKWQNLKQYSVMDELRNQLKTMNRQFGFYMKHKTAMKNNLIGILDQTYPGVNTYFDSPARSDGSQKWVDFAFTYWHVDCVRKMSLNAFIDHYQNWCKRKKYNFSKSKAEEIYGKAKELVPVLPKDEITKLIIKQAVDQLNNASTTVESLRTLMNETASKLPEYPIVMAMKGVGTSLGPQLMAEIGDVSRFTHKGAITAFAGVDPGVNASGSYEQKSVPTSKRGSSDLRKTLFQVMDALIKTHPQDDPVYQFLDKKRAQGKPYYVYMTAGANKFLRIYYGRVKEYLASLPES

SEQ ID NO: 319457 - protein, 345 aa, unidentified
MTVYIGVDFHARAQTISYLTTEDGEIRRAQLDHGQPQEVRKFYEQFAGQQVIVGFESSGYAAWFEEMLEELSCEIWIGHATAIRLFARRRQKNDRRDADLILDLLWRGDFPRIHRHSPESRAVLQQLRYRQRLVKMRTMIVNSLVFMAASRGVSLRTQLKSRRGIERLQQIALPQPLIEQRAEMCQLLQELKTRIERVEQWLEAKANSDNRVKRLRTHYGIGPLTGLCLVHTLECVERFANPRKVTAYVGFDPVEDSSGERRRMGSISKQGSRLLRFYLVEAGQIAIRKDQDLARVYQRVLVRRGHAKAKVAVGRRLLVRAFIMLRDEIDYAEFQRRGVAARSSR

SEQ ID NO: 319458 - protein, 356 aa, unidentified
MSRDIKYIGMDVHKEAIVIAVRNTRGHVVMESIVETKANSILQFIHGLQGELQVTWEEGTWAAWLYDLLKPHVHQVLVCDPRRNALLKEGSKNDKVDARKLADLLRTGMLRPVYHGEHGLRTLRELARTYQTLSQDLNRVMNRLKALYRGWGIACGGTRVYAPRYREEWLGKIEPVGVRRRAELLYQQLDGLQALRRTLRPELLAESRKHKAAKLLRQIPCIGPIRAARLLALMQTPHRFRSKRQLWTYSGLGIETRDSAQYRFVRGELQRAKKPQQIRGLNRNHNHEMKDIFKGAATRASCGVGPLRNFYVALLDKGMKPEMARLTLARKIAAIALTLWKKEERFDAEPLKMQAA

SEQ ID NO: 319459 - protein, 333 aa, unidentified
MPNPAVIGLDIAKNVFQVHGADAEGRCVLRRRLRRAEVITFFARLPKALVGIEACPSGHHWARELRSLGHDVRLIPPQYVRPFVKTNKNDAADAEGICEAVVRPNMRFVPIKSVAQQAAMMLHRTRALLLRQRTQLINAVRGHLAEFGLVARRGARNIRELAELVRDTEADKLPDAARAMLVLLLEQIREAQLRIRKTEQALEAWAKQSDACRRLLAIPGVGIMSATAIVLAMDDPKRFRSGRHFAAWLGLVPRQSSSGERQVFGGISKRGDGYVRTLLIHGTRSLTRWLVGLPMRRPTNIAAVAIANKTARTAWAILAYGHQFQPTRRAEAA

SEQ ID NO: 319460 - protein, 408 aa, unidentified
MEMETVVERGCGLDVHQQTVVACINGNGIKKEIRTYGTMTNDLLKLKEWLKEKGVTQVAMESTGVYWKPIYNILEDSFKVILANARHIKNVPGRKTDVKDCEWLCKLLQSGLLSGSFIPPKDIRQLRDLTRYKRKLVQTISAEKNRIQKTLEDANIKLSSVVSDTFGVSASQIIEELLKGKLSIEEMSNLARGKLVKKRELLKEALVGNFQEHHKFMIEASISHIKSVEKIIENINSQIAEKMQKYNKEHRLLQTIPGIKEDGASSIIAEIGVDMDRFPTEGHLSSWAGMSPGNNESAGKKKNGHTTFGNKCLKATLTEAGWAASRTKNTFFNAKYHSLVGRRGKKRALVAVGHKILIACYHILRNKTEYKELGATYLDGRKKVRIVRSYLKRLQNLGYGVTLQPLAA

SEQ ID NO: 319461 - protein, 334 aa, unidentified
MQNITLIGIDLGKHSFHIHCQDKSGKALLRKKFTRTKLMQFLATCPPSVVVMEACAGAHFMARRISDFGHETKLISPQFVRPFVKSNKNDFVDAEAICEAASRPSMRFVPPRTEPLQAMRALHRVRESLIRDKVKTTNQIHGFLLEFGISLPTGDAVIKRLSLVLAEHEIPEYLSRLLVRLHTHYLYLVEQIAELESELSQSINADDTAQRIMTIPGVGPITASLLSSQPGDGKQFSCSRDFAASTGLVPRQYSTGGKSTLLGISKRGDKNLRRLLVQCARSFMMRLERQHGKLAEWVREQLNKKHSNVVACALANKLARIAWVITTQQKEYQA

SEQ ID NO: 319462 - protein, 404 aa, unidentified
MEDTTVRFAGVDWASTRHAVCVVERDGAIAERFEVAHAALDLAAMGRRLLRAGVARVAIERPDGPVVDALMGAGLEVVVIASRQVKALRERYGSAGNKDDAFDAYVLADCLRTDGGRLRGLVPDSPATLTLRALVRARRDLVEARVAAANQLRAHLQIAFPGAVGLFADIDSPISLRFLERFSSAAAAAWLSERRLGAWLSANGYSGRRRPGELYGRLADAPAGLLGEEGRARGAVTRALVAVLMSLRSEISELEARIAEQLLLHPDGGIFTSLPRSGSVRAASLLVEIGDCRERFPTAESLACLAGAAPSTRASGKHRAVTFRWAADKKLRNALIDFAGDSRHANPWAADLYAKARARGKTHPHAERILARSWCAVIWRCWQERTPYDPARHGALQRLTAVGG

SEQ ID NO: 319463 - protein, 349 aa, unidentified
MKFLCVGVDVSAKELEVAYRGEDGKLGRVRLRNTAKDHKALIRDLRKRSKSVRVVLEATGIYGLDLALALDQAKGIEVMVANPRAVADFGKALLQRSKTDRMDAMAILAFCERMPFVVWARPSKAAFELGSISRRMYGLNELIRVEKNRNHAAAHLAASPSVVNRSVQSVIRLLQREIERLREAALRVIQSDQLLAERYQLLNSVKGIAATSAIRILGELALLPSDMSTRQWVAHAGLDPRLFESGTSVHKQSRISKAGNKYLRAALYLPAVVAGQFDPHVIAFRGHLLARGKHKRQTHVAIMRKLLHAIHGMFCHQQEWDGAKFFAVVDAVGAEGIASSAISSASTAC

SEQ ID NO: 319464 - protein, 327 aa, unidentified
MAKRTTICAGIDTGKRKLDVALDGSSEQLQIDNTLEGYKVLLDWLRCHRVKRIGIEASGGYEQAVVAELRRKRVVVVVFQPAQVRAYAKFHLQRAKNDKIDAALIAACTAAVKKIHPPPDARLLPFAEHLTMIDQIGEDIALLKNRLETCRNERIQQVWKEDISRLAKRERTEFKALVAAIREHRDLAERLDLIYSVSGSGMPTAVAILVRMPEIGQLTREQAAALAGLAPYDDDSGNHVGVRHIDGGRQRLRRALYTAALPASFRWNPHLITLYKRLIAAGKGHKRALIACARKLLIFVNAVVARGIPWGHERPPTVAASALPQTG

SEQ ID NO: 319465 - protein, 314 aa, unidentified
MYDYIGIDVSKKVLNIFDGKKDFIFDNKENLSSFKKYLKKRYPDFSSLVILFEATGIYSYHLKAFCATHMIKAYIINPQASHNFAKSLGTRSKTDTTDARTLWAYHRLIVDKDIRIPKVDPIATTLSSYLVSYRLTLKQKLALANHLEGIKDKALYHLLKKEQERLCKLEQELLIQMDTYIKKYPQLNEDYQRLLGISGIGQKTAIGLLTLFQTYPDTNRNQITALIGLDPIQRQSGTSVHGRSRISKHGNQMMRKCLYMPTLVSIKYNQKIKAFYDRLVLKHKPKKVAVIAAMRKLLLIAHAIYKNKTVYVPG

SEQ ID NO: 319466 - protein, 387 aa, unidentified
MQDDAPWPGPATIRTDLGAIFISLELSRSSWLITSLSPGSGEKMSKHSVAAGDVTGLLDRFIQITGKAQGRTGRSFPIIVIQEAGLDGFWIHRMLESKGFESCVVDPASILTSRRQRRAKTDRIDGETLVRTLMAYKRGEPRVCSMVKAPTPEEEDRRRLCRERKTLTAERIEHVNRLKGLLFAQGIFDYEPLRRNRRERLEELRTGDGRILLPHLKAQLIRELDRLEFILTQLGTVEAERDALLAQASQEASAPATMLTQLKGIGQEFAANLWLEGLFRSFDNRRKVAAYAGMAPTPWQSGSVDREQGVSKAGNPRLRTTMIQLAWLWLRHQPGSALSRWFNERVRQNGGRMRKTAIVALARKLLIALWKYTSSGVVIEGAVMKAA

SEQ ID NO: 319467 - protein, 346 aa, unidentified
MILGVDTHLDIHVGAVISQTGKLPGTHIIQTNQSGYLELLDWARSFGILERAGIEGTGTYGAALTRYLIKNGIYVVEVNRPDRSKRRLEGKSDPLDAENAARTVLSGSSKAIPKMQSGACEALRIISVARRSAVKARTQAINQLCALLVSAPQDVRDKLWKSKPRECVTACINSEVSEYSPLRIALCSTLRSLAKRWMALTEELNELDESLDKLTRKYASHLRSQFGVGPQTAATLLAVAGDNPERLKNEAALASLCGVNPLPASSGKTVRHRLNRGGSREANNALWTIALVRMRSDPRTRIYVDRRTGEGLSTKESLRCLKRYIVRELYPLILSDLAYANRPLLT

SEQ ID NO: 319468 - protein, 387 aa, unidentified
MTRFMGLDLHKNYIHGYVFQPGQKGTHFRFLNTPDEWARFVATQLTPETAVAIEATGNAFTIYDRLVDYVRQVVVIHPAGLKGLGGGRHTDRIDAERLAQLMALGTYTSVQVWVPPAEVRAIRALITQVRACQQQETAWRNRARNLLIRTGYAVPRTVALREWFAAQGAELDETLQIVFTSALTMAEQAQQEGDRLRGEILRRLAGYPEMAWLWSVPGLGAWTAAVVWAWLGDPQRFRSARQVGRYAGLDPSVHQSGEADWRGHISHQGPAILRQVLVEAAWWAIRAKDTPLRTFYARVVPRLGKRRAIVAVARKLLLAAWRVWHEQRLAHEVDRRRYQKKLSAIRAILRTVPSYPLTDRWQILTGAEGSAPDRAATEARGQPVLST

SEQ ID NO: 319469 - protein, 395 aa, unidentified
MDLLLVGIDVSKAFFSAVGIDSEGKGSFSGSYPMDSSGFEGLIKAMTSHCEDLSKVVIGMESTGCYHINLYSFLISRQFHTIVINPLLIANYAKLSLRKTKTDKKDAGTIAKFLLDHRQEISQLSVNQDLQDLRDLSRERESLCHLISAIKVEIKRVLRTTFPELESIGNLYTRSMIRFVQEYPSARLVRAAKPKAIAKTLKQPSVGNKLTLTAEDIINAARNSVATVSPAKEIIVRGKIATLLHLQERLAEVTKLLTDLCQRTKLEDLGILRSIKGVGPNTAAPFLAEMGEVNNYSSHKKIIAYAGIDPSVHESGKFVGMSKLSKRGNRHLRRAIYLMTASVVSQNAFFKAYFLKRKGEGLAPQKALFATAHKLIRIIFAMLSQRTYFKVEEAQ

SEQ ID NO: 319470 - protein, 343 aa, unidentified
MHNGENSPADTITVAGADVSQAWIDVACQNPGQGAVAESRFDNTPAGHSRLIGWLRKEGVPARITIEASGIYSLDLALALHEAEGIELMVAHPKALKNYRSARGRRAKTDRVDARLICDFCRRMPFQTWTPPSKEAFELRALARRLQTLIEERVREKARLHAATTSRHASSYVANDIEVNIRHLERRIERIEAEALALIGGHDALAQACEHLRSVKGIGDRSAVKLLGELVMMPKDLTVRQWVAFAGLDVRHHESGTSVSKPGRISKQGNARLRKALYMPAQVAIQNEPNVRAFYDKLLKRGKKPMVAIVAVMRKLLHSIYGMLKHDQDFDGRKFYRIPVSAA

SEQ ID NO: 319471 - protein, 400 aa, unidentified
MAGSEAPEKSGLTRFAGIDVARHTHFVAVVDESLAVLVKPTAITEDAVGYQKLIALLGSPAGLLVVMEATGHYWRNLFGFLCARGFTCAVVNPVRIRHFAKVDLRRAKTDRTDALTIARFGAQKRPQPLPPRDPVLDNLRALVHLQQRLRQDFADRMRQIHRLLVLVFPEFTQVVRTLESQRATVLLRHYPSAQAFRQAELHQIARLRAGRYSVGASIAASLSSAARTSVAQHHSAGYDTAVRTFCADLDTLRLSLRQLDAEILNNVQEHPLTAPLLSIEGLGTLTIARLLSRLGDPARFRSAAALASYVGVVPATQQSGQSRPARAPVSPLGNADLRAELWMPTLVAIKRNAWLRAHYQRLVARGKPPKLAIVASMRKLLVAIYAVAKSRSPFVPRVEP

SEQ ID NO: 319472 - protein, 338 aa, unidentified
MIVIGVDVHKHSLTAVAVDEAGRQLDELTLDYPDAPLFEWAASLGEVRLWAVEDCRHVTRALERRLIAAGEELVRVPPKLTGAARRGGRVRGKSDPIDALAVARVGLREPDLDRPRLGEERFRDLKLLVIHRDDLVDERRRCQQRLRWHLHQLDPSYRVPAGALDRAIWLDRVGRWLTRRPTDVQVRVARDLVARCRSLTRSITELDRDLSELSALTAPRLLELPGCGGLTAAKLLAEIGPIERFRSDAQLARHGGVAPLEASSGRTQRHRLDRGGNRQLNCALHRIAITQARVHPPARAYLERKKAEGKSNREAIRCLKRQLARTVYTTLKNEPPLT

SEQ ID NO: 319473 - protein, 340 aa, unidentified
MRQYKLIVGLDISLDSFLAFLISSDENFTAGPKKFKRSEDGIAQLLLWIYKLGFNPNEVKVVMEATNNFWEIIAVKLDKVGIGAISIVNPKIIKDFSKSLRKKAKTDNIDAEVVALYGVRMKPENTDLKKSKKFGELRYLIRTREFWIKEKVRLENYVRNLKRSVFASKKETEWIEKEIKRIIEHIKEIEKEIEKLVEEVEELKKAVKLVDSIPGIGKVNGVVILVETGMFEGFKKGKEVVSYAGIVPRVYESGIRKGDRGITREGNKRLRNAAYFAAVASLRSSCEVFRKFYERLVSRGKAKKVALVALAGKILRIAFALVKKEEIFNDQKLRLTNLGA

SEQ ID NO: 319474 - protein, 366 aa, unidentified
MKLKVTKQNPNNQSPSIDLDGEPVYIGIDVHKDQWKVTIRVGGMEMSTFSMNPSVEELVSHLQKNYPGGEYYSAYEVGFCGFSIHRQLEARGVENAVVNASDIPSLQKERMTKTDTVDSRKICRELERGTLSSIYIPTTGQEALRQLCRWRRKISIEEGRMKVRIKSFLNFIGFKLPSKFDGRRWSGKFISYLRELRFAEELNTVMLQSQLNVLESLRREEVLVLRRIREEVRNDEEKQRVMNLLLTVPGVGIATGLAIYSEIMDMKRFSSLDRLKSFVGLSPAVYSSGDKMKVLGLSWRYNKYLRNMLIESAWVAVHKDPALLSRYLELSHRMSRTNAIIRIAKKLLNRIMHVWNTGLPYERKVA

SEQ ID NO: 319475 - protein, 355 aa, unidentified
MNSEKYIGLDVHQATIVVAVMDSSGKVVMESILETKAATILQFFAGLRGTLSVTFEEGTWSAWLYDLLNPHVDKLVVCNPRKNALLKDGNKSDRIDARKLAELLRGNQLKPVYHGETGVRMLRELSRSYLTIVKDLSRVMNRLKAVYRSWAIPCAGRDVYYTRHRAQWLAKIREAGVRRRAERLYEQLDMLRYLRQQARRELLAESRKHAITAKLRQIPYLGPIRSALAVALIQTPHRFRTKRQLWAYSGLALETRISAEYRYVEGQVRRSKKLLSIRGLNKDHNHDLKGLFKGAATMASVRPGPFQDFYQAALAKGIKPTMARLTLARKIAAITLTLWKKGENFDAEKLKSQAA

SEQ ID NO: 319476 - protein, 375 aa, unidentified
MLLACPVTVLPIPEPDRNRTSVPGKEKNAVSSLAEVVDVVIGVDTHKHTHTAAVVVAGTGAAVEHRTVDTDPDGYDHLVSMADGHPGLRVWAIEGTGGYGAGLTRFLAGRGETVIELDRPNRPARRNGAKSDPLDAVRAAREVLAREHHAQPRAGGDRAALSVLLAARRSAVDAATIAQRQLHALVTAAPEVVRAKFRGRPTRSMLSAATRLRTSPNWDVETATTAQVLRSLARRCLALETEAKDHEKAILAIARTWRPDLLDQQGIGPIVAAVVLCAWSHPGRCRTEAAFANLAGVAPIPASSGQTTRHRLNRCGDRQLNRAIHVIALTRLRYDPATRAYAERRRGEGKTDREIKRCLKRYIARQLYRQLEAGR

SEQ ID NO: 319477 - protein, 400 aa, unidentified
MRTVFGIDVSKASSEVAILVNGERVYGYTMPNDIIGFSRLLEDLKTVSNPEIIFEATGVYSRRLQAFLEENSYDYTRLNPLEAKKQLDGLRVRKTDKIDAEKLASSQFVLNRKPTYVQEEVYQNLHDLSRFYQNLTEDIVRTKNRLHKVLQVAFPEIENLLSTPTGEQYWNLVSIFPTKHWVLELSEVELKEAIRNSTSKRISENRVGNLTEKLVGLAKQSYSGISKTSPMVEEVKYDAQELIRLTNRREQVLQQLIELAEPLPEYEILLSIPGIAETTATSIIGELGDIRRFKSANQINAFIGIDLKHYESGDFLAQEHITKRGNPYARKILYKCIHNIASASHTNPCHIADFYEKRKRQSQTTSTKPHTIASIHRLIRTMYYLIMHNKLYDYTLAQSH

SEQ ID NO: 319478 - protein, 362 aa, unidentified
MEVAGNAAGLDLGKKTYEMCLIGPNGKVTRTGGKTDFEGLDNLCKKLNKDDVVAIEACNLAFRIERIIRNKVGCRVIILNPGRLAIIFMSTRKTDKEDSMKLAKYLRSHDENEMPIVTPPSDEEWARRKLLSEYRSLKSLRTKEINRLHAIFEHNGYTQFKRKDMCVPKNRDNILPLLKGYEKEEAERLVERLILIEKQLELLNQKINEETKSDERVQRLMTVPGVGPITALSYVAYIGDVNRFENAHQVSNFIGFVPKVDRSCTINRLGHITKQGNPILRSLLVQAAWSATRSKSGGALKDKYNYMAVTRGIGKGKSIVTVARKMGELLYTLLKNNQVYEPRISITPDAYISKLAEEALIS

SEQ ID NO: 319479 - protein, 370 aa, unidentified
MHKPTTLFVGLDVHKDSISVAYACEDRDSDVTFVGPIGTLQRDVDKLVRRLQSKASRLVFAYEAGPCGFVLHRYLTGKEIECLVVAPTRIPKKPGDPIKTDRRDTIQIARSLRAGDLDSVYVPSVDDEAIRDLSRAREDGVIDLKAARLRLKSFLLRLGIVYVGRADWSDAHQRFLARVVYPTPVQQIVLQEYLNAITEIADRLKRITVELREHSSSWRLLPLVEAYQALRGVQDTVAITTAAELGDITRFDNPRQLASFVGLVPSVYATGKSRHLGSITKAGNSHARRVLVEGAWAYRHPAKVSEPIRKRLERLPRKIQDIGWKAQVRLCKRFRRLSARGKHPNVIVTAIARELLAFMWAIAREVKINA

SEQ ID NO: 319480 - protein, 340 aa, unidentified
MPLYGAFDLHAKTNHLGIIDGSGKRVLMKKLPNEALVILEALKSMKRRIVGLVVESTYNWYWLVDLLMGAGYKVHLANPSAIQKYSGLKHADDVHDAFWLAEQLRLGVLPVGYIYPKEERPIRDLLRKRGHLVRLRTSLIISLQNIITRNVGLQVDVNDVKRLREDRITPLLGMNEDLALAGRASKETIDFLTRQIKHIEKVVEDRVQLKEPYRYLLTLPGVGKILGLTIMLETGTIGRFPGVGDYASYCRKVTSKWTSDGKAKGKGNKKNGNKYLAWAFSEAAECARRYDEQARAYYNRKARKSNFMVAHSALAHKLARAAYYVMRDQVPFMPEKLFAV

SEQ ID NO: 319481 - protein, 348 aa, unidentified
MCKQIAVDLAKSVYQVAESVRAGQVSQRKRLNREAFRRYIQEQAEPVEWLMEACGTAHYWGRFAQALGHKVTLLHARYVRPYRRRNKTDRNDCDAILEAARCSGIHPVPVKTHEQQQLQQLHGLRETWKKSRTQRINLLRGIFREMGLEAPAATAAFLRSAHELVEQPEVVALRGQLQIVLAEINLYEQCMDECEQQLARWHADDAIVRKLDEVSGIGVLTASALKSAVGQPERFASGRQLSAWLGMTPREFSSGDRRKLGHISRQGNVYVRTLLIHGSRAALLAAQRLHRRAPERLTRLQRWAVETAARIGHNKAAVALANKLVRICWAVWCHERRFSGDWQSSKPA

SEQ ID NO: 319482 - protein, 433 aa, unidentified
MGLIVPTVMPPERADQPPSYDGFVGIDWGSQQQQVSVLDRDRRRMGERVVDHDGASLAQFVAWLWGLSAGQPQRVAVAIEVPRGALVEGLVERGFHVFAMNPKQLDRFRDRHSVAGAKDDRRDAFVLADSLRTDQPSFRRLRLDDPQLLVLRELSRAEETLLEAFRRSANQLRDQLHRFYPQMLQLCSAADAPWLWDLIDLAPTPAHAARLREEQVQGGLKAHRRRRLKAHEVLACLQTPARPVAPGAVQAAQAHCRFLLPCLRGLAEHLQACGQQVGALLHTLAEMPGAGAGPSDVAIVQSLPGVGRKMTAWLFAEAAQPLAERDYQVLRTHGGVAPVTKQSGKRRVVVMRRGGNPRLRHALYHMARVAMQRDAHFNSVYAALRAKGQRHGQALRSIGNRLLRILMAMLRHRTCYDASRIHREPVVQMGETI

SEQ ID NO: 319483 - protein, 467 aa, unidentified
MSKAKKGASKKPGKKNKNKKKDVLEGLPPLNLNAAGIDVGNAEHTVAVPPGRDPQPVRTFGSFTADLHRMGQWLVTCGVDTVVMQATGVYWVGLYQILEMYGLEVKVVNARYTKTLPGRKTDVQECQWLQKLHTFGLLNNSFLPNEETRVLRTYLRQRENLVAAAGTCMQHIQKALTEMNVQLANVISDLSGVTGMAILRAMVGGERNPQRLAELKNERIQASRQEIARSLEGNWREELLFVVEQSLQMYDTYHQKIVACDGRIEAHLKSMDAKVDVVAQPIPEPRRVKWPRKHQPQYDLRGELYRVTGVDMTQTDGLDVGTVQTVISEVGVDMTPWKTEHHFSSWLGLSPDNRISGGKVLKRGTRKVVNRAATALRLAAWSLLRSQSALGANFRRLRDRLGAPKAITAMAHKLARLIYRMLKYGKEYVDKGMAYYEEKYRQQQLKWLTKQAAALNLQLVPATGVVR

SEQ ID NO: 319484 - protein, 350 aa, unidentified
MMVIVGIDAHKRTHTAVAIDEAGRKLGEKRTTSTTTEANLELLRWADAFGKERRFAVEDCRHLSRRLEADMLAAGEELVRVPPKLMAHARDAARTYGKSNPIDALAVARAAWREPSPPRACLDGPSRDLRLLVDHREDLVRERTSQVNRLRWHLHELDPSWDPAPRSLVRFKHLDALGARLDGLGGTVAWVARDLVARIRELTVAANELERRIVEQVSRLAPALLGLAGVGGLTAAKIVAEVADVRRFHPKDAFARHNGTAPLPVWSGNLVRHRLSRTGNRQLNAAIHRIAVTQMRIHDGAKLYLGRRIAMGNTKTEAIRALKRQLSDVVYRTLMTDAVSTQVARFGEAA

SEQ ID NO: 319485 - protein, 360 aa, unidentified
MLPFDYWKYQNPNQEVATMYYIGLDVASKSSFVHVIDGRGKKIESKEIPTDKDSYRQYFGEWAKKAVYVAVEAGGHTRWIHDTITKFGINVYVVNPHKVKLIAESKKKTDKIDAKILAELLRMDGLPKRVYVATGESRELRDLLRSRQQLIKSTTNVMNHVRGLLRQEGIRLKPKALSTGEIFSRLRESGGIPAHFVPILSCYESAIAELYKQRRALDVVIAGYEHEDIDLLKTIPGFGEVSSKTVFAAVSTIKRFPRAKQLTSYCGMVPTVRSSGERANYGHITREGRSEVRQMAVQSAHALLRCKTIESFPLRKWHERVAKRRGYKTAVVGLARKLIEIAFYVLRDHRAYDARLLQAA

SEQ ID NO: 319486 - protein, 348 aa, unidentified
MTVYIGVDFHARQQTISYLTTEEGAIQHLVLLHDNPVAVRAFYAQFAGQRVVVGFESSGYAAWFEELLEELGCELWIGHATYIRQFAKRRQKNDRRDADLILELLHTGDFPRIHRYSRTTREMLQQLRYRQRLVKMRTMAMNMLLFMASSRGVSLRTQLQSKRGQAKLQQLALPATLGTQRDELLSLLQTLNEKISTIERWLEQQTKADLAVQRLQTHPGIGLLTSICLRYTLEDAGRFANTRKVSAFAGFDPMQDQSDERNRMGAISKQGSRWLRFYLVEAGQVAIRKDADLQRVYQRVARRGGHAKAKVAVARRLLVRAFIMLRDEIDYAEFQRRGVAARSSRGTA

SEQ ID NO: 319487 - protein, 427 aa, unidentified
MYRIAGIDVHKKKLAVVVSDVEVHGEYQFERCWFGANPEQLRFLSQWLAEHQVEEVVMESTALYWKPVWGALERYWQPICQKREGAGATSGMLHLAQAQSNRGPRGRKKDFRDAERLVKRLVADELKLSFVPDWEQRLWRTLTRRRYQLTRARVQLQNQLEALLEEAHLKLSSLVSDLLGVSARRMLQAIADGETNPEALAGLADRRLRATPAQLSDALGACTELHAVYRRLIKMMLGELKVIEEHTAELNQELATLLRPHQDAVERLAEVPGLGVDSAQQILAEVGANAVVFASDKNLCSWVGVCPGDEESAGESSSHRSPQGNRQMRRLLNQAANAAVKTKGSIFEIVYRRLVPRLGHNQTIGAVAHRLCRLIWLLLHKGVRYEERGPAVSQRSRQNRTSKMIRELRTLGYRVEFLNAVPSNPMP

SEQ ID NO: 319488 - protein, 347 aa, unidentified
MLHAGLDLSRRKLDVCLLSGQGEHLDQLAVPPDVDALRTLARRIEEVHDEPVSAVVESMTGARLVHDTLEQEGWDVEIADAQKVKGLAPLACKTDKIDSLVLATLSQRDLVPAIWLPDPRVREERELARFRMHLVRHKSSLKNRIHSTLVNFGRPCPVTDLFGVEGRRLLARLDVPEPWRGNVSASLALIDDLERQIDAINRKLREGHADHPYIPLLMSVPGIRWVLAFTIAAEIGEIERFSSPEKLTGYTGLCPRVDQSGERDRRGPLTKHGPTYLRWALLEATMHALRHPAYSERYQRTKRRLGKQRGAKVAQVDIARRLAHAIWHMLTRNQKFAPRGATFRLAA

SEQ ID NO: 319489 - protein, 339 aa, unidentified
MRVYCGVDLHSNNCVVGMMDETGRRLLKRRVPNELSLVKGLLQPYREQLAAVVVESTYNWYWLVDGLLEDGYPVRLAHPAGNAPYGGLKHTDDGDDALWLAELARVNCLREGYIYPRALRGVRDLLRQRTRLVRQKTGHVLSIKNIIAREGGRSLRVAQVEALDRAGIREAVRDPHAQVAVGILGELVGELKGQIRTIERTVLSQVRPDPRWQRLKTIWGVGEVLSLVIHLETGEMSRFAGVGNYASYARCVDSRRLSNGKPKGQNNKRNGNGYLEWAFVEAGHFAQANYPRAQAFFARKKAQTNAILARKALAAKLCRAAFYIMRDEVNFDPDLLFRI

SEQ ID NO: 319490 - protein, 365 aa, unidentified
MVTVGIDAHKNTHTLVAVNENGKRIGEITVDARPKGHEALLSWLRDLDDVTVAVEDCRHLTRRLEADLLIAGHRVVRVHTRLMAGMRRGARERGKSDPIDAEAVARVALREDNLPTAVLAGPSRDIKLFSDHRKLLVEQRTGLQAKLRWFLHELDPELCVPSRGMRRFCVLESLATELAEKPGAVAEIARDMLSDILALTHRINAIERQLSAIVRVEYPALLQVPGMGVLGAAMIVGETAGVTRFRNKDCFARFNGTAPIPVWSSNKVRVRLSRGGNRRINTCLHMAAVTQLRLGDEGAAYFAKQIDAGKTRTEAFRLLRRRISDRAFAALRADAQLHANEPTMTVVAITLTPKRATGVQAQAAA

SEQ ID NO: 319491 - protein, 412 aa, unidentified
MQVLHPRCCGLDIHKDTVVACLRLASGREAVTEVRTFDTMTTSLIALSEWLADNGCTHVVMEATGVYWKPVWSILSDGEFELVLANAAHVKNVPGRKTDVNDATWLAELVAHGLIRASFVPDIETQELRTLLRTRKQLVREKAGHVQRLQKTLEEANIKLDSAISDVIGKSGRAMIAAMIAGETNPVKLAALADPRIRNSPEKLRQALHGRVRGHHRFLLRLHLQQIDALDAAVVEIDREVDANLASFRTAVELLTSIPGVSALGAQVIASEIGVEMSRFPTAGHLVSWAGLCPKNDESAGKRRSTRLRNGAPWLKTTLVQCAWAGSRKKGSYLQAQFYRLRARRGAKKAICAVAASILAAAYHMLKDGVPYHDLGADHLDRRSKDKQTQRLLKRLADLGYAANLTPLPTAA

SEQ ID NO: 319492 - protein, 351 aa, unidentified
MSDYKIGCDAHKRFSQFAVRDGAGKLCQQKRIEHDEGTIREFLGQYPEGTPVALETVGNWYWIVDEIERAGCIPHMAHAAKAKVMMGNIHKTDKIDAAGLAMLEHLGSLPKVWIPSGEQRDQRELPRTRMALKKYVVGLKNRLHATLAKYAINIDGDDIFAGQGRKDIEAAIAHLPTETAYCFQQELAVLDNLEAQIKELEKHIRSRNKLSPACLLIKTLPGFGDILALVVDCEAGSIERFASCEHFASYAGLVPKEQSSGSKVRFGHMLAESNHYLKWAFIEAANVVSSHRNFPSWRNKHVVHLYERIRARKGHTKAIGAVARHLAEAAFWVLKKGQPYREPTPHLPKQA

SEQ ID NO: 319493 - protein, 356 aa, unidentified
MRIIGCDLHARQQTLAMLETTTGEVVNLTLMHEGNQVRDFYSQLPRPVLVGIEATGSMHWFLNLMEELGIECRVGHPATIRAAEPRKQKHDRRDAELILRLLTENRFPAIWLPSKELLDLRALLLHRHQWVRIRTRIQNALQAIALANGLRRGPSLWSYDGQAKMAFLPLPPHASYRRSALQALYRQMAEEIENLTKQVAEQAEQRSGARRLMTHPGVGPVTALATDVFLGDPGRFVDGKALASYVGIIPREYSSGGNQRFGGVTKQGSPLLRFLWCEAGAHAVRRDPERKRFYRRKLVQKGLGKARVAVARKLGIRRDEIDYEEFCRRGQKPQSGAACAGMLEVGNGANRYRPID

SEQ ID NO: 319494 - protein, 387 aa, unidentified
MSQSNDLSRSLVALKQDSTLIAVVELSRSTWLVAGIVPGVARHPLKKLEPDAAALLRLLERWRDEALQHGRTIARIAVAFEAGRDGFWLARWLRARGIEAHVIHPTSVAVSREHRRAKTDRLDTELLKRVFLGWLRGEPDHCTMAAVPTLEEEDARRPNREHESLVGERTRIVNRMKANLARLGIRGFKPTLRGASERLDTLRTPEGEALPPNASAELRRDMARLHLVVAQLKEIEAARLKRLVERPDQGPNAMVRLLAQVVGIGVETADMLVHEVLSRNLRDRRAVARYAGLTGAPDESGSRRRERGLAKAGNARVRRGMVQLAWRFLWFQKSSALAQWYRARTADARGGTRKTMIVALARKLLVALWRFVTTGEPPAGVVLCPAS

SEQ ID NO: 319495 - protein, 355 aa, unidentified
MSKIKKDFTGIKVFAGIDAHSVSHQLSIFVNDTFYKSVRMPATNHNIINYLHKNFPGADFLFRYEAGFCGFGLHYDLLENGIKNIVVHAADIPISHKHREQKSDKVDSKLIAQCLMGQQLIGIFVPDQQQVALRNLVRLRDQVVTDLNRCRCRIKMKLHFLSITIPEELKGSRWTKKFISWLQSISGLCEMNKYTLDFQISDMLHIREKLLTINRKLRELSRSQEYEAVYNLLISAPGIGMVGAWRIISEIGDMTRFQSEKQICSYAGLIPNSKASGENHYAGRITVRGNKLLRTTFIEAAHIARRNDPALAAFYQKTNQRKTKSNTAIVAVARKLLCRIRHMMINSCLYEKGVA

SEQ ID NO: 319496 - protein, 365 aa, unidentified
MEKISTVKMKGKKIIKGQLTIGLDLGDRSSCYCVLDENGEIIREQKIPTTPEGMQQAFGKMARSRIAMETGTHSPWVSRVLTELGHEVIVAHAQKVRLIVKSRRKDDRLDARTLARLARIDPELLSPVQHRSAQAQLHLAEIRARAGLVSARTALVNAARGLVKSYGERLRKCGTQQFGQETTSGLSAGLREALEPLMQEVESLNERIKEYDRRIEKMAKETYPETELLKQVKGVGDLIATAYVLTVEDPHRFRKSRDAGCFVGLQPGRRNSGESEPQMHITKEGDEYLRTLLVQGAHYILGPFGEDSDLRRWGLKLSARGGKNAKKRAVVAVARKLAVLLHRLWVSGEVYEPLRNSQKAMTVAA

SEQ ID NO: 319497 - protein, 309 aa, unidentified
MTAVGIDVGKAALDVAVDGVAGVVRYANTAAGMGKLVRRLQGVVDARVVVEATGGYEDALLEACCDAGLWVCRINPRQARDFARATGELAKTDAIDARLLCLLARMFVDRLRRYEAPAPWQRELRDWLRRRGQVVTTLQAQRQQTALTSPSVRKLMARTIAALVRELAAIDRAMQALLKTHTPPALRSSKGMGPIFQATSLALLPELGTLTRQQIAKLVGVAPMNRDSGQMHGKRRIRGGRAPVRVALYMATLSAVRWDPAMRAHYQQLRARGKLGKVALVACMRKLLTLVNARRRDELRLQAGAAIAA

SEQ ID NO: 319498 - protein, 400 aa, unidentified
MRAVFGIDVSKTSSEVAILVNGEKVHGYTILNDAIGFNRLLGDLKTVHNPEIIFEATGVYSRRLQAFLEEYSYAYTRLNPLEAKKQLDSLRVRKTDKIDAEKLAKSQLVHNRKPTYVQEEVYQHLRDLSRFYQNMTEDLVRTKNRLHKVLQVTFPELETLLSTPTGEQYWNLVMAFPCKEFVLSLSQSNLCEIVRQSTSKRISEKRIAYLTDKLIKLAKQSFCAVKNTSPMLEEVRYYAQELLRLSERRQVVLNDMVALAQPLPEYDILRSIPGIAETTATSIIGELGDIRRFQTTNQINTFISIDLRHYESGNFLAKEHITKRGNPYARKILFKCIHNIASASHTNPCHIADFYEKRKRQSTIASTKPHTIASIHRLIRTMYYLITHNKLYDYSLTQNR

SEQ ID NO: 319499 - protein, 326 aa, unidentified
MSRIQGKTSSSQLTTSQVYVGIDVSKSHLDVYVHPTGTARRVINDKNGLASLVKFLRPHVPEMVVLEATGRYHRLCHRHLHDAGFNVAVMNPYRTRKFSDVLGQLAKTDEIDAKMLAQFGATIQPEKTAPPTPAIAALNELLTARRQVGAEKTALQNQLHDVTRSLVKQQIRARLKMCERHQAALEREIRAAISEHEELKCRFDILTSIPGVALITAATLLAELDELGAANSSQIAALVGVAPMNCDSGVWRGQRRIRGGRQNVRNALYMAALAASRACPDIALFYNRLRNNGKPFKVAITAVMRKLAILANTLVTENRKWELNPT

SEQ ID NO: 319500 - protein, 391 aa, unidentified
MFLLGIDIAKLDHVASCIDSSTNEVVFSNFKFKNDFRGFCSLLDKIRTFDDENLIIGMESTSHYGENLISFLFKQHFKVALINPLQTSHLRKANIRDAKNDRLDSLNIARSLIFAKLNFVSEKNIDCFSLKKLTRFRSNLIKQRSKAKIQLTSLLDLLFPELQYLFKSKIHSKAIYSLLKKYPSAEEIAALKDDEISNLLYASSKGHFRKEKSIELKSLAKTSVGIKDTSISLHVIQLIELIELYDRQIKDIVTKITDTVDKLDTKLLSVPGINIISCAIILGETGNLDNFSDSKKLLAFAGLDPKIRQSGNFYASSCRMSKKGSPYLRYALVFTAWNIVRHSEKFNRYYCLKRSQGKSHYNALGHVAHKLVRVIFTLIKKDIIYQEESLK

SEQ ID NO: 319501 - protein, 344 aa, unidentified
MNHYAGIDVSLESSTICVVDGAGKILREAKVASEPEALIAWFRLLGIPLDRIGLEAGPLSQWLYAALREAKFAVELLETRHVRDAFKSMPVKSDRNDARGIAQLMRLGWFWPVHCKSIEAQETRAVLTARKLLQSKLRDIENSLRGVLRGFGLKVGETTERTFAGRIKELVAGHPGLEIVAQALLEAHAVLQREFGGLDKRTQKLARLHPQAKLLMTTPAVGPIVALTYASAIDDPARFRSSKATGAHFGLTPKKYQSGQTDYTGRISKIGDASVREALYQAAHVMLTKPVKNCSALKGWAMRIARRAGMRKAKVALARKLAVILHRMLADATPFNPTAKAAAT

SEQ ID NO: 319502 - protein, 327 aa, unidentified
MSSIAHTRQVTVTRTICGVDISSQSLDARIGHEGAFAQFPNTTEGIAALLSFCQAHQVGLIAMEATGGYEQQAFAQLSEQGLPVAILNPRAVRQFAQSMGSLEKTDRIDAGMIAWYAEVKKSPPLCLAAKSQQHLRALVTRLRQLTDIRTAQLNQQRLVTDRAVQSSFKKLLAMLARQIRDLEQRIAVLLDQDPLWRELNQAFRTIKGVADRTVARIMADMPEIGMLSNKTISKLAGVAPLANDSGQHQGRRAVRGGRATVREILFIVASVVGRHEPDFIAAGKPPKVVRIALAHKLLVRLNAKAREVRQRLAALPPDRMALPAASL

SEQ ID NO: 319503 - protein, 339 aa, unidentified
MAQVTTLGVDIAKNGVCIHGVDAHGHVIVKKRLARQKVLPFVAQLPPCLIGMEASGGAHYWAREFTKLGHTVKLLSPQFVKPYVQSQKNDPNDAAGICEAVARPRMRGVPVKSVAQQDIQALHRIRERQIKARTALINQIRGLLMEYGIVIPQRASQVRHKLPFVLEDAENGLTITAREWLQALAEELQVLDQRLAATDHRIEQVCEADEACQRLAQLGGIGPLTATALVAAVGDATGFKNGRQFAAWLGLVPRQHSTGGKTTLLGITKGGNRYLRMLLIHGARAVLRVVDRKTDAWSRWLQGVQVRRGTNCASVAQANKTARVAWALLAKGDRYRRAA

SEQ ID NO: 319504 - protein, 313 aa, unidentified
MEATALFVGIDVSKDRLDVHVHGRDEWFDVPRDTEGIAALVERLRALAPQIIGIEATGGFENVVVASLAVAGLPVVVVNPAQVRAFANALGKRAKTDAIDAAVIARFVAATQPEIRPVKDEETRLLADLVARRRQILAMIKAENQRRANAPPRMQKSIDRLLKALGREIDSVNGDIDTGIRNSALWREKENLLRSVPGVGPTIARTLIAELPELGTLDRRAVASLVGLAPWTRQSGRWRGKSFIGGGRANVRSALFMGALVAARHNPVLREFRNRLVAQGKPKIVAIVATARKLLTMLNAIIRDKTPWQKQNA

SEQ ID NO: 319505 - protein, 367 aa, unidentified
MTQVANIMLAFIGCDVGKIWIVVHHSRTGRTWSVRNNAKELAAFARQLDNTCLVVCEATGGYELALLAAMVEAAIPAHRADARKVKAFIRSDGILAKTDRIDAIALARYGADRHARLSRWKAPDAERATLHVLVHARQDLVRNRTAHKNRLAAPGAQAAAPFLGKVVKALDGEIKAIEQAIKAEIRANKKLHKAVKLLRSVCGIGLITAAGLLALMPELGTLNRRQIASLGGLAPHPRQSGNSDKYRFVWGGRQEVKSVLFMAALSASRFHKTLRVFYQRLLARGKLKLVALTAVMRKLLIICNALLREQAVQDAAADTQTGPAIAGQTDASKASGPLSPPAAGLEAGGRRRDNQHGRPAGPPNANN

SEQ ID NO: 319506 - protein, 379 aa, unidentified
MQTDADASPAVLLAAIELSKSEWRVATAEPGSPKVSHHCLPGGDAAGLLTLLRRLQERAAARLGCPVRLVTTMEAGFDGFWSHRFLVGHGVDSHVVDPASVLVNRRARRVKTDRSDAQSLLRALAAHLRGEGHACTMVRVPSVEAEDLRRQVRERDRLVGERNQHADRIEALLFGQGIRDFNPRRPGAAERLACLRTGDDRPLPPCLLAELRREMDRLALVERHLGEVEAERDALVEQGASQGSAEARILTLSKLKGVGRTAAAVLVREVFHRDFANRRQVASFLGLAPSPWSSGTTNVEQGISRSGSRRARSVMVELAWLWLRWQPATRLAKWFQERSGAARGRARKVLITAVARRLAVDLWRYLAGGVVPEGAIAAA

SEQ ID NO: 319507 - protein, 346 aa, unidentified
MKIRTIAVDLAKNVFEIGVSERAGHVKKTHRLSRSKFLKFFVNQEPSRVVMEDCGSSHYWAREIRQLGHEVRLISPQYVKPYVLRNKTDRADVKGLLEADRNSDIHSVPVKTLAQQQLTALHRIRSRWMATRISRMNTLRGLLREFGLVIPVGARHVIPGAMELIEDAEVNLPDALRGTLNQMCTEIRELEARLQSVNGQLEALAAQTPVVARLRSIPGIGLLTATAMVGFVGDVTRFRSSRHFASYLGLTPREHSSGNTRRLGRISKRGDVYLRTLLVHGAPERHHTIAAPEMGPQCPPTTRVQQGNRCSSEQTGPTHMGRLETRFGLSGPLQSGLTVEPNITSA

SEQ ID NO: 319508 - protein, 371 aa, unidentified
MKSIIYIGMDVHKKTYSLCALLKETGEIIGETKIPADVSLIIKFIENAKKSVDSDDVQIKTGYEAGCLGYSLYWQLAAKGIECDILAPSTMHRSAKNKVVKNDRRDAKNIAANLANGTYKSVYVPTDEDVEIKEYIRMMHDFKIELKKVKQHINAFLLRFGHHYPGKSKWIPAHIKWLKELELSDMYREILDEYLSQLEILSEKIERFKYRLEELSQKETYNEKIGQLRCIKGIDTTAAMTMHAETSDFDRFPTANAFASYCGLTPGEDSSGESYHRLGITKQGNSMIRTTMVEAAQVLVRGTIGKKGKKVKSKQKDQDVKVIDYADKAVVRLQKKYHRMIFRGVKRNIAITAVARELACFVWGIETGHIS

SEQ ID NO: 319509 - protein, 370 aa, unidentified
MEIIIYVGMDVHKDSYSLCCYDPRSDRYLYEHKMKSTTANVIKYLENVKKQLGDVMFVCGYEAGPTGFGLCRELLRKDISCVVMAPTSLKRNANYKVKNDKVDARLLAKDLFTHDYSPVHLSSPKEEAIKEFCRMRRSIMTELKTAKQVLLAFLLRQGKHFDGKSYWTGEHRRWLKEISFEQPYLQEAFDEYVISVNELEARLKRIENRLEEIAKDEEVEVKVKKLICFCGIDTLTAVSIVSEVGDFTRFARAWDFANFVGLSVGERSSGGKERHLGITKSGNCYLRRLFTESAKSIKKTNVKFKKSKRLLDRQKGNDPKIIAYADKCRYRLKHKMMNLENRGKASNVASTAAARELACFVWGMMTDHIA

SEQ ID NO: 319510 - protein, 312 aa, unidentified
MYYIGIDVSKKDLSVFDGKKDLKFTNKEGLKSFKKYLKKKYNLSEIAIIFEPTGVYSLYLKEFCAENSIKAYIINPKKSHNFTRALGKRSKTDKIDARILYQFHKNIDLKDIKVPKIDQQAKTLASYLVSYEFVLKQRISLSNHLESLRNKSLIFLMKKDLKRAKMLEDKLFHDIKEYVSKNQNLREDYQRLLTISGVGEKTAIALLTLFKTYQGTNRAQITALAGLDPVKRESGTSVKDKAKISKNGKGIYRKIFYLPTICATVHNQKIRVFYQRLLTHHKTKKLAVIASMRKILLIAHAMYRDKTEYIAI

SEQ ID NO: 319511 - protein, 339 aa, unidentified
MKVYAGIDLHSSNNYVGIIDEEDKRLYQKRLPNQLEYILPALEPFKKDLEGVVVESTYNWYWLVDGLQDQGYKVHLANPSAMKQYEGLKHTDDKWDSFLLAHMKRLNILKEGYIYPKEERPVRDALRRRLLFVRHRTSHILSLQSSVTRSLGYKMSVREIKNLQESDAERLFNDPFLVLTARNNISVIGFISNKIKEIEKAVTSHVKLKPEFKLLLTMPGIGKILGLTIMLEVGDINRFSKVGNYSSYCRAVKSERLSNEKKKGEGNRKNGNKYLSWAYVEAANFANRHYPEVQSFYKRKKAKRNGIVAIKALSNKLARASYYVMRDRVPYDANRLFRS

SEQ ID NO: 319512 - protein, 387 aa, unidentified
MPQPNDLSRSLVALDQNSTIIAVVELSQSSWLVGGVVPGIERQPCKKLEPSPERLLAMLHRWRDEAVRAGRTITRIALAFEAGRDGFWLARWLEARGVEAHVIHPSSVAVSREHRRAKTDRLDTELLKRGFLGWLRGERGHCSMARVPTIAEEDAKRPNRERECLVGERTRIVNRIKSTLARLGIRNFKPTLRKAAERLATVHTPEGMPLPPNTLAELQRDMARLGFVVSQIREIEAARQKRLEQQPESGPHAMVRLLARIVGVGVETADMLVHEVLSRPLRDRRAVARYAGLTGAPDESGAQRREQGLARAGNARVRRGMIQLAWRFLMFQKESALAVWYRARTADSRRGTRKTMIVALARKLVIALWRFVTTGEPLEGVVLRPAS

SEQ ID NO: 319513 - protein, 347 aa, unidentified
MLHAGLDLSRKKLDVCLLSEQGEHLDQLVSPPDGDALGTLARRIGETHRQPVCAVIESMTGARFVHDTLEQAGWEVEIADAQKVKGLAPLACKTDKIDSRVLAVLSQRDLVPAIWLPDPSVREERELARFRLHLVKHKSALKCRVHSTLINFGKPCPVTDLFGVEGRRLLERLQVPEPWRGNITASVELIDDLERQIAEINRRLKEGHADHRYIPLLMSAPGIGWVLAFTIAAEIGEIDRFASPEKLAGYTGLCPRVNQSGDKDRRGPLTKHGPSYLRWALLEATMHALKHPAYAQRYQRNKRRLGKQRGAKVAQIDIARRLTHAIWHMLSRNQQFAPRGAAFRLAA

SEQ ID NO: 319514 - protein, 386 aa, unidentified
MSEPFGPATPETAFDHDSTLVVALELSGKSWEVGAVVPGVSRRPRRRLQPRDMTGLLTQLERWRAEALKAGRTVRRTVLTYEAGRDGFWIARYLQPLGIEVRVMHPASIPVERGRRAKTDRIDLDMLLRTFLAWLRGEPRVCSIVPIPDVTEEDMRRPERERDRLVSERVAVENRIGNLLCLHGVVGFKPRLKKAAEKLERLCCFDGTPLPPKLLEELRRLMIRHGVLSAQLKEIETAREQAMLAEDADETIQQIRLLAALYGLGLATATNLAREVFARSFRDRRALAGFAGLTGTPFNSGGREREQGISKRGNARIRRLLIQLAWRWLRHQPDSALSLWFVERVGAIKGRVRKIAVVALARKLLVALWRYVETGEVPAGVRFAAD

SEQ ID NO: 319515 - protein, 330 aa, unidentified
MDRQGKKLVHTNVKDNDFAFFLKLVQPYRHDLTVCCECMFGWYWLADACQAAGLKFVLAHALYVKAIHGGKNKNDRIDSEKLTHLLRSNLIPPAYVYPAQKRPLRALLRQRIFYVWRRAELLARIHSHQLAHNRVAAKQTRCNRDPWEEQLLKAEDHPLRQLALKNDLAMIRHFDRKILEVEKELQRQTKQLASREYALLQTVPGIGETLGLTLLYEIGEIERFPTVKDFLSYCRLVKGTVASAGKIKGLRGAKLGNPYLRWTFGEAAVIAKRDHFRIRPLAQRLEARMAGNKFKANTVVAIKLARAVYFMLKNKTVFEPERLVAALARN

SEQ ID NO: 319516 - protein, 323 aa, unidentified
MEQYVGLDVSQEQTSVCVVDGGGKVIWEGKCTSTPEAIAVTIRTRAPEAVRIGLESGPLSAWHWHELRKLGLPVVCLDARHVKAALALQLNKSDRNDARGLAQIVRTGWYREVVVKSVDSYLVRSLLITRAQLVRMRVDLANQIRGVLKPFGLIAGKGGGRPFAERVRALVAGGPLQEVAGALLAAWQAIGEQIAVLGRRLVTVARQNKAARRLMTAPGVGVLVALAYVSVVDAPERFAKSSSVGAYIGLTPRRYQSGEADYTGHISRCGDKLLRTYLYEAAGIILHRVPRWSALKAWGTRLARRIGTRKATVAVARKLSVTC

SEQ ID NO: 319517 - protein, 312 aa, unidentified
MSTPSYVGIDVAKAHLDVAVHPPAATPRFPHDEAGLSALVAHVQSLAPALVVLEATGGYETDVVAALALAGIPLAVVNPRQVRDFAKAIGRLAKTDALDAAVLALFAARVQPEPRPLPDAAQQDLTALVARRRQLVEMLTAERNRLQLARGCIKHDVQVHIHFLEQRLKDTNTDLQTLLRESPVWRAHEQLLRSVPGIGPTTAATLIAELPELGCLTRQQIAALVGVAPLNRDSGPRQGPRTTWGGRATVRAPLYMATRVATRCNPIIRTFYQRLRAAGKPPKVALVAAMRKLLTILNAMVKAQRTWQPVDM

SEQ ID NO: 319518 - protein, 443 aa, unidentified
MSFDRLKRPQRRKRLLGHKLKPSRATLFVQNSKPHLSMKPTYFLGIDAAKHKMRAVLSNRSEHVLFEKDLSVQATGLRQLLAAIKRQVNDPEQLLVLIEATGLLHLNWSAALTKAGYAVAVINPLIARRLYTLQNSIRDNKSDPIDARGLCTIGLLHGEKLLVHYRFSLRPEQFTLQRAQSVRKALRNALTNLKKTYQSLMDLSFPELGGLLQLDGVGIRQLLIQAPTPAAIVGKRLSTLEKNWMVRPKAAALKALAADSVADPDLAAASGPALVALLQSIAAMEARLHALDQQIAKLACTSVDPQTKALIETIPGFGPVNAAKILAWLPTEILHSGSNRKVAARLQAFMGNDPRLRQSGQWKGHTKRSKRGVEMLRTAFFQSAFSAAHNDPELRTYYQCKPAQGKTHEVALSHLMRILTRRLVAVLRSGKPYQSHYNLKNAA

SEQ ID NO: 319519 - protein, 356 aa, unidentified
MKKHNRGTRRTITIGMDLGDKTSRYCVLEEGEVVEERSVATTQAGMRQVFGARRRCRIAMEVGTHSPWVSRLLSGLGHEVIVANPRQLQLITQSSRKDDKVDAKTLARLARIDPELLRPIRHRGEQAQMALMRIRVRARLVETRTGLVNTLRGLAKSVGERIVSCDPDALDPLRLETLPEPLREVLKPLARQVESLTEQIQEADRTLEQIARSEYPETQLLRQIHGVGLLIALSFVLTVEDRRRFQKSRDVGAYVGLRPKRSQSGQSDPQLPITKEGDRYLRTLLVQGAQRILQPRSPDTDLKRWGMRLASRGGNNAKKRAIVAVARKLAILLHRLWVTGEVYQPCGYGQARAVAA

SEQ ID NO: 319520 - protein, 408 aa, unidentified
MELEPIYKRVIGLDVHQAQITACALIEQADGAVRTEQRQFGGFKKDRRALAQWAAALSPEEVVMESTGIYWKSPYAALEAVGIRAKVVNARHVKNVPGRKTDMADAQWLAMLARAGLLRASFVPPALLRELRLIARQRQNLVGQLASEKNRLHKVLTDGGIRLGVVVSDLHGQSARAMVQAIAQGKPPPEILQYASNRLRASREEIFDALQGDLSASHLFVLQELLAHIQEIEARITRFDTHLLQGLVTEAQALALLQTIPGVDQIGAAMLLVEIGTDMEVFGSADRLASWAGICPGNNESAGKHKSGHMRKGNRYVRRLLCEFAHAASRTQSVFKSKFQALVVRRGHKRSIIAIGHKILRTIFFMLKRGEHYRDSTTDYEALSVKKNAPRWIKALAKFGYITSPYST

SEQ ID NO: 319521 - protein, 398 aa, unidentified
MESQLRVGVDVGCHAHRVGIADPAGSILEEFDISHSEAGFQEFFRRVEERRAELGFPVAVAMEGYNGYARPLDRLVQEKGYRLFNVNNLKLARFKEVFPGAAKTDPIDARKILELFHLRDQLPMAKDVLQEVLPAPEVNEKLKRISRRRRQLVTEKLRVLNRMQADLQAVSPELLAATHDADNLWFLRFLSFRDDLRQLAKLRRATIRQIPSVGAKYAKVIEEWQAKATFSDEVEYVGPMIVDDAKRILELHQQIHTLDEALAKLAMQSEIARRLSTIPGFGKTSIAELAGEIGTLSRFSGEASLALYVGMSPLTHQSGQMSRARAPRQVNTRCRAAMMTTVARHIGCVPQSRAYYERKRAQGKTHSQAIRSLGRHMVRVIWAMLRDERDYEPRGDTA

SEQ ID NO: 319522 - protein, 320 aa, unidentified
MAPEVVDVIIGVDVCKERLDLFEYHSERSYWINNDAAAIKAWLDGFAGRLKLALEPTNRYHLGLAEAAYARGHEVYLIDPYRLSHYRAGLGRRAKTDAQDAQLLARFLERELGELRPWEPMIPGQQRFWQLLKRRAALVRCKVQLNQSLIGLGVLQEDAEALVQQCEQMIRKLDRALLKQAQELGWAEWIERCQAIPGVGPLTAMALVASWQRGQFRSVDAFVAFLGLDVRVKQSGRLQGRCKLTKKGDGEVRRLLYNAAMQGRRSSQWAPYYLRLRERGMSSTAALVALSRKLARVSFALLRTDARFVPAAPEIACVST

SEQ ID NO: 319523 - protein, 348 aa, unidentified
MWAIGGDVHAKTTTFYALDDDGNPVDDFNRRFVRVRSDREGFSCVCRHLAGVDYQILVENSTKTHDVVWMMEGLCMNVIVAHTPDLKKIAKSNSKTDKNDAKDLAMYLLARFAGAEQFGTSYMCSKEDMMDRQLCRMAKQEMIEMGKTKKRIRSHALMYGIGLPKSITTMRSKDYLASFDDPVFDDLVESLNDSEKRKKRLEKKIETRFKGNPTYERMMEIPYFGTITAAYLTSYISDIGRFRDSKAFVASLGLVPRVRNSSEKISRCGITKTGDPHARWLLIQATIGHVRNCNDSPVTRFFNRKNGGSLEERKENGEDVILNRSAIVAAAAKMARTIYTLEVKDRHW

SEQ ID NO: 319524 - protein, 388 aa, unidentified
MLAAADRTDASTAIQTDLPAIFASLELSRSAWLITSLSPGGGEKMSKHSIRAGDVAGLLMRLAQLKEKARGRTGRDFPIIAIQEAGLDGFWIHRVLQSEGIESHVVDAASILTSRRRRRAKTDGIDGETLVRTLLAYKRGEPRVCAMVKAPTPEEEDRRRICRERKTLVGERVEHVNRIKGLLFAQGVSDYEPLKRNRRARLEELKTGDGRPLPAHLKAQISRELDRLELVLPQLKAVEAERDALLKPVSEGCPAPAAMLAQLKGMGPEFTAILWSEGLFRSFSNRRQLAAYAGLAPTPWQSGSVAHEQGVSKAGNPRLRTTMIQLAWLWLRHQPTSALSVWFQQRVQSNGSKMRKTMIVALARKLLVALWRYSTSGVVIEGAVMKTI

SEQ ID NO: 319525 - protein, 419 aa, unidentified
MRTELKVAQVGLDNHKNFSRLTARDSSGRIVMRQRLEHKDRQLMRKNLQMLPAGTPVVLEGTFGWGWMSDELKACQLDPHLASSSKVAAWRKARGMAKNNKIDADLLSELWSQQQRWWEVWLAPPEVRDQREWLRYRMSLVKMQSGLKNRIHATLHRHGVLHEFSDLFGKKGLAFLKALCQEPASEVKNDAPQFSASGRGTLSGYLKLLAQVRRQVADVTRMFRKVVIRNEEAERWRTLPGISWVLAYTILAETGPSDRFTNYRAYSAYCLLAPRDDESGDESQEAAVGRHVGRMGRLTLKWAFLEASHGAVRRSPHFRAIFDRRTNGGKRDRGRGMIAVAHELCRVGLSCCRQERDYSEERPPRPGSQEHRREENQRHQQWRKICRNKEAETMNVSRPGTGGLDRPMVAAAACERLRT

SEQ ID NO: 319526 - protein, 375 aa, unidentified
MRTQFSSGLGFAGLAVGIEISDKTWLLSFLGPGRSQPRFKSVRAGDLKQTLEAIERAKTAFRLAADAPVESCYEAGREGFWIHRWLESAGIRNHVIHSASIEVTRESRQRKTDRIDAEKLVRLLWRFLQQDASLRWTEIRVPPPEIEDARHESRERDHLVREKTRLTNEVACRLRTQGVRGVDPYRADFTQIRDWRGQPLGPQLLAMLARKQQLLRLVIEQLKGLEAARRVRLEDPADDIARRARLLEGLRAIGPTTAFTLSQELGWRDFKNRREIAGLVGLGGTPWESGKLRRDQGVSGGIPRIRSLMVEIAWLWIKHQPHSALSRWFQEHFGRAGKKRKAGIVAVARRLLIALWRLWSFGEVPEGAEFKPTFA

SEQ ID NO: 319527 - protein, 411 aa, unidentified
MEAAVITAVGIDVSKSKSTVAVRRPGGEIVLRPFDVRHTNSDLKKLTSTLKKLGGDIRIVMEHTSTYWRPIALTLKEAGFFVSVVNAMLIHDFSDNTIRKLKTDRADALKIANYALTFWDTLPPFNNEEETRLLLKMQSRANERITATATALRNGLIALADQIFPGVNIAFDPNTKNANGHEKWVDFFLRYWHKDCVCQYSMEAFTESYRGWCKRKNYKFRTDTAHQIYLLAQEGVATLPKCESTKMLITQACKSLNAVCEAKQSTQLEMQRLAAMLPEYEVVMQMEGAGPITGPALMAEIGDVRRFKNKKALVAFAGIDAPPFQSGAFESKSRHVSKRGSPHLRRTIFIVSNTILTRSNPENAVYCFMDKKRSEGKHYYVYTVAGSAKFLRVYYARVTEFLRSQPSPGAC

SEQ ID NO: 319528 - protein, 391 aa, unidentified
MPMYFVGIDISKYKHDCCIISAADQQIISKFTITNDKDGFEQLLTALNSLSNPEDIKIGFESTAHYALNLELFLENAHHSFMEVNPVLIKEYKKSTTLRRTKTDSVDCESIARWLITVEYKPHSKGFYHAYSLKSLTRLRDRLIRQRSFYLVKITNVLDHTFPEFKPFFNERLSKTAIYLLENYGSAEKMARMNSASYDKLRCISRGKFSIQQFLRLKELAANTVGVNNSIFDLELNTLLTLYKSLSDEINTLETEIIKLIEEVHPHYMSIPGIGPISSAVIYAEYGDISNFSNPGQMLAFAGIEPGINDSGTESHGGRMVKHGSSQLRYVLLNACLPLIRFDLTFATYYEKKRAEGKKHRVAITHVAKKLIRVIYALERQDVDFNVQKLR

SEQ ID NO: 319529 - protein, 412 aa, unidentified
MKDLLEISCGLDIHKEKIVACILTGPLGKPTHSEIREFTTLIPDMLALRDWIISENCHHIAMESTGIYWITIYEILEDAFSGDITLLVVNARHMKNVPGKKTDIRDSEWISTLLRAGLLNASFIPEKRIREFRDLNRYRKSIIRDITSQKNRVEKFLQSSGFRLSSFISDIFGASGRNIILHLMEHGQIDKMSLDSYLKTKTRKRIDEILMSVNGTLSEHQKSFLKILMCHYDSMKEHLIEIETHLQEDMLPFALQIEQLNTIYGISTTASCAIIAEIGTDMKPFKTAEHICSWAGLCPGNNESAGKRKSTSITKGNPYIKSMLCEIAWVIAGKRNTYLSAWYWRIKQKKGARKAIVALARKLLVIIYTMLKQGTNFDENCFEVRRKNCEQKQLSRYIRELEKHGYTVEAQV

SEQ ID NO: 319530 - protein, 416 aa, unidentified
MHKDEQGHRLRGSRRFPVKEEGMRFAGIDIGAEHYLLAIVDDAGAVLQSATKCTADAVGHARIRELLGTGHDILVAMEATGHYWKNLFAMLAAEGFPIALLNPRRTSRFAEEELERTKTDAVDALNIARFAAQKRPVVTPLPNQVTEELRELVRHRDRLVQDFGDRTRQLHRLVDLGFPEFTRHVRCLDSDLATTILHAYPTALAFHRLAPSQLARLRYGGRYVVGRELARTLIEAARDSVGRHHGHAYRLQVEHCCEDMDVLRRRLREIEADIARTLAEHEVGMLLTTIDGIGPTTAARIIAEAGDPAQFTSVASLAAYVGVVPALKQSGKRQSWRAGCSTIGNARLRKALWMPTLAAVRKNIWLRAYYQRLIMRGKPPKVALIASMHKLLAAVHSVARRRKAFVPILNTVESNA

SEQ ID NO: 319531 - protein, 464 aa, unidentified
MSLLVSMVVEGSHGNRGLLPLSTSLRLLIFPALLDMSTQPMVLMSRKESAMDVVHPRCAGVDISKRDAKVCIRIASSGRAKAKSVVTTWGAVTNQVLALRDHLVNEQVTLVVMEATSDYWKPFYYLLEDGPFEVMLVNARHVKNLPGRKTDVSDAAWLAQLGAHGLVRGSFVPPEPIRQLRDLTRTRTTLVRARAKEIQRLEKLLEDAGIKLSSVATDISGVSGRAMLEALIDGQRDPEVLADLAKRRLRSKIPELTEALTGRFGEHHAFLAQLHLDLIDNHTLAIDELTGRIEVVVEPFRDVRDLLITMPGISTLVADVIIAETGGDMSRFPTAGHLASWAGTCPGSNESAGRIKSTQTRPGNPYLKGALGIAAMSASRSKDTYLSAKFRRIASRRGPIKAIVALEHAMLVASWHMITNGTPYGDPGGDYFTRLNPDKAKHRALDQLHKMGYSVTLEPLAVAG

SEQ ID NO: 319532 - protein, 395 aa, unidentified
MNALALGWDVHRKFSKVSLEQMSAEGEIQVVERARLEHEDRAAMRRWLARLPKGTPVALEAAYGWPWIADLLEEMELEPHLGHPPAIKVLAKTEAKGDRIDADRLGKFQLRGILPEAYLATPEVRTRRERIRYRMALSALRTGVKNRIHAILHRLGILHSFSDLFGKAGRRFLQRLDLPEASREVLCGYLELLDRISTSIEQVEEWMAAHLKADETVRLLATIPGIGLILAHVIYAEIGEIERFPSRRHLNSYAGLAPVSDDSADRHGRRHCSPACNHALRWALIEAVTGVLNSRGSRCRRLRNLYCRLTHGGQYNKNQAKVAVARELSQLVYVIWQKRTPYTDTPPLRPGRGADDREVVDSPRRQLRVKQAMRSDQPRTPMARCRPKAVSQTLT

SEQ ID NO: 319533 - protein, 412 aa, unidentified
MLKIVYPICCGIDVHKTFVIACIASTNEVGITKYQSKRFSTFTKGLRELREWLLSNSCLDVCMESTGKYFIPVYNILEDGLKPIVAHPKYVKAIKGKKTDKRDAKWIADLFKHDLIASSFIPEKNIRDLRDLMRYRFKLTNFGSSEKNRFQNCLTVSNIQLASVVTDTFGKSSMNIIEHILENPLDKNIDIASLIHGSLTKKIPELELAVDGVITETQAEKIKIIKEHYDALDLCKLNLESVILNLSKPYQKEIELLLSVPSINNIFTAIGILSEIGADMNVFPSAKHLCSWAGLTPTNNESAGKKKSVRISRAGCYLKPLLVQCATAVVKSEKHPEIRNRYLNLKKRRGHKKAIIAICRMLLTAIYHILKKNEVYNPELYKKTELIPISREITPEQAIYIAQRQGYKVMVV

SEQ ID NO: 319534 - protein, 351 aa, unidentified
MNYVGVDYHKKYSYMVVKNEDGRVEGRGTVNNTKEEVQQFLEPYRPGMAVVEATRNWGLIYDWLEEVLDDVTLAHPLKVKAIAEARIKTDKISADILADLLRADLLPKAYAPSKPTRDIKNILRQRMFFVRIQTMVKNRIYDILDRHPEVLSQIPEASDLFGAVGMQWLSQTTLSGEDNTLLSSELRLLKYLKEEITQSNGIVKKLAKKDARAGLLQSIPGIGPFFSVLILYEIDDISRFRDEKKLCAYAGIVPSTHASGGKVFHGRITKSGNKWLRWAAIEAAQTAVRCDSEFRAYYQSIRVRKGTNAAKVATARKLLTIVYRLLRQGRFYERRTTNLEKNIIPAALVTS

SEQ ID NO: 319535 - protein, 356 aa, unidentified
MSRDIKYIGMDVHKEAIVIAVLNSSGKVVMESIVETKASSLLQFLHGLQGELHVTWEEGTWAAWLYDLLQPQVRHVLVCDPRRNALLKEGNKSDKIDAHKLADLLRTGMLRPVYHGEHGLRTLRELARSYQTIGQDQIRVMNRIKALYRGWGIGCGGTQVYAARYREEWLGKIEHVGVRRRAELLYQQLDGLQVLRRTLRPELLAESQKHKATKLLRQIPCIGPIRAARLLALMQTPHRFRSKRQLWTYSGLGIETRDSAQYCFVRGKLQRVKKPQQIRGLNRNHNHEMKEIFKGAANRASCGVGPLRDFYVGLLDKGMKPEMARLTLARKIAAIALTLWKKEARFDAEQLKAQAA

SEQ ID NO: 319536 - protein, 344 aa, unidentified
MGVAVGVDSHKSSLAVAALDELGRVVGAKEFPNDARGHDALLRWSKAQDSDRVIGIEGAGSYGAGLAQYLIDAGENVYEVPAFLTHRERKRAPSKGKSDPTDAVAVARVTARGEGLSSPRRIDIFVDLKLLSNHRDQLVRARTRLINRTHTDLVISHPGYEKKMPKLNSKKNQDGAMTLLRGDHSVRAGLIRDRIREIRRLSNKIADVERQIAGKVNESGTTLTELQGIGFVIAAKILGEVGEPGRIRSKGAFAMWTGTAPLEASSGATKRHRLNRGGNRQLNYALHMMARARLRHHADTKAYVARRRTEGKSEKETVRCLKRHLSNLVFRQLVADVRALPEAA

SEQ ID NO: 319537 - protein, 324 aa, unidentified
MIFLGIDISKLTFDVAYFGKNKYINRSFDNKPKGFQKLLTWIKKLEHPVYICLEATGIYSFDLAQYLVKHKQKVMVVNPIITHAFFKVELGRNKTDKADAQLISRYCEHMVTIGDFERKAYRPKDAEYEALQRLVTRCDQLEKSKTQENNRLEASKNKFVSRSIKRLIKVIESEIDGLKEAISTLVEKNSSLKKQVDLLVSINGIGERTAWSILAYIGDIQFFANSSQVASYAGLAPKIVQSGTSVNKSSLSKLGHKHLRKSLYMPALAAIRYNPFLKSIYERLVNNGKPKKVAVIAIMRKLLTLSYAILKSEKPFDENYQMAV

SEQ ID NO: 319538 - protein, 348 aa, unidentified
MDKITAVGLDLAKQIIQVHGIDAAGRVVLRKAVRRERLLALLAQLPRCVVGMEACSGAHHWARELTQRGHEPRIMAAEFVRPFRKSLAAKNDANDAEAICTAVVQPNMRFVSIKSVEQQALLSLHRVRQGLIEERTATINRLRGVLAEFGVVLPQSVTALQRAMPAVLADEERLPAPVRRSVQVLREHLYDLDARIAEFDRAIAQHARSSTSAQRLGALSGVGPLTASAVVATVGNAQDYRNGRQFAAWLGLVPRQYSSGGKRKLGSITRRGDTYLRALLIQGARSTLQAALRRAPARRDRLSAWVVQLAQRVGYHKTLVAIANKHARIIWALLAREQTLDLARASTP

SEQ ID NO: 319539 - protein, 436 aa, unidentified
MRGCRCSMIMGFTKPIEHFNLQRKKVITMNTLYVGIDVSSKSNVVYLMLPNGDKHSNFSVANSHEGSTLLVKKIYSALTSHSLDTVLIGLEATSVYGDNLVYFLREDATLAPFNRKIHVLNPKQVKKFHDTYNDLPKNDYVDSFVIADCLRFGRINKEVYMGEYRYKALQNLTRARFFAVQNLVKEKQRFMNVLFKKYSTMTQEKVFSDTFSTTALAVYDEFESAEALADMDLHELTDFIIEKGKNRFPDPDAVAKAIQKAARSSYRLPKTVNDSVNQVLSISITSMKALESQIKEFDKAIKALMELLPNVLISIPGIGPVYSAGIMAEIGDINRFDNQASLAKYAGLAWKQHQSGGFEAEVTRLIPSGNRFLKYYLCEAAFSLVRCDKEYSDFYHLKYKEVNRCQHKRALALTARKFVRLVFRLLKDNRLYCPAK

SEQ ID NO: 319540 - protein, 380 aa, unidentified
MSRQQSVLRNTVGYMLKNIDNQATNGEEKSKPEVIKLGLDLHARQVTECRQLDGSTPKPAQQWDPRKLLDKVEEWVKAGSKVYSCYEAGPCGYWYHRELTKLGAVNYVVAPRLLENQRTKRQKTDRLDARALLGNLESYLRGNRDAMSIIAVPSPLQEQQRSVVRYREQLVRNRRRAEARGRALALTQGILAPVGWWRPAAWKQFKSQLPEWMSSQLDNWQEEALALNAKERKVRQELEQMVTENLPVGVGALSWITLQLEVRGWERFHNRRQVASYTGLCPGIHNSNGRGREGRINRCGNTIVRYTLIEMVWRLIRWQPDYPPIKKLRNALLSKRGKRRLIVAAARRLAIDLWRLATGRATAQELGLQLSNPTTQKSTT

SEQ ID NO: 319541 - protein, 318 aa, unidentified
MGSIAAEREGEIVIGVDPHPGSHTFSAINELGKVVAELRIPNTAAGRKGLWTWASRFSCRRWAVEGPGNRFAKDLVDELLAAGEQLHAVSPGMTAEYRKRCRRGKNDEIDAGSAARVVLANGDVPVYLPAAYEMRLKELTRTYHRLVSQRRSTKMSLKDREYRDIQETMQRVVNALDSAINDLKAKIRELVKELAPELLKIQGVGPIVAGTLLAEAGRIERFANADKFAAYAGCAPIPWASGASETVRVNPGGNRRLNYAAHIVVMSRLRIDSRTKQYRDRKREEGKTQREVFRLLKTYVCRELFKALKSRHQLALAA

SEQ ID NO: 319542 - protein, 358 aa, unidentified
MAVTEGTRRIVGGVDTHKDLHVAAVVDEQDRVMETRSFATTRQGYRQMLAWMRSFGELQRIGIESTGSYGAGLLRFMQQAGITVLEVTTPDKQDRRRRGKNDDLDAQNAAHAAFAGQRTVTPRSRDGMIESLRVLMACRKTAVSARRVALQMIHNTIVCAPDGLRDQLRSLTRMQLVRTLGSWRPDLTAYRDLESAYRIGLKSLARRYLELHDEIADLDAMIAAIVEELAPNLIARNSIGHVGAAQLLLTAGGNPERLRSEASFASLCGVSPVPASSGKTVRHRLNRGGDRAANSALHIIAIGRLRTDQRTKDYVARRIAEGHSKLDAIRALKRYLAREVFTLVTQRRREINATQIAA

SEQ ID NO: 319543 - protein, 311 aa, unidentified
MSTQFFCGVDLAKHHFSLHAVDDHGKVILHKSVSRAKLLATLANMPTMCIGIEACSGAHYWAREFNKLGHDTRIMAAKYVGPYRTKGKNDLNDAVAICDAVQRPNSRFIPVKSPERQAILATHRIREHWVNERTALINRIRALLAEFGIIIPTGRAAIHREVPLILEAAENGLPDIARAVVADCFDHLQTLNQRIADTEQCFDMVTKASPNAQRILNVRGIGPQTATAIIATIGKGEQFDSGRDFAAWLGLVPKQYSTGGKPRLGRISKRGDKYLRTLLVHGARAVITNLGDKQDRLSVWGRNVLERRGMT

SEQ ID NO: 319544 - protein, 337 aa, unidentified
MKHYAGLDVSLETTAICVLDTDGQVVCEISVLSHADDIFSALSPYLATLEAIGLEAGPLSEFLVCGLQTKGVRAILMETRRVHAALSAIPVKTDRKDACGIANLLRMGWYQPVHLKTPAARDLRLLLSARETLGRRMRDLDNSIRGLLRGFGLRFPAGVRGRLCALVRELIDGNPVLVEALTPLLTARDAISDQFTNLDKRVRDRAHGDKVCRQLMSVPGVGAVIAMTFRAAIDDPTRFRSSKTVGASFGLTPRRYQSGETDRSGSITKAGDASVRCALYQAAHVMMVRTTKWTPLKAWAMRIAARRGAKRAKVALARKLAVIMHRMWIDGTEFRSA

SEQ ID NO: 319545 - protein, 418 aa, unidentified
MNLTVTTKYVCGIDLHAREMSVCVKSIDGKVLMKRNISCDIKVFMNYIEPFKKSLTVGVESTYNWYWLLDELKKHKITCALGHALYIKRMKGGKHKNDPVDASDIADMLRTNHFPLAYDYPSEMRSCRDLFRRRHFFVRKRAASYTHFQNTFTQYGLLDPVYALVKIQGKRRDLLKWSVDDDMRKILETDLDYIDSLDEIIKDLENQAIKQARYHNRKHLDLLQTIIGCGPVTALSILYETHTISRFATPQRYSSYCRVIGADNESSGKYLGHSSSDKIGNPYLKWAFSEIAIHMLKDSPEAKEWFNNVFASCGASGARARLRHKLAVAVYHMLKKNVVFDEFKFFNITNDRTGSSAHNWMETSGEKSKPSGVIGKKSGHSSKSTKTKTKKSITVKNKVSVNKTSGRKTLRTTGKVKA

SEQ ID NO: 319546 - protein, 408 aa, unidentified
MQQYYLGVDWADEFHQVWVSDAQGKKVAEMTIEQSVKGMSEFGRWLHERKAEGIELWASIEKPHGRIVDFLLDHGVVVYPVNPKALDRARDRFRMSQSKSDSFDAYVLAEFLRTDHAHLRALEPDSEQAQELKMLTRDHHRLGRHKTRLLNQIEVTLKEYYPRPLEVFSDLESKIAMDFLQHYPTPRALSDLTRRSWNRFAKREHHLSEQRCTELWEKLNQTQLAIPEHVVRVKAQLLLVLIIQLKSLTEAVKSYSDKVESFFASMPAAELVKTLPGGKSGTTVPMLWAELGDANNRWQSFRHLQAEAGGVPVTKASGKSRVVQFRFACNKLLRYASYWFSFNSLNRCEWANKYYRDQRRKGHSHPQALRALGAKWLKIIFVMWRDHKPYDENYHLANIARQQMRQAA

SEQ ID NO: 319547 - protein, 342 aa, unidentified
MEHIAIDLGGKESQICVRDADGTIIDERRCATTDLGSYLAQRPPSRVIVETCAEAFRVADIASRAGHDPRVVAATLVRALGVGARRTKYDRRDARVLSEVSTRVEVPSVHIPTAVSRDRKSMCATRESLVRARTQVANCVHGWLRMQGSRLPAGNIVNFAKRVRTHVPTRPAHIERLLELLDELHERICAANTELRRLAKRDPVCCRLMTAPGVGSTTAIRFVATLDDATRFPDAHHVASYLGLVPGERSSGAVQRRTGITKAGSPALRHCLVQAAWATKRMRVQGPLQQWGARIARRHGKQVAAVAVARKLSGILYAMWRDGTPYQSGRAAKAPSAPRSHA

SEQ ID NO: 319548 - protein, 319 aa, unidentified
MTTNAIVVGVDVAKDRLDVAVRPSGETWSTANDEAGVTALVARLRPLGPALIVCEATGGFERAAIAALAAAGFPVVVANPRQVRDFARATGQLAKTDQLDAGILALFAERVRPTPRPLPDAAAQLLDAVLTRRRQLLEMLVAEKNRLGFAPKPLHRGIQAHIRWLERQLDDVTKELASQIEASPVWRAKDDLLQSVPGVGPIVSSTLLGELPELGTLSHKQIAALAGVAPLARDSGTLRGKRMIWGGRASVRTALFMAALCGRRWNPALKVFYARLIAAGKPKKVAIIACARKLLTILNAMVRTNTRWMTPEARLQYSC

SEQ ID NO: 319549 - protein, 342 aa, unidentified
MSEKEAILGIDISKDKFSAALLKGEKKSQVKEFANNLEGFEQLKKWLEQNQLERVHACLEATSTYGHSVATYLHGLGHIVSIVNPARIKGFAQSRLSRTKNDQADATTIARFCAALKPQAWTPPSPEMAQLQSYSRRLRALEQMATQEKNRLKTTVDESLIEDIEAHLVFLETQIDNVKKRQKELLNEYSSLKSQADLLTSIVGIGEPTAMTILAEIGDINQFSSARQLAAFAGLTPQEHQSGTSVKGKTRLCKIGNPHLRKALYFPALSSMRHCSPMKDLRERFLEAGKNKMQIVGVVMHKLIRIVYGVLKSGKPFDQTKLALPNVVLEEETDFLPQQFSL

SEQ ID NO: 319550 - protein, 344 aa, unidentified
MEVAIGVDPSKSSLAVAAVDPLGRVLGTGEFSNDPRGHRALIRWVHEHGPDRVIGIECSLSYGATLSRVLLRSGEDVREVPTTLTHRQRRRRASQGKSDMVDSVAIARIVASGEVLPSAHRLEVLADLRALVEYRDQLVRARTQVANRTHADLVNILPGYERQVPNLRAKAHRTTARSLLRGDRSVRGELVRKRLGELSRLEGEIAAMDRRIRATVQKTGTSLTSIPGVGPFIAAKILGEVGDPSRIRSKPAFAVLSGTAPLSASSGQVQRHRLNRGGNRQLNWALHYIALVQCRITPEAQAYMARQREAGKSHKEAMRCLKRQLSNVVYRHLVADARRAELAA

SEQ ID NO: 319551 - protein, 326 aa, unidentified
MKDISGQVLSEGKIPATRQGLREWVGTLAKPWTVAMEATMFTGWIYDYLRPHAAAVKVAHPLMLRAIAVAKKKNDRIDAGRIADCLRCDFLPECYMAPMEIRQRRRTLRYRKLLVGQNVQLKNKIAQLLMESGVSYNKEKLHQQGYFHQVLPANPEIDPSLWPLLKLPREMIECTQKTERALLRSLEADPLLAARVERLMTIPAIGHVTALTWVLEVGEVERFHSVKQVISYCGLCSGEKTSADSSRRMPISKQRNRHLQTVLLEAAHLAPRLNPELAVLYEREAAQSNRNQATIAVARKLAAYLLAIDRGERAFVTHQVHSRVAA

SEQ ID NO: 319552 - protein, 396 aa, unidentified
MAGPLKVVGGVDPHADTIHVAVITLTGKAVADREFATTADGYRSATAFLTATGAVVRVGVEGAASYGAGFTRALKAAGIDVVDVDRPARFDRRRAGKSDRLDAYHAARAVLAERSNPVKGPAIEGVRALHLARRSAMKAQTAAMNQMIAILVMAPDTVRARYRRLHGDRLAIALTRSRGALDPVSTDTLFALKALADRYRQLAVQVDALTTRLDHAVRQASPALRAAFGVGPDTAAQLLITAGSNPERLYSECSFAALCGSAPVQASSGKTHRHRLSRGGDRAANSALHRIALVRMANHPPTRAYVARQTANGHSKREIIRMLKRAIAREIYRLLTHPADVPNYADLRAVRQAKNITVTLAARHFDVWPAVISRLERGLRRADDLARQYRTWLAAA

SEQ ID NO: 319553 - protein, 343 aa, unidentified
MELHAIGIDLGKTVFHLVGLDSSGKVVVRKRCSRTQLLVYTANVRVQVIGMEACSGSHFLGRALRVQGHDVRLMPAQYVKPYIKTNKSDYIDAEAIAEAVQRPTMRFVPIQTEEHLDLQAVHRVRERWVMRRTAVVNQIRGLLLERGLTLPKGRSHVDHGLPEILTDPALRLSGSFRVLLGQLQLELEQLTARIEQMDAVIQQTARENEACQRLTAIPGIGPVTATALVAAIGNGAGFRRGKDLAAWVGMVPREYSTGGKQKLLGISKRGNSYLRRLFVQGARVVMQYRTKQAPGLSVWLSQLMARTHQNVAVVALANTLLRMAWAVLCKNERYRVPLLATAP

SEQ ID NO: 319554 - protein, 412 aa, unidentified
MDVLHPRCCGLDVHKSSISACILLREAGRVQKHQRRFGAMTQELQGLAEWLRQFGVSQVAMESSGVYWKPVWNILEGQFTVVLANAQHKNVPGRKTDQKDAEWIAQLLQYGLLRPSYVPCEIIRDLRDLTRMRASLSQEASRISSRIQKVLEDANVKLASVATNVLGKSGRAMLEDIISGEDDPEHLASLALGHLRVKIPQLRLALEGKVRSHHRFLLRRLVDQIQFVEHEIGLLDERLEEIAQQRPELSQAVARWDTIPGIDRVAAWALLAEIGDNMAQFPTAGHLASWAALCPGNHESAGKRLRGTTRQGSPWLCRMACQCAWAAARTKNTYLTSQFRRLAARRGKKRAIIAVAHTIIVIGYHLQKNQSNYEDLGGNYFDRIHSDGLKRYLVKRLQQLGHKVTLEPMVAA

SEQ ID NO: 319555 - protein, 429 aa, unidentified
MNVVDSIRLEEFRQIRKEIRGSNEHLIVGIDVAKFKHYAFYGTATGKTLLKRMIFENNLEGFRKLRAQEDALKVRYGLDKVIYGFEPTANYHKPLGEYLIRSGRHVVLVAGTAVKNNRKTIDGRWDKNDTKDAAVIADLICQGKFLFYEYPSMPLRDLRNLLSLKRRLKRQEHGQKVRIRNHLLAQYFPELDVYYGNWGKEGLAIVRWCLDPSVIAGLEYEDFVRRVAPDARGSSYKQERLRAVWEKAVDSIGCRAGESLDVEAKLMVEGLAYIRDSIREVEDNIEEVCSCFPEYSYLLSIPGFGPDIASRVIAAIGNPFRFDNQRQVLKMAGMDLSANRSGKTSDNATPRLSKNGNAYLRYALYQAAMIASYRSTPFIQYFTDKLRGREKEKGIKTKMRVKLAAKMLIIAWTLMKKREPFDPKYLSRD

SEQ ID NO: 319556 - protein, 355 aa, unidentified
MKTKVNDFSGMNIYAGIDVHKKSWSVTILVDEQEHRTFNQPPSAEVLFKYLNKHFSGAHYHSAYEAGFCGYGHHRQLLELGIDNKVINPADVPTTDKDKAGKTDKVDSRKIAKGLRSGDLQGIHVFNEADQDLRSFARMRHNMQKDLRKAKQRIKVFLNYNTITVPAHLDDDNWSKAYEAWLEDEVKFPTENARTAFGFMLSNYHYQKQQVRQISKELRAYFRKYYKQDYFLLRTIPGIGPLSAIAIISELGDINRFSNINKLSSYVGLLPLTSSSGETERVGGMSYRCNNYLRTILVEASWQAIRKDPAMLLYYKKHAAKGNGKRAIVKVAAKLLNRIRYVLKNKQEYVLGVVE

SEQ ID NO: 319557 - protein, 341 aa, unidentified
MDIVTVGIDLAKNVFALHGIDQSGKAVFIKPKVARSQLLEMVAHLPPCLIGMEACSGAHHWAREFRRFGHTVKLMAPKFVAPYRMSGKRGKNDAADAAAICEAVTRPHMRFVPVKDIDQQAILCLHRTRQGFVEERTALYNRLRGLISEFGIVLPQKVECLRREIGAHLEALPGWANRCVGDLLAHADRLNERIEEYDKAIAQAARQDARSRQLMQLPGIGPTTASALVASLGGGHDFKNGRQLAAWTGLVPGQYSSGGKARLGRITKAGDAYLRSLLVMGARAVLAGLGDKQDRFSRWARNLVERRGYWRAAVAIAAKNLRLAWAVLHYGDDFQRIEETA

SEQ ID NO: 319558 - protein, 356 aa, unidentified
MISISHPKVPGIIIGVDTHKDEHVAVAVDSLGVRIGQRNLPTTDTGYAGLEHWARSLGEIDAFGVEGTGSYGAGLARFLRGQGHRVIEVNRPDRSTRRRLGKSDPTDAEMAARAVLAGVAHDRPKSGVDKVEMIRMFKNTKDSAMKGRTQAINQMKALVVTASVELRAKLRDMNASQLVAHCVKWHHGYLETPTAAAKYALWSLARRHAQLTREIEALDAELERLTVAFAPALTESSGIGPDTAATLLITAGSNPERLKSEAAFAALCGVSPVPASSGKTNRHRLNRGGDRQANAAIHRVVIVRLRYDNRTKAYLQRRMEEGKTKTEVIRCLKRYVAREVFGILHDIGKRRAFQNA

SEQ ID NO: 319559 - protein, 405 aa, unidentified
MLFVGDDWAEDHHDIEMQDETGRRLAKARLAEGLAGVAQFHELVAQQLGDAESAQVAIGIETDRGPWVIALIAAGYRVFAVNPLQVARYRERQSVSGAKSDAADAHILADMVRTDSHQLRQVAGDSDQAEAVKVVSRAHKTLIWERTRHAQRLRNALREFFPAALLAFDDLSAADTLELLAKAPDPDAAARLTIAQITAALKRARRHHAADKAKVLQSALRSEQLRQPAAVSTAYAATVRAQAAVIATLNTQIKTMGAQVEAHFGQHPDVEIYLSQPGMGPIVGARVLAEFGDDKNRYVDARARKNYAGTSPITRASGKKKTVLARYVHNNRLIDALGQQAFSALSGSPGARVYYDELRQRGMGHRAALRQLANRLVGILHGCLKTGTTYDETTAWSHPAETAAA

SEQ ID NO: 319560 - protein, 411 aa, unidentified
MSYTIAGIDIHKKVLMVVVTEVAVEELRFVCRRFGTTASEREHVVAWLQEHQVQEVVMESTAQYWKPVWLDLEPHFGRLHLAQAHSNRAPKGRKNDFGDSKRLVRRLIAGELILSFVPDAEQRSWRTMARGKLQLVRDRVRLENQLEALLEEMRIKLSSVVSQLLGLSGRRILRALAEGETDPDKLAQWGDRRLKCSKEELQDALRGQWQAMHRQMLQLFLERLDLLDRQIEQLDRMMAEAMKDHESAVIRLAEVPGFGPNSAQQIIAEVGPDVKTFPSAGEFASWIGCCPGSQESAEENHSSRSPKGNPFVRRVLTQAAQAAIKKKGSHFQAVFRHWRPTLGYNGALWAVAHKLCRVIWKILHDRVQYIERGQESSPKAKKQRAQKMINALRKLGYNVVITSPLPQSAQA

SEQ ID NO: 319561 - protein, 340 aa, unidentified
MDITTIGLDLAKNVFQVHAINSAGEVVVRRALRRAQMIPFFSKLAPCLVGIEACGTSHHWARELVRLGHQVRLMPPAYVKAYVKRGKTDAADAEAICEAVSRPTMRFVAIKSVDQQAALSLHRARDLLVRQRTQLVNLVRGLLAEFGVNIPRGITHALAFARRIVAGEAQEVPELAAKVVGALAAQALAVQDQVRGLERELMAWYRASALARRIATVPGVGLLGATALAATVTDPGQFRSGRQFAAWLGLTPRLNSSGGKERLGRISKMGDRYLRRLLIVGMTSLVRQAKRGPGATDPRLAQLLARKPARVATVAMANRAARVIWAIMTRGGVYRAPQAA

SEQ ID NO: 319562 - protein, 423 aa, unidentified
MAYRIAGIDVHKKKLAVVVADVEVEDEYPLERRWYGSNPEQLQRLAEWLSEQQVEEVVMESTAQYWKPVWGALERYWKPSCEKREGAGRMSGTLHLAQALSNRGRRGRKRDFRDAERLVKRLVSQELTLSFVPHAEQRLWRTVTRTKYQLRRNKVRLHNQLEALLEEARIKLSSLVSDLLGASARRMLQALAEGETDPAALAALADQRLRATSTQLRDALGACTELNPVYRRLVKMALEELQLIEQQIGQLDQQIASLLHQHQDAVQRLAEVPGLGVDSAQQIIAEVGAKAATFPSAKNLSSWVGACPGEEESAGVNYSPRSPKGNRHMRRLLNQAANAAVKRKGSIFEIVYRRLVPRLGHNKTIGAIAHRICQLIWMILNKGVRYEERGPAVSENSRRARTSRMIRTLRKLGYRVEPLRDPA

SEQ ID NO: 319563 - protein, 388 aa, unidentified
MNSSVTPATVVAAAARTNDITLFASLELSKSKWVVTINSPGSEKFSKHLVEGGDGAGLIDLLSRSRAKAEQRYGVPVKAIVIQEAGLEGFWIHRLLIANGIESHVVDAASIAVPRRHRRAKTDSIDGETLLRTLMAWARGERRVCSMVQAPSPEEEDRRRLTRERGALLEERIRHTNRIRGLLSGQGIRDYNPLRRDCLKRLEGLRTGDGRELPAMLKEEIRRELDRLALATTQLAAVERARDALIRADAEERNNPAAMLLKLKGLGPEFASLLWLEALFRSFANRRQVAAYGGLAPSPWQSGGVERDQGISKSGNRRLRKTMIELAWFWLRHQPDSALSRWFQARVGAAKGRVRRIGIVALARKLLVALWRYVTQGVVPEGAVFKAA

SEQ ID NO: 319564 - protein, 358 aa, unidentified
MMVGSNVKYIGLDVHQEAITVAVRNGAGKLVMESILPTKASALLEFLDGVRGELHVTLEEGTWAAWLYEVIKPHVRELVVCNTRRNALLKEGSKDDRVDARKLSELLRGGLLRAVYHGENGLRMLRELARSYQAISKDQQRVMNRIKALYRSWGIPCTGTQVYGRRYREQWLQKINEAGVRRRAELFYQQLDGLQGLRHTVRGELLAESRKHAGVKLLRQIPFIGPLRAAQLVALMQTPHRFRSKRQLWTYSGLAVVTRDSGQYHYVDGHLQRSKKPQQIRGLNQNHNHAMKEIFKSAAVSAALRPGPFRDFYAGLLARGMKPELARVTLARKIAAITLTLWKKGACFDAGYVKPQAA

SEQ ID NO: 319565 - protein, 409 aa, unidentified
MKLFVGLDVSSQDAKICFLNGEGHCLQSFTITNDLPGALILKKKILDTASKSNCKIIKIGLESTSIYSYHPAMFLHNDKELRTYGSQVFMINPKQISNFKKSYPEMDKTDAIDAFVIADYVRFGRHTMSIVKEEQYMALQQLTRSRYQLVHALTKEKQHFLQHLGLKCSQFTQDVESSVFGNAMMELFLERFSLEELAQMPLQELVLFLQEKGKKRFGNPEDVAKSIQKAVKGSYRLSKVVEDSIDLLLSTSIQIMRTYQAQIKEIEKGIESLMSTLPQTLESIPGVGPVFAAGIVAEIGQIDRFADETRIAKYAGLFWKKYQSGRFTAENTSLTKSGNPYLRYYLVEAANSVRRHVPEYRDYYTKKSAEVPKHKHKRALVLTARKFVRLVDALLRNNQIYAPGRGVDR

SEQ ID NO: 319566 - protein, 428 aa, unidentified
MNCNTQNAKIASITEKTLIIGIDVGSETHYARAFDWRNYEYSKKPLEFSNTEAGFLTLKAWMEDIAEKHGKTAVIPGMEPTGHYWFALGKFLQDSGMKPVHVNPHHVKKSKELDDNNPNKNDRKDPKTIAALVNEGRFSYPYIPTGIYAEIRSLSNLRFQTQEELTRIKNRIARWFSIHFPEYKDVYRDLKAVSGRMVLKAAPLPEDIVKLGAEGVNQIWRNAKLRGAGMKRAKTLVSAAEHSIGSKEAPEAARIELKNLLNDMDIYASRQEELLLSIEEKLKEIPYIDKLMAIKGIGLITVSGFIAEVGDIGRFNNPKQLQKLAGYAIVANESGKHNGESRISYRGRKRLRYVLYEAAISLIGKNAEFREIHEYYRNRKENPLKKMQSVVAVACKVIRVFYAILTKGVDYDAEKLMRDIRRPQMQAA

SEQ ID NO: 319567 - protein, 343 aa, unidentified
MQSISTIGLDIAKSVFQVHGVDAAGQLVLRRQLKRRHVLAFFTKLTPCLVGIEACASSHYWARELQAVGHAVRLIPPAYVKPYVKRQKNDAADAEAICEAVTRPNMRFVPIKTVEQQGCLVLHRTRHLLIRQQTATINSIRAHLGEFGIVAPVGRRGVEHLLEVIADANDTQVPEVARACVATLGVQLRHLKAQILELDRRILVWHRSSEASRRLNHIPGVGPLLATALVASIADPKAFRSGRDFSAWIGLVPKQNSSGGKEKLGNISKRGDRYLRSLFTAGALAVIRYAKIHGTKHRPWLVALLARRPTKVAAIALANKLARIAWALMTKGSRYRQPAELMV

SEQ ID NO: 319568 - protein, 370 aa, unidentified
MPVRRILAKTIDTDLEYEAIGIDLAKNCVSAALLTTDGEVICIDRLDYSELEKSAQTLSPTTFAMEPCTEMNYLVQKLEAWGHRCLIIGGKNVRDYIESHFSGQKTDLNDAQALAFLTQDTQLRTITAKDLEQQKYASLTTLREQYIKQYRQTIVSLKGICQAWGLNISKGISGKARLRELIENHTAFPKELREGLVDMVTHAQTTQKTLNRITKTLEELAKNDQICQLIQTIPGLGPICSCRLRATIGDIKRFKKPKDFPAYYGLVPRSIATGHNEKKGKITHRGDKTMRSLMVQGAGSVINMATKGKLKSRQLTKWVLKKQKEQMPWGKLVCAVAAKLLRIVRAVLNSGRPFNPKIAGVAKCSLPKVL

SEQ ID NO: 319569 - protein, 370 aa, unidentified
MLEAILEKCAGLDVHQETVVACVLTGPLDRVPHCEIRTFGTMTDELIELGQWLADQGCTHVAMESTGVYWKSVWNVLEAFDYDLILANAHHIKNLPGRKTDMKDAEWIAKLLRCGLIEGSFVPSEDIRDLRDLTRYRKKLVQDATSEKNRIHKLLQDANIKLTTHMSDIFGKSGRLLLQKIADGEVVTMEFLETHMKGALKHKSPKLLQSLNGRLRKHHRDMIRLSWDHLMYLEQQIQRVEQEIRRRIADKQEAMDLLVTIPGVNEQAASVILAEIGTDMTRFKDDHHLAAWAGVSPGNHESAGKKKNSGPIGKQSLKSGALRMRLGGFHDASYQTFRSLLELGETAWKEKSSCGFRTHPAANHLPHPAE

SEQ ID NO: 319570 - protein, 397 aa, unidentified
MIAVGIDISKAKSTVAVIDSDGTVLASPFTMAHTQPEMEAFVSYLKGLGEPTTILMEYTGHYHYPVLKKLQDEGFPVCIVNPYQMKKYGDVEIHKAKTDKKDALRIAAYALEKSYKLVPYSSMEQKYEDLKFLSRQYSQRITYVAKLKVQLIALLDQTMPGITRILPLNSRNPEKCALLLFIKRFKSFDEIQRIGKARFLASYDVLAKKASERSASSKGLSIYELAVDSITTRGEDPYIWLSQNQCVDLLSATQNAADEIISQMRNIAETIPEYKVLRAMHGVGDRLGPIILAEIGDVHRFHSGKALNSYAGNDAPPYQSGQFESRNRHISKRGSSALRKACYEVMQALKLTKPQDDPVYLSMLKKEQEGKPFNVAKMAGVNKFLRIYYARAMELYK

SEQ ID NO: 319571 - protein, 353 aa, unidentified
MIIIGVDFHPEFQQIASVDTETGELQEKRLAHREDAETFYRALAGQKVRVGMEASGHARWFERLLAELQFELWIGDAAEIQSKRVRKQKTDRQDAQLILRLMLKDDFPQIWVPSWENRDLRQLLWHRHRMVQVRTRIMNQLQALALNEGLRCKKRLWREHGRRQLESFRLAPWASRRRRDLLELLDRLNPTIAELSQAIEQEAEKCPEAQRLMTHPGVGPLTALAFVLIIGKAERFQCGKQIASYLGLVPLEKSSGNRRRLGHITKQGSSMVRFLLVEAAQVTVRSLPEWRRKYVQLMMRRGRKIAKVAMARRLAVALYWMWRKGWNYEQSKSSVRTRASSEQAMVCSRTPSN

SEQ ID NO: 319572 - protein, 395 aa, unidentified
MSAEGEAIRSNDYRKDTTVKAPSTRPAAVLGLDVGKSSHWACLIDRDGEVLDSAPVRNREAELDALFASAPAGTLVVVDQFRNIGSLAVRRARAAGLGVAYLPGLAASRAAGLFAGEAKTDERDAAVIARTALGVPDSLSGVPGRGEALEAARALSSQRDHVVACATRDKNRLRAVLLESCPALEAAVDLSDRRWLELLAGFGGAWGIARSGAEGPRAEAAGEAAAASTAPPPALVEAENRQVRFLAARISEALDEAGALEAETAALLEGDETYACLLTVPGIGPRTAAQLAVSVDIGRFPDHDHLASYCGIAPRVRSSGTSVRSVRASRRGDARLKSLLIFSCNSLVRSSGRYGEYYRACRARGMGHGRALKAVARKRLRAIYAVMRDRVPYRE

SEQ ID NO: 319573 - protein, 402 aa, unidentified
MTTAIVGYDSIAVFVGLDVGKSEHHAVALDRAGTRLLDRALPQDENRLRQIITGLQEHGPVLLVVDQPATVGALPVAVAQAAGASVGYLPGLAMRRIADLHPGEAKTDARDAAIIAETARTMPHTLRSIAVADEQVAELTMLCGFDDDLAGQITQVSNRIRGLLTQIHPALERVIGPRLDHPAMLALLRKHPSPDALRTAGVKRLGNLLLKHAPRKGQVWAEEITAALGQQSVTVTGTNAAALVLPRLAEQLETLRTQRNQIAAEVERLVEAHPLHPVLTSMPGVGVRTAARLLTEVAGKTFPTASHLAAYAGLAPVTRRSGTSIRGEHPSRRGNKILKRTLFLSAFAALRDPDSRAYYDRKITQGKRHNQALIALARRRSDVLFAMLRDGTIYEPRTPTAA

SEQ ID NO: 319574 - protein, 405 aa, unidentified
MSTPPLSHILFVGIDVGSQSHSVAFGDEHGNILLEFDMHHTHEGFEHFFSLLEHYAQIHHATPRIAMEGYNGWARPFDQMILQRGYHLFSVNNVKLARFKEMFPGAAKNDRIDAQKILELFTLDKRLPAAKNVLHPVYAQDEVNRQLKRLSRRYNQLVKERIVISNRMKADLQSIAPELAALPKHMNSRWFLKFLTLRPDIRMLPSVRSRTIGEIPYIRADAQERIRYWQKHARFGEEAEYVVPMIREDALRILELEDKLSALRKQMDALIDQSQMATLIQTIPGFATVHAATLAGEIGSLERFESEASLALYIGTTTLDNSSGKHQGTKRSMATNRRAKAAITDGAALNARHVEESNIYLNKKISEGKKHQQAVRSLARHLTRILWNMLTHGREYETREKVQNG

SEQ ID NO: 319575 - protein, 502 aa, unidentified
MILSPEDICRNKLSRKGRAKAMARAQAKKKKKKKAASNKSQKPAATPKMTSRGGLPISTAAGLDQLAQVNPNAAGIDLGATVHFVAVPPGRDPEAHVRCFETFTADLQALADWLKQCGITTVAMESTGIYWIPLYDLLEERGFEVLLINPSDLKKFRRKTDVSDCQWLQTLHTFGLLQGSFRPHERIVTLRSYLRHRDNLSKCATDEVRRMQKALEQMNVKLTEVISDIMGLTGLAIIRAILAGERDPLRLAQLRDKRCKNDVATIALALDGNWREEHLFALRQGLELYEVYLQKLAYLDEQIGAYLETFEDRSDGQELPAPPPNRALAPNLNLRDFMNKLTGVDLTTVHGLAGQGVLQIISEIGLDMSKWQTDKHFVSWLCLCPELHLTGGSRKSKRSRTQPSKNRAAAVFRMGAQSLLNSDCALGAFGRRIRAKKGGAQAVTAVARKLAIIVYHMLKEGRPYKDQGAAYYEARYRDRLVEGLRRRAKQLGLDVVSVDTAS

SEQ ID NO: 319576 - protein, 354 aa, unidentified
MAKALWAGLDVGVETTSICVIDEAGEVVRQSACPTKVKCVHRELSFLKRRKSASVALESGNGTTLARGLRTLGYKVDIYETRQLSKFLRIRRIKTDAGDANGIAQASRIGAKLVSKAYLKSLECQSLAARLRIRKHLILARTRAVNLLCRQLEQFGGRVSRSTRSGALRGLVEAEIRMLFGRTSTPLVADLRNLLDQCLDLMTQASRMDRDLAKVAKSIEVCNRFMEIPGVGVICALTFYAAVAEPTRFRRCSDVGSYLGLTPKIRQSGLTFRRGRISKMGNKEARALLVTASTQFMVHSSPHNSLRIWATNVEVRRGRLKSRIALARKLATIMLAMWKTNEHYHPVLIPTDTS

SEQ ID NO: 319577 - protein, 457 aa, unidentified
MEEGVNGWLEGCQEDRGIYAREVFSLAFMPRKPLDILEANDTRGSGRGGFIIPGRCLTASAGFGAEPQGVHRRLLHGGWGKEFGRPGIARHPSGTSSPWVSTWHAWLPVCLNTEQLLVGACRKAVTSYLQGWPEMNASELIFVGIDVAKETLEVAVDDKSKTRCIANAGREIEALVKELIPLSERIGVVLLEATGGFERQAAAALCAAGLAVMVVNPRQARDFAKSMGYLSKTDAIDARVLSHFARTLHQSAQRERLLMKLPDANQEALEALLIRHHQLVGMRVAEGNRLAQSHPSQHKSIKAVLKMLDRQMASVDNDMSGMLKAHFADKLALLKDFKGIGPCTQASLMGALPELGQLSHAQIGKLVGVAPLNADSGRHKGKRITWGGRTAVRSALYMAALSAVRYNPVIKAFHQRLIAKGKPKKVALVACMHKILTILNAIVKSGSPWNPEHHKCA

SEQ ID NO: 319578 - protein, 411 aa, unidentified
MTVLIDPFTVSTAITVVAGVDTHAETHHVSVLNAATGAVLGDRQVTATNDGYRQLAEFVISFGDVARIGVEGTNSYGAGVARYLRRAGIEVAEVIRPKRAVRRRGKSDPIDALAAARQVLAGEALPIPKDGDGPVEQVRVLLAVRRSAVKARTALLRQVKSLLVTAPEPVRTRWASITSTEDLMAALAATRPGPAITSVQAATGQGLRHLARRYQHLAAEIDELEQDLATLVDAANPAMRAAFGIGTVTAAQLLVTAGDNPERLSSEAAFAALCGTAPIPASSGKTNRHRLNRGGDRQANAALHQIALVRMTTDPGTGLYAARRRAEGKTGREIMRCLKRAIARQVWHLLVHPDPVPDARHFRAARQQLRLTLTDIATRLGTCAARISELERGIRPNAQLATAYQQLLATV

SEQ ID NO: 319579 - protein, 371 aa, unidentified
MSSIIYVGMDVHTTNYTLCCYSVATDTIFATVTIEPNYTQIVKYLDQVAINHGIDCHILCGYEAGSLGYSLYHQLTGCGLDCVILAPSTMATTKKKKGIKTDKRDASNIAKCLAYNTYSPVYVPTDEDNAVKEYIRMRNDAKDTLKRIKQQTLAFCTRHGKRFTEGRTYWTRKHLDWLKKLEFGNALLNETLREYLTLYHQAVDKVELFDKRIEEFAGTKKYDENVKKLSCLIGIKTHTALSVIVETGDFNRFPTAQRYASYLGLVPGEDSSGDSVRRTGITKAGNSHVRKLLVEAAQCYSRGAIGAKSRVLKERQAGVDPKVVAYADRANERLKRKCYRIMFNSKRNIAITAVARELACFMWGMMTDNVA

SEQ ID NO: 319580 - protein, 462 aa, unidentified
MPGREERETSEKSRRQLEGLPVIRRGVAGIDLGSEQHWVCAPTLDRSGREVARFGATTAELIRMAEWLKARQVESVALESTGVYWIAPQEVLEGQGLQVLLVDTRQLAQVPGRDKKSDPTDCEWIQRLHSCGLLRGSFRPEEAVCMLRTLVRDKANLVAESGDWLRRMQKSLDQMNVRVHRAVSDIDGVTGMAILRAIAQGERDAQKLARLRDRRCSKTQEEIAEQLSGHWREDHLFSLQQALKMYDAVQERIAAYEQEILGKLGEMEPEEPHEPTAPPLQNARKARAIKQRGQEAKRQALYRMSGVDMTQIDAIGVETVEVVVSEYGPDLSRFPTEKQFVSHVTLAPHVPKSGGKPVRKKKRNSASTRVAAALRMAALSLRHSQTALGAYYRRIAQRRGADIAVFAAARKLATLIYRLLRWGQPYVDEGAAAFENRYRQHRIGRLAATAKELGYQLTAVPA

SEQ ID NO: 319581 - protein, 400 aa, unidentified
MDKDRIVAGLDVHKDTIYLCVVDNTEAVIFAKVYGTLTPDLELMCSEMVSHGVTEAAMESTSTYWVPVWNALCESMSLKLVNPYFIKQLPGRKSDVKDAQWIAECLLKNLIRGSFVPDKRVQDMRKYNRRIFDLNEDLTYNTNKLDAALQRCGFRLSNYVSRVNGKSYQKCVRAIITGITDPEELVKLIHGKTLRKYGRNIIKDAVTGDFHQADICLLKQYAELIEVIERQIEECRNALIAMCQEHFPKQFKRLQSIPGVKERAASAIIAETGADMKPFEKATNLVGWCGLKPRNDISNNKVKSNRTTHGNRFLRQILIEISWVASRTRNCFFSNFSYVQCTQRHKNKMKIQVAIARKLLVAVWHMLTKDEDFIDVYLKRLEKEAEWQNDIQALESLWVG

SEQ ID NO: 319582 - protein, 402 aa, unidentified
MAEGPTRFFGLDIHKQYFVVVGVDAQREVVFGPQRVSNYQLDEWVSRVLTPQDAVALEMTTNTYLFYDTLLPHVHSVIAVHPPNVTLITGAQVKTDKKAALALAQLHAAGMLEGVWIPPHPVRDLRALIARREKMVRLSTMAKNWLHSLLHRNHLALPEKPFSPEQRSWWENLPLSATEQFLVRTDLDTLKFAQEQVEQAEECLKKASAEDERIPLLVQLPVVAMLTAITILAAIGDITRFPDAKKLVGYAGLGTRVHDSGMTHNSGRITKAGRRDLCRAMVNAANHAIEHHLHWKKEFERLEPHLGRSKAVVAIARKLLVAVWHVLSENVVDRFADPANVARSFFAHAYQVGVRNLPERQSAKAFTREQLDRLGIGQDLQEISWGAKRHKLPASKLLPPKK

SEQ ID NO: 319583 - protein, 316 aa, unidentified
MESVSFPKIVSRGCGIDIHKKVVVATINGEGLRKETREFNTFTSSLTELKDWLLANNITHVAMESTGVYWKPVYNVLEPCGLKVWIVNARHIKYVPGHKTDKADSAWICKLLLAGLLKPSYIPSKEQRKLRDLTRYRTKLIQQIASEKNRRIRILEDCNIKLSSVLSNTNGVVATSLITMLCEGRKITMSDIESVYHGRINASKEDLFEACNGIMETHHVYLLGIINNDIKQTRTLIESLNVHIKDMLSEYENILELLKGVPGLSTKTVQDLVAEIGLDMNTFPTDKHLASWAGMCPGNNESAGKKKVEEQPMEIS

SEQ ID NO: 319584 - protein, 345 aa, unidentified
MSIVRSVVGGVDTHADTHVAAAIDSNGGMLGIESFPADLAGFEALLGWLTSFGEVSLVGVEGTGSWGVGLSRFLHDEEIEVVEVDRPNRQTRRKVGKSDPTDAVAAARAALSGAASVIPKTRNGPVEQMRVLLVARRSARHQRIQTLNQLRHLVFTAPEEIRVRFKDRYKTGLVTEAAKMRPRKGSDPVTYTTNLVIRNLARRIQGLNTETASIDDMLRELVAAAAPSLLALYGAGADTAASLLVTAGDNPDRLSSERSWAHLCGVAPLPAGSGKTSGRYRLNRGGDRNANSALYRIVLTRMSSNDETRRYVARRRIEGLSTPEIMRCLKRYVARQVFRQLPRAA

SEQ ID NO: 319585 - protein, 397 aa, unidentified
MYIVGIDIAKRKHEAAVIDGEGTVIIKPFSFTNNCSGYNRLLAMLAKAKLPLDEVSFAMEATGHYWLALFTRLQKEGFRVQVINPVQTNSIRSFYIRQAKTDPRDALLIAEVIRFGHFSESTLHPENIYELRELCRGRHAIVSMQADVKRKVVALLDQVFPEYETAFTNMFSDTSMAILQTCPTPKELSEMPLEELCHLIEVSSHKRFRMAKAQELQALARNSFGFAMAGDVFSTMIRLYAKHLDFLKQQVREMDRKIAEIMETLDTPITTITGIGPTLGAYILSEIGDISRFSSAAKLAAYAGIDPTMRQSGEYNGVRNRMSKRGSPYLRHAIWLAASSAVLHDPALKLYFQKKRDEGKPYMASVGHACRKMVSIIYAVMRDNKAYVPCIPSEISA

SEQ ID NO: 319586 - protein, 425 aa, unidentified
MVLPQAAWLSVPTMGERVLFVGDDWAEDHHDVELMDEAGRTLARARLPEGAAGMARLHAMVGEQFDDTEDAEVVVGIETDRGLWVTALVSAGYVVFGINPLQVARYRDRHGVSGAKSDTGDAHVLADMVRTDSHQLRPVAGDSPEAQAVKVVARAHKTLIWERTRHVQRLRHQLRDFFPAALAAFEDLDAPDVLELLARAPDPASAAKLTTAQITAALRRARRRNISEKTAAIRAALRGQQLAQPPQVTAASAAVVRSLIAVITTLSEQIKVLERQVDAHFSQHPDAEIILSQPGLGPVLGARVLAEFGDDPHRYASAKARKNYAATSPITRQSGKKKTVMARYVHNDRLRDALNGQAFAALNASPGARACYDAHRAAGAGHRAALRHLANRLTGILHGCLKSRTLYDEATAWPQHASQEIKTAA

SEQ ID NO: 319587 - protein, 350 aa, unidentified
MLHAGLDLSRKRLDVCLLSEHGELVEEFSAPPDADGLRGLVRHVGQHGEPVRGVIESMTGARFVHDTLERFGWEVLIADAQKVKGLAPLACKTDKIDARVLAVLSERDLVPAVWLPDPRVRCEREQARFRLHLVKHKSMLKHRIHSTMLSFGHPCPVTDLFGVQGRRLLERLEIPDPWRQTVDASLDLIDYLERQIAEINKELRSSGAEHPYVPLLLTVPGIGWVLAFTIASEIGDITRFASAKKLCGYTGLCPRVHQSGEKDRRGPLTKHGPKYLRWAMLEATMHALRHPAYAERYQRNKKRLGKQRGAKVAQIDIAKKLTEAIWHMLTRNQPLAPTPAPGGAAFRLAT

SEQ ID NO: 319588 - protein, 410 aa, unidentified
MEVLYPKCAGLDVHKKTVVACVRIQQGAAVEQEVRTFDTTTSGLLALSAWLSEKGCTLAAMEATGIYWKPVWHILADGEFELLLANAAHVKNVPGRKTDVNDATWLSELAAHGLIRGSFVPDRPTQELRSLLRTRKQLVRERSSHTQRLQKTLEDANIKLDSIISDILGVSGRRMIEAIIAGQTDPAVLAGLADRRIKATKEELREALRGRPTAHHRFLLQLHLDQVDALDRAIARIDQEVEANLDSFREATQIVRTIPGFDDRSAQSVLSEIGIDMSRYPSDAHLLSWACMCPRNDESAGKRRSTRMRKGSRWLKATLFPCAWAAVRTKGSYFQAQFHRIKARRGAKKAIGAVAASLLRTIYHMLKDGTLYQDLGPDHFDRRHKTASTRRLVQRLQNLGFAVQLTPVPA

SEQ ID NO: 319589 - protein, 428 aa, unidentified
MLQHNTESDSAQEFAAFLALDWADEEHAFRLQVVGQSTIETGTLEQKPEVLGPWVAKLRERFGGRLIAVGLEQSRGALIHALMAYDFLVLYPLHPTTVAKYREAFKSSGAKNDPLDAGQILEILTKHLDRLHRLNPDTVETRLLGRLVEDRRKAVDLRTTHVQALGANLKEYYPQALELTHGNLSSRLAADLLLKWPTFEDFQQAKPSTLKRFYYGHNVRSPAVMERVLALADKSQALTTDPAIVESGRRLSQMYARLLLALHPVIADYDQRIQRVFDAHPEAKLFGGLPGAGPVMAPRLLAFFGTDRSRYAAALNVQSFTGIAPVTQSSGKSSVVYARAACPKFDRQTFHEFSRLSVPHCQWARNYVQYYTAKGKKYHTIIRALAYKWIRILFKCWQERTPYNEDQYLQTLKKRGSIFATWHQQKTS

SEQ ID NO: 319590 - protein, 484 aa, unidentified
MAARKNTKKNTKKDAASGSLTASPRPGNDGAEVAEEHVEVVTYAAAIDVAKGSGMVCARVPGSRPDRRRQTVWQAGATYASVVALMDHLRCQGIQRLVLESTSDYWRIWYYLAEAAGLEVWLVNARDVKHLPGRGKSDREDCVWLCKLNERGMLRRSFVPPQATRDLRSLTRTRSRLAQDQVRHQNRAEKILEDALLKISVVISDLFGASGRRFLDALVAGERSPAALAALGDRRLRATPAELAAALTGRFREVHAFEIATHLRLIDTINDEIARLDARIEQQLTSIPGVAPACTGCGLIGGGHAPGCASDAAPVLGLVARLDEITGVGVRNAQVLIAELGTDMSVFPTPGHAAAWARLTSRTLQSGTTTKNGRTGKGNPYLRAALGQCVTATARTDTRLGEQYRRIARRRGKQKAIIAVSRVICEIACILIADPAARFAELGAGYYSSGNPQRQTRSRIRELERLNPGMKVTLTPIEPATAAA

SEQ ID NO: 319591 - protein, 352 aa, unidentified
MRDATASPTIRVIGGIDTHKDLHMAAVVDRDDGRLLETKAFSTTRAGYRALLRWMRGWGDLESVGIEGTGSYGAGVMRFLNDAGVTTYEVDRPDRSDRRRRGKTDAVDAEMAARAVISGRRLAKPKNKNGRVEALRVLRLTRAGAVRSRVKALQLLRNHAISAADEVRDEVRALTRMQMLRTVAAWRPDYDDFDHPATATRIAMRSLARRILDLNNEIADLDELIEPLVLQLGARLLERPCIGIETAGQLLVTAGDNPARLRSEAAWAMLCGVAPLPASSGKTDRHRLNRGGDRQANRALHMITLSRLRTDDRTKAYARRKLADGKSKLDTIRCIKRYIAREVYPLLASNPT

SEQ ID NO: 319592 - protein, 360 aa, unidentified
MKKDIKTESGLTVGVDLGDRWSKYCVLDEHGQILEEDTVATTGRAFRKLFSDRTAARVVIEVGTHSPWVQRLLRELGHETITANPRYVRLIYSSRNKNDKLDAERLARLARVDTKLLHPIQHRGGTAQADRALLRSRNALVECRTKLVNHARGIVKSVGGRLPSCSTTCFHKRVRQDLPDELKPALTPVLDTLAALTKKIQCLEARIVRLAAKRYPETGHLRQVSGVGPLTSFSFVLTLEDPERFKHSRAVGPYLGLRPRQSQSGESDPELRITKAGDTDLRRLLVGSAHYILGPFGPDTDLRRWGLALAARGRKNAKKRAVVAVARKLAVLLHRLWVTAEVYEPLRNNKSLIVPEAVSA

SEQ ID NO: 319593 - protein, 354 aa, unidentified
MTNSSELCVTMGIDLSDKKFDFCLLNVDGTVKKRGKLPLTLAGLDRLPVTGPIRVVLETGTHSPWVSRALESKDHEVIVANPRRLPSIYKSSRKNDANDAEMLARLGRVDTELLSPIRHRGLSAQADLAVIRSRDELVGVRTNLINHVRGSVKSLGCRLSSCTTPAFHKRVRHEIPSELAPALHPVVAAIEELTSQIKGFDKQIEELGNTKYPETVVLRQVVGVGTLTALAFMLVLERYERFENSRSVGSYLGLTPRQDDSGETQKQLRITKEGDQLLRRLLVGSAQYILGPFGPDCDLRQWGEQLMTRGGKNAKKRAVVAVARKLAVLLHSLWRTGEVYEPLRQEKRRCQPAA

SEQ ID NO: 319594 - protein, 337 aa, unidentified
MIVVGVDVHKRSLTAVAVDEAGRQLAEQTVVVAQELLSWAGSLGGERLWAIEDCRQLTRVLERALLAVGERLVRVPPKLMAPERRAGRMRGKSDPIDALAVARAALREPRLDHPRPGEERLRELKLLVDHRDDLVAERRRAQQRLRWHLHDLEPTLVVPLGGLDRAVWLDRLGRRLSRQPPSVQVQIARELVGRCRTLTRTILELERELQARMAATAPALLALPGCGALSAAKLLAEIGPIERFDTDAQLARHAGVAPLEASSGRIRRHRLDRGGNRQLNCALHRIAITQGRSHPPARAYLDRKHAEGKSRREALRCLKRQLARTVYTTLKNGPPLT

SEQ ID NO: 319595 - protein, 350 aa, unidentified
MTMLSEIVDVVIGVDTHKDTHTAGIIDARTGGQLGDLTIVTDPDGYEDLIRFADDHDAVRVWAIEGTGGYGAGLTRHLQAAGEWVVELDRPDRPARRHGAKSDPLDAFRAAREALSRTSLASPRAPGSRAALSVRLAARRSAIEAATVAQRQLNALVIAAPETLRDRLRGRSIRAMIPIAARLRTSTSWDLETVETAHVMRALAKRIITLETEAADHERALAVTVKSWRPDLLELCGVGPINAAVVLCAWSHPGRIRSDAAFAMLAGTAPIPASSGQTIRYRLNRSGDRQLNRAIHNIAICRLRYDPTTRAYAERRRNQAKTDREIRRCLKRYITRQLFRQLEHPPLDTP

SEQ ID NO: 319596 - protein, 320 aa, unidentified
MLAATTVVGIDVSRDWLDGFCFPGGESFRLANSAEGHAQLIAAIREMPDPVKVGFEATGGQEWVLWATLVAAGIDASQLPPAQIKAFARSRGTRAKTDQIDAELIARFMLFRPEAGRMLPSENLRILRALTTRRAQIVDMRKRLTAQISARKKQNVPAEVEGMDEDLKTMLDTQIHDLERRIESAIAQEETSAVKASLLRSIPGIGPVSAAMLIAEMPELGRMTAGEVAAMTGLAPVPHDSGTMRGRRAIAGGRRALRHVLFQAALAAACHNPVLKPVARRLKMCGKPHKLVIIAIARRLVTIANAILKTGIPWQPQLGA

SEQ ID NO: 319597 - protein, 407 aa, unidentified
MEVLYPRCAGLDVHKETVVACLRLAEGAEVTRQVETFGTTTRELLRLLEWLQAAHVSHAALEATGVYWKPVWHILEDACTLVLANARQIQHVPGRKSDVTDAEWIADLLAHGLIRSSYVPPAPVQELRDLTRTRKQLVRERTQHIQRLQKVLEDANVKLDNVVTDLLGQSGRAMLEAMIHGQSDPRRLALLAHPRLKASREELVEALTGRLTDHHRFLLHLHLRQIDALTATVAALELRLEEALAPFRAAFERLQTIPGVSRTVAAVLLAEAGADMSVFPTAGHLLSWAGLSPGQHESAGKRKNTRTRPQRWLKTTLIQAAWAAIKVKDSYLRAQYLRLKARRGAKKAIVAVAASMLTAAYYMLSRGCDYQERGAAYFHHHDRERSAFQLVQRLRRLGYAVQLQPAA

SEQ ID NO: 319598 - protein, 360 aa, unidentified
MMKYMIKTQTPCLTAFKTIVSVNFETPIAIGIDVAKNSLMICYRYADNHILTKNIGNNDSDIKKLIKELKLLNFSGKIVSESTGRFHMLSAVMLSEKNFLMYVINPLMSKKYNSASIRKVKSDKRDAEILAEIAIKEEKLPDVFTADRKKLMIKKKISLVATMDKQIQAMQATVKEYQETAKTLKIKLTKAEKGILGVVKNLKEEKEKLEKEIENIFNEQSSVDAINIRRQEIFSSIPGISNYAATLATVFFLEDHCQNPKQWIAYSGLDISVKQSGQWIGKGKLTKRGNGYLRKRLFSAAWGTIMHDAKFKEYYNYLREKKHSYVESLLMIARKIIRIMFYLSKNNCMYNPNKIVFTTN

SEQ ID NO: 319599 - protein, 310 aa, unidentified
MDAIYVGIDVSKDRLDVHVRPGGEAFAVERNGKGLEKLVDRLRGLSPSLVAVEATGGFETIVAAAVAGAGVPLAVVNPAQVRHFAQAIGKRAKTDPVDAGVIAHFAEAVKPEPRPMPEETAVLLAELVGRRRQIIEMLVAERQRERHASNIRVRKSLARHIAVLEKELPSIDQDIDGLVRGAPIWRAKEDLLVSVPGIKNTLARIFLAEAPELGSLDRRRIASLAGVAPYTRQSGRWHGKAMIGGGRTALRSALFIAALTASRHNPALKIFYQRLLATGKPKKVALIAVARKLLTILNAMLRDNKRWQNA

SEQ ID NO: 319600 - protein, 368 aa, unidentified
MKQVTTYVGVDAHKKDLFVAMLVGDRTVPVTWQVANEPQAVRRLVRKLEREAPGPVRVCYEAGPGGYALQRQMRTTRVECQVIAPALIPRKPGERIKTNRRDARKLVELHRAGLLTEVRPPTPEDEAVRDLCRARDDAREDLQRSRHRLGKLLLRRGLHFSGRNWTKAHRRWIESLEWTHAPERVVVDDYLLAIDHLEARLLELDARLTDIAQTDPYRAPVGWLRCFRGIDTLTAILILAELHDFRRFQSPRALMAYLGLVPGEDSTGEKHRRGRITRTGNALVRRLLVETAWHYQHRPGSGVALTRRRKGQPSRVIAIADKAQQRLCRRFRRLAEQHKPAPKIAVAIARELAGFLWAALQPAPRSVN

SEQ ID NO: 319601 - protein, 344 aa, unidentified
MNNLSRVGVDLAKNIFQLHGIDRTETTIWCRRLKRDNWIKVLLNKVEPGCKIGMEACTGAHHWARLLQAKGFHVKLIAPQFVKPYVKSNKNDANDAEAICEAMSRPGMRFVTVKTIEQQNIQAVHRIRSELVGQRTAKGNQIRGLVAEYGLVAPQRMNHLRAAIPAWLEDAENGLSGRFRRLLDGLWGDLKRLDKRVAEMDKEIALIAQHDPVAKRLQQLRGVGPMIATALIASVGDGKQFANGRQMAASLGLTPKQHSSGGKDRLLGISKRGDAYLRSLLIHGARSVIYAARGKEDRLSQWVISIASRRHPNVAAVALANKTARIAWAMLRYETDYAPQLAAA

SEQ ID NO: 319602 - protein, 482 aa, unidentified
MKKRTIYTNQSQELLRLFEQVGNSAKVMCVPIDYAKKDHVVMFCNGYGDIVRKPFSVKNSAEGLKYLIDQVTRSCRHRRIRKEHVFFGGEDANSYAENFANALRSKGWLVAHVNAHDAKKQRQNLQASTDRLDLMGIATMLLNRRANCSPAQTGIYRNLRTLVRHRKKLVVMKTEVRNRVHAVVDRLFPGFLSEKKTSITPFSNSSLYLMENSFSAQQIRRRKHSTLVNILKRYGTAAPEGAAAKLRTYAAQVLTTQNQYAATLQLSLAHHIKLYRCLLDNTEQLEKEIALPLAQSQGAFLTSIKGIGIVLAAGVTAEIGSPFEQKPLNNLTSYSGIIPRVKQSGGPNAQAHTGRVSKRSNHLLKDSVVQSAFHIGHFGPKELSLDYKRRKAAGQHADFGMGRRFLRMAMSLMKTSQIYLPPPLRNEQLRAQERAGYYLAVWPQLRDKWNKVDALKVAFAKHNPLGQWRHIVQELYGIKLKL

SEQ ID NO: 319603 - protein, 367 aa, unidentified
MKKISTAAVKQNRNFSKQKLTIGFDLGDRSSWYCVLDEQGEVVLEQRLSTTSKAMKEVFGGMPRSRIALETGTHSPWVSRLLSEMGHEVIVAHARNVRLIGESRKKDDRLDAQTLARLARIDPQLLSPVKHRSAKAQADLTVIRARAGLVRARTALVNTVRGLAKSYGERLRGCNVRNMNPEKAEGLSPELQWAVEPLLAGIESLSERISEYNERIEKLAQESYPQVARLQQVKGVGTLIALTFLLTLEDAQRFRKSRDVGSYLGLQPGRRNSGQSEPQMHISKEGDPYLRTLLVQGAHHILGPFGVDSDLRRWGLKLAERGGRNGKKRAVIATARKLAVLLHRLWVSGEAYEPLRNSNQSAVPAAA

SEQ ID NO: 319604 - protein, 339 aa, unidentified
MEVKRISIDTSKHTFTIHGVDLQERPILQRDIKRTQLEPFFAKLEPTEVALEACAGSHHWGRLLSRLGHRVKLIPPQYVKPFVKRSKNDRTDAEAIGEAASRPTMRTVPLKTVAEQAATIVVKHREMLVAQRTQAINALRGHAAEFGTIAAKGCTNVTALLAVLAADEVIPHSARAMFEQMGQHVADLDSKIEALDRQLLDQHKINPVSRRLATIPGVGPITAITLALTVDSGNFESGRHLAAWLGLTPREHSTAGKHRLGQISKAGNERLRQLLVVVAMAVIRVAKPGRPSASGWLLQLLERKPRKLAAVALANKMARIVWAIMAHGEAYRRQPATAA

SEQ ID NO: 319605 - protein, 314 aa, unidentified
MTGPRYVGIDVGKDHLDLHVRPDGTAERHPNDPPGVAAAVARVAALAPDRVVLEATGGYEAPVAAALAAAGLPVAVVNPRQVRRFAEATGRLAKTDALDAAVLAHFAEAIRPAVRPLPDADTRALAALVARRRQVVEMRTAEANRLGMAPPPAVARGLRDHLAWLDRQLGRVDEELAAAIQASPAWRAKDDLLRDVPGIGPVVSRTLLSELPELGTLSRKRVAALVGVAPVARDSGRKAGTRAIAGGRAGVRGGLYMAVLSAVRYNPPIRAFYRRLRDAGKAVKVAQVAAMRKLLTILNAMVRDNKPWDPAAVA

SEQ ID NO: 319606 - protein, 455 aa, unidentified
MRIFIGIDIGKEYNYASFLNNEGMEIDKRFKFKNNHLGFLSFKDNIDKLTYDCNFNYDDVLIGFESTGHYWINTDWFLTEKLNIKTVMVRNDAVRHTRALNSQGKGKNDSLDSRTIAECLKNGYYFDVQGRKEDYIVLRRLTRERTELEKEIARYKNRYRAWLDVNNQIFLENFSNVFSTGAFSLLKVYPSSLDIIQDSYLEVREKLKEVGYKRTNNTFKIYYEEAKTYKNIINGITYADRLEINEYIETLEMYMKKKESLDEKIEALMNYLEGKVYNSLSQIKGMPKAQVASLLAEIGNVSNFKSARHLISYAGLNVQGEGSGKNKGYSWISKTGNRKIRKELYVITFNLVRHNDYFRGLYCYYKSYKRPNEKSSKEMLIALACKILRVIYGMLKYNIEFDLNEMLKNYDFRNINKEKFIDEFLGSSEKKQKIIPQEIEDIFLSNRKSNEKSDD

SEQ ID NO: 319607 - protein, 326 aa, unidentified
MEHELHYIGIDTAKEKLDVDVLRPDGRHRTKKFANTTKGHDELVSWLKGHKIDHAHICIEATGTYMEPVAECLYDAGYIVSVINPALGKAFAQSEGLRNKTDTVDARMLAEFCRQKRPAAWEAPHPLERALRALVVRHQALTDMHTQELNRTETAREVQRPSIDAHLLWLEAELKRLEKQIKDLTDDDPDMKHRRKLLESIPGIGEKTSAVLLAYIGLKDRFAHARQFAAFAGLTPRRYESGSSVRGASRMSKAGHVSLRRALYMPAMVATSKTEWGRAFRDRLAANGKKGKVILGSMMRKLAQVAYGVLKSGVPFDASRHNPVAA

SEQ ID NO: 319608 - protein, 338 aa, unidentified
MERIRQNAGIDIAKDSFVTTFTVLLKGQIIKHISTKKFDNNIKGFEDFYNWCIKWQEDDIEVNFTMEATGVYYENLAYFLFEKEESVHVLLPNKAKKFAESLNIKSKTDKIDSKILGQMGVERVLERWVLSSKTYRQLRTLTRERQQIIKNRTIVKNQLHAEQNSGSPVKSTIRRMKNHIKYLDKQIESVEKELRTLVAKDDLISGKVKRITTTPGLAFITVVTVIAETQGFSNISSIRQLNSYAGYDVSIKESGKWKGKSRISKKGNSHIRQAMYMPSWSSIQHSETYGAFYERINEKKESGLIAGTAVQRKLLGLIYTLWKNDTEFIENYKMKNIA

SEQ ID NO: 319609 - protein, 320 aa, unidentified
MRNTVGLDISKLTFDASAMVGNAEYSAKFDNDSKGLDQFSDRLKSLGCQNLHICMEATGNYYEEVADYFAQYYSVYVVNPLKISKYAESRFKRTKTDKQDAKLIAQYCRSAQESELVKRQKPTDEQYRLLRMTAAYAQIKSECAAMKNRHHAAKDEEAAKAYAQIIKAMNEQLEVLKEKIKEQTEKPNCKEGVKRLETIPAIGRMTAAVLFHHLTSSKFETSNKFAAFAGLSPQQKESGTSVRGKGKLTKFGNRKLRAVLFMLTMVAYRIRAFPDFIERLEEKKKPKKVIIAALMRKLAVIAYHVHKKGGDYDPSRYKSA

SEQ ID NO: 319610 - protein, 388 aa, unidentified
MNVEADKSEPFTAIRTDLGAIFVSLELSRSSWLITSLSPGGGEKMSKHSVPGGDFAGLMERFAQLQEKARLRTGQSFRIIVVQEAGLDGFWIHRALQNEGIESHVVDAASIATPRRRRRAKTDKIDGETLVRVLLAYKRGEPRVCAMVKAPTPGEEDRRHLCRERKALTAERVRHVNRIKGLLFSQGISRYQPLRRDRRERLEELQTGEGRAFPQHLKALVNRELDRLELLLKQIKTVEAARDALLAVGQTAKPAPAAMLLGIRGIGPEFAAILWSEGLFRHFENRRQIAAYAGLAPTPWQSGAVDREQGVSKAGNPRLRTTLIQLAWLWLRNQPRSALSVWFHERVSRNGGRLRKTTIVALARKLLVALWKYVTAGVVIEGVRMKVA

SEQ ID NO: 319611 - protein, 384 aa, unidentified
MNKHSMIFIGLDTHKEFHEVAYCEEQRGATPVHYGRIPSSKVSVKKLLRQFKSKYPGATLHVVYEAGPCGYWIYRLITSLGHCCYVVAPSLIPKKPGERIKTDRRDALKLVRSLKSEDLTPIYVPEPEDEAVRDLSRAREVAMKDLKEAKYQLKALLLRNNIRYEGTANWSKKHLRWLTELILPHPAQQIVLQEQLQTIEERIRRLERLDNELTHHVHQWRYYPVVKAVQAMRGVRLLVAVGVVAELGDLNRFDHPRKLMAYLGLVPSEQSSGGKRHLGAITKAGNGRARRLLIEGAHSYRYPANVSTELQLRQEGLPKDIVDIAWKAQLRLCKRYQRMSKKGKHYNLIITAIAREMAAYIWAIAKEVVLTPANPKLRLSRVPA

SEQ ID NO: 319612 - protein, 400 aa, unidentified
MLSIGIDVSKGKSTVCGMKPGGEIVYTPFEVQHTREGMSELVSLLRGSGEEVRVVLESTGSYHCPVVAALLENGIFVSVVNSLRMKRFCSQSIRRVKTDQIDAMQIALYGLAYWQELQPTRLPENTYRELQLLARQYYQMTSLLIKAKVDFNALCDQVLPGMQELMSDHAGRHKLSDFVLRYHHTAHILKMGETRFRKDYCKWAEKKGYRNHERMAALIFATAQNGIPVLPNAPSTKIVITEAIRVLHTVEASRDAILTQMQALAKTLPEYSLVREMPCIGDTLAPRLIAEIGDVRRFHSKRALIAYAGIDAPPYQSGKFCANNRHISKRGNRYLRKTGYEVMQSYVMHKPANDPIFTFIEKKRSEGKSGKLAMVAGLNKFLRVYYGKVTELYRSLPAIE

SEQ ID NO: 319613 - protein, 355 aa, unidentified
MNQEKYIGMDVHQATISVAILDSGGKLIMECILETKAATILEFIQGVRGTLSVTFEEGTCAAWLHDLLKPHVSRLVVCDPRKNALLKDGSKSDRIDARKLAELLRGNQLKPVYHGDHGVRTLKELGRTYLTITKDLTRVMSRIKALYRSWAIPCSGTTVYAARHRSEWLAKISEPGVRLRAERFYQQLDLLRLLHQEARCDFVVESHKHPAVKLLRQIPSIGPIRAALLVALLQTPHRFRTKRQLWAYSGFAVETHDSGEYRYVRGKLLRNRERISVRGLSDNYNRDLKNLFKSTAISASTRPGPLRDFYAALLARGMRPTMARLTLARKIAAITLTIWKKGVDFDAKQLDQQAA

SEQ ID NO: 319614 - protein, 439 aa, unidentified
MILIREVADAPVIMGISKPAGLKSPYREVKIVNPLFVGIDVSSRSNVVYLMNPDGSKYSSFSVQNNLGGAKLLSEKIVSALSSMQLSDVVIGLEATSIYGDSLVYALREDGSLGRFQRKIHILNPKQVKKFKEAYPDLPKNDWVDAFVIADHLRFGRIAKEVYLDDYRYHALKTLTRARFDVIQNLTREKQRFANYLFLKCSGMAQDKDIPNTSATTIALMEHFESVDELANTDFNELTAFISETGHGRFADPAATAKAVRAAASGSYRLPKTVNDTVNQAMAISIASMRALEKQVKILDKAIDQQFEIIPNTLTSIPGIGRVYSAGIIAELGDIHRFDSQASVAKFAGLVWHKNQSGDFEAEHSRMIKSGNRYLRYYLLEAANSVRRCDSEFRRYYDLKFKEVNKYQHKRALAFTARKLVRLIFRLLKDNRLYIPPEG

SEQ ID NO: 319615 - protein, 320 aa, unidentified
MMAQNDLVVVGIDIAKDKVDGCIRSLSLRQTLPSTAEGRRKLISWLRKHKVTKAVMEASGGYERDWAKALREADIEVRVVDPKRVRSFARSAGRLAKNDAIDAEMIAWFAETFGEAKGQACDAAREKLVQIVHARQGLLDLQTSLQNRGEHAAPEVVQKMQGRLLKKIALELAGLEAAIAAMIEATPHFAERAAIIESVPGLGEITSAGLIAAMPELGQVSNKIAAALLGAAPYDDDSGRRRGERHIKGGRRRVRNLFYMACLGAATRHNPMLKAFYQRLLAKGKEKKVALVACMRKLIVILNTMIARGEKWDATRCAPS

SEQ ID NO: 319616 - protein, 343 aa, unidentified
MVESHSTTISIDLAKNVFQVAVFNKHGNLKSNQTMSSRKMALLVAQHPEANICMEACGSAHHWGRKFTQQGHEVYLVPAHISAKYRSGNKNDPKAVLAIYAAARRPDTHFVTDRTLEQQDLASQHKVRQGYVKQRTEVANRIRGFGMEYGVKFPKGIEQLRRRVPEALEDGENELTTIARSLLSNLLGQLLSLDEQIAQITKVLVEHTKQVPACRELVRMPGVGWLVAGALYVRIGNGSAFRRGRDASASIGLVPGHTGTGGKTKLSGISKRGDRYLRTLLGHGARSAVSNVGDKPDGLSVWIRKQLSTNHMNNTTIALANKLVRMAWAILSSGGQYREPVAQ

SEQ ID NO: 319617 - protein, 355 aa, unidentified
MDKYIGFDIDCKKTVVCVYQKNGCSKYDTIGPDVESMKKFLLSQKKNFSGKVHLVFEVSGQAGFLYDSLVDSVDSLTVANPSKMTWIFRTTKKNDRIDAYKMAKLLYMDEMPAVHMPSKEVRQWRETILHRKKTVTKLVQVKNRIRATFKGQGYNEPLHKGGWWKKSNLLWMREICQRDMGKFDLWHLHLSNLLDEFDLLKIQIKNTTAYLDKYLATQPGGKLLMSIPGVGPRTSEAVLAYTDDVSRFDNFKQYCSYFGMVPKLDESGSCRRLGHITKHGPAAVRWVICECSWMAIRKSKALNEFYERVRCGQDGRKKIAIVAVGRKLLSIMRAMLISGELYNEKLVERMLNQAA

SEQ ID NO: 319618 - protein, 346 aa, unidentified
MQTSPQLYIGIDVHKKSWSVNLRTDLFDHKTFSMEPDATQLFRYVDQHFSGYQVKCCYEACCCGYSPYRELSKQGWEVLVVNSPDVPAVNKREQHKSDRVDCRHLCKQLQADQLRGIFVPDEKQEQLRSLFRQRNNLTKELRKIKSHIKGELLYYGIDLPENYENNNWSKAMLSWLQSLPWKYETGQSSLHSKLRQLHFAYYEWLQLSNQLRAYARREYKKDYYLLRTIPGIGPLTAIGILAELGDIRQFKKLDQLRSYVGLVPSVYSSGEKTQTRGMTPRSKQLLRSYLIEAAWTAVRRDIVLQHYYRCHTGKPSNKIIVKVARKLLNRVWYVIKNERPYQLEVN

SEQ ID NO: 319619 - protein, 407 aa, unidentified
MEVLVDRGAGIDVHKQSVTVCVMTTVGRTVEKTLQRFTTFHRDLLAMREWLVTLGVTHAAMEATGEYWKPVYEVLEGSVELLVANAQHVKNVPGRKTDPEDAAWLARLLRHGLLRASFVPSQAIRDLRDLTRLRRKTIQLSARVESRAQKVLEACGVKLGSVMSDVFGVSGRAILQQLAANQTDPRALAKLARGKLKAKKREISVALESSFSSHDAMLLDHQLILHEQLQQRRAKIESHLAVLAEPYEQLICRLDEMPGINRDAAIEILGEIGEDMSPWPDHDRIAAWAGLCPGNHESAGKRKKIGARKGNPFLKSILIQAATAAVKKKGSYYQAKFIRLCRRRGYKRAIVAVAHAMLIAIYHIIRDGRQYYERGAAWFDNRSAESKRRSLVKQLERLGYSVELRTA

SEQ ID NO: 319620 - protein, 365 aa, unidentified
MDKEYYTTIGMDVSDRTTKVCVMAKQGINPKIVMETTIPTSKDGLAKFLATQDKSSPVVFETGMHCRWMNEVAEGIGFKVYIANPCRLRMITESKAKNDVNDARMLARIALSDPGLLHPVRLRGKEHQKMLNLHEMRNLLVKQRTGIIVQLRAVAKSMGFRIERSSTAHFHAIDTRAWPKEFRDIAWPMLKNLEQLAVTIKTYEKQIRELAQTPTFKAQVERLMEIRYVGLYVATGFVAVTGGDMDKFEKSRDVGPWLGLVPKQDQSGDIDRQCHITKTGSPFMRRLLVESAQMIVRDSATDTDLKVKGMRFCRRGAKIAKRKAIAAVARSLAVLMVAMLKHPNTPYAPLSERCKMELLSMKASA

SEQ ID NO: 319621 - protein, 385 aa, unidentified
MFDHLAKTPITVQPQASTLFVSLELSKSRWLVTVSAPGSAKFSKYSVTGGDAAELLQLLERLQGAVAQRLGAPVAIAVIAEAGLDGFWLHRLLCQHGLASYIVDPASIAVPRRHRRAKTDKIDGEALLRSLIAHARGEQRVCAMVVPPSPEAEDQRRLSRERARLIKERIQHSNRIQGLLFGQGIRDYDPVHPERRTRLDVLVTGDGRALPAHLKSEIQRELARLELVLSQLVAVEAERDALMAQTAAADPNAPAAALTRLRGIGPEFASLLWLEGLFRRFNNRRQIAAYAGLAPSPWQSGGIDREQGIAKSGNPRLRRTMVELAWFWLRHQPASELSRWFQERVGQARGRVRRIAIVALARKLLIALWRYASHGVVPEGAVLKA

SEQ ID NO: 319622 - protein, 326 aa, unidentified
MVIIGIDVSKTKLDCLWIRDLQAMKIKGKVQANTPTGHQALLAWAMKQTGEDVSGLHFVMEATGVYHETLAYALHDAGAQVSVVNPARVRDFARSLGAQTKTDKRDSVAIARYGMTQSPRLWVPEPVEVRQLKALIARCDAIKQDIQRELNRLEKATASDASEEVRASIETVRSQLEAEKARLESLIEDHIDNHPDLKNDQVLLESIPGVGPVISQHMVAIIRSRSFKQAPQCAAFLGLIPVERQSGTSVYSPPRLSKHGDGRVRAKLYMAAVVATRYNPDIRRQYRRLLKNGKSKMSAIGAAMRKLVHICFGVLKHQTPYRPQPA

SEQ ID NO: 319623 - protein, 319 aa, unidentified
MAEEVYVGIDVSKAELVVAARPGGERMTLTNDRAGIKRLVGRLGELKPRLVVVEATGGLQRQVVAALWTAGIAVAAVNPSWVRNFAKGRGLRAKTDRKDAELLALYAERERPQVRPPADAETQALQELVMRREQLVAMLVAEEHRLTHALGPVRKELRHHISYLEGRLKQIAEDIDKTVRRSAGWRRKSEIVRSVPGFGKVFCSMVLAKVPELGALNRKQIGALVGVAPVPDDRGTRHGRRAIAGGRFEVRNKLYMCALVASRANPVLKEFYQRLVARGKPKKLALVAVMRKLIVTLNAMLKTNSMWRPPCLAVSVREN

SEQ ID NO: 319624 - protein, 415 aa, unidentified
MYYVGIDIAKSFHVVSVIDDEETKVINKPFKINNDAKGFEKLLTILDSVTLDKSDFTVGLEATGIYGENLQEFLKYKSYLVKLLNPFQTTRYREQITLKKVKNDEIDSLVIALLLKSGKFSSGYITDDEYQSLRTLYRNRSSIQADMKDVKKRILTQITVTFPEFENFMKPFSVSGLALLDKYPTAHHYKHSSIDRIMKLFRHIQGNNFTQDKALKLLELSKESIYSGKAKDAREIAIRSSIRILKMYLTELETLEQEILSLLERSPATISVNDAGEEIQRADSLISNLKTIPGVAEKTIAALISECGDLTRFPTIPKFIGYLGLFPTENSSGNSKHIGHLSKRGSPLAKHALYMSAVSCLIHNSELKQLYDTKRSQGKSKKEGLVAVSRKIATIIYSIFKYNVPYNPNRVFLKS

SEQ ID NO: 319625 - protein, 479 aa, unidentified
MYFVGIDIAKSFHVAAVLGIDSDKVLHTLKFNNDEEGFEKLFLLLSSLDEISNFTVAMEATGLFFENLYLYLKAKGFKVVLLNPYQTNRFREMDTMKKVKNDNIDALMIAALIKSGRYSKAYVSEDTYQSIKSLYRHKSSLQDELKKHKRQVSTLLAVVFPEMEQVIKDPFNVTGLALLEKYPTAKHYHHASVDRILKTFRGIKGNNFNETKAQKLLELSKSSIYQGNGVDERAFVILSHIRQIRFINNEIEQCETQMLALFNQQPKLDENEEQEVMNIIDNLRTIPGVSDKTIFALMSECGDLSRFTNQNSFIGYLGLYPTLEQSGNKTVHGPIAKRGAKLAKKALYQAAIASVRHNKELNKLFHDKVSLGRAKKEAVVIVARKLAHIILAIYKNNVAYNPNRVFVASWLLSFNYLTISCNRTWQKQYWDKNLNNTIVKPNIFSVWLSKHSSKILDTYIKWVLQKSNICKKFNSYNVL

SEQ ID NO: 319626 - protein, 408 aa, unidentified
MNTLYVGIDVSSKSNVIYLMLPNGDKHSNFSVANSHEGSTLLVKKIYSALTSHSLDTVLIGLEATSVYGDNLVYFLREDATLAPFNRKIHVLNPKQVKKFHDTYNDLPKNDYVDSFVIADCLRFGRINKEVYMGDYRYKALQNLTRARFFAVQNLVKEKQRFMNVLFKKYSTMTQEKVFSDAFSTTALAVYDEFESAEALANMDLHELTDFIIEKGKNRFPDPDAVAKAIQKAARSSYRLPKTVNDSVNQVLSISITSMKALESQIKEFDKAIKAQMELLPNVLISIPGIGPVYSAGIMAEIGDINRFDNQASLAKYAGLAWKQHQSGGFEAEVTRLIPSGNRFLKYYLCEAAFSLVRCDKEYSDFYHLKYKEVNRCQHKHALALTARKFVCLVFRLLKDNRLYCPAK

SEQ ID NO: 319627 - protein, 356 aa, unidentified
MSREIKYIGMDVHKEAIVIAVLNSSGKLVMESIVETKASSLLQFIHGLRGELHVTWEEGTWAAWLYDLLQPKVQQVLVCNPRRNALLKEGNKSDKIDAQRLANLLRTGMLRPVYHGEHGLRTLRELARSYQTISQDLIRVMNRIKAVYRGWGIACGGTQVYAARYREEWLGKIEHAGVRRRAELLYQQLDGLQELRRTLRPELLAESRKHKAAKLLRQIPCIGPIRAARLLALMQTPHRFRSKRQLWTYSGLGIETRDSAQYCFVRGQLQRAKKPQQIRGLNRNHNHEMKEIFKGAATRASCGVGPLRDFYVALLAKGMKPEMARLTVARKIAAIALTLWKKEERFDAEQLKAQAA

SEQ ID NO: 319628 - protein, 346 aa, unidentified
MREVGLVLGVDTHKDVHVATLVDDVGQLVAVAQFAASDRGSREMLMWAKRHGSLRRAGVEGTGAYGYRLGRLLTEAGVEVREVNRPDRSVRRLRGKSDPVDAEAAARSVLSGTARATPKDREGPVGALRALMVARRSAVKARTQAINQIYALLVCCEDGPRARLGGRRGRPLAQGCARLRPTDGTSSALRSLGQRWLRLDREARDLEGQIALIVKRVAPGLLARPGVGVLSAAQLLVTAGDNPHRLRSEAAFAALCGASPVEASSGKTTRRRLNRGGDRAANSALWMIAHVRMMRDQNTRDYAALRTERGNNRKEILRLLMRYIARELYPIILGSLDGGSACEAVA

SEQ ID NO: 319629 - protein, 407 aa, unidentified
MDVVIENACGMDVHKDTITACAITPEGKEIKTFSTKTIYLIELVDWVKKRNCTHVAMESTSVYWKPIVNLIEAEDIEFLVVNAQHIKAVPGRKTDVKDAEWIAKLLRHGLLKASYIPDRNQRELRELVRYRRSIIEERARQHNRMQKVLEGANIKLGSVVSDVLGVSARDMLRSIAEGNDDLEELSNLARGVMKKKKEELKLALQGCMKDHQRFMIKTILDHIDLLTDQMDKLDKEISKRMEESQEDIERLDSIPGIGRKVAEQMIAELGTNIKEQFPTAPQMCSWAGLVPGNNQSAGKRKSSKTLNGNKYLKSSLVEAAHSVRGSKNYLGALYRRTASRKGKKRAGIVVAHAMLRISYYLLTRKEMYVDLGEDYFDKQKQQSIVKHSLRRLEGLGYTVTIEEPKVS

SEQ ID NO: 319630 - protein, 408 aa, unidentified
MYNAVGIDASKLKSTITIIQPAGVVIRKPFDVLHTSDELNTLVTYLKSLEGETRAVIECTGRYHEPVVKSLSEAGIFISAVNPKLIKGQKQNTLRKVKSDPADARKIAKYALDNWAELREYSSMDTTREQLKTLNSQFTFFMKQKVAAKTNLISLLDNTYPGVNKLFDSPTRDDGSEKWVDYAYSFWHVDCVRKIGLKAFTERYEAFCKKHHYNYQKNKPALLFEESKQLVAVFPKEKSYKLLIQQSIQQLRLASEHIEIIRKEMNELASTLPEYETVMSMYGVGETYGPQLIAEIGDVSRFTHREAITAFAGVDPGVNESGQFKQRSNRASKNGSTRLRKTLFQVMSTYLQNKPVNEPVYQFLDRKRAEGKPYLVYMTAGANKFLRIYYGKVKECLRNLEQSQIEES

SEQ ID NO: 319631 - protein, 367 aa, unidentified
MKIIHWIGIDDHADKWTIAHFKGNEEKPAREFELVPDAAGYRKLIKYLKELGGEVRVVYEAGPCGYELYRRLTKAGIKCDVAAPSLTPRKPGDRVKTNRRDANKLARYLRAGDMLTLIVVPDKERESLRDLVRARHAVQKDLLRNRHQISKLVLRYGHRYREGKTAWSKQFWTWLGKIKLDEQHSQLVLEELILSHRQRLEQRGRYDEAIEAAAKAPEYAPYVAALTVLRGIDRLSAMTILSELGDLRRFATAPQLMAAIGLVPSESSTGDNTNRFSITKTGNAHVPRGSLEAAWQYQKRIGNGPTIRKRRKDQPKALVDIAEKCELRLNRKFHRMTSRGKRSTIAAVAVARELMGFIWAIGQITHP

SEQ ID NO: 319632 - protein, 362 aa, unidentified
MDHFAGLDVSVKETSLCIVDDAGRIVREVKVASEPEALVQALTEPCYHLKRIGLEAGPLSQWLFSTLAEAGLPVICVETRHMRAVLKAQINKTDRNDARGIAQMMRAGLYRPVHVKTLRSQKLRMLLTHRKLLQSKAIAIENDLRATLRNFGLKVGVVGTVKFEARIKELVENLPDLVVLVEPLLIVRRVLREQIGILHRRLLAIVRDDDVCRRLMTVPGVGPVVALTYRATVDVPSRFRNSKAVGAVFGLTPCKHQSGESNRTGVALLAIMDISARAISLADRPRPGHLGHQFIIRIISSPHRDIPRSSSRRQSPARSSITRSMRGDRTSEGAARMRGSSARKKRNPCRTATPRSSRKARI

SEQ ID NO: 319633 - protein, 422 aa, unidentified
MLEQTQDEQEIIERVAALDIGKAELVCCVRVPDPKGGSRRVQEVTTYSTMTRSLQVMADRLLDLGVTRIVMEATSDYWKPPFYLLEAHGFQTWLVNARDVKNLPGRPKTDRLDAVWLCKVAERQMLRPSFVPPVPIRRLRDLTRYRIALVSDQTREKNRVEKLLEDAQIKLSVVASDIFGVSGRDMMAALIAGERNPQVLAQLARSRMRKKIPQLEEAFVGYFTDHHRFLLAKMLSRIDALDADIADLDAQIEAKIAPFAPAVARLDEIPGVGAIAAAVIIAEVGVDMTRFPTPAHLSSWARFAPGVKESAGRKKGTGSTGHGDRYLARVLGEAAVGASKTNTFLGERYRRIARRRGKKKAVVAVGRSILVIVWYLLRDESAAFHDLGPGYYDSRTNPETRKRNHIRELEALGYKVTLQPAA

SEQ ID NO: 319634 - protein, 347 aa, unidentified
MNFYNNTHPYYCGIDLHARTLYVCIIDQDGNTYVHKEISADPNKLKQLLEPYIGNIVVGVECMHCWYWVADFCDDIGADFILGHALYMKAIHGGKAKNDKIDSFKIANLIRGGNFPVAYVYPKEMRATRDLLRRRMKIVRHGADLKAHVVNTTSQYNLPPNKLNLKNVAAREHLKSTFPETAVQKNIDLDLVILDCYAEQLSKVEWYIETQARQHKPIHLHLLKSINGIGRILSLTIIYEIGHIERFESVQNFASYARLVKCKAESAGKSYGTQGNKIGNAHLKWAFSEAAVLYLRGNDNAKNYLLKLQKRMSKAKALSALAHKLGRCVYFMLKNETVFNEERFLKG

SEQ ID NO: 319635 - protein, 348 aa, unidentified
MTLVGCDLHSRKQQVAVLDTSTGEVIDQELAHEGDAVEQFYRTLRPPVTIGIETTGYTQWFHALMHRLGHTVLVGEAGKIRAMVIRKTKTDRRDARHLLDLLRQDRFPTVWMPDPDTRDLQALVAHRVRLVRMRTMVKNGLPAIALNQRLALRSKLWTVRGLARLRALELPPHTRRRRDDGLELLAWITGRVDQLDDQIADVVACDARTRRLLTHPGVGPLTALTTVLVLGPTTRFPDGKHVVSYVGLAPSINASADKHHLGKITKQGNALLRWVLGQAAPLAARADDDLRRRYFAVLHRRGRPKAKVALARKLLVRLYVMLRDQIDYDEFRRRGRVAHAQPEPVAVR

SEQ ID NO: 319636 - protein, 361 aa, unidentified
MTESTTIIAFDQHADSVVAAVLAPGERVPAAQAVPPDLPGIGRFVEKVGRRGRVQCYYEAGPCGFALQRFLAERDVPCEVIAPALMPRRPGDRVKTDRRDATQLALMARAGALTAVHVPTAQEEAVRDLLRCREDIRADLLRARHRLSKFLLRHGRRFTTTRAWSQKHWAWLRQQPWVHDAERQTHEAYLRAVDEAVARLRTVEDDLRAALQVEPLQARVARLRCFRGIDDLTALTIAAELGDPRRFTRARQVMAYVGLVPSEHSSGAKRAQGGITKTGNAHLRRVLVEAAWHYRHVPAIGDRLRARQAGQPAEAISHAWRAQLRLHHRYRRLAGRGKRTNVVITAVARELAAFVWATLVA

SEQ ID NO: 319637 - protein, 394 aa, unidentified
MKLVGIDVGKNSHHFCVMDKETGEFNVAPSSFSNNKEGFDFLINSLKPYSKKSILIGMEDTGHYHVALLKFLLSNGYTVALINPKTTDLTRKMEGGITKNDKLDTITICDVLDTPERKKQYRITKVDRFDLYEQRQLTRHHHNLKEELNVYCNRLQKSIDLVFPEFNTLFSSKYSIVYMNLLKTFGSAEAIASTDIRTIRKCFEVKGRGGRISLTPEKLKECAKNSIGISSEVETIQIKHLVNQITLIKEQIAEIDKKIEEFSIKNNSPILSIPGISHFSGTSILAELGDIGNYSKPSQIIKFAGVAPYHYESSQYNAQHTGITKKGSKYLRKTLYQIILTVINNNPVFKKYYLLKISQGKGHRCAQGHCIRKLLRIIYHLLETGQSFDSALLR

SEQ ID NO: 319638 - protein, 345 aa, unidentified
MEPMYYIGLDVHKKKISYCVKDSAGRICGEGSLTATRLDLDLWMKTLPGPWSAAMEATMFTGWIYDRLKPHAAALKVAHPLMLRAIAAAKKKNDRIDASKICDFLRCDFLPECYMASTAIRERRRTLRYRNLLVRQMVQMKIKISSLLMEAGVSYNKQRLHKSGYFRELLATNPDIDEGLISLLRQCRESVERLQKTESALVRSLERDSLLMDRVERLMSIPAVGPITALTWALEVGEVQRFSSIKKAISYCGLCSAEKSSGNTVQRMPLSKQRNKHLQTTLIEAAKMAPRYNSELAMLYDREKQKGNANRATLAVARKLVAYLMAVDRGQRNFQLAQVSSGIAA

SEQ ID NO: 319639 - protein, 357 aa, unidentified
MGSSNVKYIGLDVHQEAIAIAVLNSAGKLVMESIVETKAATLLEFLHGLRGELHVTLEEGTWAAWLYDVLKPHVSEIVVCNPRRNALLKEGSKSDKVDARKLAELLRAGLLRAVYHGENGLRTLQELARSYLTISKDQARVMSRLKALYRSWGIPCSGRQVYTPRHRGQWLSKIAHPGVRRRAELFYQQMDGLSAVRHTVRGELLAESRKHEAVKILRQIPLIGPLRAALLLALMQTPYRFRTKRQLWTYSGLAVVTHDSAQHRYVDGQLQRSKKPQQIRGLNQNHNHEMKSIFKGTALSASQCAGPLQDFYAGLLTKGMKPEMARLTLARKIAAIALTLWKKGGRFDAEHLKSQAA

SEQ ID NO: 319640 - protein, 310 aa, unidentified
MDAQFVGIDVSKDRLDVHVLPKGEALAVARNGEGLAALNDRLAGLGVVTVAVEATGGFETVVAASLAGAGLPVVVVNPAQVRAFAQALGKRAKSDPIDAAVVARFVEATRPEIRPLPDEQTQALADLVARRRQIVQMIAAEHQREKRAMIKRVKRSIQRLVLALEKELAELDKTIDDMVRGSPAWRRNEDLLRTVPGVGPIIARTLLAEMPELGTLDRREIAALAGLAPWTRQSGKWKGKSFIGGGRSSVRTVLFTGAMAAARFNPALKAFHQKLVDAGKPKIVATIAVARKLLTILNAIIRDQKPWKPA

SEQ ID NO: 319641 - protein, 433 aa, unidentified
MKKTTMAAKVTTEPEPKFVAFVGIDWADQKHVWSLQAANSTQREQGELEHRPEVIEAWVSQLCRRFGPGPIAVAVEQVKGALVYMLRKYECLHLYPVPSTMSASMRKALYPSGAKDDPGDAELVLELLLLHRDKLRRLTPDNEATRLVQNLVEERRKLVDEKTAQLNRLIGYLKVYFPQMLEWFAKLDSKLVCDFLERWPSLEELQAVPAGEVKQFFHHRAGRHGELTGWRMKGMSQAMPAIRDRAVIEAKRTVVQVIAGLLRTLLEGIATLDRKIAEAAQAHPDFFIFQSLPGAGAALAPRLLAALGSQRDRYTSADEVQKYAGIAPVTETSGKKKWVHFRWAASKFLRQSFHEWAGHTIGHSIWARAYYQLQRERGQEHHAAIRSLAFKWIRIVFRCWQDRVAYDETRYLTVLAKRGSHLIPPFAAATGSK

SEQ ID NO: 319642 - protein, 366 aa, unidentified
MKQQHQEREVTIGLDLGERWHRFCALDSRGEVVEEGSLLNDRASLARLTARYRGALAVMEAGAHSPWVSRYLEGLGWEVIVSNPRKVRAIYQHERKSDQRDALMLARIGRMDRALLYPVRHGSEQAQQDLLRIKLRDSLVRARVALINSVRFSLKSLGYAVSNPSSERFHKVAMERLPERVQQMIAPSVQALAELSTRIAVLEREINVVARTKYPQTLWLQQVPGVGALTALYFVLKIEDPQRFENVRDVGAYAGLCPRRDQSGGSDPQLRISKRGDPYLRRLLVSAAQYILGPFGPQSALRAYGLMLATDGSARARKRAVVAVARKLAVLLLSLWKNRSHYEAFPHWQIIEDKQSGTIAMHRVEA

SEQ ID NO: 319643 - protein, 427 aa, unidentified
MTDQLKHKAYHSWVAIDIAKDYNVVMVELTDGKNRRFRMANSGKDHDRLIEVIRELPQPCHIGFEATGNYHRPLAYRLLTEGFDVSLISSLASARYREAIFNSWDKNDPKDAGILLELLKRGIVQTYVDPIRSGYHDIQELSKTYSNITLSRTRLQHSILTHYLPLYFPEMAKFWCSTRNAWWINYLLHFPTPASVIQYSEQAFCQIASPIIGRKMNKQAKLLELYEAAQHSIGLPIASDSLACQTFQLQLQRYQELTNQRQQLEQQAETTLSMNPDYCLLKTVPGIGPIVAMTILAEGGDLRRFNHHRQFLKYCGLDLAKNQSGNFRGQDKLSKRGNARLRLALYMASLHAIRQTENSFRNKFHRYTQATPKDADCKRKAMTAVMAKMARVIHALIKSGTPYQGYFEVSPSGSIPLCRAVGATRTP

SEQ ID NO: 319644 - protein, 347 aa, unidentified
MRFYTTQHPYYCGIDLHARSLYVCILDETGETILHREIKARPEPLLDLLTPYIGNIAVGVECMHCWYWVSDFCAQHGIDFILGHALYMKAIHGGKAKNDRIDSYKIAHLIRGGNFPLAYVYPPEMRAARDLLRRRTRIVRHGADLKAHVKNTTSQYNLPPNNLDLQYPCAREAMRNCFDDVFVQRNIDLDLNIIAFYRHELSSIECFIEKHAKHHNGRDYHILTSFPGIGRILALTILYEVGDIGRFSTVQDFASYSRLIKCKAESAGKSYGTQGNKIGNAHLKWAFGEIAVLYLRGNDKAKNYLLKLQKRMSKAKALSALAHKIGRCVYYMLKNQKVFDEKRFLTG

SEQ ID NO: 319645 - protein, 453 aa, unidentified
MARRNARVSLKPDKSRAALTITHPNAAGIDIGSASHFVAVPPDRDDQAVREFSTFTVDLNALADWLDACGVDTVAMESTGVYWIPLFELLESRGFTVLLVNARHVKNVSGRKSDVLDCQWLQQLMTYGLLSGAFRPAEQVCVLRCLYRQREMLLKSQGRHVQHMQKALTQMNIQLANVLADIVGVTGQKILRAIVAGERDGATLGALKNVRVHASADEIARSLQGNWRAEHLFALKQALALFDFIGTQLRECDGEIEAQLQSLRTHDGDPAKGKKRSRSRNAPKFDLRVQLFQMCGVDLTRIDGVDVTTALAVVSEIGVDMARFPTVKHFTSWLGLCPGTKITGGKVMSGKTKRVVNRAAQALRLAAAALRSSKSALGAYFRRLCSRMDKPRAVTAAAHKIARLIYLMLTKGQEYTDQGQDYYEERYRERVLRALSQRAAKLGMKMVAIEQPA

SEQ ID NO: 319646 - protein, 391 aa, unidentified
MIYIGIDVAKDKHDCFITNSEGEVLFNAFTIPNNADGFHDLFQKISSLTNDFSNVKVGLEATGHYNYNLLGFLIDKGLPTFVINPLHTNLFRKSLSLRQTKTDKVDAHTIALMMMSGVNLQSYSNTSYHNEELKSLTRYRFDKVQERAKLKTSISRLVNILFPELEKLVPSLHMVSIYALLAEFPSSAQIASCHLTRLTNLLANASKGHYNKEKAIEIRNAAKHSIGSNMPAKSLELKHTIRLIQELTSEIDEIECSIKSIMDEIRSPILSIPGINYRMGAMIIAEIGDFNRFSSPDKILAYAGMSPSTYQSGQLDNCYSHMEKRGSRYLRYALYNATKYVCHWDESFGTYLAKKRAEGKHYNVAISHAAKKLVRTIYAMEKSKQSYNLVA

SEQ ID NO: 319647 - protein, 378 aa, unidentified
MPSETTIHVAIELSVSSWLVATRPPGAEKSRLHHIEGGDTTALLALIAELRTRASTKLGKPAEVVCCFEAGRDGFWLHRALTMHGVAAYVLEPTSILVNRRARRAKTDRLDAEGMLRVLAAWLAGDRQVCSMVRVPTPEEEDAKRPHREREHLVQERLRIENRIEALLFTQGIRKRPSLRSWERDLAKLRTGDGRALPSLLRVELDRLRRRLVLALELIREVEAERAEALAVTADDEMTQKIAALQRIRGIGTNFAAVLVREVLYRSFANRRQLASYVGIAPMPYQSGGMDRDRSISRAGNPRARTTLIQLAWLWLRYQPGSALAAWFRERVGTLQGRTRRIAIVAMARKLLIALWRYVETGVMPDGVEIRAQADVTA

SEQ ID NO: 319648 - protein, 454 aa, unidentified
MRKKKVMAEAATGEFAAFVGIDWGDREHRWALQPAGSQKRETGKLAQTPEAIEEWAAGLAARFGEARVAVALEQSRGALVCALCRYQHLTVYPIPPAASAGFRAFAAPSGSKNDSQDAGMLLDMLLWHGEKFRALRPAEEPMRKLQGLVQFRRQLVDQKTAATNQLTAHLKLCFPQALEWFDETGSPLMTAFLRRWPTLPQLQAEAPPTVLAFLHAHNCRSAARNQMRLEQFASARPLTTDAAVIDPAVLMIRTLLQVIENLRQGIGDMDRAIDQLWESHPDRGIFTSFPAAGPVLAPRLSAAFGSDRSRFSSASEVQTFSGIAPVVSQSGQSSWIHFRWSCPKFLRQTFHEYAGVSIQFSEWARGFYDRQRSKGKGHHAAVRSLAFKWIRILFACWRDRVPYNEQRHGHSVTARCALLSNTRPDRTAATQSQKPVDFQFKSIAGFSKFSGLTS

SEQ ID NO: 319649 - protein, 356 aa, unidentified
MNSTKYIGMDVHKEATVIAVMNAAGKLVMESIVETKAATIRQFIEGLRGELYVTFEEGTWAAWLYDLLKPHVTKVVVCNPRKNALLKTGNKSDRIDARKLAELLRAGLLSAVYHGETRLRTLKELCRSYLAISKDLARTMNRIKALYRSWSIPCGGASVYAPRHRAEWLNKITEPGVRRRAELFYQQLDGLQKLRQEARRDLLAESRKHGATNLLQGIPYIGAIRAALLIALIQTPHRFRTKRQLWAYSGLALETHSSGEYHYVQGQLHRSKRPVALRGLNQNHNHDLKSIFKGAATKAGSAKGPFHDFYTALLAKGMKPTMARLTLARKIATITLLVWKKGVCFDAQQLKRQVSV

SEQ ID NO: 319650 - protein, 356 aa, unidentified
MPTQVTKKIDFSGKELFIGLDVHKKSWSVTILVEGMEHRTFTQPPDPKALFNYLQKMFPGGTYYSAYEAGFCGYSIHRELNALGIKNIVINAADIPSSQKDNLEKRDPIDSRKIARALAKGLIRAIHIFDRDMEELRSLNRTRFYLMRDFRRSKNRIKSFLQYYGESIPAEFDNNQWTLKFIAWLKQIQMKTLSGQEAFLNLIRSYEFHREQILTLSRQIRIRIREYDSELYALLKTISGIGPLTSSALITELGDINRFPHIDHLSSFVGLIPRVKQSGDSSYSGGITFRCNEYLRTLLIEASWQAIRQDPALMQYYHEHIINNKGQRVIIKVARKLLNRIRYVMKTRQPYVTGVA

SEQ ID NO: 319651 - protein, 487 aa, unidentified
MSSGNAPASVGMVPLGVGIDTARYGHHVSFLDEQKRSAAKSFHFTESVAGYQQFQAVLQKLAEKHPGVHFHIRLDAAGQYAENLVQWLHRLPFDTTISVGQPARNKAYRQVHFDKRKADPTESLACARFAIVERPAATPHNPPEFQQLRDAVALMESSAKQRTRLINQLHGLLARVFPELAVHVTDLSANWVLSLLEKYPTPDKLARAKPETLIKIPHLAADMAETLRSAAAQSTGSNCGPIAAELILQKVHAIRQEQAAFAALADLVEQAWQALPEGPARRIRTIPGIGLQTSAALVAKIVSIDRFATPTALIGYFGIFPEEVDVSGTDRQGNPKKGTEIHMSRKGNDLVRRLLYTAAQCAVSWNPPVKALFARQRAAGKEYNPALGHCMAKLLRQVFAVWAKDCDFDPDFESRPKAAAESNETASNEPAQKKGTPQASKGEAPLKPEVTMTSPTHLPPSGPRPVALPQSRPPSARRPVTVRAASE

SEQ ID NO: 319652 - protein, 415 aa, unidentified
MAKEHLKVIAGIDTHADTHHVAVITGTGQHLADREFPATGSGYRGIIDFVTGFGAVLALGVEGTGSYGAELSRVLTREGMHVVEVTRPNRQARRLQGKPDPLDAYQAADSVLAGRAGATPKSRAGAVESPRVLRAERATAMRARVAVMAQAKAILVTAPETIRARYRGLRSPALMAALVNTRPAGAPSEPLTSTATVLKRLAVRYRHPTLELALIDAELDAILTLHAPMLRDLPGVGTEVASQLLVTVGDNPERVTTEAKFAALVGVAPIPASSGKTTRHRLSRAGDRQANKAIHHVVLVRMRWDSRTMTYVARRRQEGKSTKEIIRCLKRYVARELYEQLLHPHPAPDAGPLRTARAAKHLTLQQAADALHLWPTTLSRLELGLSHDNDIHHRYETWLNAQSPQTAKTRYPASA

SEQ ID NO: 319653 - protein, 426 aa, unidentified
MAEKKMGPQPEFAAFVGIDWADRKHVWCLQVADSRKRETGELEHKVEEVEAWVAELCRRFDHRPIAVAVEQVKGALVFLLSKYECLHIYPVPSTMTAKMREALYPSGAKDDPRDADLLLDILEQHRDKLHRLSPDDEATRRVQNLVEERRKLMAERTAQSNRLTSYLKIYFPQMVEWFEKLDMPLVCDLLERWPTLEELQKVSPEELRRFFCQHHCHRGLRERRVLAIGGAIPARGDRAVIEAKSAVVKVIVQLIRSLLEGIAELDRKIEEAAAEHPDFFIFDSLPGAGAVLAPHLLAAFGSQRDRYRCAAELQTYSGIAPVTERSGKRKWVHFRWACPKFLRQSFHEWAGHSIAQSTWARAYYQQQRDRGSDHHAAVRALAFKWVRILFRCWKDRVAYDENKYLAALAKRGSPLGKLFVVSLASL

SEQ ID NO: 319654 - protein, 373 aa, unidentified
MPKYSTAFGMDVHLRSTTVCALDADTGEAVTRRFPGNPWGEIAGWMDGFPGPSLAAYESGYLGFAPQRELAGLGVECVVAAVSKIPRSAADSASKNDRNDAARMAKAILAHDISPVWVPSPEVEGIRDLAGAYDGATARLATAKQRLLAFLARRGFVYGGTTPAGNPRKYWTYDFLRWLDEIRPEDDGGVRALAALRNEVEAAAEARADLLSEYRAAVDASPIAAEVAALQSIKGCAFALAAAFSAEVGDFTRFRSGRQVTAYFGLAPSQRSSGDSVRLGGISGAGNALVRKLAVEGSWCYAAARHQPKLMPRDTGVPLEIRMHGRKGSERLLRRREEMLARGMPAAKANAATAAELVRWLWALGMMCREGAE

SEQ ID NO: 319655 - protein, 401 aa, unidentified
MATVRDNAIRVKRFRELKATLRTDRTRLLVGIDVAQAEHVVQLRHAHTRVVVPTFTIPNSTRGFTQLWTWIQQAQRTTGCRDVVCGLEPTGTYHQALATFLEAQGADVVRCSSSVAYWNRRTQDRTWDKNDRKDAANCADLLEQGKVLFASQPTGPLAELRHLVKCLRRARTELAACKARWRTTLRPALAPMGDALPQRLWAELPAALQAWERAAPGRPAVPKGRLPLGLATACADLGAQVMATQGRTATLEAALTPLAERLPAYTLLRTIPGVGPTVGAILLAEIGDIGWFTKFSQLRKLAGLDIVRVQSGQFAGQFRISKCGRGLLRWALYHAAVGLARTAAGQARLAALKTKRRGDRYAGFKAVTELAAKQLRVVWGVWRSGMPYDPTRAGGLRRQPR

SEQ ID NO: 319656 - protein, 320 aa, unidentified
MQGKTLPGRSAGKEVYVGVDVCKEWLDVYLHPIGFKMRVANTPAGIKRLKRWLADHSVVLIVMEATAKYHRLAQRMLYAAGFRVAVVNPLRSRLFSEALGQLAKTDPIDARMLAVLGQSLSPQAAPPVPELVEELHEIVRTRQEATDELAAFKNRLGASTVPFVKREIARMIKNLESHIERLEIARRIESDPALAHRYRILVSIPGIGPATASVLLVGMTELGAMTGKAAALLAGLAPIAWDSGEKDGKRHIKGGRGYVRNALYMAARSAARCIPHLKAFYERLAAAKPEKVAITAVMRKLIVLANTLIKEDRLWQAARP

SEQ ID NO: 319657 - protein, 343 aa, unidentified
MQTITTIGLDIAKSVFQFHGVNADGDVVLRRQLKWRYVLAFFQKLPPCLVGIEACASSHHWSRELQALGHTVRLMPPAYVKPYVKRQKNDAADAEAICEAVTRPNMRFVAIKTPEQQSCLTLHRTRHLFIRQQTALINAIRAHLAEFGIVAPVGRNGVEQLLEVVADANDTRLPEIARACVAALGTQLLALKAQILAFDRHIMAWHRSNETSKRLDAIPGVGPALATALVASIGDPKAFRSGRDFSAWIGLVPKQNSSGGKDKLGSISKQGDRYLRSLFTAGALAVIRYAKLHGTKHRPWLTALLARRPTKVAAIALANKMARMAWAMMTRGERYKEPVALAA

SEQ ID NO: 319658 - protein, 338 aa, unidentified
MKLYVGLDVSLVRTAVCILNESGEIVAERQVDSEPDAIAGSLAKVQGIIERIGLEAGPMASWLFAGLSGQGLPVVCIEVRQMKAFAKASPVKTDKRDARLIAQAMRTGLFKATHVKTDESQRLRLLLRHRQAVMRRNKDLINTVRGTLKAFGIRTGGGKNTPYARRVREAVADPSLLTVTEPLLVAYEQGLAVLAELDRMVLAAAREDTVCRLLMTVPGVGAVTALAFRTGIDLPERFAKSRLVGAVLGLTPRVYASGESEHIGRIAKCGDGTRWLLYEAANVMLTRVKGDNWLKSWALGVAQRRGMRKAKVALARRLAGVMHAMWISGQAFSLAKPL

SEQ ID NO: 319659 - protein, 355 aa, unidentified
MNAIKYIGMDVHVATISIAVLDANGKLIMEVTIATQTGALLDFIRGLSGTLNVSFEEGTSAHWLYTLLEPQVAKVVVCDPRQNPRRLGEKKSDRLDARKLAEWLRLGTLKPVYHGNSLGPALKELARSYRTLVSDTARVMNRLKALYRARGIGCAGTRVYSPRFRDQWLEQLREPGARGRAERLYRQLDLLLPLRQEARAAMVAESRKHPAHKILCSIPALGPVRVALLLALLQTPYRFRGKRQLWTYAGLALVTRTSADYQVVGGQVTRARKPALVLGLNANHNHTLKGLFKDAAASTLAHPGPFKDFYTTRVAQGMKPELARLTLARKIAAIVLTLWKKGECFNVEHVKAQAA

SEQ ID NO: 319660 - protein, 374 aa, unidentified
MGCPAFPTYMEEAPVFSERTSVGLDVHARSVVGHGIDQVTGEVFTSRLVPDGGAVMEWLAGLPGPTAVLYEAGPTGFGLARQLRSAGYRCEVAAPSKLRRPSGDRVKTDARDAEHLSRLLRLDDFTAVAVPQEATEAARDLVRCREDCRSDLMRARHRVSKMLLRHGVVWSGGHAWTGDHLAWLARQRFSQSVSQYAFEEALDQVLATVARRDRLDSRIEELAADSAWTPVVRRLGCLRGISTLTGFALAVEIGDWARFDGNSIGAYVGLVPSENSSGKSRVLGPITKTGNGHIRRLLVEAAWHHRPRYVVGKTLRGRWALATPAARARGDAGNRRLHSRWVVFQARKKRYNVATIAVARELAGWCWSLAMIED

SEQ ID NO: 319661 - protein, 370 aa, unidentified
MSEPTPLFVGLDVHKDSIAVAHAQGHSADPPVFVGTIGTREADLNKLVRRLQAKTSDLVFAYEAGPCGYGLYRDLIAQGFRCQVVAPSLIPKKPGDKVKTDRRDAVELARLLRSGDLTRVYVPTVDDEALRDLCRARDAARLTLKNAKLRLKAFLLRLGLHYIGRADWTDAHRRYLAKVVCPTAAQQIVFHESVRAVDEQVDRLRRLEAELVERGPAWRLYPVVQALQALRGVQWLVAITVVAELGDLTRFDSPRQLAAFVGLIPSEYSSGPSRRLGGITKAGNSRARRALIEGAWAYRHPAKVSEHIQRRIDGLPKPIQDIGWKAQVRLCKRFRRLTARGKHANVAVTAIARELIAFMWAIAKEVPVTT

SEQ ID NO: 319662 - protein, 363 aa, unidentified
MTSMIPATGPVTGGVDTHGHTHHAAVLDHVGRQLGDREFPTTPAGYRALGVWLSRHGQLERVGVEGTGTYGAGLARYLRGTGVSVVEVDRPDRKARRAKGKSDPLDAYAAARAALSGAASGCPKTRDGRVEAIRALRVARSGAVKARSQATNQLKALLVTAPAELREQLRQLSTTALIATCARLRPTGDIGDPEQATKTALRRLARRHQHLSEEVAEADTELKALVSATAPGLLALPGVGTEVAGQLLTTVGDNPDRLRSEAAFAHLCGVAPIPASSGRTHRHRLNRGGDRAANNALYIVVLGRLRYDARTRAYADRRTKQGLSKPEIIRCLKRYVAREMFTALTARAVQSPPATTSTLPTAA

SEQ ID NO: 319663 - protein, 312 aa, unidentified
MDALNIGIDVAKDRLDVAANTAALAPFHLPRDHGGLADLVERLKPLGAERIAVEATGGFETVVVAALAAAGLPVVVVNPAQVRAFAQALGKRAKTDPIDAAVIARFAEATRAELRPLADAETQALADLVARRRQIVAMIGAENQRLKRAAPRTARSIGRLLKALERELAEIDQDIDDSIRRSPTWLEKAELVKSVPGIGDQIARTLIADLPELGTLDRRQIAALVGLAPWTRQSGQWRGKSFIGGGRAAVRTALYMGALVAARHNPSLRAFRDRLVAQGKPKLVALIAVARKLITILNAIVRDQQPWREQTA

SEQ ID NO: 319664 - protein, 356 aa, unidentified
MSSKLNTAIAVAGIDIGKNSFHVIGLDKRGAIVLRQKWSRGQVEARLANTPPCLIGMEACVGAHHLSRKLQALGHDARLMPAKYVRPYSKGQKNDFRDAEAIAEAVQRPTMRFVATKTGDQLDLQALHRVRERLVGQRTGIINQIRAFLLERGVAVRQGLRFLRIELPGILAKRTDVLSPRMLHLIEGLADDWHRLDERIEVLSSEIGALACGDPACDRLMTVPGIGPFISSATVAAIGNGAAFSKGRDFGAWLGLVPKQISTGDRTILGKISRRGNRYLRSLFVQAAWVVLVRVGPKHWDRYGLKSWIEAAKKRLHHNVLAIALANKLARIAWAVLNKERKFECIRTNKMSPRAA

SEQ ID NO: 319665 - protein, 346 aa, unidentified
MAVTIVETRAITGGVDTHAGTHVAAALDPVGGLLGVQEFPVSAAGYARLLGWLGGFGTVCLAGIEGAGSYGAGLSRYVTAAGVRVVEAGRPGRQDRRRAGKSDPLDAVSAARAAQSGRARGAPKGRDGAAGAIRALMVAKRSARSERTPAINQARSLIVTGPDDLRARFARHSVAALVAELALLRPRPGDVVGYATRIALRELGRRRVPGSQLDRPGALIGPLITGHAPGLLALHGVGTDTAALLLVAAGDHPGRLRSEAAWAHPRAVAPIPASSGKTVRHRLNPGGDRQANHAMWRIVITRMSSHAPTRIYVERRTIKGLPKKEIMRCLKQYVAREVYPHLRAAG

SEQ ID NO: 319666 - protein, 342 aa, unidentified
MQVSTIGLDIAKNVFQVHGIDAAEKVVVRKQLRRSQVLEFFKALPPCLVGMEACATAHYWTRELTKLGHQVRLMPAKDVKAYVKRNKNDAADAEAICEAVRRPTMRFVQVKSAEQQGHLMLHRTRDLLMRQRTQLINALRAHMAELGIVAAQGYAGLKELLKIIAGERDARLPVDAHASLVVLAAGLHAVQTMIGSIDRRIIVEHRSNEASKRLRSIPGIGIVGATAIAATVTDPKVFRSGRDFAAWIGLVPREDSTGGKQKLGPISKQGDRYLRRILVVGAHAVLKLARQKPEKYPWLTQLLARRPFKVVAVALANKMARVAWALLAKGGVYRAPALAVAD

SEQ ID NO: 319667 - protein, 443 aa, unidentified
MGRAVEELAVDDDEERLQRVAAIDVAKASGKVCVRLPGSGGRRVTRVWDVESTTAAILALADELVGMDIERTVMESTSDYWRPFFYLLEAAGLRVWLVDARAVKQVPGRPKTDKLDAVWLAKLNERGMLRPCFVPPAAIRQLRDYTRLRRDLTEDRSRHKQRLEKLLEDALIKLSTVATDIFGKSGRAMVEALIVGERDAHALADMALGKLRPKHAALVEALNGRFDDHHAELARMLLDQVDALTDQIIRLGRRIDELVAELPQAQPQPPTDPSGPGSGGGLGVVDRLDEITGIGRDAAHTIIAEIGLDMRQFPTAGHLVSWAKLTPRTIQSGPRTRSGKTGKGNPYLKGVLGEAAAAAGRTDTFLGERYRRLVRRRGKLKAIVAVARSILVIVWHLLADPAARFNDLGADYYSHRIDSDRRTRHLVQQLQALGHSVTLTPAA

SEQ ID NO: 319668 - protein, 339 aa, unidentified
MQKYPLLGIDVSKRTLDACILEAPKTYRSITVANSPAGLAKLQKWLLPQELDGMTVCLESTNVYSAAAATFFYEHHATVYLANPSQVAAFMRTELRRVKTDKADAQSIAHVAAAVAHRLRPWQPLPEHYQELRDLVRHLHALTRSLSRCKNRQEKTKYLTSAAAEIVRRSLTAEMKLYRDEIKAISAAIKACLKRYPDLSNRYILLRSVPGIGLISAVTLMAEIPNARQFGSAKQLAAFAGLTPRIRHSGKHQPVSQPISKIGSARLRRVLYMAALTAKKHNPNMTGFAQRLQQEGGKKPNVVIIAIARKLLHLVFAMEKHQTPFNPNYQKIQLNMGTV

SEQ ID NO: 319669 - protein, 339 aa, unidentified
MTEVSTIGLDLAKNVFQVHGVDEAGETVLRRQLRRSQVVPFFEKLSGCLVGIEACATSHHWARELQALGHEVRIMPAHYVKAYVKRNKNDAADAEAICEAVTRPSMRFVAVKSPEQQSLMMLHRTRSLLVRQRTMLVNAIRAHLAEFGIVAPLGRTGMKALRAVIADPKEARLPALARSCLESLIVALHSIEQEIAGAERQIHAWHRGNETSRRLASIPGIGPIVATALVASVADPEVFKSGRELAAWIGLVPRQNSTGGKERMGRISKQGDPYLRWLLVAGAMAVIRQGRKTGFQKMPWLADLMGRKATKVAAVALANKTARIVWALLVNGETYRRPA

SEQ ID NO: 319670 - protein, 404 aa, unidentified
MSNVAGIDISKGKSTVSVLRPFGEVVAKPFSVGHTGSELKELADYLKSLDGETRVVMEHTGRYYEPVARFLHDQGIFVSAVNPKLIKDYGNNTLRKVKTDKADARKIARYGLDNWVELRQHTPVDTIRMQLKTLNRQQGLYSKTKTMMKNNLIALLDQTYPGVNALFDSPVREDGSQKWVDFATAFWHVDCVRNMSLTAFTERYRKWCKRHGYNFSQSRAVEIHAGAQDLIAMLPKDALTKTMIRQAIDALNAVSASLERLKAEMRTLAAQLPEYPVVMAMHGVGDSLGPQLMAELGDVTRFTHRNAITAFAGVDPGADQSGTHEAKSTRASKSGPPELRKALFLVMDCLLKTMPADDPVYCFMDKKRAEGKPYLVYMTAGANKFLRIYYGRVKEYLALRENAD

SEQ ID NO: 319671 - protein, 346 aa, unidentified
MKILALDLGKYKTVGCAYDSASGVHQFKRVCTTPAGLAKLVQEVKPERVVIEVCSIAGWVCDLMWGLGIEVQVANTSDDAWRWRKVKQKDDRRDALKAARLSAVNQLREVYIPGHEVRQWRALITYRQQVIRRRTKIKNHIRDLLLREGQILGRGSSCWSQVGIAALAAQARPFSECGPAELWRGELQLELEQLKEIQRQVATVTAQLDKIGAGDARVQLLRTVPGVGPRLAEAIVALLDQPQRFRKASQVSGYIGMVPKAMDSGETERRGHITRQGSRLVRSLLVEVAWAGLRHNAWVRQTYQRLSGGKKARKKIAIVAVGRKLLVKCWAMLRDNRPWDWQPQIT

SEQ ID NO: 319672 - protein, 349 aa, unidentified
MKVLKQVAGIDVAQKELVITLGRMYEDLSVELYAYKVFKNTEKGFLLLTDWVNKLTEQSIEVLYVMEATGVYHQKFAYYLDDKKMKISIVLPNKISNFFRTLEVKTVTDKTCSQVIARFGLERKLNYWKRPKAIYKTLQQLTRERDQIVSERVVAKNQLHAENSEAEPNLMTLKRINERIQLLNKQEKEIKENISDILKQTPELQKEVNRLMSIPGVGQLTAVIILAETNGFELIRNKKQVSSYAGLDVKEKQSGTSIKGKPRISKKGNRSLRRAMHFPALTAVKWDENFKEIYARMVSKHGIKMKALIAIQRKILELTYVLFKKQTEYDKEYEAKKEIQKNSVQTQVV

SEQ ID NO: 319673 - protein, 343 aa, unidentified
MQTVTTIGLDIAKSVFPVHGIDAAGTVIIRRQLKRRFVLAFFQKLPPCVVGIEACATSHHWSRELTALGHTVRLMPPAYVKPYVKRQKNDAADAEAICEAVTRANMRFVETKTPEQQSCLMLHRTRHLFIRQQTAVINSIRAHLAEFGIVARVGRHGVENLLDVVADSSDRRLPEVARACLAALGVQLRLLKAQILEFDRRIMAWHRSNETSKRLDEIPGVGPALATALVASVADPKAFRSARNFSAWVGLVPKQRSSGGKNRLGSISKQGDRYLRSLFTTGALAVIRYAKIHGTKHRPWLTALLARRPTKVAAIALANKIARMAWAMMAKGERYKEPAALAA

SEQ ID NO: 319674 - protein, 377 aa, unidentified
MKKFITHVGMDTDSRGFDIAIAEGFGSDNPEVRGWGRIPATLGAVDKLIKQLRKQGYQELRFVYEAGPCGFGLYRHLQGREGIVCAVIAPSKIPVRPGERVKTNRRDAQKLAQLDRGGNLEAIYVPSEEDEAMRDLSRGRAAAVAAATRVKQQLKSLLLRHGVKYTGTAESWSSDYRQWLGGLHLPHEAQNYVLAEGLVALAEAEARVTRLTERIRELLPGWRMQPIVAALQALRGVALVTAVEMVAEVGDLTRFGNPREVMGYLGLVPREDSTGDKRRQGSITKTGNGHARRSLVESAWAYARPPRLTRALKQRQQGLSREVIEISWRAQVRLCGRYRRLSARGKNKKKIIVAIARELCAFMWAIAVASSSPARAA

SEQ ID NO: 319675 - protein, 413 aa, unidentified
MIDDVQWFVGIDWATQSHRVCLLDIEGRHVNERDFAHGGAGLTELRDWLLEKTKAAPGQIAVAIETPHGPVVEMLLDHAFLVFAINPKQLDRFRDRFTVAGAKDDSRDARVLGGSLRTDRQAVRRLVVDDPLMIELREWSRIADELQQERTRLANRVRQQLWRYYPQAIELTDDVADDWFLALWQQVPTPATAAKASGKTITRILKDHRIRRLDAAGVLQTLRQTPLFVAPGTTEAACAHIRNLAARLHLVNQQIKQAHRTLDSLCAKLDVPAENPSGQNREQHDVTILRSWPGIGRIVLATLLTEATEPLRTRDYHALRALAGTAPVTRRSGKQCFVIRRLACNKRLQNAVHHWSRVAIQHDTAARRRYDALRRRGHGHARALRSVGDRLLYALCTTLDRQTPYSPIAKPRR

SEQ ID NO: 319676 - protein, 421 aa, unidentified
MLGVGIDWAEEFHLVALGRPGEGVIDVARVEHDPRSLDALIARLVALEPDPAEVRVVLETSSGMLVERLVEAGFTVVPVNPDLIARRRGPARKKDDAGDARIACLLALDRFERLRPMVAHGDEAAELRAIARDDERAVRDERRLLNRLRADLIATFPAALTIAGDDMGAPTFLRLLERWPTANALAEASRDDLLALARAGHHGWPDRFADRVQTALAAQQFVARDWLVRAKADTIRLAAIQLLALGAQRRAWERRMGELLIGAPRSGRDLPKDNDRGPAVPGGEIYLSFPGLGDRLAARVAGEIGDIANFVSPNALQCYAGKAPVTRRSGKSELVIAHRLACNGHLRDAVQQWAFCSLRGSGWAREFYAAQRARGKSHHAALRALGNRWLEVLWHCLQRGLRYDEATHVTNRNRALHRAAA

SEQ ID NO: 319677 - protein, 368 aa, unidentified
MKKVSTAAAKASRNISRQTLTVGLDLGDRNSWYCVLDEAGQIQLEQRVGTNAKALREVFGAMPRSRIALETGTHSPWISRLLSELGHEGIVANARKLRLIGESRKKDDRLDAQTLARLARIDPQLLYPVKHRSAQGQADLAVIRARAGLVRARTAMVNTARGLAKSYGERLRGCNVRNLNPEKAEALSPELQAALQPLLAALESVSQQIREYNQQIETLAQERYPQTALLKQVKGVGTLIALTFLLTLEDPQRFGKSRDVGCYLGLQPGRRNSGKSQPQMHISKEGDPYLRTLLVQGAQHILGPFGVDCDLRCWGLKLAERGGRSGKKRAIVATARKLAVLLHHLWVSGEVYEPLHNSRRRTTVAAAA

SEQ ID NO: 319678 - protein, 304 aa, unidentified
MNGIGIDVSKRRLDIGTTDGETLQVSNSPSGYAELDAWLRTRPAIQIVLEATGGYEQAVLDFLHKAGHPVIRANALRARRLAQGLGKAAKTDRLDALVLAQMAALVELPSYQPLEPWQRKLREFVRARRQTMQALTVARQQQEMVTDRELRRLMQGSIIRLQTMVERLGKEIAEQVAQQPQLAVLKSMKGVGPALQAVLASYLPELGQISGKAIASLVGVAPISHDSGTMRGRRSIHGGRAEIRQVLYMAAMSAMRHEPRLRDFYRSLRARGKEGKVAIVAVMRKMLVILNARVRDAESGPIPA

SEQ ID NO: 319679 - protein, 340 aa, unidentified
MGEYIGLDVSLKETAVSIRREGKRVWRGKCASDPQLLAALIRKHAREVVRVVFETGPMSVWFFHALSAEGLPAICIDARHAKAALDMAANKTDANDADGLAHLAEVGFYKEVRVKSFDSMLARTLVAARTRLVRIGTELSNQIRGLMKTFGLVVPPASGSKFERQVEALLAGNADLGRIIRPLLEAWHAVRLRAAELGRKLLADARRSDACQLLMSIPGVGVVTATSFITAIEDPTNFKRSRSVGAWVGLTTRRYQSGEIDYDGHISRRGDSHLRGLLYEAATVLLVRSRSECDLRKWGLQLRERLGFKRAAVAVARKLAVIMHTMLVTGEPFQETRTSA

SEQ ID NO: 319680 - protein, 338 aa, unidentified
MDKYTGIDLHSNNCVVAVIDAEDRVVCERRVPNKLDQVLALLKPYLEELRGIVVESTFNWYWLVDGLQRAGHEVTLANTTALVQYDGLKYSGDEHDARHLAHLLRLGLIKPGYIYPPELRGIRDLARKRLELVRCRTSQILAVESQMARQTGGHISSREVKALTVSEVEKWHWPADVTLATQANVQVITALNGAIGELEKWLHERVKPSAEFAILQSVPGIGEVLATTIMLESGPIDRFADVGNYVSYARCVPSKRVSNGKKKGEGNRKNGNAYLAWAFVEAAHYAMRWNDAAKRFYQRKKAKTNGAVATKALAHKLARACYHMIKEQKPFDEKRCFA

SEQ ID NO: 319681 - protein, 391 aa, unidentified
MTEDASRPAQAAIRTALGAIFVSLELSRRTWLITSLSPGGGEKMSKHAVPAGEVSGLLRRFAELRRKAAARTGRDLPIIVIQEAGLDGFWIHRVLQSEGIESHVVDAASILTSRRRRRAKTDRIDGETLVRTLMAYKRGEPRVCSMARAPTPQEEDRRRVCRERRTLMGERVSHVNRIKGLLSAQGVFGYEPLRKGRRERLEDLRTGDGRPLPVRLKAQIIRELDRLEVLLEQLKTVEAERDALLKPASDEAASPAAMLARLKGIGPETAAVLWSEGLFRQFDNRRQVAAYAGLAPTPWQSGSIDHEQGVSKAGNPRLRTAMVELAWLWLRNQPTSALSLWFHERVQRLGRQVRKTIIVALARKLLIALWRYTTAGVVIEGAVMKAAAAAN

SEQ ID NO: 319682 - protein, 449 aa, unidentified
MTKMELEIVNPYCAGIDVGSKSHFVAVGQALEDVKEFGVYADDLKEICLHLKQHGITSVAMESTGSYWQNLYVELVKHGFEVTLCNGKFTKNIRGKKTDVKDARWIQKLHAIGLLTGSFLPDETTETLRTYCRQRSNWVDLSAEATHKMQKYLRLLNFRLDVVVRDICGLTGLSIIADICKGNLDPEKLSELRHGNCKKSREEIAKALKGNNRADYLFGLNQEYESYLFFQKKINDCDKEINKFLKTQINTHPEKKILRTDDKPHKRINKNAVKGIDLNQAAYQYFGGIDLMKIEGVNHSTIMSVMSEVGPDGFEKFPTAKHFTSWLRLAPNNKISGGKLLSSKTPKGSNRLKIALRNAANAIGNLKDTHLSDFFRRIAFKKGRTAAVSATARKLAVIIWKMVVNKIQYQPPKEYLFLDQKRKLKLVVRIKKQIVKFKLTNEELGIVTT

SEQ ID NO: 319683 - protein, 413 aa, unidentified
MDVLHERCAALDIGKKDLKACVRTPAPRGRRSRAQTVRTFATTTGALLELREWLVSENVTLVVMEATGDYWRGAFYLLEEGLNVMLVNAAHAKGLPGRKTDVSDAAWLCQLGECGLLKASFVPPEPIRQLRDLTRYRTTLTAERTREAQRLEKELEDAGIKLSAVASDILGVSGRAMLAALIDGDRDAHRLAQKAKGRMRPKIPVLEQALTGNFGEHHAFLCRLHLERIDQLSAAIDALSERIEEQMRPFRRRLDRLVTIPGVGQATAEVIIAETGADMTRFRTAAHLASWAGVCPGHHESAGKRRSGKTRHGNRWLTGALGAAAMAVSRTRNTYLGARYHRLVPRLGKQKTIVAIEHSILTAVWHMLSTDTDYHDLGADYFARRDPEQAIRRITRQANALGLTVRFDPIEAA

SEQ ID NO: 319684 - protein, 390 aa, unidentified
MEARVVNNLPPAAAHDGAVRCLLAIELSKKSWVAAVNTPLSDKISLHKLKPCDWKELLQLIERIRKRIAQELKKPVEVISCYEAGYDGFWLHRLLEAQGVRNHVIDPASLQVDRRARRAKTDGIDVGKLLRSLMAYLRGEPRVWSVVRVPTIIEEDDRRLHRERSRLINERIQHVNRIKGLLAIHGIYDYEPMHPERIQRLERLRTADRHSLPLRLKAEILRELQRLELVLGMIQTIETERDAIVSAKSKSQQTSAKKIKHLVKLKSIGPEFATVLVGEVFYRTFDNRKQVGSYVGLTPSPFQSGSTSRDQGISRAGNAKARTTIIELAWLWLRNQPDSRLSVWFRERVGNRKGRIKRIAIVAMARKLLIALWRYLETGVVPEGAVLKSK

SEQ ID NO: 319685 - protein, 436 aa, unidentified
MPIPVASEIPPPPPKSTLPIGEYAAFIGLDWGDQKHAIALRPRGAGARVENLILEHSAEKLHAWLEQLGERFNHQPVAIAIESSKGAVVAALVEYPWLAIYPIHPSTSRRFSTAFTPSGAKDDAPDARILLDLIEHHRARLRVLIPQEHETRCVALLVEARRKMVDRRTMLTNELTSLLKNYYPQALSLTGETLYSPLALDFLERWPELAVLRKARAETLRAFYYEHQVRSTKAVEKRVELQQNCRPLSGDRALCEASMLQLHALVAEVRTVNTHLSKAENAIAETFKAHPDVEVFRSLPGAGRVMAPRLCVLFGLDRNRWRNAGELQKYYGIAPVTEKSGRQLHVHWRWSAPVFARQSLVEWAGQSVRACGWAKAYYLQQKQRQNGHSAILRSLAFKWLRILWRCWRDRKPYDDALYLSHLRARNAPFLSLLETK

SEQ ID NO: 319686 - protein, 321 aa, unidentified
MQSTTHEVFVGIDVSKARLDVAADGAPPFAVENTPEGIADLVARLRPLRPTLVVLEATGKLEAAAVAALAAAGLAVAVVNPRQARDFAKATGKLAKTDAIDAAVLAHFARAIRPQVRTLPDDAARELDALLDRRRQLVGMRTMEQNRLSAQLSKRVRSDLEAHLRWLDERIGRVDKELDERVRSSPVWKEKDDLLRGIKGIGPVASRTLLAGVPELGTLTNKQAGALVGLAPMADDSGEWRGPRRVTGGRAQVRAVLFMAAHAARRHNPVLKAFAQRLEAAGKKPKVILVAVARKLVVIANAILRTGRPWDPETASAVPNA

SEQ ID NO: 319687 - protein, 386 aa, unidentified
MSRPSNILLPAINYDHTLVLSVELSNKSWVLAAQVPGLPRTKAQRTIEPNKNALLAAIDGYRARAAAVGYTVDRVITTYEAGWSGFWLARWLVAQGVEVHVVQPSSVPVDRRLRRAKSDGIDAELLLRTLLAWLRGEPRVCSMVPIPDEADEDARRCVRERTELLSDRVGLTNRIGAVLATLGVNDYNPLLQSRRRRLAELRTGLDEPIPPNALAKIERLLARLELVLAQIAELERERDEVAAADAPDRPGKMIQQLASLRGIGVQSATVLVREAFVRHFANGKALGSYAGLTSTPYSSGGIDREQGIGKAGNRRLRTVMVELAWLWQRYQPGAAQVAWFRDRVGSTGRRIRKVMVVALARKLLIALWRFVIDGVMPEGAVMKSSI

SEQ ID NO: 319688 - protein, 430 aa, unidentified
MVGRDRAVLAIDLGEDKQVATLMDHDNVVLARKVALVKAHNLGSLLVWAGQHAVKHGFLGVTVACEPTGHRWKALMGLADGAGMGFVCVQSLAVHRAREGDDYTRDKTDHRDAVLIGKLVTRLDCYLPERADTQWARLRHLGARRARLVSEATACGQQVADLLSCAWPAALECAAKPLESTTWLACLGVITDRCNGDPAKIRKMGREKFVAAVRGELPRWEAKKVSHRVLGRVWDALNDSRGVLAQRRGALERVHLVMADWRSARARLRDVEGRMLEVLDQLGLRELVCSIVGLSGVGAAVILAETGDLTRFASARSVVKHAGLNPTENTSATMRGQTRVSHRGRPQLRAAAWRAVWGALPHNPVLAAKFAHLTKRDTDRLAAGQARAACAAALLRWLYAVVTKRQPWDQRVASGLVRSRNADEGLPAAA

SEQ ID NO: 319689 - protein, 319 aa, unidentified
MSKTVLGIDVAKSKLDVALMIRGKALVKEFGNNIKGFKLLQGWLTSLHIEHVHACLEATGVYGDAVTEFLHEHGHRVSVVNPSRIKHFAMSDLKRNKTDKSDARTIATFCLKMEPDAWRPLPPEVKYLQALTRRVEALEGMLLEEKNRQDVAPPASRPSIDRMIENLKKEIDHVKRLIKDHIDNNPGLKQQSELLESVPGLGEKTITLLLGEVDLLAFDSARDLAAYAGVTPGRSQSGKTLDRTKLSKIGNSRIRKALYFPAISAIKYNEIIKQFAQRLRQNGKTPMQIVCAAMRKLLHIVYGVIKNNRPFDPTLAFSV

SEQ ID NO: 319690 - protein, 345 aa, unidentified
MNISRVGVDIAKSVFHVHAVDRHDQVQWRGKYPRDKWLEALSKRVPVGTEIGMEACASSHHWARELQALEYRVKLIAAQFVKPYVKSNKNDRVDAEAICEAMDRPNMRFVAVKTVDQQDVQAAHRIREELVRQRTAKANQIRGLVGEYGLVAPVGIGQLRAALPRWLEDAENGLTDAFRVLLAGLAEDLRHLDDRIEAITASIEQQVQSDPVAKRLMTLRGVGPLTASALAGALGDGQAFRRGRDFAVSLGLTPHQHSTGGRDRLLGISKRGDSYLRKLLVHGARAVFCHVGQQDDNLSQWIRQLATRKHANVAVVALANKTARIAWAITRHDSGYDPALAAHVA

SEQ ID NO: 319691 - protein, 349 aa, unidentified
MTTQRLSYVGQSVYVGVDVHKDTYAVTCVCNKQIVKTATAKADPAGLTASLSQWFPGARLSTAYEAGFSAFVLHRALSKAGIMNIVVNPASIAVAANDKVKTDRRDSKKLALDLSDGRLQGIYVPTEDEELARLLPRTRAQIVEHRATIARQIKAKLHQFGLIAPASRRLISNRYVREIDAWPLPPDLRVSLTFLAEQWRFATRQLIEMRRLLREQAKAHPAIEQVYRSVPGIGEVVARTLATALGDMTRFANERALCSYTGLTPSAYASGPSVRRGHISRQGSSRVRHLLIETAWRARPRDAVLKEIFDRIAATRGKKRAIVAIARRLTGRIRACFRQGTTYAVGTYA

SEQ ID NO: 319692 - protein, 450 aa, unidentified
MARRTNRFDEVQRYVAGIDLAGHADHYVCGPRKDDGTHDIEHFGTTTNEILRMVAWLKERKVVSVAMESTSVYWIYVYDMLEKAGIRCLLVDTRTVKMVPGRKSDVKDCQWLQKLHSCGLLRGAFRPPEEFNAVRSVIRESENVRQMRTQSIQSIQKSLDQMNVRVHHAVSDIDGVTGMRILAAIVGGERDPRVLAKLRDKRCRKSEAEIAEELTGNWREEHLFNLKQAYDTLCFLDERIADYDRQVRDMYAKIAAKFPPVEPPPGGTGPKKPKDKDDAKAKADLARICGGFNMTKIDGIGYDNAAAILSELGPCLDAFPTESHFVSYVGVAPALGKSAGKNVSSRKKHKNTSRVGLVLKLAASTLTRSESSLGARLRCTRSRTCSRTAIKDVAREMAKRIYRGLRFGQAYVDEGEQAYLERTRERTIKSMKKKILKLGISAKELGIFAA

SEQ ID NO: 319693 - protein, 339 aa, unidentified
MKVSTLGIDLAKNVFQLHGVGCNGQTVLKKKLTRDKFLPFLMQLEPCLIGMEACASSHHFARVLRQYGHEVKLIPPQYVKPYVKTNKTDAADAEAICEAVARPNMRFVQIKTAEQQAILVLHTERNILIRERTACANSMRAILAEFGIIMPRTLSQLYKKIPEILEEYDNELSAFVRCSVARQLEHLQGVEDQITLIEQELSRWAKTQPACQRVMKVPGVGLMTATYLVASVGNGQQFHSAKQFAAWLGLVPREFSSGGKQRLGRISKRGDRYFRYLLVHGARAVAAVIERHKDNMPWLYRLLNKKAYNVAVVAQANKTARILWSMLVHHTEYRTLSAV

SEQ ID NO: 319694 - protein, 374 aa, unidentified
MDTIYIGVDFHARQQTICYLKTETGELVTCELKHQDKQVVRDFYVQFCGQVIVGLEASGYSPWFERLLEELGCEVWLGHATEIRRRARWRQKNDRRDAELILELMLHNESPCLHRGAVQSREVMRMLRYRQKLIKIRTMSKNSLQALALQAGVARRSHLFTREGKQELTAALMSPAMQWQREHWLQLLQPLNQQVLESMVWLKAQSKGDVSVARLRTHPGIGLLTSLCLAHTLQPVDRFRNTRKVVAYAGFDPVERSSAERKRFLGISKAGSRLLRHLMVEAAHVAVRKDEDLKCFYQRLADRRGRPKAKVAAARKLLIRAYIMLRDEIDYAEFRRRAVAARLARLGHGPQVPAVVIGQPASTERREQLTRTRK

SEQ ID NO: 319695 - protein, 358 aa, unidentified
MNSVGIDIHKTRCNACVKTLEGRILEEFTFQNTSQGLEELVTHLKPHQEVQVAIESTGNLWTRIYDRLEQEQIRVVLTNPKKTKALTENKIKTDRIDARLLADLLRGNLLKASYVPPREIRIQRSIIRERARLVETRTILKNRIHTLLDKYDLHPPFTDLFGKHGLEWLSAVQLQPGDRVILDVNLEQLQSLTRSIDALTANIALSAVDNPEVKLLMGFTGIDYYGAMLLLNEIGPIARFPSAKKLVGYAGLAPSTHQSSNVTIHGHITKEGNSHIRWILIEAAQNASRHDPRFKHFYLRIAKRRGHQIALVAVARKMLVTIYQVLNHHSEYRGLRPELFENKIRRLQRVTQSSLQTR

SEQ ID NO: 319696 - protein, 363 aa, unidentified
MGQSSWLVAGMVPGIKRQPLKKLDPDENQLLKLLNRWRHEALQAGHAIERVVVAYEAGRDGFWLARWLRERGVEAYVMHPSSVAVSREHRRAKTDRLDTELLMRAFLGWLRGERRHCSMAAIPTIEEEDAKRPNREHEKLVGDRTRIVNRMKSTLARLGNRWFKPTLRKAEEKLGELRTAEGTLLPENTRGELRRDMARLRVVREQIKEIEQQRLRKLEAAAAAEKGPHAIVRLIARVVGIGVETADMLVNEILSRHLRDSKAVARYAGLTGSPDESGNRRREKGLARAGNARVRRGMIQLAWRFLKFQKDSELAQWFRARAADGRRGTRKTMIVALARKLLIALWRMTTTGEIPEGVVLRPA

SEQ ID NO: 319697 - protein, 348 aa, unidentified
MAHFVGLDVSVKETSVCVVDDAGKVILEQKVPTEPSDIIALLTSLGVTYGRIGIEAGPLSQWLFNALTAAELPVICVETRHMKALLTAQQVNKTDRNDARGIAQMMRVGLFKPVHVKTLVAQEQRMLLTSRKLLQRKLLDLESDLRGTLRNFGLKVGVVSGGRYEARVRELVSGFARLAAIAEPLLNVRRVMRQQLAVLHKMLLDTVRDDPVCRRLMTAPGVGAVVALTYRATVDQPQRFVHSRAVGAHVGLTPKRYQSGEIDYDGRVSKCGDALLRTMLYEAAHSLLTQNRKWSWLKAWGVRVAQRRGMRRAIVAVARRLAVVLHRMWIDGSEFRWRKDSAAAPAAA

SEQ ID NO: 319698 - protein, 343 aa, unidentified
MAIAIVGIDLGKNSCSVAALDGNGAVVLRRRVSRGKLAGYVGRLPACVVAMEACCGAHHLGRVFEAQGHAVRLMSPEYVQPYVKAQKNDDRDAEAIAEAATRPTMRFVAMKAEAQLDMQTLHRARSRLVNSRTRLINQLRAILLERGITVAKGRRALAVALEPLLEPEDAGLSSRIRMLLADMRREWDALDARIATLDREFVETARRSAPERRLATIPGIGALNATALVAAVGEAEGFAHGRDLAAWLGLTPRQMTTGGKPRLGGITKRGNVYLRTMLIHGARAALPSLSRSDTPLGAWLRGLMARAHVNVAVVALAAKLARIAWAVLRSGADYDRRAGATAA

SEQ ID NO: 319699 - protein, 413 aa, unidentified
MQLLYARCAGLDVHKKTIVACVMITLLTGQVHKEVRTFATTTAGLLALADWLSSHEVTHVAIESTGVYWRPVFNILEASCTVILVNAQHIKAVPGRKTDVRDSEWLAELLRHGLLRASFIPPQPIRDLRDLVRYRKTLVYERSQEVNRLHKLLETANVKLTSVVSDVMGKSGRAMLDALLEGVSDPEALAELARGSLRGKLPQLREALEGRVDAHHRVLLHHLLEHIAFLEQSLHELTGEIEQRLSSYEKAIERIVQIPGLQRLTVSTILAEIGDDMSRFPSARHISSWAGVAPGNKQTGGKRMQAPTTKGNTHLRAALAEAVWALSHTKNNYLSAQYHRLARRIGKKKAIVAVSHSLLVIIYHLLRDQTDYRDLGSTYFETLDKERLCSSAVRRLESLGYDVTLHAKQEVPA

SEQ ID NO: 319700 - protein, 399 aa, unidentified
MTPDDIDVWVGLDVGKSAHHAHALDHDGNTLYDKPLKQDEKAIRTMLGKLSKHGRVLLVVDQPNTIGSLPLTVARNMGIAVAYLPGTAMRRTAQLLPGDAKTDRRDAHVIAWAALKLPETLRDAGPDDETLAALKLLAGHDEDLAHESTRHVNRLRSLLLQTHPAFERALKGERITRDATLALLERYGGPMGVKRAGIEDVKDWAKSNGLRAGRIIDDMFKAIGEQTVTVPGTLMAETIIPSIAHDIKTIRDRRREVGRQVEKLLEDHPLLTVLTSMPGIGVRTASNILLGIGGDIANFKSSAHLAAYAGISPVTGQSGTSIKGERPSRRGNKRLKNALWQTSFVASTKHPPSVAYYKRKREQGKHHNAAIICLARRRCDVIYSMLKNGTLYQEPALVA

SEQ ID NO: 319701 - protein, 470 aa, unidentified
MLRCYLASRSHYKPFDGTRTARPGKDGNELMKEQDSEPQWSALTAIDWADQKHFWRLVPAGSDRQEYGELENTPEAVEVWAMGLHDRFGGRPIAVCLEQSRGSLVCLLAKYPHLVLFPVHPKTAADYRVAFCPSGAKSDSGDTASLLDLLQRHRQQLRQLQPDSVETRLLQILVETRRCIVNEKTRQKNRLTACLKLYFPQVLKWFDEVDSPLVGALLQRWGTLMELQRAHPGTLSRFFHDHNCRGEERLRERITAIQQAMPATEDPAIVEGESRKARVLVGVIETLRHSIGEYDRRIAELVASHPEGSVFGSLPGAGPALVPRLIVAFGTRRERFEAASEMQNFSGISPVTEASGKTKLVHMRWACPKFLRQTFHEFAAHSLAQSAWAKAYYDLQRRNHKDHHAAVRSLAYKCIRIIYRCWKNRQPYDEQLHLRSLQRRNSPVIGAFVPTTGGEWKLVSGFQKFSRNNC

SEQ ID NO: 319702 - protein, 372 aa, unidentified
MEKSSRTLYVGLDVHKDSIAVAYAPEARDADVVALGTIGTRQCDIDKLIRQLQSKGPAQLVFVYEAGPCGYWLYRYLTRKGFACHVVAPSLIPRKPGDRVKTDRRDAITLARLMRSGDLTSIYVPQVQDEAIRDLSRAREDAVEDLKAAKHRLKAFLLRQDIRYEGRATWTAAHLRWLSEVVCPTPAQQIVFQEYLRAVTEQHERLGRLESELHAQVKSWRLYPVVEAIQALRGVELTGAVIVIAELGDLTRFDHPSPLMNYLGLTPSEYTTGQRRRQGGITKAGNTHARRALVEGAWAYRYPAKISRHLQLRLEKLPAEVQAIAWKAQVRLCKRYRQMTARGKHVNEVVVAIAREMAAFAWAIARIVPLAN

SEQ ID NO: 319703 - protein, 403 aa, unidentified
MNNVAGIDVSKGKSMVSVLRPFGEVVAKPFSIGHTGSELKELADYLKSLDGETRVVMEHTGRYYEPVARFLHDEGVFVSAVNPKLIKDYGNNTLRKVKTDKADSRKIARYGIDNWAELRQHTPMDTIRMQLKTLNRQQSLYTKTKTMMKNNLIALLDQTYPGVNALFDSPVREDGSQKWVDFATTFWHVDCVRNMSLTAFAERYRKWCKRHGYNFSQSKAVEVHAGAQDLIAMLPRDALTKTMVRQAIDALNAISASMERLKAEMQALAAQLPEYPVVMAMHGVGDSLGPQLMAELGDVTRFTHRNAITAFAGVDPGADQSGTHEAKSTRVSKSGPPELRRALFLVMDCLLKTMPQDDPVYRFMDKKRAEGKPYLVYMTAGANKFLRIYYGRVKEYLASLEEN

SEQ ID NO: 319704 - protein, 458 aa, unidentified
MEEPQEVPADGEHERVWERVAAIDIAKASGVVCTRVPDEDRPGRRKTHLWTVQATSKAVIELGDYLRARQIQVVTLESTSDYWRIWFVILEAAGLKVQLVSARAVKNAPGRAKTGKKDAVWLAKLTGKGLLQPSFIPPYEIRRLRELTRLRAALVHDKSRYRARLEKLLERARIKISAVLSTLDTDTARAMIEALIAGQRNPRVLADLAIGKARARRAELTLAPEGRREDHHSIQARILLDDIDALNRQAGQLTGTIGELISQIPAAWGTDADGTTGPHAGTSPQAPVLPAIAQLDAITGCGIIAAQAIIAETGLDMTLFGTPGRLVSRAKRCPATRQSGKKTSGGKAGKGNPWLNGILGEITASAARTDTFPGERYRRLARRRGKRKAMVAVARSILVIIFALLSDRSVRFRDLGPDFYDTQINRDRKIRNHIRQLQALGVDPEDLAALLTKNPPAA

SEQ ID NO: 319705 - protein, 352 aa, unidentified
MKKLFIGIDFSKKKFDATVILAAGLHELEERKWETFTNDPKGFRHFIKWVKQNAWKTTQEEWLFCGEDTGACSISLSRWLYGRGYDMWLANAYAIKHSSGIQRVKSDKADSAVIAEYAWRHQDKAQLYEPIDENLQELREIFLYRHKLVEQRVKLQVRSKEKDTVKGKSKALSFVERKTKHLIEELSKAIKQCDDKMKEIIAADEALRENYDIITSMRGVALQNAACLMIYTNNFKRFDYDSRKIACYYGVAPFGKQSGTSINTTPRTSHFANKLIKSLLGQAAHVAKEFEPEIRAYYDRMIQKGKKRQVAINNVKNKILHILVAMVRKKEKYNPDSNKKENVKDLALCVNF

SEQ ID NO: 319706 - protein, 393 aa, unidentified
MGRVIIGVDPHKLSATIEVLDGGENVLGGGRFGTDRDGYRQMLIVGRRWPDRVWAVEGSNGIGRHVAQRLVADGEPVVDVPAKLSARARVFSTGHGRKTDATDAHSIAVVAVRTPNLNQVGVDDELVALRLLADRRDELAGARTRTVSRLHRLLLELIPAGAPRFLSATQAKALLATVRPRDIAGRTRRQLATELLADLVVLDRKLKDSDRRLTEAVAATGSGLPDLYGIGPVGAARILGDVGNIARFPSKAHFASWTGTAPIDASSGQQQRHRLSRAGNRRLNRVLHIMAIVQIRHDTEGRAYYRRKLAAGKTPMEALRCLKRRLSDAVFRQLVADTNRPPEAGPGGHSGATLKSSAASPTPIADSSDKSLPGPATANATAPTHRLQSPALT

SEQ ID NO: 319707 - protein, 460 aa, unidentified
MNHTRSKSKNGSKMPMVHPNAAAIDVGATMHMAAVRADRASEPVRSFGTFTADLHRLVNWFTECGVETVVMESTSVYWIPVFELLDSHGFTVCLVNARDAKHVPGRKTDVSDAQWLQRLHSFGLLRASFRPKGQIAELRSYVRQRERLLEYAASHIQHMQKALTEMNLQLHHVVADITGATGLRIIRAILAGERDPGALACLRHYSCHSSAETIAKALTGSYRAEHLFALEQALALYDAYHEKASACDARIEAVLKELSIHRGRGHGPAPRASRRRNRTDQANALTFDVREALFALLGKDITTIDGLGPYLSLKLIAECGDDLSSWPSAKHFTSWLGLAPSNKVSGGKMLSSRTRRSGGRAAALLRLAAVTVGRTDTALGAFYRRLSSRIGKAKAVTATARKIAVLFYNAVRYGMDYVDPGASAYETRYRTRVVNNLHRRAKAFGFVLQPLEPKVGAAVS

SEQ ID NO: 319708 - protein, 342 aa, unidentified
MQITTIGLDIAKNVFQVHGIDAKERVVVRKQLRRSQVIAFFSALPPCLIGMEACATAHYWARELRKLGHEVRLMPAKDVKAYLKRNKNDAADAEAICEAVRRPTMRFVQIKSAEQQGQLMQHRTRDVLIRQRTQIINALRAHLAELGIVAAQGDAGVNELCAIVADDRDERLPIDARASVIVLAAQLEALQTLIGSIEKRIKMQHRSNETSQRVETIPGIGVLGASAIVATVADPTIFRSGRDFAAWIGLVPRQDSTGGKQKLGPISKQGDRYLRRILIVGAIAVLRRAQENPGKYPWLTQLLARRPFKVVAVALANKMARTAWALMAHGGTYRAPELAEAA

SEQ ID NO: 319709 - protein, 355 aa, unidentified
MQSNKISFKGQNIYVGIDVHLKTWHVTTLTESGYKYSFAQHADAKELFDRLNKKFPEAHFKSAYEAGFCGFSAHYALTELGFENIVVHAADIPTTGKEKAMKTDAVDSEKIAWSLKRDELTGIYIKDKDYMDDTNLMRLRQRFIKDLSRQKNRTKHLLYTQGVTYPERFSKNGTHWSQNFMKWLREEVVLLSEEKRTLMLLCDQVEHIRKDILAVTREIRRLSTADKYKENFSMLSSVPGFGLITSMSMLTEFDNNPMRFPNERKFVAMLGLIPTCHDSGEKKVSGEKTNRGNKQLGPLIVEASWVAIHRDYQLGCYYTNCCQSMKPQKAIIKVARKLACKAYAVMKTKKPYVLS

SEQ ID NO: 319710 - protein, 354 aa, unidentified
MIIIGVDYHPGFQQIAFVDTDTGELQERRLQHREEAEKFYRDLGAQGASVRVGMEASGHARWFERLLGELQFELWIGDAAEIRTKRVRKQKTDRQDAELILRLLLEDRFPRVWVPSWENRDLRQLLWHRHRMVQARTRIMNQLQAVALNEGLRCKKRLWRDAGREQLESFRLSPWASRRRRDLLELLDRLTPTIAELTQAIEQEVEKCPEAQRLQTHPGVGALTALAFVLIIGRAERFQCGKQIASYLGLVPLEESSGQRRRLGHITKQGSSLLRFLLVEAAQVTVRSDQEWRSKYFHLAMRRGRKIAKVAMARRLAVRMYWMWRKGWNYGQLTKFGSHAGQPGTGDGAQLNTE

SEQ ID NO: 319711 - protein, 487 aa, unidentified
MVFEQPHELYAPSLDEYGAFLSAAARYCRSYASSGCCSTLYTNCEDRFLFISSLPMKSNVSHSLTSCDDEPLPSILVGVDWGDSKHAFALRLSDGTIESGFVASTSEILHSWLETLLMRFDSQPIAFVLEAGSVPLIAALREYPQFRIYPVCPLASAAYRKSFRPSGAKDDQPDAQLLLQMLVVNHHQLIPIPNQGSVETRLLDKLVIHRRRLVDRRTALTNQLRSTLKAYFPQALQLLPDDLSRPFVALFLERFPSLLDLKKARSSTIRKVFTKGGYRSAEKIEAKIQLIQQARLLHKDHALTAAAELQVKHAIMEIKLLKRQISETETQVNQLFKNHENASFYRNLPGAGPAMAPRLLAAIELLPTQTVSEAQRYIGVAPVIERSGNQCWTHRRFHPPGFLHQTLVEWAGLTVQYSQWANAYYLHARAKGKKRYTILRALAFKWVRIILRCLETSQGYDEATHIKRLQQADVPWALPLLPQPSNT

SEQ ID NO: 319712 - protein, 420 aa, unidentified
MDEITEEPAALVERVAALDIGKASLTACIRVPHGDKPGARRQEVRTYATLTPALLELRDWLVCQGVTLVVMEATSAYWKPPFYLLEDDIECWVVNARDVKNVPGRSKTDKLDAVWLARLTERGMLRPSFIPARPQRQLRDLTRYRRTLTQERTREKQRAEKLLEDAQIKLSSVISDIFGASGRAMLDALVGGQANPHELAALARGKMRAKTSVLHEALTGHFTDHHAFMLGMMLDRIDALTDQIGTLTTRIEQAIAPFAAQVAQLDEIPGIGPAAAQDLLAEIGADMSRFPTAGHLVSWAKFAPRARQSAGRSKAATTGKGNPWLGGTLGEAAAGAARTKTFLASRYKRIVKRRGKKRALVAVGNSILTIAWHLLSDPAAHFTDLGPDWHDRLAPLRRKRQLIAELERLSGKKVTLRDAT

SEQ ID NO: 319713 - protein, 344 aa, unidentified
MQITTIGLDLAKNVFQVHGINSAGEVAARKALRRSQMRRFFEQLDPCLVGIEACGTSHYWAREITKLGHEVRLMPPAYVKPYVKRGKTDASDAEAICEAVGRPTMRYVAIKSPDQQAALALHRTRDLFVKQRTQLINMIRGLLAEFGIEIRRGIEQALMLAKRIAAGEMPEIPTLAAKVIAGLAGQVLDLQARLREIEHELQAWHRSNDVAKRLATIPGIGTVCATALAATVTDPHQFRSGRQFAAWLGLTPLQHSSGGKERLGRISKMGDKYLRRLLVVGMTSLVRRAKYKPEAVDPWLADLLSRKPARLVTVALANKAARVVWAIMVRGGVYRMPAGVTTPI

SEQ ID NO: 319714 - protein, 383 aa, unidentified
MKAVCGLDVHKDSIFLCILHSDGELFEQVFGVLTFQLEEMRKLLQKHHVFEVCMESTSIYWIPIWRVLSPHFTLRLVNPYFIKQLPGHKSDVKDAQWIAECTMKELVRGSFVPPEIIQQLRQYDRRIFDLNAEIVRKVSKVDGVLQRCNIRLSNYVSNIECKSYRDVVRRLSEGVTNPNELMKLVHGRIVNRHGAETILASLTGVVSQAEIDVLRQLHEEIDIAESHRNECQQRMLEICEKHFPEELERLQKIPGIKERAATSLIAEIGTDMSKFETANHLASWSGLKPRNDESNKKIKSRKITHGNVYLRNTIIQCAWAASRQKDSFFSRFSYHQTIVRRKNKMKVIVAVARKLLIAVWHVLHDKTDYVDFKPDREESANNG

SEQ ID NO: 319715 - protein, 443 aa, unidentified
MKLYVGIDLALRGPHRAAVVDDRGTVVLPERRLRTDMRNLDALLEQLWQRFPEAEVQVVAEPTGTVWIPIARHCLRRGCRFALVAPQKVHDLRRFYRRHAKTDPLDALTLARMPLVDPEALFTSEVLDVRWLALRRGVKKEAKLARLVAEIKQSICAKVDLAVPGLAALVGDPASRLARALYGRYLDPQQVLAMGAEAFRDLVAGARRRPVPEGWFRRLWACYEAAAAFWGPGDLEAQDLTEDVAEDYAILDTLIVQLRQVRQRNLALYRALDPEGHVQSLPGVGKVLAPALLAGLPDPHRFPGSKAFRAYTGLIPRVDQSGIRRAKGTRSTKAGPAWLRRALYLAAEVARRQDPQLAQIYQRCLVEKGHHHSHAVCVVAVHLADRLYAVRRDGRPYVLRDTHGTPLDRLTARRLAQAYTVPDTVRRARRNREGHPGENVRVG

SEQ ID NO: 319716 - protein, 368 aa, unidentified
MKKNNTCLKSPKRNKTRKRSLTIGMDLGDKTSRYCVLDSDGEIVREGTVRTTKKGMKQRFGSLAGCRIAIEVGTHSPWVSRLLSSLGHEVIVANARQVKLISASSRKDDRLDAQTLARLARMDPQLLRPIRHRSEKAQGDLMQVRVRAALVDTRTGLVNAARGLAKAMGERLPKCDADQMGVAKTQGMSAELSEALRPLLETVEALTKQIKASDQKLEQLAERDYPETELLRQVSGVGSLISLTFVLTIEDPSRFQKSRDVGCYVGLRPRRSESGESRPQLGISKEGDEYLRKLLVQGAHCILSHKSPDTDLKRWGLKLAGKGNKNAKKRALVAVARKLAILLHHLWVNGEVYEPLRNSRLLEQKAVA

SEQ ID NO: 319717 - protein, 354 aa, unidentified
MLKYSVGLDVSSADIHACFSVIDSQQKVKVISSKVINNNTKGFEILVTWIEKNRKLKELPLVIGMEATGIYHEECAYYLHDKSYAVSVILPNYAKKFLQASGLKSKNDKIDAKGLAQMFAERSFRLWQPLGKFYYQLRGLTRQQESLQEIKTGIKNQLESANRGAFKNKDVIKQLNETIKFLEKQVVEIEKKILALLKSNNEIKKQVENVLTIKGVGIMTLAILLAETNGFLLFTNTRQLVSFSGYDIVENQSGRHRGKTKISKKGNGHIRRALFFPAFTAVSNKCKPLLDLYNRTFENHKIKMKSYVAVQKKLLVLVYTLWKKNVVFTENYLMENTKEEEQASASLGSLAQAE

SEQ ID NO: 319718 - protein, 368 aa, unidentified
MEEGIKLFIGLDVHKESIALGTAEAGREPGRLGATMRHDVPKLLKHLARYGDPNTVHVVYEAGPTGFGLQRALARRGYRCEVIAPSLIPKRAGDRVKTDRRDCIRLAELSRAGELRAIWIPDPADEAIRDLARAREDGVQARTQARHQLKSFLLRHEIRYPQKTSWSKTFYRWLATLRFEGVGAQAAFTEYWQAVTAADERVARMSSALRGAITGWRFEPVVKALLALRGIDDISAIGLIAEIGDINRFEHPRQLMSYLGLVPSEHSSGERTARGSITKAGNAHARRLLTEAAWNYRFTPRIGYAAHRRAESLPQAMRDTAWKAQLRLSARYAKLNARGLHKNKVVTAVARELSGFVWALARAASAAA

SEQ ID NO: 319719 - protein, 360 aa, unidentified
MASIIYVGLDVHQQSISACLLLPETGEVLYDQVVNERERLQRAVKKWSQHGELRMCYEASSAGYVIKRWLDGWGVSCEVIAPSLVPKSPGERVKTDRRDAFKLARLYRAGLLQVVRVPSEEDETVRAVVRLREALTRDMTRCKNRALKYLSTLGLRYSAGSYWTQKHRAWLHSLELTPDQRLVLQGHLEALDELAARAKRIEARIAEIAQEPQYAPAVGALLSLRGVGVFTAMVLLSEIGDVRRFGEAAQLMSYFGLVPGEHSSGETQQRGRITKMGSQRVRWVLVQAAWNQLRKPGNCQRLRSHWQSQPPEVVRIARKAEQRLHQRFWHLTLRCDRKTAAVAVARELVGFVWAILQVVA

SEQ ID NO: 319720 - protein, 396 aa, unidentified
MFAGWDWGNATHDVTVIDDAGRKIERFPVPHTEEGITRALARLACHGGVPVAIETTRGLVVDRLLAAGHPVVAVHPNAFHAARPRWGAARAKNDPGDGFKLADYARTDSHRLPILTPTLPQTLELQALTRQRGDHLAMRIAAVNQLAALLDTHWPGGKAIFASLHSPIALSFLDRYPTPQAAAGLTAARVETFCRRHHYSGRRSGAELLTRLHAAPTAASRLGEPVIAQLVGAQVGLVRSIQAGIDALDTLIAGAVEQHPYAALLAGLPRIGVLNLAQIIGEVGPILERCNTFDQLAAETGIAPVTRASGKTHTVAFRHATNRQARQALVTWIDNSRRASEWADQRYAAARARGQRHPHAIRTLGRAWLRIIWACWRTETPYNPNLHQPAQQPIAA

SEQ ID NO: 319721 - protein, 318 aa, unidentified
MSTKKARSFIGIDVSKKMLEVAVHDRENHFHCANLDSAFPTLIAELIALRPVLIVLEATGGCETAVTNALHRAGLPVVVVNPRHVRHFAKAVGQLAKTDRLDARVLAHFAAVIRPPLRPLKSEEAQQLEALLSRRRQLVEMMAAEKNRRRMSSSPEIQEEIDEHIDWLKGRIKALDKQVTQQCKRSAAWQRKNEVLLSVPGIGPVVSLACLAELPELGTLNRQQISTLVGVAPLNCDSGKHRGSRHIFGGRAYLRSLLYMAAVAGVRCNPVLQEFYQRLLSRGKPFKVALVACVRKLLSIINVMVRENTLWIDKAVTT

SEQ ID NO: 319722 - protein, 353 aa, unidentified
MKCDKYMGMDVHQAMTVVVVLDAEGKVILETMVTTEAAAIIRLVQSLSAPLHVTFEETTQAEWLWNVIRPFVAEVIVCDPRRNKLLSEGSKADKVDARKLAELLWTGMLRSVYHGHEATRKLKELVRGYESLSIDTQRTMARLKAIYRGRGIATPGRSVYQAKQREGWLTLLVEPGLRQRAAWLFEQLDHLRPLRRAAKETMLAESRKHRAVALLRTIPQLGPIRAAVIVATVDTPHRFRTKRQFWSYVGLAVVTHMSAEYEMKAGRVVRRRKPIATRGLNHNCNHRLKKVFISAAAAGNRYEPYRPYLAALKDSGMRAEMARLTLARKIAAVALIVWKKGEAFDPKKLNLTT

SEQ ID NO: 319723 - protein, 395 aa, unidentified
MQVMHPVCCGIDVHQKSIVCCILDGPLTSNEPKKYQTTFGTTTKELKAALDWLLEHQVTHVFFESTGQYWIPLFNIFSDSDLELVLANPQHIKNVPGRKTDVKDAEWIAQLGRCGLINQSYIPSQEVLQLRYLTRYRLSVKQRLTQIKNHIHVILQRGNIKITSYLSDIFSKTGQALLTLFIDGEVINEDNVESCIHGRIKASTRQLIEAMEGKLSTVDRFLIKECMEEYKLQKKISDELNKEINEYILEHFPEEYQLLLTIPGISDNCCATILAEIGPNVDAFKTDKNLASWAGMCPGSNESAGVKKSSHTTQGNKYLKQALVMSVLSVQRAKEETFSLFYQRISSRGSKMKAIIACGHKMLRIIYKILQSHQPYNSQKALGLRQQTNALSLTI

SEQ ID NO: 319724 - protein, 481 aa, unidentified
MTARKNTKRDGAASGSPAAAGPGGGEGAEVAEEHVEVVTYAAAIDVAKGFGTVCTRVPGSRPDRKRQTVWQADADYASVVALMDHLRCQGIQRLVVESTSDYWRTWYYLAEAAGLQVWLVNAKDVKHLPGRGKSDREDSVWLCKLNERGMLRRSFVPPQAVRDLRSLTRTRSRLAQDQVRHQNRVEKILEDALLKISCVISDLFGASGRRFLDALVAGERSPAALAALGDARLKATPEQLAGALTGRFREVHAFEIATYLRLIDTINDEITRLDARIEQQLASIPGVAPACGSCGLIGGGHSPGCAAGGTPVLGLVARLDEITGVGVCNAQVLIAELGTDMSVFPTPAHAAAWARLIPRTLQSGTTARPGRTGKGNPYLRGALGQCVMAAARTDTRLGEQYRRIARRRGKQKAIVAVSRVICEIACILIADPAARFTDLGASYYSSLNPQRQTRSKIREIERLNPGMKVTLTPAGPAATAA

SEQ ID NO: 319725 - protein, 343 aa, unidentified
MEKISTIGLDIAKNVFQVHAIDETGKIVVQRRLKRRQVLSFFEKHPPCLIGLEACATSHYWAREIEKLGHEVRLMPPRYVKPYVKRNKNDMADAEAICEAVTRPTMRFVAIKTAEQQSVLMLHKTRQLLIRQQTMLINAIRAHLAEFGIVAGIGRRGVEKLEAIIEAGEDDRVPPAALECLMVLRDQLAVVKRHILDVDRRIMDAHRSNELSRRLAGIPGVGPLIATALATSVPDPHTFRSGRDLAAWIGLVPRQNSTGGKQRLGHISTAGNRYLRTMLVVGALSVIRRAKQLGYTRRPWLARLLERRSTKVAAVALANKIARIAWAMMAHGTYYQEPETQAM

SEQ ID NO: 319726 - protein, 400 aa, unidentified
MLLFFEVITMIFVGIDVAKDTHYAAVSDDSGAVLVKTFAFQNNAEGFCLLLKKLSEFDRSKLLIGLESTGIYSENLICFLYESGFRLAVINPIQTATLRKTAIRKTKTDKVDTMLIIKSLMVNSYRLYSQRDADSLKLRTLCRFRQNLKKSKARLKIQLAGYVNLVFPEFGKFFKSGIHIAASYALLKKYSSPKEIAALRTSTLCTLLSKASHGRFGKDTAEALKSLALSSVGVKNPYISIQIAQTIAQIELLEQQIKDLNSAIEEAMESINSVLMTVPGIGAVNAACILGEIGDIKRFSKPCKLLAYAGLDPTVRQSGQFTAKSTRMSKRGSALLRYALINSAWQLTLNDTTFKAYYDLKRSQGLNHYGALGHVAHKLTRVIFKLLTSDTPFNPAKLVA

SEQ ID NO: 319727 - protein, 337 aa, unidentified
MEYFAGLDVSMEETRVCILDGDGTVIREVKVPSTPSDIEAALAGAPACRRVVFETGRMAPMLHHGLTERGVPVVCIESRQASQALKSLATHKTDRNDARGLAHLARTGFFKPVHVKSLPAHAIRSLIIARKKLVGQRVMLENQIRGLAVVFGVRLPRALSSAFIAQALQASEGIDGLSAAMRGLVTARMAVLSAVTSIDADIKKLTRASSACRLLMTIPGVGHLTALAFTAAVDDPERFRRSRDLGAYLGLVPRRYQSGEVDYTGSISKCGDRRMRTLLYEAANVMLTRYKRPLKLKDWALAIAKRSTLRKARIALARRLAIIMHAMLRHGTEFKPA

SEQ ID NO: 319728 - protein, 415 aa, unidentified
MALKIVYKICCGIDVHKTFVVACIASTNDKGVTSYESHRFSTYTSGLKTLLQWLLDRNCKDVCMESTGKYWIPVYNILEKDCSIVLAHPKYVKAIRGKKTDKKDAKWIADLFKHDLVAGSFMPPAGIRQLRDLMRYRFKLTCFKSSEKNRLQNCLTVSNIQLGNVVSDTFGKSAQAILDKILENPADTSFDLEPLVFKSLKKKLPELRDAIDGYITPEQAGKLKVIKSHYENLEARKAELEELILALATPYQQELAILQTAPGISSDFTAIGIISEIGTNMEAFPSAKHLCSWAGLTPTNNESAGKKKSVRVSKAGCYIKPLLVQCANAAIESKKHPEIRDRYLRIKKRRGHKKAIIAIARMLLTALYHMLKNGENYNSDLYQKSDILPTTREITVEQAILMAQFQGFRIKSATE

SEQ ID NO: 319729 - protein, 340 aa, unidentified
MNKFNTKSWFVGIDISKDSIDVSLFNKYNPNSYYDQRFKNDLKGFDLMLKWLLKHQANLNDCLFCMEHTGTYGLLLFTWLSGKETDFCVEPGLQIKRSLGITRGKNDKVDARRIAKYAFVNRESLSPFTLPTKSLIQIKQLLTYRDQLIKCRGSFKNSLKSHKQYQQISELSFVAEDIQEQIESLSKRIVRLEERILETIQSDPALKTNFKLATSVTGIGFVIAAFMLVTTNNFSSFENGRKYACYTGNAPFELSSGKSIKHPRSVSHLANKRLKTLLSNGANAAYRSDPEIRNFYKRKTEEGKDHKLIINAISCKLINRVFAVIKRQTPYVTTYQQKVV

SEQ ID NO: 319730 - protein, 322 aa, unidentified
MTKNEYKDYVGIDVCKKHLDVCVRSTGEYFRVENNVDGFKVIQERLAGYSPCLLIAESTGGYESDMVRSLQKKGLSVSVINPRQARDFAKAVGRLAKTDKIDAGVLAHFGEAIKPAVKEISGEEEESLSALAQRRRQLVDMLTVEKNRLSQAHGSVRKPIKKSIEFLKKQLKHMEKELSDHVKSDKRWSRKTEVLESIRGVGPVIAVTLVADLPELGKVSHKEIAALAGLAPLNRDSGFMQGKRSIWGGRATVRTALYMGALVGVRFNPVLKAFYEKLRQRGKQKKVALIACAHKLLTIMNSMIKYDCTWQQKLNENTAVNA

SEQ ID NO: 319731 - protein, 356 aa, unidentified
MLNDKKYIGMDVHKESISIAVRNDAGKVVMECVIETKASVILQFIDGLRGDLQVTFEEGTWAAWLYDLLKPHVTELVVCDPRKNASMREGNQSDKIDARRLAELLRLNHLNPVYHGEHGLRSLKELVRSYLTITKDLGRVMSRVKAIYRSWAIPCTGKQVYARRHRAEWLAKITEPGVRRRAEFYYQQLDALRALRQQVRRDLLAESKKHPAWKRLCQIPSIGPIRAAVLLGILQTPHRFRGKRQLWAFSGFGIETQSSADHRSVDGQLQRVKKPSSIRGLNRNCNHDLKNLFKGAAILASSKPGPFQEFYTALLTKGIRPEMARLTLARKIATIVLIVWKRGASFDAQHLKPQTA

SEQ ID NO: 319732 - protein, 349 aa, unidentified
MTEIIRIGLDLAKTVFQVHGVNGNEQVTIRRSFRREALLRWFEQLPPCLIGMEACATAHHWTREITRMGHTVRLIPPAYVKAYVRRNKNDAADAAAICEAVSRPSMRFVPAKTEAQQASASLHRVREQLIRQRTATMNSLRGLLAEFGILAPQGMTGMNTLIAAVEDPDETRIPAPLRPALHAYVAVLATLKAELDRIDAAMIRAARENTAVRRLMAIPGYGVITASAMHARVPDPSIFDSARHFAASLGVVPRQDGTGGKVRLGPISKRGDGYLRRLLVNGAMAVLRSPAAKRDPWLVKLLESKPLKLVAVALANKMARVGWAILTRGRDYRPRPAAPATAAGAAMAV

SEQ ID NO: 319733 - protein, 354 aa, unidentified
MKRTTKYVGLDVHQAMTVATVRSEGGRVIARSVVETSDESIREFFNAMAGSVHVAFEEGTQAQWLYDLLSPRVDRVIVCDRRGEKRSGNKGDQVDADELSEQLRCGGLRAVYHGAGGRADLKELTRAYRNLVEDSTRVMLRLKALFRARAIRTRGGGVYEPKQRAAWVAQLPQQGARLRAETLYAQLDVLRTQRKKTKAAMVAEAKRDPAFGVLETIPYFGPVRIALLLATIGTPWRFRTKRNLWAYAGLAVVTRSSSDYELFDGRPRRRRRPPLTRGLNRNHNRVLKNVFKGAANVAIGRPGPFQDFYHGMLERGMREELARVTLARKLAALTLRLLKTGEVFDPTQLSRPQI

SEQ ID NO: 319734 - protein, 352 aa, unidentified
MISWIGADVSKDYIAMFVDGRRSNVANEPRALKKFFGKYDAQASLVIEGSGGYCRKPIEAALGRNLTIYAVNPADFRSYAESLNYRAKTDPIDAELLARYGQKECDRLRVYQPPSQEAERARALLGLRDLMIKGRSALSVAFVAMPDFIQSDTHWLLADLTHTGEQIQKIEQQLAAYVGSRPVARTLLQIPGIGILTATALDWVFDRCQFSNSDQLVAFVGLDVRVRDSGRHKGARKLTKRGDALVRKLCIQAAHSLRRSPAWRGLFAAYSGRGLSVPAVNAIIARKLLRIAFALITTGQAYDPRKVGGLLAEFHAPKQIRLAMKSPCLPPCLRRFTKTPSKRTKISAPLLT

SEQ ID NO: 319735 - protein, 355 aa, unidentified
MKEKKTSNLEQFFVESAGRKIWIGVDVHKRSYSVAVCRDDGVIVSWKTTADNDALVKQLSGHGIEIKALVYESGPTGFGLARACRDAGIPVIVAAPSRVIRPVSPTAKTDSLDCRKLAHLAAKDMVRSIAVPSEEEEALRALQRRRHQLADSRRKVRQRIRGFLLFHGLQEPTGLDNWSNAAVAALMDMPMNPVLREVLDDYLEELRHVKGKIARLENSLAKHTAALHQRRLACLQSVPGVGRIVACSFLSELFRPERFQRGEEVSAYLGLAPFVRHSGEKSPAGRLRPTGHTRLRSLLVEAAWIWKGRDPGVQAYYGRMLCNTGLAQKAITAVARKLAIILWRLACETRVYRPA

SEQ ID NO: 319736 - protein, 373 aa, unidentified
MPKYSTAFGMDVHLRSTTVCALDADTGEAVTRRFPGNPWGEIAGWMDGFPGPSLAAYESGYLGFAPQRELAGLGVECVVAAVSKIPRSAADSASKNDRNDAARMAKAILAHDISPVWIPSPEVEGIRDLAGAYDGATARLATAKQRLLAFLAKRGFVYGGTTPAGNPRKYWTYDFLRWLDKVRPEDDGGVRTLAALRNEVEAAAEARADLLSEYRAAVDASPIAAEVAALQSIKGCAFALAAAFSAEVGDFTRFRSGRQVTAYFGLAPSQRSSGDSVRLGGISGAGNALVRKLAVEGSWCYAAARHQPKLMPRDTGVPLEIRMHGRKGSERLLRRREELLARGMPAAKANAATAAELVRWLWALGMMCREGAE

SEQ ID NO: 319737 - protein, 336 aa, unidentified
MQKPEQSPGPIEESESTSEGYLVVQNETFVGIDVSEEKLDVHVLPAGLTISCRNDPEGIDRLIRELKKSALSIIVMEATGGLERLPAAELGSCGLPVAVVNPRQVRDFARGIGKLAKTDSIDAYVLARFAETTRPAPKPLESEQEALLKDLVRRRRQLVDLRTGEKNRLRRARSRPIQQSILTLIQTLEDQIRKIDSDLDDNVKKSPMWREREELLESFTGVGNVTARTVLALLPELGQVNRGQIGSLGGLAPRNKDSGKMRGKRKISGGRAEVRKVLYMAALTAISHNSAIRAYHERLIAAGKPFKVAITACMRKILVILNAMVRENKPFQAFCR

SEQ ID NO: 319738 - protein, 457 aa, unidentified
MAYSTNAPPSAKQGRLITTPTSQVVINALYPSAIGVDVHHDLLVCAYQHLDIEKAEISTELHEFRCTSPRSFVDFAQWCYERTPNVILMESTGVLWRAPYDSLEDVGFESEQLALVNARDIKAMVGRKTDKQDAIRLAEYARLGKFRKSFVPPRDIRDQRLIARDFRKCKSDESRHRNRVQKTFNALGLRLSAIFSNFTGKAATTILDAWCDGVDNLKEIVETKGSRLKAGTDAILDMLCKAIPEKVMSHLRKQREHLTYLQKRTDDVMATLREAQQPYQESIDLLTTIPGIKETAARLIFAEIGDDLSSFPDAEHFASWIGVCPGNNESAGHAHRSGTPKGNKYLRTVLIECAQAIGLMRKGVLFQRFQAFAIKKGRLRGVMAMAHLLARIIFSILKSRTPYREVSSTTLRDVNVKKVTAAMTTAIRTAGLTLRDGLLVVEKTGEILVDVEDCARA

SEQ ID NO: 319739 - protein, 359 aa, unidentified
MAVIEERERRIVGGVDTHKDLHVAAVVDEQDRVIETRCFATTRQGYRQMLAWMRSFGELQRIGIESSGSYGAGLLRFMQQAGIAVLEVTTPDKQDRRRRGKNDDLDAQNAAHAAFAGQRTVTPRSRDGMIESLRVLMACRKTAVSARRVALQMIHNTIVCAPDGLRDQLRSLTRMQLVRTLAAWRPDLTAYRDLDSAYRIGLKSLARRYLELHDEIADLDAMVAAIVDELAPNLIARNSIGHIGAAQLLLTAGDNPERLRSEASFASLCGVSPVPASSGKTVRHRLNRGGDRAANSALHIIAIGRLRTDQRTKDYVARRTAEGHSKLDAIRALKRYLAREVFTLITQRRKEINATQIAA

SEQ ID NO: 319740 - protein, 350 aa, unidentified
MIIGVDYHPSFQTIAFLMEETGECGEQELHHSDGQAEKFYRELKQRGICVRVGMEATGYSRWFERLLAELGFEVWIGDPAEIKTRRVKKKKTDREDARLLQKLLLENRFPRIWVPDPENRDLRQLLWHRHRLVQMRTRIMNQLQALAMNEGYRWKKKLFSEQGRAQLEKLSLAPWASRRRQELLELLDRMNPTIEELTTAVEREARKRPVVQRLMTHPGVGPLTALAFVLIIGTWERFPRGKQIGNYLGMIPSEDSSAGKQRLGHISKQGNSLLRFLLVEAAQAAARVHPAWRRRYVHLAMRRHRSIAKVAMGRRLAVRLYWMWRNGCEYSQSLEFGSYAGQLGIGHGAK

SEQ ID NO: 319741 - protein, 324 aa, unidentified
MDIHSKIIVCTTLDENGNVVRKDRFENSFENLEAYLYAFKKGDSFVMESTGFYEPLYDFIESHGFRVILANPLKIRLIAESRMKNDDVDSEVLAKLLKNGWVPESYVPRKEIREIRRIVRTRMQIKQSTTTYKNRIRFELMRMHVSIEDPFTLNGHKKLKDLKIPRIDSYLRILENMELEIKSIDHELEKYSDLEEVKLLRSIPGVGLFSALLIHSEIGDISRFGDSGKLLAYAGLIPSIRQSADIIHHGRITRQGSKYLRWIVSEDLHMHMRYDPGSSISKFYRRMSSRKGKSKALVASANKLLKVVYWILREKRSYISNQAQ

SEQ ID NO: 319742 - protein, 312 aa, unidentified
MAPTVFVGIDVSKDTLDVAVRPSALRWQVGNDDAGIRDLLSRLAEPSALLVVLEATGGYEYSAAAAFASAGAGVVIANPRQIRDFARATGQLAKTDAIDAAILALFAERVRPEPRALPDEARQELEALVTRRRQVTEMLVAEKNRLSHARRPVRRGITAHIRWLERQLADVDRDLDEAIRHSPLWRFQDDLLQSVPGVGPITSRTLLAQLPELGQLDRKKIAALVGVAPLARDSGTLRGRRTIWGGRAPVRAVLYMATVAAARCNPLIRTFYQRLRAAGKPAKVALIACMRKLLTILNAMARTHTPWRPTHA

SEQ ID NO: 319743 - protein, 338 aa, unidentified
MKVTTVGLELAKNVFQLYAVDKKGKCVFNKRLKRKALLAFFANLEPCLVGMEATGSAHHWARELIQLGHTVRLMGPQFVKPYRKGSKNDSNDAIAICEAVARPDMHFVSVKTKEQQDIQAIHRIRQRLVADRTAKANQTRGLLAEYGVIVPYGINRLRKALPLILEDAENGLSALVRELFEDLYCQLRELDDKVATYDQKIKQVFMASPACQRLAKVEGIGPAIATAMVAAVGDAKNFKNGRQLAAWLGLVPRQHSSGDRYKLLSITKRGDRYLRTLLIHGARSVVRRSEGKSDSRSLWLNEIKERRNKNIAAVALANKNARIIWALLAREEEYRAAA

SEQ ID NO: 319744 - protein, 422 aa, unidentified
MNSLTDDVFTAYVGIDWADSKHDICVQASDSQQRDFDCISHQVDRIEQWAQSLHKRFGGVIAVALELSKGPIIYALQKYDFFVIFPINPSTLAKYREAFQPSRAKDDPTDAELALDLLLRHPDRFNPLRPQSVEMRTLIVFVEQRRGLVNDRIRITNRLRNTLKQYYRQTLEWFDRIDTLLFCDFIARWPTLIQVKRARKTTLERFFHQHSMRFSHVLDARLKAIKVAQALTLDEAVITPYRLHALVLAEQLRVTLQSIRRFDNEIAELAPKYPDYGLFSALPGAGPSLAPRLLVAFGEQRERFASAADVQKYSGIAPVTERSGKKHWVHWRWQCPTFLRQTFVEWAAQTINKSYWAGAYYRQQREKGCSYQAAVRALAFKWIRILYRCWQSGTPYNETTYLNALKRRGSPLLNPATDAEMT

SEQ ID NO: 319745 - protein, 342 aa, unidentified
MVQPVTVGLDIAKNVFHAYGVDAHGEKVLSRELRRGKVEAFFAKLEPCLVGIEACATAHHWARTIEKLGHRVRLMPPAYVKPYVKTQKNDAADAEAICEAVTRPNMRFAETKTVEQQSVLVLHRTRATLITHRTRMGNTIRAHLAEFGITENIGRIGLSRLIDMIVSGEDARITDVTRRALMCLADQYHLLQNQILELDRQVMAWHKSNEASKRLATIPGIGPLAASALVASVGNASSFKNGRSFAAFIGLVPKQSSSGGKERLGRISKRGDHYLRWLLVVGGLAVIRYAQRHGTRRPWLLKLLQRRTTKIAAVAMANKMARIAWVLMARGGAYHEPVPQAA

SEQ ID NO: 319746 - protein, 420 aa, unidentified
MARTVEIVYPVCCGMDVHKNFLVACIAVTDKRSNTEHHIRRFSTFTGDLRRLSEWLASYNCRDVCMESCGKYWIPVFNALEKTCNVCLTHPKYVKAIKGKKTDKKDAKWISELFKCDLVRSSFIPPPDIRHLRDLCRYYVKLTGFASGEKNRAQNCLTMCNFKLDDVFADVFGKSATRVLDALLEHGDGSFELDGLISGKCQSSPEKIRAALDGELNPTQTEKLNLIRRHIDDINALKAALEKLIYKLAERYQPQIDLLMTVPGISTKLTAVRILAEIGADMSVFETAKQLVSWAGLTPQNQESAGKKKTTRIGRAGAYLKPLLVQIALNCGKSEKCPELKNKYLSLKRRRGGKKAVIAIARKLLTAIWHILSKNEVYNAELYRKSDRPPIARELTTTQAIAFLRNKGFLIVDKETGEVA

SEQ ID NO: 319747 - protein, 465 aa, unidentified
MPKPRKSTMPSVHAKPTQRKHAAGIDIGATSIYVAVPVDRDPQPVRSFQTFTEDLHRLADWPQRCRIKTVAMESTGVFWVPLFQILEQRGFEVCLVNAHHVKNVPGRKTDVADCQWLQYLHSVGLLQASFRPAQQVCALRSLLRHRDSLVQTASTYAQRIQKALDQMNLQLHHVISDITGVSGVTILDAIVGGERDPLKLASLRDYRIKATTETVAKSLVGDYRPEHLFTLRQSLDAWRYHRKLIAECDDEIQRHLVQFASKADPKQNPLPRPRKVSSSKVYSSVPGYDLRTEHYRILGVDLTKVPGINTLLVHTLLAEVGPDLSKFRSAAAFASWLGLCPDNRISGGKILSVRTRHVQNRAALALRIAAHTLHHNQSVLGHYYRRMRAKLGAPKAITATAHKLARILYHLLTTGQPYQESIFEERKPSINKEPSSVSTLGPVPSAINSSLWRKQLDQFLRSRTR

SEQ ID NO: 319748 - protein, 345 aa, unidentified
MEQISRIGMDTSKHFFQLHGVNAAEKVVLRKKLRRKEMVAFFEKLAPTVIGIEACGASHHWARLLRSFGHEVKLIAAQLVKPYVKRGKNDTADAEALCEAMSRPTMRFVPMKTAEQQAALMLVGLRDRLIRNRTQLSNAIRGYAAEFGFAAAKGMAHLDPLFDRIQADESLPDLAREMFAAQAEEYAQLQAQIASIDAKLMAWHKADECGRRLAKVPGIGPIGATLLMMKTPAPETFRSGRQFAAWIGLTPKDHSTAGKVRLGVITRAGDDALRSVLVVGATAVIQHVRRGGRGSPWIVDLLKRKPPKLAAVALANKMARVAWKLMVTGESYTAKFAPAAVASAA

SEQ ID NO: 319749 - protein, 356 aa, unidentified
MNKISKLDFKDQRIYVGMDIHKKSWSISILTDNFEHKTFTQPPNVEVLVNYLKRNFPGGSYKSVYEAGYFGFWIHDRLQEHGVQCLVVNPADVPTKDKERRSKTDRVDCRKLARSLRSGEIDSIYVPSRPKVEDRSLIRTRHSMVRKQTRCKNQIKSILQFYGIQVPEELANGHWSKRFVSWIEAIRMERASGNFALKVHLEELNNMRKIIADITRSIRSLANSEEYRQNVHLLKTLPGISTLTAMTLLTELYEISRFKNLDKLCSYIGLIPDTDSSGETERKTGITKRRNAQLRGILIESSWVAVRKDPALLMTFNTLCKKMPKTNAIVRIARKLLNRIRYVLKTQQEYVLAVVQ

SEQ ID NO: 319750 - protein, 392 aa, unidentified
MRFVGIDIGAETHLVAAVDEAERVLMPPTKIGEDADGYQRLLERLGEPHDTLVAMEATGHYWTNLFAALAARGFAVALLNPLRTARFASEDLARTKTDAIDALGIARFAAQTRPAATRLPDRVTEELRQLVRLRDRLVQDFGDRVRQLHRLVDLGFPEFTRYVRRLDSELAAAILHDYPTAAAFASVSVRRLAALRYDGRHRVGDELAQALLTAAARSVGRHHGEAYRIQVRYACEDLDLLRRRLRTLEGDIERMLDRHDVGSLLTTIDGVGPPTAARLVAELGDPASFRSAGALAAYVGVVPSRRQSGKRSATRAGLTSIGHAALRASLWMPVVTAVRKNPWLRAYYRRLRARGKLPKVALIAAMRKLLVAVYTVAKQRRPFVPALAEARP

SEQ ID NO: 319751 - protein, 411 aa, unidentified
MNQITSVGIDVSKGFSMVAIRQPGGVIVEPPFRVNHTSRELNALVQRLHILPGEIRIVMEHTSCYWRPIGLTLVNAGFFVSIVNAMLIHDFHDNSIRRVKTDRADALKIANYALTFWTELKPYSPEDELRQLLKMQCRLYERTLSTSVTLRNGLISLLDQTFPEINRVFHPLVKQSNGHVKWVDFVKTYWHKEKIATMTESRFMDSYRRWCKREHYQYYASHARRIYGLAKETVASMPRSESTRQLICQAVDSLNAVYEVLHQLRKEMLRLAQQLPEFEAVMSLPGAGNITGPKLMGEIGDVRRFTSKRALVAFAGVDAMPYQSGIMDSHSRRMSKRGSPLLRKTLFQMCSICLQLSRVDDPVYLFMDRKRREGKQFYVYMVAGAAKLLRMYYARAKSAFDADNKENKITA

SEQ ID NO: 319752 - protein, 343 aa, unidentified
MYFIGLDVHKKTISYCVKDAAGRVHQEGKIGSTRRELDGWIRTMPQPRTIAMEATIFTGWIYDHLLPHAERVKVAHPLMLRAIAASKKKNDRIDASKIADCVRCDFLPECHMASTEIRDRRRTLRYRNLVIKQMVQMKNRVSGLLMETGVSYNKQRLHKVGYFAELMTTHEEVHESIRPLLKLSRDMISRSQKLDYALVSSLQRDPVLKERLRRLRTVPGVGPITALTWALEIGDYTRFSSIKQAISYCGLCGDEKNSAEKVMRMPISKQRNKHIQRVLIEAAKLAPSESHELALTHARELERGNRNRATLAVARKMVCYMLAVERRQQDFVPAEEFSRTIAV

SEQ ID NO: 319753 - protein, 402 aa, unidentified
MSISVALEPAAAVVAVDVGKTAAAILVTDAQRRRLFGPVEFPMTGSGVARVIKKTQAVLPLGVTRVGVEAAGHYHRPLTGSRVWPGWQVVELNPAHVTEQRRVMGRRRVKTDAIDLEAITELLLAGRGVPVTEPPPAVVQLSAWAGHRRRRVATRTATKNQLLTQLDRCFPGLTLALPDVLGTRVGRLVAEQFSDPHRLAALGSIRFIRFASARGLQVNRTVADRLVAAARDALPCGDAVIARQVLGADLALLTSLDQQVHAAEASMAALLPDTPFASLLTVPGWGVVRAGNYGAAVGDPCRWPSHRQLYRASGLSPVHYESAGRRRDGAISREGSVHLRRALIDLGIGLWLQDPAARGYGQTLRARGKNGGIIACAMAHRANKIAYAMVRDQTSYQPHRWA

SEQ ID NO: 319754 - protein, 400 aa, unidentified
MISVGIDVSKGKSTVCILKPYGEIVSKPFNITHTQKDLSELSSMLFRLNDEVKIVMEATGIYHLPVLTYLQEKGFFVSVINPYLMKSYRNESLRKAKTDKIDSRIIANYGIDHWFKMKEFQTSGEIYEELKLLGQQYRHYMKLHLLSLAKLTHLLDLTMPGIKNLLASWNETNRKDKRSDFVERFWHYDVITSMSEQEFTEEYILWAKEKKYVPSQEKAKVMYTLAQESIPTLPSETSSVKILVTEAVRVLKEVDATLGLILSRMQEIAKTLPEYSVVREMGGVGNTLAPKLIAEIGDVRRFRNGKALVAFAGIDPPPYESGQFVGCNRKISKRGSASLRKVGYETMRSLKMRSRPEDPVYRYVVKKESEGKSKKSAKIAGLNKFLRIYYARVTEIYKNI

SEQ ID NO: 319755 - protein, 391 aa, unidentified
MYVIGIDVSKYKHDCIIMHEDTGEIVRDVFSFDNSRAGFVQFISVLKTLNPTLKKKIGFEATGHYQDNLKMFLADNGLDFMELNALLVHKFKSSLTLRGVKTDKTDARLIANYLCKVEFKPYPKIVYNILSLRSLCKRHFTLIKDRTKYLISITNFLDRTFPELKPFLNDNIKSKTAMFLLRKYGIPSKIANMNIQSYELLRKLSRGKFSVAKFYKLKDLAKHTIGFTYPTDTFEIKSLLNVYDSINEEILKVETKISTLMSKINSKIPTIKGIGLVSAATIIAEIEDINRFVSPDKLLAYAGLDPRIYESGTMSSKGKMNKKGSVNLRRVLMNCAESVIMFNPAFYAYYRKKRDEGKAHRVAISHLARKLVRIIFKLETTQVDFDPSLVK

SEQ ID NO: 319756 - protein, 365 aa, unidentified
MSEIITYVGIDAHKRDLHVAMLVGAAAAPVTWVVENEPKAIARLHRKLEREAPGRALVCYEAGPCGYALQRQLTKGQVTCVVIAPALMPRKPGDRVKTDRRDARRLAELLRAGLLTEVRPPTPAEEAVRDLCRARDDARDDVQRARHRLGKLLLRRGLHWAGKNWTKAHRQWITTIQWEHAAERAVVDDYLLAIAQVERRLEDLDAQLAATAQTEAYREPVAWLRCFRGIDTLTAMLILAELHDFRRFPSPRALMAYLGLVPSEDSSGDRHRRGRITKTGNTLVRRVLIEASWHYQHRPGVGAGLAARRKGQPPRVIAIADKAQHRLCRRFRRLAAKDKPAGKVVVAVARELTGFIWAALQPEAA

SEQ ID NO: 319757 - protein, 457 aa, unidentified
MHPQVPTPDVLHYTNCNPCRSQNNPMNMPPLPARQAPAPPAQTSEFAACIGLDWGDQTHAWALHDTASDSVQTSTLINSPEALHGWLQELAQRWAGRPVALAIETSKGPLIHVFVAYPWLTVYPIHPATTARFRSAFKPSGAKDDTPDALLLLELARWHRAKLRPLQGQDELTRKLSALVQLRRDLVDRRTQVVLQLETLLKSYYPQALDLVGKNLTTGLALDFLERWPDPLALKTTRRDTFQRFYYTHAIRSETLLQERLDRIARSMALTTDETVLEPARLHLQALRQLLRVFNNNIDGLENQIHRAFKEHPEAYLFGNLPGAGPALRPRLLVAFGQDRSCYEHCSSLQKYAGVAPVIEKSGGQSWTHWRWHAPKFLRQTFVEWAGQSVIYCAWAKTYYERMKAKGKRHHVILRALAFKWIRILWKCWQTRTAYNEACYLKALAQRKSPNAPKLRS

SEQ ID NO: 319758 - protein, 338 aa, unidentified
MNIVFLGIDLAKNVFQLCGLNQAGKPVYTKRTDRKELLQTLANIPACLIGIEASTGAFYWQREFEKLGHKVKVISPQYVKPFVRGQKNDGNDAQAIAVALMQPTMQLVPPKSPEQQDIQALHRARQRIVNHRTATVCQIRGLLLDRGIPIGSAVSRARRAIPLILEDAENGLSSRMRRTIAELYDLFNDLERRIHFFDKEIETVFRQSEACQRIAKVKGIGPKTATAVVAAIGKGTEFKNGRHFAAWLGLVPRQHSSGDRQVLMNMTKKGDKHLRTLFIHGARAVVRVATNNNDGHMNQWVNQLKERRGFNKTTVAVANKNARIIWSMLRNETEYQVV

SEQ ID NO: 319759 - protein, 401 aa, unidentified
MICVGIDVAKDKHDFVILNSDGQALSNVFTVTNNAEGFSKLLQVIRKCSRPNEKIKVGLEDTGHYSCNILRFLLDEGLTTYLINPLYTSFYRRCLTLRKTKTDRIDARTIAAMLLSDVSLTPYTVTAYHNEELKSLTRYRFDKDRERAKLKVSVARLFCILFPELEKIVSTLHSVSVYALLSELPSAGQIAQAHLTHLKSILKNASKGRCRQEIAEKIRNAAKCSFGSDIPAKSLELQHTIRLIRELDAEIEDIEKAIHGIMEKMQYPITTIPGMGLHMGAMILAEIGDFSRFSSPDKILAYAGMSPSTHQSGKVSLSGSYSHMEKRDSRYLRYALYNAVKYVCLCSPCFAAYLAKKLAEGKHYNVALSHAVKKLVRLIYAMEKSGQPYMQHNTITIFLLI

SEQ ID NO: 319760 - protein, 392 aa, unidentified
MVVSVGIDVAKDKHDCFIQSSEGEVLADVFTISNNMDGFHTLLEKIQACTAPQDKIKVGLEATGHYSYNLLGFLLDNGLTTYVLNPLRTNLYRKSLSLRKTKTDRVDARTIAAMLLSDAGLKPYTDIAYHNEELKSLTRYRFDKVKERAKLKTSVSRLVCILFPELEKLVPTLHTASVYTLLEKFPGAKQVAEAHLTSLKSLLEKASNGRYKRDMALSIRDAARNSIGSRMPAKSLELQHTIRLIRELDAEIHEIEAEIETMMDEIQSPITTIPGIGYRMGAMILAEAGDLSRFASPDKLLAYAGMSPSTYQSGQLKNCYPHMEKRGSRYLRYALFNATKYVCLWDPTFSAYLAKKRAEGKHYNVAISHAAKKLVRLIFAMEKSRQPYRSAA

SEQ ID NO: 319761 - protein, 325 aa, unidentified
MDKPVLGIDISKSSFDVFLIHGEKQQHRSFPNRAEGFEQLSNWLRECCIQQVHACMEATGRYGDELAAYLFEQGHQVSVVNPARIRDYARSKLTRNKTDKLDAKIIAFFCLNEKPALWQPPAPEIRELQALVRHLEALLGMRTQENNRLKSGVPSKQVCSMLEEHLAFLDQQIIQIKKRIKQHIDQNPGLKRDHDLLITIPGIGDTTANKLLSENIQAFSDGRALAAFAGLSPRLCFSGTSVHHRGRLSRVGRSGLRKSLYFPAISAMRFNPQIIIFCERLAEKHKPNMVVIAAAMRKLLCLSLGVLKSGIPFDTGYTQSACVRP

SEQ ID NO: 319762 - protein, 361 aa, unidentified
MAATMTWVGLDVHARSTHAAAIDRESGELVRSRFGPGSESVVTWLAQLPQPIHACYEAGPTGYALYRAATRAGLRIDVVAPSKTPRAPGDRVKTDRKDAELLVRLLLAGSLVPVAVPPPAFEAVRDLARAREQVRADLARLRHRVSKLLLRHGRVYERDGGTWTRAHQRWLAAQRFEHPATELAYLDALAAIDGLLARRQALDERLSRLAHDPALWPTVARLRCFRGIETSTALVLHLEVGDWTRFRRPAQLAAWLGLVPALHQSGESETRGGITKTGSGYARRLLVEAAWHYLREPRIGVALHERQQGQPDHVLQIAWRAQHRLYRLHRSLRGRGKPGNVAVVAVARELACFLWAAAVAE

SEQ ID NO: 319763 - protein, 415 aa, unidentified
MALKIVYKICCGIDVHKTFVVACIASTNSKGVTTYESHRFSTYTKGLRDLLQWLLARNCKDVCMESTGKYWIPVYNILENDCTIVLAHPKYVKAIRGKKTDKKDAKWIADLFKHDLVAGSFMPPADIRQLRDLMRYRFKLTCFRSSEKNRLQNCLTVSNIQLGNVVSDTFGKSAQAILDKLLENPADTSFDLEPLVYKSLKKKLPELRDAIDGFITPEQAGKLKVIKGHFEDLESRKAELEELILALAAPYQQELAILQTAPGISSVFTAIGIISEIGTNMEAFPSAKHLCSWAGLTPTNNESAGKKKSVRVSKAGCYIKPLLVQCANAVVTSKKHPEIRNRYLRLKKRRGHKKAIIAIARMLLTALYHMLKNGENYNAELYRKSNLPPVDREITVEQAIIIARNQGYKIKSATA

SEQ ID NO: 319764 - protein, 323 aa, unidentified
MNKYNEIFGVDISKDVFDVYGSKSGHNQFKNAASGFMFFLKNLPKKSLVVMEATGYYHYSLAQFLFKQGVLVSVVNPLSVKRFIQMKLAKVKTDKSDAKAICEYGQINQVPLYSALSDVQSECLQLFRLLDSYLKKRTMTKNKLHGEDVLGIPSKHVYRSLKRNRKHLDTEIASIETKLLSLVKQDQQTQLTLLKSIPGLGVKTALFLIVITDGFTKFETAAQLCSYVGITPTIRQSGSSVRGRSSISKVGNKKLRNLLFLCSFSACKHNKSCREIYERIVNKGKSKKLALIAVANKLLKQAFAIAKSGNPYDETFVSVLMAK

SEQ ID NO: 319765 - protein, 376 aa, unidentified
MTMIEGGVIAGVDAHTDTHDAAVLDDCGRLLATRTFAADPAGYRQMQAWAEGFGAVAAIGVELTGSYAAGLVRHLRANDLRVLEVNQPHAHTRRRRGKSDPIDAEMAARHVLAESAVVIAKDTTGIVESIRLLRVAREGAVKARSAALNALTGVIVSAPDELREQITVRKTTRARANLCARLRPDQARLHEPIQAAKVALRSLGRRVSDLDTEIAALDGQLKLLVAKAAPRTTGLMAVSTGHAGQLLVTAGQNIERLTSEASFAALCGASPIPASTGRTDRHRLNYGGDRDANRALHMIAVCRLRYCQRTRAYAERRTAEGKTKTEIIRCLKRYIAREAYHALNADLHPRIPPPTRRPIISITCDARPIGQTVRSA

SEQ ID NO: 319766 - protein, 345 aa, unidentified
MHIASIGIDLGKTSFHLVALGERNKILLRKKFSRKQLLVYTANLPASLIGLEACAGAHFVGAALRAQGHQVRLIPAQFVKPYRKSNKNDFLDAEAIAEAVTKQNMRFVPIKTQEQLDWQAIHRVRDRLVQRRTALINEIRGFLLERGITFAAQPIHLRKNLPSVIEDAEQNLSPRLRWLLDRMWQEWKQLETEIEAITSEIERISNEDARCRQLRQIPGFGPLVSTATVAAIGNGAAFRRGRDFAAWVGVVPRQYSTGGKQKLYGISKRGNVYLRRMLIHGARAVLFRVKYDTGGFGQWVRRLAQRAPRNKVVVAIANKLARIAWAVLASGRDYRHQPLPQPAAA

SEQ ID NO: 319767 - protein, 390 aa, unidentified
MTIIGIDIAKYHHQALILSENGEVIVNSFSFENNHQGFQEFHHVLLSLDPTHKIKIGFEATGHYGNNLKNFLMNLGFDFMEIHPVLINQFSKAYTLRKTKTDKLDVKVICSYLTSVDYQPYLTESYHINQLKSLTRFRDPLVKQRSLQLQSMTNIMDHVFPEFKPFFKNSLKSATAIYLLTSFETPSRIARLNLNSYNKMKSQLHRTISYARFCELKTLAKNTIGIEDPLRTFQLQACLKLYLEYHHQIQETEQLIEYEFSKVTSHIQTIPGIGLISAAGIYSEIGGISRFNHPDKLVSFCGLDVSYYQSGEAEFTGRMVKRGSSYLRQYLMNVATTSLIHNPHLYEYYSKKRREDKHHRVALSHVAKKLIRTIFKLETDQIDFDIEKVR

SEQ ID NO: 319768 - protein, 367 aa, unidentified
MYEITRGAIVRVGADLAKRVIQVHAVDAAGRRVVSRALKREQFMAWCAQLPAGCIVAMEACSSAHHWARKLRALGLDARLIAAHFVSPYRMEGKSGKNDMTDAAAICEAASRPSMRFVPVKTCEQQGVMSLHRVREGLKEDRTGCINQIRGVLAEFGLVFNKSPKVLRAALADVIEDASNELSALARRVLQRTFDHWRELDEHMRWCDSQVGQHVRSSPAARRAAKITGIGELGASALTAGVGDFHQFKGGHQLGAWLGLVPKQNSSGGKTSLGRITKRGDDYLRTLLIQGAKAAVMSAGKRDDPISRWLVQLVARVGWQKACVAMANKNARILWAVMTRDAGFDAHHVSVKPQATRSSPTTTACTV

SEQ ID NO: 319769 - protein, 339 aa, unidentified
MKYIPVGVDIAKHLIQVHFINEHSGEVVDKQVRSKDFLAFFGNREPCLIGMEACGGSQHWARELEKLGHKVRLMQARFVKAFVMGNKNDVMDARAIWMAVQQPGKDIAVKTEEQQSVLVLHRSRRQLVKFRTAQINALHGTLLEFGETIHKGRAVMDRELPAALERLKTKLPPYLITVLEDQHNRLSELDILIDGLEKQLISVARQSETCKRLMDIPGVGPLIATAAVATMGEASAFKSGREFAAYVGLVPKQTGSGGKVRLLGISKRGDTYLRTLFIHGARAASLVAKEPGPWITELKKRRPASVAIVAMANKLARTVWALAAYERKYDKNHVSIRPY

SEQ ID NO: 319770 - protein, 310 aa, unidentified
MEAIFVGIDVSKDRLDVHVRPGGEAFVVPRDSKGLEELIDRLTRLVPQLIAIEATGGFETIAAAAIAGAALPLAIINPAQVRHFAQAVGKRAKTDPLDAEVIARFAEAVKPEPRPLPDEQARLLAELVARRRQIIEMIVAERQREKRAENTHVRKGILRHIRVLEKELPDIDDDIGTLVRSSPAWREREDLLVTFPGVSNKLARTFLAEVPELGRLNRREIASLAGLAPFTRQSGRWRGKSMIGGGRAPLRTALYMAALSAIRCNPILKLFYQRLLSAGKPKMVALIAVARKTLTILNAMLRERKQWQPA

SEQ ID NO: 319771 - protein, 347 aa, unidentified
MKITTIGIDLAKNVFQVHGVDERGKALLRRRLKRGEVVAFFARLSPCLIGMEACGSAHHWARELAALGHTVRLMAPQFVKPYVKANKSDARDAEAICEAVGRPSMRFVPVKTLEQQSVLSLHRARQGFVAARTAQANQIRGLLSEFGIVIAKGIRQIEGRVPEILEAAENGLCGMNRALFQRLFEHFRQLDRQVKQLEEQIHAWHREQVDSRRLAGIPGIGPLTASALTAAIGNAREFANARQLAAWLGLVPRQASSGGKDRLLGISKRGDVYLRTLLIHGARSVLRRTRACPDPAQGWLAQLVHRRKPNVAAVALANKNARIVWALLAHGREYQPGYVGAPLPTAA

SEQ ID NO: 319772 - protein, 376 aa, unidentified
MQGSTFIGLDVHKATISVAVAMGQRGGEVRHLGTVPHRPDHVRKLVEKLAASGGRLCFCYEAGPCGYGLHRQLVEMGHDCIVVAPSLIPVKTGDRVKTDRRDAVMLAKLHRAGELTPVWVPDAAHEAMRDLVRARATAMRVLGKARQHLQGFLLRHGRIYPGKKGWTVAYRRWLTTVRFHHPAQQIVFQDYVDAVSDAEARVERLTTQVADLLPTWSLAPIVEAVQAMRGVAFIVAVTVVAEVGDFQRFHNPRQLMAYLGLTPSEYSSGATVRRGGITKAGSGLARRALIEGAWSYRMQARVSRKLHDRLEGLPKAVRDIAWKGQLRMCQRYRHLVAAGKAKVIVTTAIAREMVGFIWAIARAVTSQHEVGVVTQS

SEQ ID NO: 319773 - protein, 322 aa, unidentified
MKTKRVCVGIDVSKKELSIALWPEQRVWTCPQEPAALARLADELRRLRPRLVVLEATGGLELEILDLLVKRGVPVHRCEPSRPRHYAKALGIYAKTDRVDALLLARFAASGELKPQTFASDQIRELEALVTRRRQIVKMITMEKNHLAAGRDRAGMASVRVVLRMLIGQRRRLEAKIVTALERAPELKAKAELLRTAPGVGAVTAAALLGGIPELGKLNRWQAGALTGTAPMKNRSGQWIGRERIFGGRMDVRSTLFMSALVATRHDPWMKAIYTRHLTHGLAKKQALTACMRQLVIRLNVMLRNGQAWRPEPLRQTAPAAA

SEQ ID NO: 319774 - protein, 350 aa, unidentified
MLHAGLDLSRKRLDVCLLSEHGELVEEFSAPPDADGLRGLVRRVAQHGVPVRGVIESITGARFVHDTLEHLGWEVLIADAQKVKGLAPLACKTDKIDARVLAVLSERDLVPAIWLPDPRIRSEREQARFRLHLVKHKSMLKHRIHSTMLSFGHPCPVSDLFGAAGRELLERLQIPDPWRQSVDASLQLIDDLECQIDQINRDLKASGAEHPYVPLLLTVPGIGWVLAFTIASEIGDIARFSSAKKLCGYTGLCPRVRQSGESDRRGPLSKQGPKYLRWAMLESTMHALRHPVYAERYQRNKKRLGRQRGARVAQIDIARKLTEAIWHMLMNNQPFAPTPASGGATFRLAA

SEQ ID NO: 319775 - protein, 363 aa, unidentified
MNEITTVGVDLAKEVIAVCAADRSGRTVFTRVFRRDTFAAWAVQLPPCVFGMEACGAAHHWARWLASHGHTPRLMAAEFVQPFRKSRAAKNDRNDAEAVLTAVRQPNMRFVTVKSVEQQACLSWHRLRQGFSEERTALINRVRGLLGEFGVWQGRSAALLTRALPALEHDEGLPLMVRRLVGEARQHLARLDEAIAGCEVEIKNHIQGNVAAQRITAITGVGALTAAAMLATVADARDFQNGRQFAAWQGLVPRQDSSGGKARLGRITKRGDSYLRGLLTQGARSALQAALTKEPLLRTRLQNWIVQLHARVGYHKTLVAIANKHARMIWAILAKGEAYDPDAWRRWTRTAPARASAMSGVTP

SEQ ID NO: 319776 - protein, 402 aa, unidentified
MTYDYVIGMDVGKYFHHACVLDIDGTQVLSKRINQNEKSLRTLFSTFSAHDHKVLVVVDQPNNIGRLTVAVAQDIGIDVRYLPGLTMRQLSRIHAGNAKTDIRDAYIIAHAAKNLPESLRSVDRVEEAFLQLKVLNGIDEDLARSYTRLINQIRSALVGCYPQFEQALRGQIIHRKWVLHLLARYGGPTKVKRLGKAKAAAFARRYKARNPEPVLDAIFAAISEQTVTIAGAHYAEMGIAMSAKDALLKLEHRKQIEQEVIELINDIPHTQILLSMPGIGPKTAAQILMTAGDMSDFPSAGHLASYAGLSPRTNQSGTSIMSNSLNRAGNKKLKNALWQSSFASIRFHERSRQFYERKRRDGKRHNAAVVALARRRLNVLYAMMRNHERYRDPALQQEGIAA

SEQ ID NO: 319777 - protein, 402 aa, unidentified
MRVIGMDVHRAFAQVATLEDGKVVNEQRLDLVQDKVVAFGRTLRPDDEVVLEATGNTAAIERLLRPSVSRVVIANPRMVRAIAYARVKTDKIDAITLARLQASGFLPEVWAADEDTVRRRRQAAERMGLLDETVRLKSRIHAILHANLIPQYKGALFGPTGRRWLAAASLPEHERLILNRLVDELQHTTEQLAVLDRDLASLALADERAVRLMTIPGVGPIVATMVLSAIGDISRFKSPQKLASYFGLTPKIRQSGESPARHGRISKQGNASVRKMMVEAAWSAQSAPGPLRSFFARISAKRGAAAAIVATARKLTVLIWHVLANGQEYAFARPAFQAMKLRKVALKAGAPREYGKAGPGRDYWIKEIRHREMEYVKRAEDAYARMVEAWRQVPPKGRKKTC

SEQ ID NO: 319778 - protein, 398 aa, unidentified
MTESSDCESVQVFIGIDVGKDTHHAVAINRSGKRLFDKALPNDENKLRSLISDLKQHGQILLVVDQPATIGALPVAVARSEGVLVGYLPGLAMRRIADLHAGEAKTDARDAAIIAEAARTLPHALRTLKLADEQIAELSMLCGFDDDLAAQTTQASNRIRGLLTQIHPALERVLGPRLEHPAVLDLLQRYPSPEKLASLGEKKLAAQLCKLAPRLGKRLAADIAQALAEQTVVVPGTNAAAVVLPRLALQLITLRKQRDEVALEVEQRVLAHPLYPVLTSMPGVGVRTAARLLTEVACRAFASAAHLAAYAGLAPVTRRAGSSIRGEHPSRRGNKALKRALFLSAFAALRDPLSRAYYTRKMSQGKRHNQALIALARRRCDVLFAMMRDGTFYTPQGS

SEQ ID NO: 319779 - protein, 465 aa, unidentified
MKQDRGRHSKRRGGCPSLLKRVNPNAAGIDCGSAEHYVAVPADRDPNPVCAFKTFTADLHRLADWLVACGVTSVAMEATGVYWIPIYEILEARGLEVVLVNARHVKNVPGRKSDVMDCEWLRELHSVGLLRGSFRPAAAVAALRAYLRHRETLVQSAAMHIQRMQKALVQMNLQLHVVISDITGVTGIKILRDIVAGRTDPLALARHRDHRCSASEAEIAAALTGHYRPEHVFVLKQNLELFDAYQRQLIACDTAVEAYLKTLATQSAATAAPVPAPRSKRKPRDNEPRFEIRTPLHQLTGADLTQIDGIAPYSALRLLSEIGTDMSRWPTEHYFTSWLTLAPNNKVSGGRLLSSRTQPSANRAAAILRLAAMNLGRTQTALGAFYRRLAFRIGKAKAITATARKLAILVYRTLKGTLMYQDPGAAAYDTHQRARVLRRLRHRADNLGFALVNRQTGELLEGVVS

SEQ ID NO: 319780 - protein, 455 aa, unidentified
MSKSNRTDTPLRAARAQISDPEITVHATYRSAIGIDVHLNLLVCCHQKQVEGHCEQSESWDFNTDRASIDAFAAWCRECNPDIILMESTGSLWQSPYDALERAGFTSERLALINARDAKAAAGRKTDRKDASRLASLARTGNFRKSFVPEKDFRLQRVISRDLQKNRNDISRTSNRFGKSLNLTGCRPTTVFSDIRGGKAASCILMAKLRDDPHLFEVIKQNSRRLRASPEQIMQALNFEIEPMMKEQILALREKINQLEEYDRSTFERLRQLQAPYEKDIQLLITITGIQERSARMIYAELCANLKEHFPTSEQFASWLGICPGDNTSAGKQKSGKCPKGNKHLRRTLIEAARGLVVGGTAALKEKFQVLKMRRGYRRAMVAFAHLLARIIYSVLTHQKGFEPYQSTAFRDTLIERAKNGVKQLLKLKGTKYVIADGLVVETKTGAILGAVVSS

SEQ ID NO: 319781 - protein, 355 aa, unidentified
MDTIYIGVDFHARQQTLCYLTTKDGEVRTHELKHQDKTEVRAFYAQFSGRVVIGLEASGYSPWFEQLLEELGHEVWLGDATEIRRRARWRQKNDRRDAELILDLMAHDEFPRLYRPCPQSREILRMLRYRQKLIKIRTMGKNSLQALALQSGLAKRSLLFTKAGQQELRTATMSPVMQWQRDQWFQLLEPLNERLLETMLWLKLQTKDDERISRLRTHPGIGLLTSLCVVHTLWPVTRFRNQRKVAAYAGFDPMERSSAERKHFLGISKAGSRVLRYLLVEAAHTAVKKDDDLKRFYQRLVERRGRPKAKVAAARKLLIRSYIMLRDEIDYAEFRRRAVAARLARQSSRPLVPEA

SEQ ID NO: 319782 - protein, 320 aa, unidentified
MSDHSAIGIDADSKTLVVARHGTKGSARIANSASAIGKWLSSVPAKSRIGVEATNRHHELVVRAAQKAGHAVFLLNPRDIKHYAKGVACRGKTDSGDAQVIARYIAREADNLHEHIARSPEQERLHVLLQQRDSLVRNKATLHLSLGTDAAESAIFGPIFSGLKGAIAMLDREIQHVCRSGEQRDLYRRIMTIPGVGPTVAAFVTHHITRWPLANSDAWVACTGLDPRPNESGARIGRRRLSKRGNAGLRQILYMAAMGLTRCKGGKPLYTAIRDRGHSSTASFNILARKLARIAWGVFKSGRDFDPSMLKVGQACFQQT

SEQ ID NO: 319783 - protein, 354 aa, unidentified
MPRHRSDLEAVATIGVDIGKNTFHLVGLGRNGAIVVPQKLSRRQVEARLANMPPCLIGMEACVGAHHLSRQLKALGHDARLMPARYVRPYSKGQKNDFRDAEAIAEAVLRPTMKFVAIKTIEQLDLQALHRVRERLVCQRTSVINQIRAFLLERGIAVRPGLRALRTEIPIILAMTDKLSPRMIHVIEALCADWRHLDARIETVSEEIKTLSEQDDGAKRLMTVPGIGPIISTATVAAIGKGDMFSKGRDFGAWLGLVPRQMSTGGRTILGPISKRGNRHLRMLFVQAARAVLLRPQSWVKHGLKSWIEAAARRLNRFKLAIALANKIARIVWGVLHGGRNFEVRTLRPALQAA

SEQ ID NO: 319784 - protein, 396 aa, unidentified
MKTYILLKSEPVQSQIITAPAGAKPLVLFVGLDVHNDSIAVSLAPSDSTEVRRYGIIGGEHDDVLKLVKKLEAAHPGATLKFCYEAGPRGFALSRCLRSHGRDCILVCPTKVPRKPGERVKTDRRDADHLARLHRAGELTGIYVPEPEDEAMRDLIRARFQVGQQQHRARQQLKMYLLRHNRRYGGKSSWTPAHLRYLARIKMPFPVQQIVFQEMLEVISDATARLERYDQEIERAVPGWRWEPAVRALMSLRGMALLHAATLVAELGDFNRFEHPGQLMGYLGLVPSEHTTGGDRQQGGITKMGNGPARRALVEAAWQYRAPARLSPHLKKRQEGLPKTITDIAWEAQRRLHHRYTHLTRVGKKKSQVAVTAVARELAGFVWAIARQVKPRAAKP

SEQ ID NO: 319785 - protein, 347 aa, unidentified
MTQAQIYIYGIDLGKNWFHLVAMDRMGHVLTKQKLTRSQLKQFISTTPPCRVAFEACPGSQYWGRLFQQAGFEPKIIPAQFVKPYLKSNKNDFNDATAIAEAGSRGTMRCVPLKSHEQLALQATHRVRQRFIVERTATVNQMRALLLEYGLTVPVGRKVFERSLPTILEDAENGLPDFIRALVLRLRERWQQLDIQIDDMSLMLGQASSASGLCQKISTVPGIGPIVSTALIAAIGNGSQFKKARDLSAWLGLVPRQYSTGGKSSLGGISKRGNSYLRQMVIQGAKALKIHMKRDKSSLGEWVARLEAGHHHHVVLIALANKIMRICWKVLTSGRDYQPYPNASAAV

SEQ ID NO: 319786 - protein, 393 aa, unidentified
MIYVGIDVAKQKHDCFITNSDGEVLRDVFTISNSMDGFRELHESILSFNPNPSPNNIRIGLEATGHYSNNLIDFLVDKNLNPVVFNPLSTNLYRKGHSLRKTKTDKSDARFITMMLITEDIKPYSQVSYHIRELKSLTRHRFRLVQERSRFKISYTRILDIVFPELHSIVWSITQKSMLLTLLELPNTKAISQCHLTRLVTLLEKNSHGRYHRDKAVDIRELARNSIGSNSPALAFELQQIIRSILFLQEQIDLLDKQIKEVMFEIDSPIMSIPGISFTLGAIILAEIGDVLRFDTPAKLLAFAGLEPSTHQSGNFTSSHATMVKRGSKYLRWAVINAVRLVCMRDIAFKAYRDKKLQEGKHYFVASSHTARKLMRVIFYMLKNNQSFIAQAA

SEQ ID NO: 319787 - protein, 357 aa, unidentified
MAIAPSFKVIGGIDTHKDTHAVAAISATGEFLGAAQFNTNPSGYRNLLAWLREFGVVLRIGIEGTGSYGAGLTRYLRSEGVDLVEVIRPKREWRRRRGKSDPSDAEAAARAALSGEAKGTPKGQDGQIEAIRLLRLTRRSALLGRTQAFNQLQAVIETAPVELREQLRHLRHSDLLARARRFRVAVIDTPTAAARMALRSLSVRWLALNDEVAALDAHIGQLVRQAAPQLCAVWGIGPDTAASLLVAAGDNPERLISEASFAALCGVSPVDASSGRQHRHRLNRGGNRDANRALWVVAMVRMAKHARTQAYVQRRTQQGLRKKEIIRCLKRYIAREIYEILSGGIVPTGPRNEGTTS

SEQ ID NO: 319788 - protein, 343 aa, unidentified
MKDVSTIGLDLAKRVFQVHGVDGSGQVVMTRRLGRGQVLTFFAKLKPCLVGLEACATAHYWAREIGKLGHTVRLMPPAYVKAYVRRGKNDATDAAAICEAVTRPHMRFVAVKSPGQQSQLMVHRTRELLIGQRTSLVNALRAHLAEFGVVAAQGILGLKELLAIVADETDARVPRLARQVLAELAAQIRSCEAAIAGLDHKLKALHKASEPSRRLATIPGIAAVGAGAIVATVGDAAQFKSGREFAAWIGLVPRQNSSGGKQRLGAISKQGDRYLRRLLISGAMAVVRHARTRPDKHPWLMRLLARRPRKVVAVALANKMARMAWALLARGGTYRAPALAAAG

SEQ ID NO: 319789 - protein, 365 aa, unidentified
MEKLLKQAIGIDCAKDDFVASYGKYFYNTEVQVTLTQTIKNNEQGFAKLEQLIKKTAVKEIPINIVMEATGVYHEKLACFLYDKGYPVSVVLPQRAKAFMKTLKTKTVTDKESSKGLTVMGLEKKLDLWQKPDEVFNQLKQLSREREQLQKLLTQTKNQLHAEKAGAWPNKKSITRMTLLQKMYNKQIDEIEKDIESIIKANPGLQKRINHVTTIPGVGLITAVTTIAETNGFNLIRNKRQLVSFTGYDVVEKQSGISVRGKAHISHRGNRHIRRAMHMPALTSIRHTEHSKELFKRLVSKHGIKMKGVVAVQRKMLVLIYTLWKKQEDYDETKYSVKKIEQPQKTALTELDHVRSIESVDSLQR

SEQ ID NO: 319790 - protein, 402 aa, unidentified
MSERENKKACIGIDVSKGSSHFQAFYSAGVPASEPTYIEHTKRGFSHLYSIVSDLEKELGYAPYVIFENTGTYSKPVEVFCQRNNLRHYVIAPLLSAKMRKSEIRPIKTDKIDCATIANVYYLKRLRVAGKDNELYSELKYLCSYYNYITGIMVSMKVKYREYLDLVYPRIDTLFGVYTESFLKLMTRYPNPHKLNRKSKKDLASFFHKSDYCGLRKAKRLATLVKGYFKETEIPVLENDILITLFSKHLKDLIKVMNENQEILDQIILLGMKTKEYPYLISIPGIQKNTAARIAAEIQGIERFESASKLCAYAGIDPTVHASGKYDGQHLSITKKGNKRLRSLLYLVVAGTSKSKAPNNPVRDFVQKKKSDGLAPKAAIIAGCTKLTRIIFAVCSNETYFV

SEQ ID NO: 319791 - protein, 419 aa, unidentified
MNHRRLVGIDLGIASAHTVRVIDGEGKTVAKRKAWPAVESLTEVEEAALAGCPPGTRLEVVVEPTGPAWLPIAVFFARRGHVVHRVSSAKAADLRRFFSRHTKTNGIDADTLARLPLADPDGLQPLELPSAERAALDRRVRAADRLTRAAACHKVRIKDLVRQVMPMSPLTGDLGTADLAVLERWADPRQLVKVTHTRLTATIAKASNNHQGPERATEWLAAARAALDLYADDPAVAFSDLAAEVATEIRLLRAYQRELAAHAAERERCYRWVDPGALARSLPGLAEIGGPTVVAVMGDPARFHHGKQFRSFTGLVPKASETGDSDRKGQAMSKAGSSLLRTTFIRAAEILGGPQALADAISVPIATLESWFLGEAIPPLEHFHRAVEILLKNGATVRPPPSSQGTARLSADPSGSSSD

SEQ ID NO: 319792 - protein, 432 aa, unidentified
MKARENKKRKRAIQGLPVLQPYAAGADIGDTRHDIAINDGHGGHIVRTFQTFTADVQEAVNWLKEEGITTVAMESTGVYFLTFYLMLEEAGIEAYLVNARHVKNVTGRKKDETDAMWIQRLHTCGLLKNCFQPDNDFRTLRTYVRQRKGLISRSSDEVRRMQKALEEMNIKIHIVISDILGKTGMEIIKAILSGNHNPVELSKLRDPRIKASQEDIIKSLQGLWKDEYLFTLEQAYNTYWFYQQQIKECDIKINEQLTKQVAKANQGDITLAQPEIKKKRKAKKNQFDLPIAPVLKALTGVDLCKIPSISEVSALEFIAETGIDTKKWKGMNPFSAWLNVVPNTKITGGKIISSRMMKKKNRAGQTLRMAASSLWSNKSPLGDYYRRMSFRYGGKGAALATAHKLARIIYTMLDTKQEFNVEMLMESQQKFR

SEQ ID NO: 319793 - protein, 368 aa, unidentified
MDRKSSKLYVGMDVHKESIDIAVADEGGEVRHHGQIGGEMNALWRAVRKLESLGRQLVFVYEAGPCGFGIYRGLTARGHACWVVAPSNTPRRVRDRIKTDRRDSLKLAGLARAGELTPIYVPDVRDEAMRDLVRTREDAVMMQRQARQRLAALLLRNDVRYAGKTAWTAAHRRWIADVKLPQSAQRLAFEEYVQAVEEASARVQRLSQCIEQELAHWCWRPVVGALQACRGIQLIHAVRIVAELGDLSRFSHPRQLMAYLGLIPSEDSSGEHRQQGAITKAGNSSARRALVEAAWAYQYTAKVSALIARRQADVPKAALDIAWKAQVRLCARFRRLAARGVNRNKIVVAIARELAGFVWAIAQQVKPI

SEQ ID NO: 319794 - protein, 336 aa, unidentified
MKNLKLFIGIDVSKKTLDVALTTNGDKANMTYTKVSNDNLGFSKMVQWISRQTIMTTDNWFFGLEHTGVYIIRLCQFFEQQGMAYTIESPLRLKKSLGIKRTKNDKADAKDIAHYIHLRRNDLKISTLPDECLMRLQVLYAQRRLLVKQKVSLSNSTKERSHFINEQYAQTLMEDSLEIIELIQQKIKLTEDRMKQVIQNDDTLKKQFELITSVKGIGLINAVLFLIQTRKFTAFTNPRKYATHAGTAPFGQQSGTTLKKQPKVSHMANKHLKAMLTQAAKNAIQYDKELKRYYHRKLEQGKNKYSVINAVKNKLIHRVFAVVKRGTPYVELATFA

SEQ ID NO: 319795 - protein, 393 aa, unidentified
MHKDTIFCGVFDGKHHQAVKEFSTLTSSITSLGEYLKSEAIEDVAMESTGIYWIPIWNILEDMGFNLTLVNPYLIKQMPGRKSDVKDAQWIAALLHKGLVRGSLIPCKEIRELRTYSRKYIRLQQRLTSILQEMERNLEMCGIRITSFVSNISGKSVMKVIHALVEGENDPEVLAGYIHGRIVNRHKRETIVESLRGHTTPQHLFQLELSLEEYELLCGQRDRCEEEMSRLCHLHYPKELALLQTIPGISLLSAMIVIAETGADMKAFENSGKFAGWTGLRPRNDESAGKFKSTATTKGNRYLRAILVQVAWAASRTKGSFFKEKFSRLCLRKNRKKALIAIARKMAVLIWNVLYYKEEYNPQKLIVYEPGKVQAKMDYHQKEFKRLENLLKN

SEQ ID NO: 319796 - protein, 354 aa, unidentified
MNSVRYIGMDVHRDTISVAVLDESGRLTMQSVLATRAGAVLDFIHGMRGTLHVTFEEGTHSAWLYDVLVRRVEKLVVCNPRKNALLKSGSKSDAIDARKLAELLRAGMLSAVYHGETSALEVQQIARSYSQLTEDTTRVMARLKAVFRGQAVSCAGKKLYGKRHRDQYLAQVSGGLRRRAEHLYQELDALQPLRHAVRRELLVECRKHAAAQWLQSVPFLGPIRAALLIGRVQTPHRFRTKRQFWTYCGLGLETRDSGEYRMVNGQVQRRRKPALIRGLNWNHNHEMKNLFKSTATTASVHEGVWREFYLGLLDKGMRPEMARLTLARKIAAITLKIWKKGERFDAEHLKLQAA

SEQ ID NO: 319797 - protein, 341 aa, unidentified
MSESALIGIDLGKHTFHLHGQDKSGREVFRKKCSRAQMMQFFGNSPSCVVVMEACAGSHHVARQLAAMGHTAKLISPQFVKPFVKGNKNDFVDAEAICEAASRPSMRFVTPKTESQQALSVLHRMRESLVHDRTKTANQMHGFLLEFGISLPKGLAIMKRLASVLAEHELPVRLTVLLQRLHDHFAYLDEQIKVLDKELAGQLADDDLGSRLLSMPCVGPITASLLAVEMGDGKQYRCSRDFAASVGLVPRQYSTGGKANLLGISKRGDKHLRQLLVQCSRVYMQNLEHQKGALADWVRSLLSRRHSNVVACALANKLARIAWAIAAHHTQYEAGPDALSA

SEQ ID NO: 319798 - protein, 418 aa, unidentified
MTHVDLLTRPGGVVVSVHVAPVTSSTIVVAVDVGKTSALFSVSDAARHRLIGPSEFAMTGSGLTAAAARATAVVPPAGRVKVGVEAAGHYHRPVLDHRWPDGWEVLELNPAQVAEQRRVQGRRRVKTDVIDLEAITELVLAGYGRPVSDRDVVIGEVNAWAVHRSRRVATRSATKNQLLGQLDRAFPGLTLALPDVLGTKIGRLVAAEFADPARLAGLGVNRLIRFAATRDLQLRRPLAERLVAAARDALPTRDGVIARQILAADLILLADLDDQIHAAETALESLLPRSPYATLTSVPGWAVVRVSNYAAALGDPQRWPGPRQIYRASGLSPMQYESAHKRRDGRISREGSVALRRALIDLGIGLWLNEPAAKNYAKGLKARGKHGGVVACALAHRANRIAHALVRDHATYEPTRWA

SEQ ID NO: 319799 - protein, 391 aa, unidentified
MDQTQDLGVAAVLVAIELSKATWLLAIHEPVTGKVSRRRVGGGEADTLIATIEQIRHNAEARLGAAVEIECVFEAGYDGFWLQRRLVQSGIACRVMDPASLKVDRRARRVKTDRVDAECLLRALQAWRRGDRHACSFVRIPSIEEEDARRPHRELARLVKERVAHANRIKGLLALHGVRTYQPLRRDRREALAVLQTSCGGPLPAQCRAEIERELSRLELVLQHIEEVEQTMAESVSMASSESKGVPARSEPATSDAVTMLEKLTCVGRETAVVLAREVLCRDFRDRRSLAAFAGLTPCPYSSGRVRHEQGISKAGNAIVRARLIQLAWRWVRFQSTSDVTAWFLARTTGNSKRSRRITIVAVARKLLIALWRYATTGLVPAGARIRAAQT

SEQ ID NO: 319800 - protein, 391 aa, unidentified
MIYIGIDVAKDKHDCFITNSDSEVLFKAFTIFNNLDGFNDLYQKIESVMDDVTKVKVGLEATGHYSYNLLGYLIDKGLPTYVINPLHTNLYRKSLSLRQTKTDKVDARTIASMLMSDVNLKSYSDTSYHNEELKSLTRYRFDKVKERAKLKTSVSRLVCILFPELEKLVPTLHMASVYALLSKFPSAKHVATAHLTRLTNLLSESSKGRYCKDTAITFRDAARASIGSNMPAKSLELKHTIKLIQELDSEIDEIENEIKIIMDGINSPILSIPGINYRMGAMIIAEICDFNRFDSPDKILAYAGFSPSTYQSGQLDGAYAHMEKRGSRYLRYALYNATKYVCHWDPTFAAYLAKKRAEGKHYNVAISHAVKKLVRVIYHLEKTKQQYIKAT

SEQ ID NO: 319801 - protein, 517 aa, unidentified
MDLVYKRCAGMDVHKKTIHVCIRIGRGKKLEVLTRVFGTFTADLEQLREFLRTNKVRRVIIESTGVYWMPVRNVLERSDWKFDLVLVNPQHVRALQGEKTDDKDCRRLAEFGQHDLLRGSFLPPVEIRDLRDLTRRRSQMQSDRNRVINRIGRLLETANFKLGSVASNIVGKTGWLILNAIANGETDAKRLAEQAQGSLQLKMAELAEALRGYSREPFRWLLSQLIEDLSRLDSKLNEIDLRLREQMKPYEDLIGRLCTIPGVKEITAWTLIAELGTDMSKFPTASHAASWAGLCPGNCESAGKRQTGRTRKGDRYLRRMLIQNGWAVAHKKDCFLTALFYRIAARRGSKRAAMAVAHRVLVIAYYIIRDGSVYAELGGDHYDQKNPERTARRLTERLERIGYEVILTKANVAALETTNKPIRNGTTRWIMSSPKIARTRLRIPGPVATPDVCGKCAAKKIPCIHDPSERRPRPTLSGGKPKPGRPCKCAERGLVCKHQIDSEIQPAKISAPETSST

SEQ ID NO: 319802 - protein, 427 aa, unidentified
MTKVQHTADARVLVGIDISKHRHEVLIAAPGKRRRRRLTITNTVDDIDRLIALLGDYNSPVQIGFEATGNYHRALMYRLGAAGFDLKLVSSIAMARTREALHNSWDKNDPKDAQVILHMLQIGATQIFLDPLRAGTNDIQELSKTHEIVSRAKTELWHRIQGHYLPLYFPEATRFHRSSRSDWFLAFLEMFPSPHLIAAMDKEAFIAAAWQVVGRKVSKTALISDIYETARCSVGLPVAEDSDALRMFRMVLAEGRSLIRQRNAIEDRAVELLGDHPDYRLLTSVPGIGPINALTILAEAGDLRRFPHHRQFLKFCGMDLATVQSGMFRGQSRISKYGNARLRRTLWMAGQTAVLQRTNSFRDKFERYIAQDRHNPHLRRKAYTAVAAKMARTIHAVIKSGAPYRPFFEGVSPGGRTPLCRAVEAVR

SEQ ID NO: 319803 - protein, 320 aa, unidentified
MENQTLYHSALGIDVCAERLDLCFLPTGKTGSTENTSIGAAQLVEQLKQSPVDIIVIEATGGLQRLVATTLAASGFTVAVINPRQARDFAKAAGRLAKTDQLDAEILAWFGLRMQPEPRALPDAQAQALADALARRGQLVEMRAAEKNRLHRANATMRKNIQIHIQWLTKQIDKLDIDIDAALRRSPVWAEKVRLLEAVKGVGPQTLRQLLLELPELGTLNRKQIAALVGVAPLNRDSGTHRGKRMIWGGRKHVRNQLYMTALVAARSNPPLKAFYVRLKATGKAHKVALVAVMRKLLTMLNAMLRDRAEWNPLFTEKSA

SEQ ID NO: 319804 - protein, 377 aa, unidentified
MGDEPMNNTIFVGLDVHKETIAVAVADGRRGGEVLQLGNFLNRPDHIKKLVERLARGDRILSFCYEAGPCGYGLYRQLVALGHECLVAAPSLIPVKAGDRVKTDRRDAVMLAKLHRAGELTAVWVPDDAHEAMRDLIRARATAVRVLGKARQHLQGFLLRHGRIYAGKKGWTQAYRRWLTTVRFEHAAQQVVLQDYIHAVADAEARVERLLRQIEDLAQVWSQAPLVAALQAMRGVAFIVAVTLVAEVGDFSRFANPRQLMAYLGLVPSEHSSGRAVHRAGITKAGNALARRALIEGAWTYRMQPRVSRKLHDRVEALPQVVRDIAWKAQVRLCSRYRRLAAAGKPKVVVTTAIAREMLGFVWAIARSVQIAPLHTV

SEQ ID NO: 319805 - protein, 359 aa, unidentified
MRGQRNEISFRGQKIYIGIDVHLKSWSVTVLSETSVLKKFSQHPSPEALHGFLARSYPGAEYHSVYEAGFCGFWIHERLTALGIDNIVVNPGDVPTKSSEKLRKSDAVDSSKLARSLRANELKGIYTPDSASLEMRSLIRLKNSITKDTTRQKNRIKSQLRYLGIGIPQEFLEPFSNWSKRFIAWLKEVETLTPSGRQALDIQIRHLEELRRQKLEMTRALRTLAKTDRFREPLRLIMTVPGFGQATGMAFLSEICDIARFRNAEQLAAYIGMIPMCHSSGEKDGTGDITVRKHAIMRCNLIEAAWVAVRQDPAMNLFFTEQCKRMPKSKAIVKVARKLVNRLYFVLKHQTDYVNSVMS

SEQ ID NO: 319806 - protein, 359 aa, unidentified
MRTITIGVDLAKQVFSVCSVDAAGRVQDRRELRREAFRQWLPSVPAGTIVAMEACSGAHHWARRCQDSGLQPRLMAAQFVAPFRKSRTAKNDRNDAEAIATAARQGNMRFVPVKTVDQQVRLSWHRVREGYKAEALATSNRLRGLFAEFGVVIAQSDAALRRALADLDALALPCALVELLRDVDAHWQKLQARIADADRRINAHAKADDACTRLRAIIGVGPITADAVVATIGSAQDFKNGRQFAAWLGLVPMQHSSGGRSRLGRISCRGDGYLRTLLIQGARSSLQRAKAVPWEKASPEQRWIQDLGRRLPFGKVLVAIANKHARQLWAMLARGEHYDADAWLKHPMVQRPARRSAAR

SEQ ID NO: 319807 - protein, 391 aa, unidentified
MEARTVNNLPPAASHDDDAVRCVLAVELSKKSWIVAVNTPLSDKISRLTLKPCDGKELLDLCERIRTRVARETKQRVEIVSCYEAGYDGFWLHRLLEAHGIRNYVIDPASLQVDRRARRAKTDRVDAERLLRSLMAYLRGEPKVWSVVRVPSVAEEDDRRLHRERGRLINERIQHVNRIKGLLAIHGIYDYQPLRRDRMQPLDRLRTADGRTLPPRLKAEILRELQRLELVIGMIKAIEAERDAIASAKAQTEHTSAKKIQGLAKIKCIGPEFASTLVGEVFYRSFDNRKQLASYVGLTPAHFQSGATCHDQGISKAGNAKARTVMIELAWLWLRHQPDSPLSVWFRGRVGKLKGRIRRITIVAVARKLLIALWRYLETGLVPDAAALKLR

SEQ ID NO: 319808 - protein, 285 aa, unidentified
MREDSSVKLVVGLDVSDKWTQVCVVSMDSGEVIEEGRVRTRKVAVRERFAGRPRMRIVLEVGTHSPWMSRLLEELGHEVIVANAAKVGLIHGNSRKRDRTDAENLARLGRVDPKLLHRIRHRSQSAQEDLAVIRSRDQLVRCRSQLISHVRGSVKAMGSRLPSCSTECFARRAAAEIPQGLKPALDPILAQIATLTQAIRESDRRIEQLAKQYGVTELLVPIRGVGALTALTYVLVLEDPTRFATSRAVGAYLGYVRRLDESGESSPPLRISKEGLGGDPEDHPG

SEQ ID NO: 319809 - protein, 437 aa, unidentified
MDGRAKRRKSQKQQQKTMNDSTQWQPHRAFGALDWASEKHSVIVVNPAGKVIEDFEIEHSALGWKKFREKLQPYGSIPFAIETSQGVAVEQLVEAGMLVYPLNPKSAQAYRQRKAPSGVKDDRLDAWSFADALRVDGQDWKALRPEEPLIKELRLLCRDEVTLIEQRTAFVNQLRHALAEYYPAALEAFKEWTSVSAWMFLQRFPSPELLAQAGKGQWQKFLHSRRLWGSDQGPRRMEIFAHATEFAGTAPTLKAKSLLALSLVQMLFTIEKQLALYRQQIEALFARHPDHDLFGSLPGAGPKIAPRLLSEIGDDRQRFGGDPQNLQCLAGSAPVTKRSGKQRKYWHVHHRWACDKHLRHAIHLFAEQSLSRCAWAEIYYQHHRQKNQSHANALRRLSHRWLKIIYKMWIDRTPYNAELHHRNQLQHGSWVFQLQQS

SEQ ID NO: 319810 - protein, 480 aa, unidentified
MNIKARRTKKQVNVENQAINLLSKEELNKKIEVVEKELRSYTWRELETNGKFAKNDKLSFITDDMLIVGCDIGSETHYIRAIDVRGRELSSGAFEFSNTSEGFANARAWVLALAAKNDKKQIVLGLEPTGHYWFALAAWMISNGISVVQVNPYAVKQSKEIEDNSQLKDDRKDPKLIANLVKDGNYGMPYLPEKVYADMRRLSMFRDQLTEDRIRNINRLHRELKIYFPEYMDAFGKIDGAFTLEVLKVSAIPTDITVLGAEGMKNIWHNAKLRGRGYSRANEIVSYAEKSVGLTDGTDAGREAVKWYAEQILRLDEQLSEIESALHEKCREIPYAENILAINGVGENILAGILAEMGDISRFDDVKEIQKLSGMGLVACSSGKHKGQTKISHRGRKRLRYWLFQAAKSAVSHADEFKQLHEYYTTRSNNPLKKMQSLVVIACKILRVIYTILKTGTTYDPQKLLKDIKHPAASQAPMAA

SEQ ID NO: 319811 - protein, 413 aa, unidentified
MRKMVKRAAGLDVHKDQVTACVRIAGKGGEEGREEIHEFGTTTRELLALRDWLAAHRVELVVMEATGVYWKPVYYVLEEAFETWVVNARHFRNVPGRKTDVSDAQWLAELAQHGLVRPSFVPPKAIRELRDLTRYRKAQIQERTREVQRLDKILQDAGIKLSSVASRVLGVSGRAMLDALVKGTTDPEALADLAKGQLRKKIPALKEALEGRFSRRHAVVVGQILAHIDYLDEAISNLSAEIEEVVDPFAEKVELLRTIPGVDEKTAVSLLAEIGPDMTRFPTHRHLASWAGMCPGNDESAGKRRSGRTRKGSKWLRDALVQAAHAADRTKGTYLGAQYARLRGRRGAKRAAVAVGHSILISSYHVLSRGVPYQELGEDWLLTRDREAQTRRLIKQLTRLGHIVTLQPAEVPA

SEQ ID NO: 319812 - protein, 409 aa, unidentified
MLLFLGDDWAEESHDVELQDQTGRVLARAKLPEGIAGMARLHAMVGGHVGDDEDVTVVVGIETERGPWVQALIAAGYQVYAINPLQVARYRERHGVSGAKSDSADAHVICSMVRTDPHQLRPVAGDSPLAEAVKVVTRAHKALIWERSRHTLRLRQALLDFFPAALAAFDDLTAPDALELLAAAPDPASAAALSVEKITDALRRARRRNRAVRAEQIAIVLRGDQLGQPPVVATAYAATVRAQAAILTVLNTQIKAIEEQVEAHFGKHPDANVYLSQPGLGVVLGARVLAEFGDDKQRYADAKARKNYAGTSPITRQSGKRKVVLARWVHNDRLIDALGLQAFCALSVSPGARAYYDQLRARGVGHRAALRQLGNRLVGILHGCLKTGTVYDEAKAWNHHHEKDLAIAA

SEQ ID NO: 319813 - protein, 420 aa, unidentified
MKYALASRTDTPADGVIAGIDWASADHAVCIVDAAGEVVSRFSIEHTAAGLWHLVQRLASAGVTEVAIERGDGPVVDALLAAGVTVVVITPRQIKNLRSRYGSAGNKDDRFDAYVLADVLRTDQARLRPLTPASPATATLRQACRARKDLVRHRVAVGNQLRAHLLSVFPAAAGLFCRIDSAISLAFLARFDCQDRADWLSQKRLAAWLKAASYSGRTDPADLYQRLRSAPRGATGDQGTASAQVTRALAAVLASLNTQIKALEAGIAAQLADHADGHIFTSLPRSGTVRAARLLAEIGDCRAKFPDPQALICLAGAAPSTRQSGKHKAVTFRWAASKQLRDAVCDFADGSRHASPWAARIYNDAIARGKDHPHAVRILARAWLYVIWHCWHNGVGYDPARHRGLQCLLAAQDTAADQAA

SEQ ID NO: 319814 - protein, 315 aa, unidentified
MKEECVKFIGVDVAKDHLELYSPGLKLPARLNNRPKTIAAWLRRLLVSGPAIHVVCESTGGCENALLRACWQAKVPVSQLNPARVRAFARSQGLLAKTDAIDARVLADYGRIFTPPPTPEPSAQQIRLGELVARREDLKTQRAAESNRLSYLEDPTMRRMIKEHLRWLDRHIAQIEKLMEKTISEDPVLRHKRQVLVATRGAGNLIAATLLADLPELGSLPRQAAPALAGVAPFNRDSGTLRGKRSIRGGRANARRALYMAALVGSRRNPILCDFYQRLLSKGKAPKVALTALMRKLVVHLNSQLKIHSLQPAQC

SEQ ID NO: 319815 - protein, 342 aa, unidentified
MDQVSIIGIDLAKRVFQAHGSAPDGSVVFRKKLSRAQLLLFLAAQPRCTVAMEACATAHGWGREIGELGHEVRLIPPIYVKPFVKRQKNDAADAEAIAEAASRPTMRFVAVKSEDQQARSMIFRTRDLLVRQRTQLINALRGHLAEHGVVAPQGTAHVKRLADVIGDETAVLPATVREIGRLYLEQIGLLTGRIEELEKKLRTEAGQAEATRRLQTMPGVGPITAVAIESFAPPMETFRRGRDFAAWVGLVPRQNSTGGKQRLGRTAKMGQRDIRRLLIIGAMAVVNSAARHGAPEGSWLERMLAKKPKMLVAIALTNKMARGVWAMMTKQEDYRYPAAVAA

SEQ ID NO: 319816 - protein, 319 aa, unidentified
MNLVPVGVDIAKLKFDVAVLLPNQKYKTKKFANTPAGCREFLNWLARFGHCHVCMEATGCYSTELATLLADNGCCVSLENPARIHAFANTELTRNKTDKSDAALIARYCALYQPAPWHPAPLSERQLTALVRHLRNLEEMRQMEMNRLEAADEVIVPSLNEHVTMLDELIEETRNKINRHIDDNPDLKRDRELLKSIPGIGDMLSVSLLAFAGNLRRFSNSKALVAYAGLNPRRCESGMWKGKSRLSKVGHAELRSALYMPAVVAGRCNKVVKNLMERLAARGKTGKERVCAGMRKLLQLAYGVVKSGHEFNAEIPLAG

SEQ ID NO: 319817 - protein, 395 aa, unidentified
MKHILSFDIAKGKSVYCFIDEKRNVIRDATLIEHKKDEFDDLFNFVSKYKNLTVIMESTSIYHLPVENYFRSKVVETIVMNPKLVKQYRDTLNKSKTDKLDCFKIARCYLGTIDNLYQKQDEYFMFNPLARQYWSLVEGQTRLKNRYKQLIEIVFPEFNLLFNDLYSDLALNFIHDFPHPVLFVNRRNDYLMNYLKTKNETTQAFRFKNKVLKMKELAKNSLCYVSVDSLQVQNLIQVIEMIQYHKQEIEKIKNQLINNLKNTKLFKIINSIPGFGDFSTALFLAEVGDITRFEERKQFISFIGIDSITSQSGIASYHGPISKSGSKFARTILFNVVTTLIQICAHTDKENPIYLFFRKKQSEGKHHYKCIIACENKLCKIIYKMCTSDCTYINK

SEQ ID NO: 319818 - protein, 350 aa, unidentified
MVVVGADVHKRTHTFVAVDEVGRKLAEKVVGATSAGHAEAVMWVRERFGAQVVWAIEDCRHLSARLERDLSTAGQQVVRVPPKLMAQVRASARTRGKSDPIDALAVARGFLREPNLPIASHDEVSRELKLLVDRREDLVGQRTSTINRLLWRVHELDPERAPKPRSLDLAKHRTLLGDWLATQAGLVAELARDELADVTRLTEAINALAKRIGERVREVAPTLLAMPGCGELSAAKLLGETAGVGRFKSEAAFARHAGVAPIPVWSGNTAGRVRMTRSGNRQLNAALHRIAITQARLDGLGQTYYRKRLAAGASNPEALRCLKRRLARVVFGHLHTDHQNRIQPCQPAAA

SEQ ID NO: 319819 - protein, 408 aa, unidentified
MKRYYLGVDWGNQTHQLYAGDQSGGEIKEMTVQQTPEEMAELGHWLDQSRAKGIELWAAIEKPHGRIVDFLLDHGVVVYPVNPKALDRARDRFRMSQSKSDCFDAYVLAEFLRTDQAHLRALEPNSAQAQELKIITRDHHRLVRQKTRLLNQIQVTLKEYYPRPLEVFGDLESNIALDFLKQYPTPQALSKLSRRQWNRFSQREHHLGEVHCQELWEKLSKPQLAMPEHVIRAKAQLLNVLLVQLEGLMEAVESYQQQVQRFFASMPAAKLVETLPGAKGGTIVPLLWAELGDARSRWQSFRHLQAEAGVVPVTRSSGKSCLVQFRFACNKSMRYAAYWFAFVSLNRSEWANAYYRDQRAKGHRHHQALRALGAKWLKIIFVMWRDHKPYDENYHLANITRQRMRQAA

SEQ ID NO: 319820 - protein, 341 aa, unidentified
MAQYVGLDVSMEETSVCILDTAGSTVWEGSVVSEPSAIVRMLHRRAPYAERVGLETGPTSTWLWHELRNAGVAAICIDARHAQAALSMRVNKTDRNDAAGLAQLMRMGWYREVQVKQLAAHGNGALLASRALLVRQRCEIENQIRGLLKNVGLRSQATKGKAFEQSVRALAVRSAILKDVILPLLAAWSALRLQIAVLTRNVNERAKNSSVCRRLMTMPGVGPLTSLAFSATIDDPARFKHSASVGAYVGLTPRRYASGEIDRMGRISRCGDALMRSYLYEAANIMLVRTRGTNPLKSWAVKLAKRAGHKKARVALARKMAVVLHRMWLDGTDFGAHRQSA

SEQ ID NO: 319821 - protein, 337 aa, unidentified
MNGMTDCNWVGIDVSKAKLDVARLDDKGKLKSHVFNNDAIGFAALLNWLSQRGCTQPDTQICTEATGPYGEALCTFLCDEGWTVSVVNPARIKGFAQSGMVRNKTDKADAALLARFAQTMHPEPWTPPPPEVRELRALVDRLQALKDMHQQEANRLEAALNQPSMVALIEGHMQWLKDSIKELENQIDDHIDRHPKLREDASLITSIPGLGNTTAAKVLAYLGDVNRFKNAKALAAFVGVTPKIKESGSSVRGRSVIARSGHAAVRHALYMPAMVALRYNPLMKVFAERLKSDGLAPKAVIAACMHKLIRQIYGVLKSRNAFDATILGNRLDFQDGI

SEQ ID NO: 319822 - protein, 451 aa, unidentified
MLRVKHANQILVCLASAPETRCQPVPDRLADRLWRWFVMEVVWQRVAGIDVGKRDAKVCVRVQGRGSTPTSTTVTTWSTTMPQILRLRDHLVESRVELVVVESTSDYWRPFFYVLSEAVPVMLVKASDVKGMPGRKSDVSDAEWLADLAAHGLVRASFVPAEPMRQLRDLTRARVGLFEERTRELQRLEKELEDACIKLSAVVSDLAGASARSMLEALIGHESDPATLANLAKGRMRPKIDQLTEALTGRFNNHHRFMVGFRLSRIDRTTAEIAELDRRIDEVMEREDLVIARELLVEIPGIGRHGAEELLAEIGADMSVFPTPQALACWAGVAPGSHESAGKRHHVRTRAGNRYVKRSLGIAAKSAARTKACFLGARFKRICARRGYNKALVAVEHSMITAIWHMLSTGETYRELGGDYYQRHAPQHALKRKIRDLEAAGYRVTAVAATA

SEQ ID NO: 319823 - protein, 341 aa, unidentified
MNYLGIDLSKRDFHAVVMDQAGVILHSHKYQNTKEDVLAVLAHCPDKPSIVIEATQNWMWLVNLLKQQEIDEVTLAHPLKTKAIASARIKNDELDATTLAHLLRSNLVPPSYIATPEEQEDRELSRARCQLVKQQTWCKNQVHSLLTKENLIPSVSDLFGKKGRQWLESVTPDLPQAKQLVLNQWLMLLTDTRARVKDLEAAIHQKCLGNQQVELLQTIPGFGEITSFVIVAEIGGNIRRFPTGKQFASYLGLVPSLYQSGKTKRLGSITKLGNPYARWVLVQTAQRLVRNDEFYRLAYAALALRRGKKKAIVAIARKLAVLSWRILVDQRPYQAQAPNTG

SEQ ID NO: 319824 - protein, 387 aa, unidentified
MTDSFDVRKSNRPFDQNHTLVAVIELSQTSWLVGGIVPGLKRSPLKKLKPDREALFRLLVRWRDEAVKAGQEIMRIAVACECGRDGFWLVRWLRTQGIEAYVIHAASVAVSREHRRAKTDRLDTELLKRAFLGWLRGEVRHCSMVTIPSFEEEDAKRPSRERETLVKERTRVINAMKSDLTRLGIRDFNPKLRTAREKLETLRTPEGALIPPNTLAKLLRDMERLRLVVAQIKAIETARLKRLESSPQEKPHAMVILLARVVGVGIETADMLVREVLSRELRDRRAVARYAGLTGSPDESGSKRREKGLSKAGNARVRRGMIQLAWRLLRFQKDSALVQWYQARTADGRGGTRKTMIVAPARKLLIALWRLVTFGEVPEGLILRPAL

SEQ ID NO: 319825 - protein, 397 aa, unidentified
MIAVGIDISKAKSTVAVIDSDGTVLASPFTMAHTQPEMEAFVSYLKGLGEPTTILMEYTGHYHYPVLKKLQDEGFPVCIVNPYQMKKYGDVEIHKAKTDKKDALRIAAYALEKSYKLVPYSSMEQKYEDLKFLSRQYNQRISYVAKLKVQLIALLDQTMPGITRILPLNSRNPEKCALLLFIRRFKSFDEIQRIGKARFLASYDVLAKKTSERSASSKGLSIYELAVDSITTRGEDPYIWLSQNQCVDLLSATQNAADEIISQMRNIAETIPEYKVLRAMRGVGDRLGPIILAEIGDIRRFHSGKALNSYAGNDAPPYQSGQFESRNRHISKRGSSALRKACYEVMQALKLTKPQDDPVYLFMLKKEQEGKPFNVAKMAGVNKFLRIYYARAMELYK

SEQ ID NO: 319826 - protein, 322 aa, unidentified
MKCIGIDVSKLNFTVAYPTENAYRLATFINDSKGIKKFINSINDCDYHCVMEATGTYSSLLVYLIQEAQIPVSVVNPKQINHFAKMMLCVTKTDNLDAKLIAMYGEKMKPAIYKMSSSTIQFLHQKRTLLRQFRKQLRMLLNVQESFQALPKIDTQADKALKKSITFLEKQIHELHLDMVAVTRAEFSTQLDHLTSIKGIGNGVATALIMATGGFTYFDSAKKFAKYIGLCPSYQQSGTSIKTKGIITRHGDPELRSLLYISSWSAIRFNSSCKELYERLKAKGKPSKVALMAVINKLLRQAFAVIISKSNYVDNYVIGKIK

SEQ ID NO: 319827 - protein, 353 aa, unidentified
MRTYYVGMDVHRASIVIVVLNGAGKIVMQLVVETGAERVRGFLKQLRGKVYVTFEEGTQANWLHDVVRPLVTEVVVCDPRHNKLMHSGNKNDRVDAQKLAELLRLGSLKAVYHGDNGVRTLKELVRNYDCLVSDTTRVMLRLKAIYRGRAIPCGGHDIYRSDRRAQWLEKLREPGARQRAGFLYAQLAALKPLRHEAKLVMVKEARGQTAYPWLMSVPQLGSVSVAQLMAVVGTPHRFRTKRQFWPYVGLAVVTRTSADHEVVNGVLRRSRRPIATRGLNRNHNHLLKKVFKSAATSACHSGPFKAGYDERVKQGMDPSLARLTIARQLAATTLAIWKRGERFDPERMKQQAA

SEQ ID NO: 319828 - protein, 338 aa, unidentified
MEVYGGIDLHSNNQVVALVDAAGELVYRRRLGNELEKVVTELAPYRERLVGVAVESTFNWYWLVDGLQAAGYRVHLANPAAMRQYSGLKHGDDDSDAEWLAQMLRLGLLREGYIYPKAERGVRDLLRQRGRLVQQRTAQVLSIQNQVQRSTGRRLSGTSIKAASAEEAAGWVAEREVALSLTANLEVMRCVDQQVTVLERAVLRQVKERPEYAGMQTVPGVGKILALTVVLETGDIRRFAAVGNYSSYCRCVGTQRISNGKRKGKGNAKNGNRYLAWAFIEAAHFAVRYCETIRRFQQRKEARTHPLVALKTVAHKLARASYYILRDGVSFELAKSFG

SEQ ID NO: 319829 - protein, 350 aa, unidentified
MNATTYGLDIAKSVFQLYWVDPESGEVFNRRFSRDQLIRFLGKREPGRVALEACSGAHWWARKIVSLGHQAILLHAKYVRPFVQTNKTDAADARAIWTAAQQPGMRTVAIKSEAQQAILSLHRIRSGLVDTRTRQVNQIRGLLGEYGLHFRYGRKALMNELRARIAEIEQTVPPLIWRALQRQMAHLRQLETDIAEAERENLNWMKANPDAQTLATINGIGPLTATATVGVMGSPDAFHSGRTFAASLGLVPAQTGSGGKIRLGHISKRGDPYLRKLFIHGARIVVTRSKQRPEWVEELLKRRPVNVVIVALANKMARTAWALLAHGQTYDRQHVSVRPCASGPQSVESI

SEQ ID NO: 319830 - protein, 343 aa, unidentified
MGEVSTIGLDIAKSVFQIHGVDAAGAVVVRKRITRAKLLEFFAALPACLVGIEACPSAHYWSRRLQALGHTVRLMPPSYVKAYLKRGKNDANDAAAICEAVTRPSMRFVATKSEQQQSGLMLHRSRQLLVCQRTMLSNAIRGHMAELGIISAKGRNGTAELLKIIANEQDDRIPAAARFSLDVLARQYAAVREEIVAIEKRIHAWHRSSEESRRLEEIPGVGPIVATALVAEVGDWKTFSSGRSLAAWIGLVPRQHSTGGKERLGGISKQGNRHLRWLLVAGAMAVIRYARQHGTKRPWLARLMDRRPIKVAAVALANKIARMAWAMMVRGERFKEPRLLPAA

SEQ ID NO: 319831 - protein, 420 aa, unidentified
MESQVSFNQVVSRGCGIDVHKKMLVATISGEGLNTETREFGTVTRSLTELKDWLLENRVTHVVMESTGVYWKPVYHVLEPSGLTVWIVNARHVKNVPGHKTDKQDSRWLCKLLLAGLLKPSYIPPREQRELRDLTRYRSKLVQDISSNKNRIIRILEDCNVKLSSVLSDTSGVTATRLIDKLCQGKEVTMGDIEEVYHKKIEATKEELFEACNGYITDHHIYLLGTIRGDNHHLESLIRDLDEKIKHALAPYENALERLREIPGLNRKSVEDLIAEIGLDMDVFPNENHLSSWVGVSPGNNESAGKKKNGRTTHGNKQAKSILSQSAWAASRTKGTFYHARYHRLAARRGKKRAIVAVAHSILKSVYHVLKDEVPYDELGADYLNSRVEARRKRYLKAELEKMGYCVELVPHNPVSPSGS

SEQ ID NO: 319832 - protein, 448 aa, unidentified
MSERQVIDDPLHERVHERVAAVDVAKKDGMVCMRLPHPARPGQRRSVVWTVTATLAEVRALAAQLAAERVEKVTLESTSDYWRIWFYVLEAAGLEVQLVSARQARQLSGRPKTDRLDAMWLARLTEMGLLRPSFVPPAQIRALRHYTRARSHLTGDRTRCFQRLEKLLEDALIKVSSVASTLATASAQDMIAAMIAGERNPQTLAALARGRMKARREALVQALDGMFDDHHGQIAGLLLDQIAFCDARIARLTILISEHLASIAAAWGVDADGTAGPDAGASDDAVARPAIARLDEIPGVSAGLAAAIIAETGLDMTRFPTPGHLVSWAGLCPRTIQSGPRTRHGKNQGNAYLRGCLGQAANGAAGTATFLGERYQRIARRRGKAKAQVAVARSILVIIWHLLADRQARYTDLGPGHYETKINKNRKARSHIRQLQALGYTVTITPAA

SEQ ID NO: 319833 - protein, 421 aa, unidentified
MQVLYQRCAAVDVGKDVIAVAVRLPGDGPDGRVTIKRTFKTFYGVLAEAARWMGSLGVTHVAMEATGIYSMPVYHALLEHGNFEKVLVCNAGHVKNVPGRKTDFSDAEWLVHLLECGLLAGSFIPPAEIKAARDVVRYRAKIVQQRVSEIARLGNTLQDAGIKIDSVAWSIATKSGRAMIEALIDGERRGPVLAQLAKGTMRSKIADLSMALEGRFSDHHALMCRLHLDHLDHLETAIARLDARIEQMMEPFQCWRDLLATVPGIGRHAAAAVISEIGVTVQEFFPDDAHLASWTGLCPGNHQSAGKRRSGKPRPGNTHLQTLLVECAWSAVRHDGYLKSLFHRHVMKNGGYRSATAKKKAIVVVAHAMIVIIWHLMVTGKPYHELGAGYFASLQDPERETRRLIAKLQALGHTVTLNPAA

SEQ ID NO: 319834 - protein, 315 aa, unidentified
MTKPNKSKSKIHVGVDVGKWTLDIFIHEKGIHFQVENTAEGIRALLKRLSHYQIRRMVMEATGRYQFLLAEACFNKGIPVSIVQPGAVRGFARGKQLLAKTDKLDAEIIADFAATMEPPVTAAKSKNLILIKDLLARRRQIMNIRTIELNRRHVMGKAMQASCNRILKAMDTEVAWLEKKLDKLIGQQAEWEDKKALLLTVPGIGKTMVYTLLADLPELGDMNNKQAAALVGVAPMNRDSGKMRGKRRIKGGRYSVRTTLYMATLSATSCNPVIKQFYDHLVRQGKHKKVALTACMRKMITMLNAMVRDNKAWAY

SEQ ID NO: 319835 - protein, 355 aa, unidentified
MTSTKYIGMDVHKESISIAVMNSVGKIVMECVIETKASTILQFVDGFRGDLRVTFEEGTWAAWLYDLLKPHVTEVVVCNPRKNALLKDGSKSDRIDARKLAEQLYMNKIKSVYHGEHGLRTLKELARSYLTITKDVTRVMNRLKALYRSWGIPCAGSEVYAPRHRSEWLGKITEAGVRRRAEHSYQQLDVLRLMRQEVRRDLLVESKKHKAWKLLRQIPGIGPIRAALLVALIQTPHRFRTKRQLWTYSGLGLETHDSAQYRVVDGQLNRSKKSVTLRGLNKDHNHDLKDIFKGAATRVSSSRGPLRDFYEALLAKGRKPTMARLTLARKIAAITLIVWKKEVRFDANYLKPQAA

SEQ ID NO: 319836 - protein, 364 aa, unidentified
MNKCFLDTELSSHEGTRHQFNGGKQVIKLGIDVHQDFYTVVMQVDGSNPKPAQRFDKEAFVHWAGKLRSQGGEMHAVYEACGFGFGLQRKLMALGIACRVVCPQKLDERCTRVKTDGLDAKALCLKLDRFVQGNRSALALVRVPTEEEEQLRAIHRQREQLVKARKQLEAQGRSLMVNHGIEPVKNWWKPRTFAALQVPEWMKELLCNTQPILVALQEKIRALTLQLQAAATPAQPRGLGAMSSVIIDREIGNWQRFNNRRQIASYTGLCPGEYSSGKTRLQSCVTKHGNPRLRAALVELAWRLVRFQPNYKPIIKWNRVLRHGALATGAARKKAIVAVARQLAVDLWRIRTGRLSAHQLGLSL

SEQ ID NO: 319837 - protein, 350 aa, unidentified
MNHKEVSMDRFYYIGLDIHKKVIAYCIKALDGSLIDQGKIGADRLALGVWVKGLPGPWIGAMEATLFTGWVYDFLKPHAVALKVAHPAMLQAITVAKKKNDRADAEKIADLLRVNLLPECHMLSEEIRELRRILRYRNHIVRTAVKMQNKMSGLLMEVGVSYSKKRLHGKKYFHELLERVDEIPPSVNELLQLSRSSYEMFRSFQKRLVETLRTDSLISGRVHRLMTIPGVGEITALTWVLEIGDPDRFSSIRKAVSYCGLCSAQRESAGKEQRGPISKKRNKHLQTMLIEAAKVAPHWNEQLAIVHERELKKGNRNRATLAVARRLVAYMLAVDRKGADFKLPSEIRAA

SEQ ID NO: 319838 - protein, 437 aa, unidentified
MKGEPLMTNRLQVGVDFSLKRADFCLLFPDGRPLEPHIAFANSRPGYSLAKRLLLDALDTYSFDGLDLSGEATGYLWLPFFLQLSADPDLAAYDLNLFLLNPRWVKWFKKCFAQDDKTDQKDPFYIAERTRTRRPDAIWSPLDCLPLRFYTRLRFHLIQNLAREKCYFSTFLFLKASAYRRLKTFSDVFGATSRLVLTQQPTLDELAALPVEDLASQLYELSGHHLPDPMDNARKLKRAVQESFSLDQTLALPVQRILDITLDHIRFLEAQVQQVDGWIATELEAYPLIAQLATIPGIGPVFSSGIGAEIGSVKRFLQVPKWDRKRKRFRPRNLRDAEDAVAKIAGLWWPRAGSGDFEAQDRRMAKTGNRYLRYYLVQAANLMRQHIPEYAAYYNRKFKEAVKHHHKRALVLTARKSVGLVVGLLHRDEPYRSREDR

SEQ ID NO: 319839 - protein, 407 aa, unidentified
MEVVIERACGMDVHKDNITACIMTPEGKEIQTFSTKTVFLIQLVDWIKKNNCTHVAMESTSVYWKPIVNLLEAEEIEFLVVNAQHMKAVPGRKTDVKDAEWIAKLLRHGLLKASYIPDRNQRELRELVRYRRSIIEERARQHNRIQKVLEGANIKLGSVVSDVMGVSARDMLNAIAEGEEDPEKLANFARRTMKKKKDELELALKGYINSHQRLMLKTILKHIDFLTEQIEMLDQEVEERVSSYQEDVERLDSIPGIATRMAEQILSEIGTDIKKQFPSAAHMCSWAGLVPGHNESAGKRKSAKTKKGNKYLRSALTEAAHSVRGSKNYLGALYRRTASRKGKKRAGIVVAHAMLRISYYLLTRKEMYVDLGEDYFDKQRQQSIFRHSLRRLESLGYTVTLQEPEAS

SEQ ID NO: 319840 - protein, 324 aa, unidentified
MQGKVLPEPNAMTPVYVGIDVCKEWLDVYVQSPPGHKFRVANDGFGLRRLKRELTGLPVARVIMEATGKYHRAAQRSLHAAGLPVAIVDPLRARLFAKACGWLAKTDAIDARLLALMGEALDPAETSPPTQALEELQELVNARTAATAEKTALLNRRAAAVTTFLRTELRRRLAAVERHIKRLDGEIERRLGPEPGFARRRAILLSIPGIGLTTAAVLIAGLSELGSCTGKQAAMLVGLAPVACDSGERSGHRAIKGGRAAVRNAAYMACLSASQHNPDLTTFAKRLRQAGKPAKLVLVAVMRKMIVLANTLITQDRLWSPVAP

SEQ ID NO: 319841 - protein, 391 aa, unidentified
MIYIGIDVAKDKHDCFITNSDSEVLVKAFTIANNLDGFNDLYQKIESVMDDVTKVKVGLEATGHYSYNLLGYLIDKGLPTYVINPLHTNLYRKSLSLRQTKTDKVDARTIASMLMSDVNLKSYSDTSYHNEELKSLTRYRFDKVKERAKLKTSVSRLVCILFPELEKLVPTLHMASVYALLSKFPSAKHVATAHLTRLTNLLSESSKGRYCKDTAITFRDAARASIGSNMPAKSLELKHTIKLIQELDSEIDEIENEIKIIMDGINSPILSIPGINYRMGAMIIAEICDFNRFDSPDKILAYAGFSPSTYQSGQLDGAYAHMEKRGSRYLRYALYNATKYVCHWDPTFAVYLAKKRAEGKHYNVAISHAVKKLVRVIYHLEKTKQQYIKAS

SEQ ID NO: 319842 - protein, 370 aa, unidentified
MMMTTTTTVTTILAIDLAKARSLFCWHDVVKGTHQIRQVPSTPQAFHDALVSRAVDRVIIEVCDMAGWVKDLCESLQIPLQIANGNTEGWRWRNVKRKTDKDDALKLISLSLTHQLPTVTLPGRPVRQWKSLILYRQKLIERRTRVKNRVHALLVSEGKAMSGGRKAWGEASLAELGRLAKPIADCTMGELWQGQLHLELGALDDLNHAIERLDRKLDELGEADARVIRLQTIPGVGPRLSELVVAVIDDPGRFKNVRQVSAYAGLVPRRYQSGTMDRSGRISKAGCGKLRKLLVEIAWGMLRHNDHGKGVFKRISKGQKTRRKQAAVALARRILGWCWAMLRDQTDWRDPAAAAAAAGAAAPRLPAVMT

SEQ ID NO: 319843 - protein, 464 aa, unidentified
MKKPGQKKQVKARKKRSKKNNLDSLPFINFNAAGIDIGSEEHWVAVPKDRDEEPVRKFDCFTSDLIAMAEWLKKCDIDTVVMESTGVYWIPLFQILETQGFDVKLVNARHVKNVPGRKTDVLDCQWLQQLHTYGLLSGSFRPEDSICVLRSYWRHRENLIRYAAAHIQHMQKALTEMNLHLHKVISNLTGVTGIRIIQAILAGERDPLKLAQMRDPRIKNNAETIAKSLEGDYRQEHLFALKQAFELYCTYQQQIKACEQETEAYLTQFDSKCNPDPTKKYKSSRSKNDPSFDLGIHLYRITGVDFTKIDGLDVLTVFTILTEVGLNPEAFGTEKRFASWLGLCSENRITGGRIISNKTRKVVNRASKAFRMGANSLKNSQSALGGYFRRMRARKGAPKAITATAHKLARIFFHLWKTGDTYQDLGADYYEQKYKERVIENMKKRARKLGFELTLQPLAGLEVS

SEQ ID NO: 319844 - protein, 317 aa, unidentified
MEPVKASMKVAGIDTSKAKLDVAVKGKSEVLQVTNDAAGFAQLGAWLASMEVTRVGIEATGGYERAVTTWLRGLGLEVVVHQPAEVRAFARFKRLRAKTDKIDAALIAAATAQVDTVRCANDPLIVELAERLTAYEQVSELLAQMKTHLEHVTLEDLKAQQQAQIQHTTTWKKALAQDLFSRIKANADLARRFELLQSLPGVAKIVAASLVLRMPELGSLDHGHAASLLGVAPFAKDTGQSNGERHIAGGRARPRRMVYLAAIVAKRIDPAYKAFAGRLLKAGKKPKVTIVAVMRKLIEAANLILKRGTPWVPTQRA

SEQ ID NO: 319845 - protein, 397 aa, unidentified
MYIVGIDIAKRKHEAAVIDGEGAVIIKPFSFTNNCSGYNRLLAMLAKAKLPLDEVSFAMEATGHYWLALFTRLQKEGFRVQVINPVQTNSIRSFYIRQAKTDPRDALLIAEVIRFGHFSESTLHPENIYELRELCRGRHAIVSMQADVKRKVVALLDQVFPEYETAFTNMFGDTSMAILQTCPTPKELSEMPLEELCHLIEVSSHKRFRMAKAQELQALARNSFGFAMAGDVFSTMIRLYAKHLDFLKQQVREMDRKIAEIMDTLDTPITTITGIGPTLGAYILSEIGDISRFSSAAKLAAYAGIDPTMRQSGEYNGVRNRMSKRGSPYLRHAIWLAASSAVLHDPALKLYFQKKRDEGKPYMASVGHACRKMVSIIYAVMRDNKAYVPCIPSEISA

SEQ ID NO: 319846 - protein, 337 aa, unidentified
MDYFAGLDISMDETHVCVLDREGMVVRESKAESTAQAVANELAKAPSCRRIVFETGRMAPILFHGLSQLGLPVVCVESRQAYQALKSLATHKTDRNDARGLAHLARTGFFKPVHVKSLPAHAVRSLISARKKLVGQRVTLENQIRGLAVVFGVRLPRALTTAFIDQALKASEGVAGLSAAMRGLSAARVAVMTAVAAIDADIRRMTRASTACRRLMTIPGVGQLTALAFVAAIDDPSRIRRSRDIGAYLGLVPRRHQSGEVDYTGGISKCGDGRVRTLLYEAANVMLTRYKGQLKLKDWAFAIAKRSTMRKARVALARRLAIIMHAMLRDGTEFAPA

SEQ ID NO: 319847 - protein, 341 aa, unidentified
MDHYVGLDVSVRSTSICILSAAGQVVREGKVESEPEAIVAFLGGRGLAYGRVGIEAGPLCQWLYAGLAKAGLPVVCIETRHAKAVLSAQVNKTDRNDARGIAQMMRVGLYKPVHVKTLASQEIRALLGGRRALQAKLMDIENSIRGLLRNFGLKVGTVTRARYEERIRELTDGRAGLIAVIEPMLTVRRVVREQYVLLHKRMLALARADEPCRLLMSAPGVGPFVALTYRAAVDEPARFRQSRAVGAHFGLAPRTHQSGELDRRGPITKNGDETLRAALFEAALVLLRPGSKPSPLKAWGLKLAKRRGTAKARVAVARRLAVILHRMWVDGTPFRIEAAMA

SEQ ID NO: 319848 - protein, 389 aa, unidentified
MRFAGVDIASLTHVIAIMTEIGKVLVKPTSFGEDAAGYEKAFALLGPSTDVLVVMEATGHYGRNFMAALWVRGYQLALINPIRTRLFAHEDLRRAKNDPIDALGLARFGIQKGPLLPTPPFDEATDQLREFVYLLERLTQDFGDRVRQLHRLIDLGFPEFTRHVPNPSAQRATAILAAYPSAQAFSDSCLRELATLRYDGSHHVGEPLASALVETAKASVGRHHGPAYHLETRYICQDIDRLRSELRQIQQEIERRLAENPVAVLLATIDGLGAIAISRIIAAVGDPARFRSGAALASYVGAVPGTDRSGKGHRRSDPLCPLGNARLRRTLFMTTLGAVRRNPWLGAYYARLRARGKPPKLALLAAMRKLLMAIYSVAKHRKPFVPQLP

SEQ ID NO: 319849 - protein, 398 aa, unidentified
MLSHLSFGLDRNQAVDRLNVGIDMGKNKWVMDVLDTANGKHRRHMFTGASCLREATAKVRALVATGREVDVVCEAGRNGFTPARLMREAGARVTVVPVNKLEVVNTGKKAKSDRIDARGLSERDARAKGFPSVWVPSVDLECRRRMLREAQRLGKDIKRNNNRILGILERWPVPSESRHLPAAAWRGRIGQWRREGLIGAALPEIELGCICNLIAELEVLERSLARWEKEAAALLREERRAAAKAGRVHPVDVLMEYKGIGEHIARELVWYVGDFERFANGKKFASYLGLVPVPWASGQVSKCQGISKCGNPELRRLLIELAWLWTRHQPDSPITRKWAPALDRRCRGRGRKTAIVAVARQLAVALFRLLKHGEPLAGAVKNRPIRVPAATPGSPLAV

SEQ ID NO: 319850 - protein, 367 aa, unidentified
MEVNTIAIDLAKNVFALCAANGDGELIWRKELRRAQLLSFMRRQRPCVVGMEACGGAHYWARQFAALGHAIRLVSPALVTPYRKGNKTDRNDAEAILEAITRPSMRFVAVKSVAQQDLLALHRVRSQLLKNRTAVCNQLRGLLRERGVAVRVGVTALKGALPTILAEEENNEISGEIRDLLIEMSDWLRALEARIASCDEKLDRKFKADERCRRLAKVPGVGPLVATALVAAVGNAREFRNGRELSAFLGLVPRQHSSGGKRVLLGITKRGDRYLRTLLIHGARASLRWSALKTDSYSCWAARIKATRGPNVAAVAMANKNARILWALLNRGERYRPGNSTPRTVLRAGSPPSVEGARAAKLCLVED

SEQ ID NO: 319851 - protein, 465 aa, unidentified
MLHTMPQLGHETLYVGIDVGKLQHVAGFVAQSLLTRYQRFESCPALSFANSREGFRALADRMQAYVPLTQVYALLEVTGHYHKALVQYLHEVDIPVYLMHVQKRQAGLLKSDKRDALGLANHLYNALEKGVQTADPLQAVRRLASPTEAAAQLHGMVQHREELIAEQTQRKNKLTSLCDELFPEFTQICKNPNLPSALALRQAFPTPAAISTAGLSALKVARRGTHPSEEKLVELQRLAAQSIGARDVARVRGLTFEQHQLIVELELLQQHVEALDTEIAHIITHSREGQILTSIPGIGPTQAAIILATIGNIANFDRPAQLKAYCGWAPTLTQSGTTLDRARLTPRGARLLKRTLYLVVWHTLRHPDNEFARLYTHLVPRKCVYDERTRQYRGKGKVLGRVAGQLITVMFTLLKRDQERLAHAKGDMLAAPELYDPELHRRHRAGQYRPPARTMLGTVVQSPPP

SEQ ID NO: 319852 - protein, 347 aa, unidentified
MSHSTPESDRIMIGIDPHKASWTAAAVGPGLQPLATVRVPVGPHGYRDLRRFVARWPDAMWAIEGAGGLGAPLAARLSADGIAAVDVPAKLAARVRVLSTGHGRKNDDADAISVAVAALSAAGLRTVTVDEEVTALRALVEHRDDVVKTRTQTVNRLHVLLTQLIPAGAPRQLTADTAAQLLRTVRPRSLGPRTLRRLAADLITEIRRLDRRITVANTEIADAVQASRSTLSELRGIGNLTTGKILARVGDVHRFRSAAAFASYTGTAPIEVSSGDVVRHRLSRAGDRQLNCCLHTMAITQLQRDSPGRVYYLRKRADGKSHKEALRCLERRLSDVVYRCLIRDADP

SEQ ID NO: 319853 - protein, 343 aa, unidentified
MEAITTIGLDIAKSIFQVHGVDAEGNVIFRRQLKRRYVLAFFEKLPPCLVGIEACASAHHWSRQLQALGHTVRLMPPAYVKPYVKRHKNDATDAEAICEAVTRPNMRFVATKTPEQQSCLTLHRTRHLFIRQQTSVINSIRAHLAEFGIVAPVGRNGVEQLLSVAADSNDRRLPDVARVCVIALGAQLQTLKAQILEFDRMIRAWHRSSEISRRLDVIPGVGPALATALVASIADPKAFRSGRDFSAWIGLVPKQNSSGGKDRLGSISKRGDRYLRSLFTTGALAVIRYAKIHGTGHRPWLTALLARRPTMVAAIALANKIARMAWAIMAKGERYKEPAALAA

SEQ ID NO: 319854 - protein, 409 aa, unidentified
MYYVGIDIAKSFHVVTIIDENEVKVTQKPIRVTNCIDGFSKFITKLETISSNTNDFIIGLEATGIYGENLWEFLNSHGFNVKLLNPFQTTRYREQHTMKKVKNDNIDSWIIALFLKDGKYSSGYVTDDEYQSLRTLYRNRVSIQSDMKEVKKRILTQVTVTFPELENFIDIFSITGLALLDKYPTAHHYKHSSVDRILKIFRHIQGNSFNNQKAIEVLELAKNSIYSGKAKDARAIAIKSSIRLLKIYQEELSILEEEILALLERNGIKEEKDVPINSLIENLKTIPGVSSKTIAAVISECGDLSRFKTPIKFIGYLGLFPTENSSGNSKSTGHLSKRGSSLAKHALYMASVSCLLHNKELKQYYDTKKSQGKSKQEGIIAVARKLATIIYSIFRYNTPYDPSRVFSKS

SEQ ID NO: 319855 - protein, 316 aa, unidentified
MTTTPVFVGIDVSKDRLDVALRPTSDRWALANDAPGVATLVARLQGLAPTLIVLEATGGLAVPLTGALAAAGLPVVVVNPRQVRDFAKATGQLAKTDALDAAVLAQFAEAVRPALRPLPDAATQALSALLARRRQLIEMLTAEKNRLGSARPPVRPGIRAHITWLERRLADLDADLAQAIRESPVWREKDDLLQSAPGVGPVLATTLLASLPELGTLTRQQIAALVGVAPLNRDSGAWRGKRRVWGGRAPVRAALYMSALVATRYNPVLRAFYQRLCAAGKAKKVALTACMRKLLTILNAMLKYRTPWETNFAHAS

SEQ ID NO: 319856 - protein, 418 aa, unidentified
MEPKVLIGDDWSQDHHTICFMNPSTGGVAMTFDIPQTPEGFGRVCTERDKLEIRPQDCRVGIETAHNLIVDYYLDHQYQVFVIAPSVVKGCRKRFGASGAYTDESSAMLLADLLRTDRARFSPWRPHSPLIQQMLVQVRLIETLRREINRWTNRLEATLLRVNPYPLGLFNELECEISLQFLLRYPTYEAVQALTLDGLKVFCREQHYTHPRRVPKLYAHLQIPTPPPSPAVAQAYADQVPFFAQTLLPLVQQRKQSLKALRTLFVQHPDHPIFDSLPGAAKLLAPSLLVKFGDDRERFPTSKSVQTLAGTCPVTQQSGKYKGIYFRKACDKEFRRILDQFAWSSLNESVWAVTYHTQLQQRGIVGSHAIRCLANRWLAIIWRLWQDRAPYDEGYHLQRRALRHRPKPQDARRLTIES

SEQ ID NO: 319857 - protein, 402 aa, unidentified
MNAVGIDVSKGKSMVAIMRPFGEIVSTPFEIKHTTSDINSLVELINSVEGESRIVMEHTGRYYEVLAHQLSEANLFVSAINPKLIKDFDNDSLRKVKSDKADAVKIARYALDKWQNLKQYSVMDELRNQLKTMNRQFGFYMKHKTAMKNNLIGILDQTYPGVNTYFDSPARSDGSQKWVDFASTYWHVDCVRKMSLNAFIDHYQNWCKRKKYNFSQSKAEEIYGKAKELVPVLPKDDITKLIIKQAVNQLNSASTTVESLRTLMNETASKLPEYPVVMAMKGVGTSLGPQLMAEIGDVSRFTHKSAITAFAGVDPGVNESGSYEQKSVPTSKRGSSDLRKTLFQVMDVLIKTHPQDDPVYQFIDKKRAQGKPYYVYMTAGANKFLRIYYGRVKEYLSSLPES

SEQ ID NO: 319858 - protein, 524 aa, unidentified
MTATCRSKRGRNRRPDVLQRPRGLIHPRVQKVGAEHFGIVAVDCAKARSKWMLTDFWGNVLLPPAVVEHTRAGFDAAVAGLRQAIRERDIRDLLVAVERTGRYHHAPARALASAGFETRTVHPFTTKQFRRPADPGNKTDDTDLAAICRAAINGFALVEPSLDESWRQFQLLTRHRRDLVRKASILCCQIKEHLEAALPGYAACFPTLWDHPAAMILALRVGGAEAIKQASVVRLRDLLTKAGVGFQQRTLDRVRQWADAAACPDVAASGHRRIAADLEADRQRKELEIQGLEREIAQMLVRTPYVLLMSIPGINVVSASEYAAEMGPICNYANARCITGRAGLYPSRHQSDQVDFSGPMVKCANRRLRFALMQIADNLITCNHYFAKLASGWRVAKTDPRLIRVRVAMRFSRISFQMVAGATVFNHPAARQRDYILQKLITFHHQHQTSAHQVQHDLQHASMQLPPGECAAEARPLQEELTKIVENRRRGPQPLGEILPALLAGLAARVVQSPPSGAGQPHVR

SEQ ID NO: 319859 - protein, 371 aa, unidentified
MVWTAPYGISCARMRLCKSQTREPSVDQIIRIGMDTSKHIFQLHGIDSAERPVLRRKLRRNQVLGFFAKLAPTVIGMEACGAAHYWARELRRLGHEVKLMAPQHVKAYVKRNKNDGRDAEGLCEAMSRPTMQFVPVKTEEQQAALMLAGVRQQLIARRTQLSNAIRGYAAEFGLTAAKGLDKIEPLLAQIAQVESLPALAREIFAIEGREYAQLQVKLKAIEAKLMAWHRSNAASRRLAQIPGVGPIGATTLVMKTPDPGAFPSGRHFAAWLGLTPKDHSTAGKTRLGKITRAGDEVLRSLLVAGATAVIQQVRHGRGHPSPWLVALLKRKPPKLAAVALANKIARIAWKLMTTGESYDSARMPGASAAAA

SEQ ID NO: 319860 - protein, 306 aa, unidentified
MTTIATPVIGIDVASGELVLCADKVVKLANTPAAVRAFLRTIPADTLLVCEATGGYERLLVAEAQARGQPIHVANPKRVRDFARSLGRLEKTDPVDAEVIRRYGVALRPAPTPPVPPAQGQLRELVDLRHDLGEEHTRWSNRLAHATSVSRGLISRRLRQLAREGAAVERQIEQHLAAHPPLQDKVQTLCLVPGVGLTTAAVVLAHLAELGQLNRRQAAKLAGLAPLNHDSGAQRGQAHIAHGRAALRRALYCAAVVAARWHDELRGFYQRLRARGKPAKVALVAVARKLLLILNALLKDAHPSPA

SEQ ID NO: 319861 - protein, 322 aa, unidentified
MTTPPAIYVGIDVSKSQLDIAQAPAAQPWAVSNDAEGIQSLVLRLRELQPTLVVLEATGGYESAVVAALMAAALPVVVVNPRQARDFARAKGRLAKTDKIDAQVLADFGEAVRPQIRPVRDAALQELSGLLRRRQQLVEMLSTERNRVRQATGAVRKDINTHIHWLERRLQDLDRDLNQAIRSTPSWREKDELLQGVKGVGPVLSMTLQADLPELGQLNRKQVAALVGVAPLNRDSGQFRGRRKVWGGRSQVRAVLYMGTLVASRHNPVIREFYQRLISAGKPKKLALTACMRKLLTILNAIARDQNADPLFLSRLANQDSC

SEQ ID NO: 319862 - protein, 367 aa, unidentified
MKKDNTVKKSARNRKGVNRKRTVGIDLGDRSSRYCILDEQGEVLGEGSVATTQKGFAQVFGSKLRSRIALEVGTHSPWVSRRLAELGHEVIVANPRRVRLITDSSRKDDRLDAKTLARLARIDPELLSPIRHRSEQAQADLMVIRARAALVEVRTMLVNSARGLAKSYGERLRSCGTSQVGEELAESLSEPLQNALKPLLAEVESVSQHIREYDEQIETIGKSRYPEIELLKQVHGVGTLTALTYVLTVEDPHRFRRSRDAGAYFGLRPRRRESGNSRPQLRITKEGDAYVRKLLVQCAHHVLGPFGPDCDLRRWGLELAERGGKNAKKRALVAVARKLAVLLHKLWVTGEVYEPLHVRRDGKAVAA

SEQ ID NO: 319863 - protein, 408 aa, unidentified
MNAVGIDISKGKSMVAALRPMGEVAFLPREFLHTGVGLEQMAYAIIALGEDTRVIMESTGRYHEPVAAALHEYGIYVCVLNPLLIKQSGGGSIRKVKTDKADAMKIAKYGLDNWADLREYTPMDTVRQQLKLCSRQYDLYMKTVVSLQNNLISLTDKTFPGVNELFSSPERADGHQKWVDFAMTFWHCDCICRVSEKAFTERYRKWCKRKGYHFSAEKASDLYASSCGHFTTLPKNENTKLLIVTAAQQLLAGKATLAALRAEMTRLASQLPEYETVRAMYGVGEITAAQLMAEIGDVRRFPRRSSIVGFAGVDPGVDESGKHSAKSVPTTKRGSPHLRKTLYQIVCTYLKKSPADEPVYQFLDKKRAEGKPYFVYMTAAQNKFLRIYYARVKECLEAFDAQQDISQG

SEQ ID NO: 319864 - protein, 399 aa, unidentified
MTNQDHRVGGIDSHKDTIHVAVITAIGQPVTDREFPTTVAGYRRAVAWLIEHGPLSAVGVEGTCSYGIGITTELLAAGIRVVEVNRTRAAEKRKQGKTDPLDAYRAARSVLSGEASTEPKNPSIEPLRALTIARRSAVKSQQAAWRQIGSLLVTTRPALRDRFRDLPETKLIATLRDCRPDQIHDVDDADTLYALRTLARRYLALQDEITALEERMLRRATRANPALMAIKGVGPAVGAQLLITAGDNPDRLRTSASFAALCGTAPIPLSSGRTDKHRLSRGGDRQANAALHHIVKVRMSYDQRTRAYRDTRLANGWTTKEVFRALKRAVAREIFHALAGHTLAPDYSDLRPARHAKNLTLTAAAQHLGVWPARIGELELGRRPNDELATRYRAWLAAA

SEQ ID NO: 319865 - protein, 373 aa, unidentified
MRHIIYCGVDFHARQQTVCCLKTESGELATQELKHGNKDELRQFYQQFSGPVIVGLEASGYTPWFEQLMEELGYEVWLGDAAEIRRRARRRQKNDRRDAELILDLMLHDEFPRIHQPLPESREILRMLRYRHKLVKLRTIIKNSLHSLAIQSGLSLQARLFTRQGEQQLLASLMSPVMSQQRKQWLEMLRELNQRITETEWWLKQQAQKDPRISLLRTHPGLGLLSSLGVVHTLIPVSRFRNQKKVVAYGGFDPMERSSADKKRYLGISKAGSRLLRFLLVEAAQTAVKNDPELKRFYRRLEHRRGKPKAKVAVARKLLVRSYIMLRDEIDYAEFQRRAVAARLARDYARTNLPGHLIGQPASPASGPEERAD

SEQ ID NO: 319866 - protein, 473 aa, unidentified
MTQLALTAPVDTGRTTEIAALNDAARAGLLVTSKTVFTRTLAEILACTDPDPVSQQFNLMKGQRALRRLINETPIDPGNDPHGERDFGVVEHLGHKIFWKIDGVDAPSHGGIESCQTGFARSQFNRKEASMSEVSILAIDLAKHSFQVCATTIEGVVVSNRKYSRGKLGQLLAEHPKCLVAMEACATSHWWGRFARDQGHDVRLIPPIYVKPFVKRSAKNDANDAAAIATAVRQPGMRFVQVKSQGQQSQAMLFRTHQTLTRQRAQLMTTLRGHLAEHGIIVAKGDAALLAYEETLESQEDIVPDLVREVARLYYHHMDRLAQTVATLENHMAEAAKQDQDIRRLRTMPGIGPITAAAFLAFAPPMESFRRGRDFAAWLGLVPKQLSTGGKTKLGRVSKMGQSDLRRLLVTGATVCIRWARWKGIRPDGWLGRLLERKQGTLAAVALANKMARILWAMVTKGQDYRGGLVEYA

SEQ ID NO: 319867 - protein, 339 aa, unidentified
MSRQYVAIDLHHRRSLIVRENERGEELGTVRIDNDPVTMSIALAEAGPNPEVAIEATYGWYWAVDLLQAEGANVHLVHPNGLNWEGRRVKNDYRDCKELLDRLQLNKLPEAWIAPPETRELRELVRYRAKLVALRSSCKTQVKAVLAKHGLHPPVNDLWVGHRGGAFLDEVELPDAYRIRVDSLRDLVEVFDRDVAMLERVIHGRLRDHAGYRAIQTIEGVGHVIGAIFVAEIGDVGRFSSPQQLCSWAGLTPKHRESDEKVRRGRVTKQGSKLIRWAAVEAVAHMRGGPKLRSDFARIGRRRGKNIATVAVARKLLTLVFYGLRDGEIRCLARAKETG

SEQ ID NO: 319868 - protein, 338 aa, unidentified
MKLTTIGLDLAKNVFQVHGVDEHGKKTLGKALKRPQVLAFFANLPPCLVGMEACGGAHYWARELEKLGHTPRLIAPQFVKPYVKGNKNDANDAEAICEAVGRPNMRFVAVKTPAQQDLQALHRVRERYVADRTAKVNQVRGLLAEYGIVIGKGIAQARQRLPEILDDAGNGLSDAARALFRELYDEIVRLDGQVGGCDRKVGLAAKASAPCQRLMQVAGIGPLIATALVAAVGDGRQFEDGRQLAAWLGLVPRQDSSGGKPRLLGISKRGQPQLRALLIHGGRSAVRAAAHKDGPRSRWINDLVRRRNKNIAAVAVANKNARIAWALLTREEDYRPAA

SEQ ID NO: 319869 - protein, 338 aa, unidentified
MLHVGLDLHKRFSTVATMDDNGNVQLEDKLYHDDRTRLKGFFGDMAGKAVVTVEATRNWYWLYELLEDQGVTVKLADARKVRLIAEAQLKNDRVDPKSLAQLERTGFLPEAYIPPREIRDNREYLRYRLTLVRLRTGLKNKVHALVDKLGICHQFADLFGPAGRHFLSQLELRPAYQEELNDYLALGDDLERRIVAATKEIKRQLKPDLRAKLLMTLPAIGHLTAYLLLNEIGDIRRFPSPGKLCAYGGIVPIVKQSADHRWQGHITRTGNRYIRWALTEVACLAPSRDYALGSFYRRVAYRRGPLKARVAVARKLLVAVWHVLTYEEPYKPTPFPTV

SEQ ID NO: 319870 - protein, 347 aa, unidentified
MMVVLGTDAHKRTHTVVAADEAGAELGSIMVAATSEGHLKVLRWAARWETRRWAIEDCRHLSRRLEADLLAAGELVVRVPPKLMAGVRRSARTRGKSDPIDALAVARAALREPDLPTAQLDGPSREVKLLVDYRESVVRERTALQNRLRWRLHELEPGYDPPSSSLNRYQTLDQVDQLLGAHHGVVADLARREVIRIREITSEANQLQKDIEARVAEIAPSLLALPGCGGLTAAKLVGEAADITRFSRRDAYAMFAGTAPIPVWTGNNQKFRLNRGGNRQTNAAIHRIAVTQIRIHPPAQALIARHIASGKSKRDALRILKRRLTDVVYRTMIRDTQPVQAAPARAA

SEQ ID NO: 319871 - protein, 339 aa, unidentified
MKLYTGLDLHSSNSYLGIIDETGKRVFKQKLPNERERILEAMKPYQNDIAGIVVESTYNWYWLVDLLMDAGYQVHLANPAAIKKYTGLKFADDQHDAFWLAEMLRLGILPEGYIYPKEDRPVRDLLRKRMHLVRLRTSLIVSLQNILCRNNGYRLKTADVKALCEDRVAPLLTRNEDLALAGMVSKESIDFLTRQIKKIEAVIEDRVELKPSYAKLQSVFGIGKILALTIMLETGPISRFAKVGNYVSYCRKVSSKWLSNDKVKGKGNKKSGNKYLAWAYSEAAEHARRSYVQARTYYNRKMQKTNFMTAHNALAHKLARAAYYVMRDEVNFMPEKIFV

SEQ ID NO: 319872 - protein, 337 aa, unidentified
MNKTDTTFLPCGIEVSSKTLVVDLAGKAPREFPNTPIGHRALLTWLRRAPLPLRVCMEATGLYGLDLALALVAAGIPLLVANPRSVRNFARALMQRSKTDPLDAILLREYAARMPFAPWQPPSPQALQLIAAARRIQALTHMMAAEKNRLHAASLSHTVPPMVRFDIRRSIQNMERAVERLTQGVLLFILDDPQLARRKQLLVSIPGIGLTSAIQLLAELLHLGPDADVRQWVAYAGLDPHEHTSGTAVASKPRVSKAGNAHLRRALYMPALVATRHEPHLRGFYHHLLERGKAKLQALVAVMRKLLHAIFGMFKHDTPYDGSKLYALKPQAELQCA

SEQ ID NO: 319873 - protein, 400 aa, unidentified
MISPHLYIGIDVSKFKHDVVVINDRKQTVTPCFVIKENATGYQSLLDRLETIRQQLAISQLQIGLEATGDYWKNLYYFLQSRTAWPVTVINPVQTRRFAQSHLRRAVTDPIDALEIARYMQERKPDPTPPQTFGLLVVKDIDKQMLSLIKERNANICRLRLELGKTFPELEQQSPSLTAQRVLVLLKHYPTAEMVHLANEDQLRQLTYGIKKQHLPSTFVSRVKLLAQNSIACKSGFGAGIVVQTLALRILEIQAHLDQLKKELIKVHHKIVGKPSILTTIPGVASLTAAILEAYIGDVKRFPNYNQIVAYFGMNPTICSSGVSKAKKGHLQKKGNARVRNILFMNALSLVRYKVEPFYGFYQQKVAEGKPKLVAVTAIMRKLLVVVYEMLKKNEPFHAK

SEQ ID NO: 319874 - protein, 322 aa, unidentified
MAILSFCGIDVSKDRLDVMVLPEQQGLSVRNDAGGWTALVEQLRKFAIAAIGLEATGGYERGVMRALLAAGMSVRQINPFRLRQFARASGVVAKNDPLDARMIASFVAVMPTRPAQRHTPAVERLAEILAVRRQLSNEKVAAENAGRLLEDPMLQRLSRRRIARLSADVEKLDERLVEIVASDAALAHRYRLLISMQGVGPVLACTLVALLPELGRLNRKQIAALVGVAPYDFDSGLLKGVRRIWGGRAPIRNVLYMAAMNAARHNPALKLFHDRLKAAGKEPKVVIVAVMRKMITTLNAMVRDDVVWADRSTGRHNVPTAR

SEQ ID NO: 319875 - protein, 372 aa, unidentified
MSGASEGFVALDVAKLKHAVAIADGGRSGEVRYLGEIASTSVAVRKLIAMLSKNYECLTFCYEAGPTGYGLYRLIKSLGHSCLLVAPSLVPARPGDRIKTNRRDAESMAKLLRAGELTSVWVPDERHEAMRELARARDAAQKDLRIKRQQISGFLLRGGLYYPGKKTWGKAHLNWLASQRFEHVEQRFAFEELLLGMRQASERSDRIEQAIRDAVPDWSLAPCVTALQAMRGIDTITAVGFLAETGELARFEHPRQLMAYLGLVPSEASTGDRVRRGAITKAGNIRARRLLIESAWSYRFPARVGKEKQAKVAAAPRAVREIAWKAQTRLCGRFRKLARKGKRSTVVATAIARELAAFIWAINREVAAQSKT

SEQ ID NO: 319876 - protein, 341 aa, unidentified
MKLTTIGIDLAKNVFQVHGADARGKPVLKKQLKRAQVLAFFANLMPCKIGMEACSSAHYWARKLQVLGHTVQLIAPQYVKPFVKRNKNDAADAEAICEAVTRPNMPAVPIKNASQQAILSVHRARQGFVKARTAQANQIRGLLAEFGIVIPQGISHIAKRVPEIIEDGENDLPGSFRLLIQRLVDHLKVLDQQIGELELEIQAWHRESEASKKLAKIPGIGPMTASALVASIDDAKSFKNGRQLAAWMGIVPRQHSTGGKTTLLGISKRGDTYLRTLLIHGARAVIRAAERKPPTNPWLGKLLARRNKNVAAVALANKNARTIWALLAHDRTYAPDYGLAP

SEQ ID NO: 319877 - protein, 388 aa, unidentified
MAHDILLTADYHDRVCVIRRLNLTTREERMLPGVPTTPEALNRIVDDACLEAGSEGRVIWLQESTTGWARVKELIGDRVVFFVCNVLQMPLPPKARRRKTDKVDTARLQREFLNGDLPLAHQPPPEWRQLRRLVAYREGLVSRRTAVRNWINRYLAHETWVDRTRLWSPAGQARLRALLPKLSSTDAMIIGLKLEELARLDEQLKPVLLELLAAYNNCPDAQRVDAIKGIDVVSAVSIVARIGPVDRFRKADSLIAFAGLAPGVHQSDETRRNGRIGGGGTDRHLRHYVIEATMWARNLPRYKPTYDRVKRRRGAKVARLVVARMMVRSIYKVLREGVAFDPAPARKATAAAAACRFKPKRDRFLKVKWIQRGEPRIHHLGRHRTLLP

SEQ ID NO: 319878 - protein, 360 aa, unidentified
MSKQVVSIVRPVLSDKELTVPRQASVFCGIDVSAETLSAAAIEAGRPMEQREFSNTANGHKGLIAWLGKKKALVRVSMEATGIYSMDLALALDAAEGIELAVLNPKRAHDFAKSMMRRSKSDRADAAVLAEFSLRMKFVAWQRPSLSALTLRSVTRHIEALSLEHTRGLNRLHAAQGSRGTPRCVVEDLKRALVTLERRIVKQRGAARKLIDSAEQTREQFRLLLGMPGIGEISALQILGELVLLAPDLKARQWVARSGLDPVHEDSGSSVHKPAHISRAGSRHLRRALFMPALAAVRCDPHLRAFYEALLARHKSKLQALIAVARKMLHAIYGVFKSGQPYEGKLLFPNIRLEVESIAG

SEQ ID NO: 319879 - protein, 317 aa, unidentified
MTKTTTKTAGIDTSKDKLDIAIDTGATCGQVENTALGWEQAAERLAAAGVTRVGIEATGGYERGVVRYLRQRGFTVLVLQPAQVKAYARMHLRRAKNDKIDAALIAACAAALEAPAVPPDDRLAALAGHLTFVEQVEEDIARLKVRLEHVEDARLRGILKADIATFKQRRATEMLRIIKVLRSHADLARRYHLVLSVPGIGERTALAIIIRMPELGRISREEAAALAGLAPYDHDSGTHKGQRHIAGGRARLRRSLFAAALPAAFRWNKALIELYSRLVARGKCHKAALVACARKLLIYANTVVRRDTPWDQRPAAA

SEQ ID NO: 319880 - protein, 422 aa, unidentified
MNDAIKLAAFVGIDWADTEHTVALRMAGSSNVETSVLLQKPEALADWAVKLKERFGDRPVGICLEQSRGALIYALSQYPWLVLYPINPKSSARFRESLYPSRAKNDPNDAALLSEFLDKHQDRLRPWRAEDVETRKLRLLLENREKLVDDRTSLCNRLRAALKLYFPQALEWGGPLIKPMSWAFLLKWSTLPDLQKVSQKKFLNFFYAHHVRRGDQINGLYEQVQSAKALVTDSALVDTSVLLVRSICNQLQALQPHIDQHEAEIEALYAKHPENHLFSDLGGAGKVLGPRLVAAFGSDREKYKDAGEVQKMSGIAPVVESSGKSAWTHWRWAAPSFLRQTFHEFAAHSIPRCAWAKAFYELQRERGKSHHAAVRSLAFKWIRILFRCWKDNVPYDESRYVQQLIAHGSPLLKFLIQKPLEA

SEQ ID NO: 319881 - protein, 338 aa, unidentified
MEKKWFVGIDVSKKTIDVVYYDRKKQKMCEEIHRQFSNDQSGFILMRKWFKECGMKTVELVIGLENTGIYSFDLCLSLESAGIDYCCFNPLHLKRSFGLTRGKNDKVDAWRIAYYCYLHREELVYCKMSASTIMQLQELSSERKRHIKHIAEYKAYLTDRKQRITDSTQKRTANALEYEQALVDEIEKEMEVIIRSDTDLKKNYDLLLSVKGVGAVNAITIIIHTNNFESFGNARKYACYVGVAPFENTSGTSTKGKPHVCSIGAKILKSDLSMAARSARIHDPEMKEYFERKTAQGKEFGVVMNAIKYKLIQRMFAVVKRGTPFVQLQTYKSTTTIN

SEQ ID NO: 319882 - protein, 314 aa, unidentified
MEAIGIDMAKDTFHAAFDDRKVMKFNNNNAGIEKFMTVIEDCGFPPDTKIGVEATGVYHLLFAVTLTEHSWDVMVINPLESHRMITQGLRTVKTDRLDALKIRSMVIVGKGYLFSDSKDTLALKALVVERQALVEMRKMTKQRMEVHHLKEAATGRTLHDSCSAVLEALTDEIKAIEDATRNYEPETQELLRSIPGIGSTTAATLVAFIGDIHRFPTPEKLVAYIGLDCRVFQSGTSVKGKGYISKRGNKYLRHILFNAAFAARRHNPALKRYHERKLKEGKHYFSSLCAVERKLVHIIYAVWKRRRPFEKRSV

SEQ ID NO: 319883 - protein, 338 aa, unidentified
MSVIKVIGIDLGKSVFHLIGHDHSGREIYRHKLSRVKLFQFISQQETTTIAMEACCGAHWLARRCQEYGHNVKLIPAQYVKPYVKSHKNDFIDADAIAEAATRPNMRFVSPKSEQAQISTVIRRIRTGYIRERTSCMNRIGSILLEFGISFPRGHANMKKLFQWLADKDAVIPPLLILELRDQLDYYNQLNEKITAQDQKLIELNKENELYALLQTIPGVGPMTASCCLSSVGDPKDFANGRNFAAWIGLVPFQYTTGGKPRLLGISKRGNKELRELFVHAARAVMWRDASAERYFGSWLIDLKCRKPFNVAVVALANKLARIAWSVMNSHKAFEVKA

SEQ ID NO: 319884 - protein, 414 aa, unidentified
MKSARNTLPTEPVNGITCGIDWARDDHALSIVDAKGREVTRKTITHDAAGLRDLLTTLNSAGAREVAIERPDGPVVDTLLDAGIAVVVISPNQVKNLRGRYGSAGNKDDRFDAFVLADTLRTDRARLHPLRPDTPATIALRQTCRARKDLVAHRVAVANQLRAHLKIVFPGAVGLFAAIDSPISLAFLTRFDCQQRADWLSVTRLTAWLANASYSGRTHPRELHRRLTSAARATHEVTGAHVTGAFVATLTALNAQITVLDDSIADQLAAHADAHIFTSLPRSGTFRAARLLSEIGDCRARYPTPEALACLAGVAPSTRQSGKITHVGFRWAADKQLRDAVCDFAGDSRRANPWAADLYNRARARGHDHPHAVRILARAWLYVIWHCWQDHTTYDPTQHRALQALLERPQPGAA

SEQ ID NO: 319885 - protein, 373 aa, unidentified
MKHHSGAYVGIDTSKLRNAVAVAEEGRGGEVRYLGEIDTTEAATRKLVTKLAAKYRQLTFCYEAGPTGYGLYRLIRKLGHDCIVAAPSLIPKKPGDRVKTNRRDAVGLAKVLRAGELTAVWVPDERHEAMRDLSRAREAARKDLKGKRQQVSSFMLRLGRHFPGKKTWGPAHMNWLMLQKIEHREQRIVLEELLGAVRQESERVERLEQAIRDAVPEWSLAEVVTALQAMRGIDLVAAVTVLAEIGDLSRFQNPRQLMGYLGLVPSESSTGDTVNRGGITKAGNGRARRILVESAWSYRYPPRVSREKQNKVAAAPRAVREIAWKAQMRLCGRFRSLTRKGKRPNIIATAIARELAAFIWAINREVMAHATAS

SEQ ID NO: 319886 - protein, 338 aa, unidentified
MVNTTAYNVAGCDVSADWLDVAVKRPERDRLDERRFDNTPSGHRALIKWLTKADHTARVAVEASGVYSLDLALALDEAPLVKVMIVHPRALKDYRRAQMQRSKTDQIDARLICDYGLRMPFVPWQVPSEEAFELRALSRRLEALVQARIAEMNRLHAAQKSRRASAYVINDIEVNIRHLERRITRIEEEAVSLIQAHAALRVACAHLTSVSGIAERSAIKLLGELLMMPQALSVREWVAFAGLDVRHYESGRSVHKPGRISKEGNVRLRRALYMPAQVAIQHEPQVRAFYDKLIAQGKKPMVAIVAVMRKLLHSIYGMLKHDQDFDGQRFYRLPTQNA

SEQ ID NO: 319887 - protein, 394 aa, unidentified
MKLVGIDVGKNSHHFCAMDKETGEFNVAPSSFSNNKEGFDFLINSLKPYSKKSILLGMEDTGHYHVALLKFLLSNGYTVALINPKTTDLTRKMEGGITKNDKLDTITICDVLDTPERKKQYRITKVDRFDLYEQRQLTRHHHNLKEELNVYCNRLQKSIDLVFPEFNTLFSSKYGIVYMNLLKTFGSAEAIASTDIRTIRKFFEIKGKGNRISLTPEKLKECAKNSIGISSEVETIQIKHLVSQIMLIKEQIAEIDKKIEEFSITNNSPILSIPGISHFSGTSILAELGDIGNYSKPSQIIKFAGVAPYHYESSQYNAQHTAITKKGSKYLRKTLYQIILPVINNNPVFKKYYLLKISQGKGHRCAQGHCIRKLLRIIYHLLETGQSFDPALLR

SEQ ID NO: 319888 - protein, 354 aa, unidentified
MRHFIGCDAHKKYSVFVAIDETGNVKPAVRVNHDRELYRGFLRGLPAGSEIAVETIGNWYWIVDEMEEAGHRPRLAHARKSKLMMGEIDKTDKLDARGLATLLRNGTLPEVWIASREVRDQRELLRLRMTLVGMEIRLKNRVHAILAKYAIQLEEVRDVFSQQGRRLLLGTTLEHLPAHTAEVIRQHMELLESTEQQRELAEERLKSIVKERADVKLLMTLPGVGWILGTVIAFEIGDIDRFSRAPEIASYAGTVPRVHSSGGKTRYGRVHPDVNRYLKWAFVEAANVIVMHQKRLGDVHVVRLYKRLRQRKGHGRAVTAVARHLAEAAFWVLKKQQPYQQPGLSRFVHTPVSA

SEQ ID NO: 319889 - protein, 343 aa, unidentified
MGEVSTIGLDIAKSIFQVHGVDVSGNVVIRRRMSRAKILEFFATLPPCLVGIEACPSAHHWGREIEALGHTVRLMPASYVKAYLKRSKNDANDAAAICEAVTRPSMRFVPTKSEQQQSGLMLHRSRQLLVRQRTMLSNAIRGHLAELGIISAKGRNGTAELLEVLAERDDRIPVAARLSLEPLARQCANITAEIRVIEKQIHSWHRSCEQSQRLEEIPGVGAIVATALVAEVGDWKAFSSGRSLAAWIGLVPRQHSTGGKDRLGGISKQGNRYLRWLLITGAMAVIRYARQRGTKRLWLARIMERRPVKVAAVALANKIARVAWAMMVRGERFKEPRLLPVAA

SEQ ID NO: 319890 - protein, 390 aa, unidentified
MFYIGIDIAKRTHEICILDASGEPVDSPKKVHNTTVGAEKLMAALGHLSLTPSDCLVGMEATGHYWLGFYGFLLEKGFNVKVINPIVTDAFRSMHVRKVKTDSVDALVIAKVLMFGEYTESPAASGETLALRQLCRFRTFEIDTCSDLKRKAIALLDQIFPEYETLFSDTFGVSSREVLISYTTPEDLEKISTRKLTNLLAKASKGRFGREKALQLKEAATNSFGITIAVDAFAFQLRQLLEQISFIEKQVADLDRKITEYMRETGTYITTIPGIGPVLGAVILGEIGDIHRFPDGSRLVAYAGIDASVSQSGTFLGNQMHMSKRGSPYLRRALYMAASVAAFHDPELSAYYQRLRDRGKHHKVAIGAVARKLCFIIFTILTDNRPYEKR

SEQ ID NO: 319891 - protein, 356 aa, unidentified
MTRLPTDDFAAFVGIDWADAKHDVCLQAAGSETREFSILVHTPETIDEWVSTLRQRFKGQPIAICLELNKGPIVYALRKYDFLVLFPVNPLTLARYHEAFAPSHAKDDPTDAELQLELLLKHREKLTPLKPQSPAMRALEQLVEHRRRLVGDTGRLTNRLSSTLKNYFPHVLQWFHDKDTAIFCDFLAQWPTLKAAQLARRTTLERFFRAHHVRYADVIEQRIQAIKSATPLTTDGGVIVPHALLVQALITQLRVTLQAIEDFDHAIAQRAQSHPDFPLFDALPGAGAVFAPRLLVAFGEQRDRYASAAELQKYAGIAPVTERSGNTTWVHWRLQCPTFLRQTFVEWAAESTQHSF

SEQ ID NO: 319892 - protein, 338 aa, unidentified
MEREYVGIDLHRRRSVIVRRSAAGEVLPAVRVDNDPLVIAAELAKAGPNPEVIIEATYGWYWLVDLCREAGAEVHLAHPLGNNWGHRRVKNDERDAADLVDLLRLGRLAESWVAPPDLRELRELVRYRAKLVALRSGLKSQIHAVLAKEGVQVPMTDLFGVAGRRLLDGVSLGRAYEVRVESLRDVIGVCDREVAMLEREISVALEDHAGYRAVQAICGVGPVLAAVFAAEIGDATRFSGPAQLCSWAGLTPRHRESDTTVRRGPITKQGSKLVRWAAVEAISRQRGGTFLQADYQRIAERRNSRPIARVAVARKLLTLVYYGLRDGVIRCLQPTGDE

SEQ ID NO: 319893 - protein, 280 aa, unidentified
MHYLYYVGLDVSKETFDASLVAFEDANEMAHRKFANSRKGICSCLHWVEKRHGIRLDDVIFCAEDMGSYISEMAVCASDRTLNFNFSLISPLVIKYSMGIARGKTDRVDARRIAEYAITHYRKIALYLPAEKELCQLRTWLILRAHLAKQRVAKLVLLEKLDYKEKFADVSIQRSMLQEEIAYAETHMKTIEREMKELIAADSNICRNYKLLTSIKGVGPITAIVMLCSTLNFTKITDHRKFACYCGLAPFEHSSGTSVRGGAVRIATINEIIVGTLKYN

SEQ ID NO: 319894 - protein, 343 aa, unidentified
MESISTIGLDIAKSVFQVHGVDAAGQVVVRRQLRRRQVVAFFQKLPPCLVGIEACASSHHWSRELQALGHRVRLMPPAYVKPYVKRQKNDSTDAEAICEAVTRPNMRFVPTKTAEQQSCLMLHRARHLFIRQQTAVINSIRAYLAEFGIVAPVGRRGVEQLLEVVADRADDRLPEVARACLAALGSQLRALKAQILEFDRRIIAWHRSSVTSKRLDAIPGVGPALATALVASIADPRAFRSGRDFSAWVGLVPKQNSSGGKDKLGGISKQGDRYLRSLFTAGALAVIRYAKIHGTGHRPWLTGLLARRPTKVAAIALANKLARMAWAMMARNERYKEPAALAA

SEQ ID NO: 319895 - protein, 394 aa, unidentified
MAFKIFRKNCCGLDVHKTWIYACMGITDTNGRTEYKQARFSSFTKGLQKLADWLAKYDCNDVCMESTGKFWIPVFNILEKTCWVTLAYPKYTKPQKGNKTDHKDAKWICDLYMCDMVNPSFIPPPDIRQLRDLMRYRSKLTNIMTSEKNRALNCLTVSNLKLDDVFSDVFGKSSRSVIRYILEHPGETFQVAPFIDRRCKHPVEEIQAVIDGTISHQQAVKLRECLQHLDELEVHKTNVEKEILCLVQQYPYQLELLQTVPGFSGNIMTAIALISEIGADMSVFPSAKHLVSWAGCCPRNDQSSKKVKSTRISRAGVYLKPLLVQVAIQPFTANADKLSAAGALEIRCQICDGRFLSMWAALFIFLGCPLPPCPKDLHVHNGRIVILASVAWIF

SEQ ID NO: 319896 - protein, 359 aa, unidentified
MQQATGSAVERTVGLDIGDRTSRYCILSQDGTLLEEGQVATTEAALRRHFSPMDRARVALEVGSHSPWVSRLVADCGHEVIVANPRQLRLIYENQRKSDRTDAEYLARLARVDPKLLAPITHRGEQAQADLALLRSRDMLVRARADLVNHVRGALKSVGCWIPKCSTPAFARRAKAHVPELLEATLRPVLSTITQLSEQIHQMDRQIEEVAQSSYPETEVLRQVPGVGGLTALCYVLTLEDPARFPTSRSVGAYVGLVPKRSSSGQRDPELGITRAGDEMLRRLLVQAAHYTLGPFGPDTDLRRFGEKLAARGGKNAKKRAIVAVARKLAVLLHSLWSTGEVYEPLRHHPEAAQEQEAA

SEQ ID NO: 319897 - protein, 356 aa, unidentified
MSQKSSSAIAVIGIDIGKNVFHLVGQDRRGAIVLRQKWTRGQVEARLANLSPCLIGMEACVGAHHLSRKLQLFGHNARLMPAKYVRPYSKGQKNDYRDAEAIAEAVQRPTMKFVATKTTDQLDLQALHRVRERLVSQRTGIINQIRAFLLERDIAVRQGLRFLRAELPGILATRADVLSPRMSRVIEELAGDWRHLDARIEGLTDEIETLARQDQHCERLMTVPGIGPIISSAMVAAIGTGDVFSKGRDFGAWLGLVPKQISTGDRTILGSISKRGNRYLRALFVQAAWVVLVKLGPTHWERYGLKSWIEAAKKRLHYNVLAIALANKLARIAWAVLNKGRAFECVKTDVIASRPA

SEQ ID NO: 319898 - protein, 312 aa, unidentified
MTDITIGADISKDHIDLQSLPDGGTLKVANDRKGFAAIVRWIGTKGVERIVYEPTGAYHKAFERFMMVQGLPLSKVNPRLARRFAEATGRLAKTDRIDAGLLAHYGALLAPRILQANTQIHNDLKELHVARLALIKDRTAAKNRAKNLSNLLLKRHNADRLRQIQRQMTAVDEAIMALIGADVSLKARFDILVSIPGVSQITAFTLLIEMPELGELDEKAAAALCGLAPMSRQSGRWTGRAFIAGARAIVRHALYMPALVACRFNPDFKTKYEDLTKAGKPPKVAITAVMRKLIVLANALLRQNRKWQPKPA

SEQ ID NO: 319899 - protein, 326 aa, unidentified
MNIIGFDVSKDTLDCCLLKSSAKTDDALPHVKQENGISGFEQIRQWIKQHKIRKVAIVMEAIGIYYEAAANYFSQFYTVYVVNPLKIKKHAEKVFSRTRTDKADAALIADYGKRFLDKLSPYPYKQPEKAEYRLSKLNGLCLQLQAEIGRHKNQIHASTDAFIIEAHQSVITELTKQLESARQEMQTICQENEKINQHCQRLQTIPCINQQTALWILQNLLGKDFKTANKFIAYAGLSPEIKQSGSSVKDKEKLTRLGNKRLKTALFMPALSAMRSNYFKPFVARLRANGKCPKVIVVALMRKLLKLAYYIYKTKKPFDANYKASL

SEQ ID NO: 319900 - protein, 356 aa, unidentified
MSQKSSCAIAVVGIDIGKNSFHVVGQDRRGAIVLRQKSSRGQLEARLANLPPCLIGMEACVGAHHLSRKLQLLGHNARLMPAKYVRPYSKGQKNDFRDAEAIAEAVQRPTMKFVATKTADQLDLQALHRIRERLVSQRTGIINQIRAFLLERGIAVRQGPRFLRAALPGILATRSDVLSPRMLRLVEDLAGDWRHLDARIERLSGEIETLARQDRHCERLMSVPGIGPIISSAMVAAIGTGEMFSKGRDFGAWLGLIPKQISTGDRTILGSISRRGNRYLRALFVQAAWVVLVKLGPKQWEHYGLKSWIEAAKKRLHRNVLAIALANKLARIAWAVLNKGRAFMCVKTDAMASPPA

SEQ ID NO: 319901 - protein, 375 aa, unidentified
MKKYMKFVALDQHQHSTTVAIAEPGRQKPRLYGQISSRPEALAELAQRLDNGETELAFCYEAGPCGYGAYRQLTALGYQCTVVAPSLIPRRPGERVKTDRRDAVKLAEQHRAGELTGVCVPGVEQEAMRDLVRCREDLKGMHRQVRQRLSGFLLRHGRVYSGGSKSTQAYGRWLEQQRFESPVQQIVFQEYVDTATSLQQRLTAVEEEMARARGDWALAPLVEGYAALRGVAALTALTVAAELGDLTRFDSPRQLMAYVGLVPTEHSSGAAHRRGGITKTGNAHVRRVLTEAAWCYRFPARKTAALQRQAELTTPEVQDVAWKAQRRLCHRYRYLTNRGLAHNKVCTAIARELLGFLWAIAWALQPAAAAAAPGA

SEQ ID NO: 319902 - protein, 342 aa, unidentified
MSVMIGIDPHKGSHTAVVIDSDEVVIDQVRVKASGGQLAELQSWASGYEDRCWAVESARGLGYLLSQQLVAAGERVLDVPPMMASRVRVLGSGKSQKNDPNDARSVAIAALRHSGLTTVTADDHTRVLGLLAKRHRDVARLKNKAACRLHALLLELTAGGLASEMTVNKANSLLENVKVTDEVTRHRIVIATELIDDIARFNAQMRASKKRIRTAVAASGTSLCDIRGIGPIGAATILGSIGGINRFPTKGHFASYNATAPIDASSGNHNRHRLNPRGNRKLNHVLHIAAVCQLRYPSEGRVYFDKKRDEGKTSKEAIRALKRRISDVVYRRLQADARRSMS

SEQ ID NO: 319903 - protein, 427 aa, unidentified
MAARCIFAVLNSEIMAAVEFTQVVSRGCGMDIHKEVVVATVRGDGIQKETRSFDTFTSSLTELREWLVSLGITHVAMESTGVYWKPIYNVFEGYIPHVWIVNARHIKNVPGHKTDKNDSEWICQLLMAGLLKPSFIPPREQRELRDLTRYRRKVIQMVSANKNRIIRTLEDGNVKLSSVLSDTSGTTGTKLIEMLCNGKELTLQDIEDVRHGRCHHTSEEMLEACTGYMNDHKRYMLQRIRDCNRNLTVEIIELDRRIKEIVAPYSEVMGRLDEIPGLHDRTLEDLIAEIGLDMAVYPRAESLCKWAAMCPGNNESAGKKKSGKTNHGDKYVKATLVEAAWAASRTKGTFCKERFERISKRRGGKKALIAVGHSILKAVHYVISTGGRYHELGEQYVPSKIEKKRRDYLRGELQKLGYEVSLIKKKD

SEQ ID NO: 319904 - protein, 467 aa, unidentified
MQELTLGIDVACRAAHQASLADQTGRFAWSGRRFRTTTADLDRLWAAIPSPAAVTVVLEPTRNAWVPLAAWFRRHGARVIVVPPEQSADLRDYYSKHAKSDHLDSRMLARLPLLHPEGLRPAEGLGPADPLRRATRLRASLVKRRSVILARLDSYLELLGPGWHAAFGGDLASNTALRFMAAGYADPHTARRLGPARLARFIWRYSHGHWGEELADQLLAAAAETLALWDGELDYTELAADIAAEARLALALTTEIRDLEQKIAAQLHQADPAAIMTSVPGLGVINAAQILARLGDPARFRSLAGARSFTGLVPSLTASGVNGHHGPPTKSGDAPLREALFMAADTARRTDPVLAARYYRLMVHQGKHHNSALCHISTALLTKIIACWRAGTPYQIRDTDGTPLTPAQGRAIVAQRYRIRDDIRAQRRTTHVSKKAGRRHQESPGAPTPARPHTTLRPHTGELLDTA

SEQ ID NO: 319905 - protein, 378 aa, unidentified
MRQGGRDRIDPIIVVSINPLCFYAMIYSSGADISKEAFSLCVLSYHLNEQYHRVIARKEFANRPGGHKACLSWVRRHTPETGPIRVTMEATGIYYEGLALYIAEHAPDIHISVVLPSQAKRYIQSRGLRSKTDKIDAFGLALMGAERRLTRWAGIDPFWRNLRQLTRTRGSLLDQRTQLRNQIHALRHSGVEGGAAQQALEETVAAMSQQIELLTQRIYHQLRSRSDLTEQVDRLRSIPGIGLLTIATVLAETNGFERFTSISQLISYSGYDVVIRESGKWAGKPKISKQGSKYIRRAMYMPASVVIRSGQGPTFELYQRLVGTHNIKMKGHVAVQKKLLTYMYTLWNTGRWYDPQVIKDQQKVALPEGKTTVDTSYA

SEQ ID NO: 319906 - protein, 336 aa, unidentified
MNKFKAFTGIDISKKTFDAALHFSEKCVVHHKCFSQTTEGFMSFVNWLQSHQVTMQDTLICMEHTGLYTNGIIEFLVGMKANLWVEMAIKIKRSMGLQRGTDDKASAITIAQYCLRFSDRARFWKPVDTRLSKLKNMIVQRDRIVNALKQLSVPIEEMKSCNAAKEAGELERLQFPAIKGLYKAKEKIEASIQSYINSEEVINKSIQLMCSIKGVGLQTAASLFVYTKGFTMFENAKQLACYCGVVPFSKSSGTSVRFKPGVSPFANRKLKSLLHLCAMSALRWDKEIKAYYERKLMEGKNKMSVINAIRNKLLLRIFAVLRDQRTYVENNKLAGA

SEQ ID NO: 319907 - protein, 420 aa, unidentified
MLEETNQTEEIVERVAALDIGKAELVCCVRVPGKAGKRLQEVTTYATMTRSLLQLADRLAELGVTRVVMEATSDYWKAPFYLLEAQGLEVWLVNAREVKHLPGRPKTDKLDAVWLAKLAERGMLRPSFVPPAPIRRLRDLTRYRADLVAVRTAEKQRVEKLLEDAQIKLSVVASDIFGVSGRAMLAALIQGERDPKRLAQLARTRLRAKLGQLQEAFTGQFTDHHAFLLQTMLGRIDQASADIAELDRKIEAEIAPLGAAVERLDEITGVGRTAAQTIIAEIGTDMARFPTAGHLASWARYAPGVNQSAGKAKGKATTGHGNPYLARVLGEAAVAAGRTDTFLGERYRRIARRRGTKKAIVAVGRSILVIVWHLLADPNLRYHDLGASFYDTHVNAERAKRNHVRQLEALGYRVTLVSAA

SEQ ID NO: 319908 - protein, 411 aa, unidentified
MDRFVERCAGLDVHKDSVAATVHVPGRDGSRLQETRTFATTTRGLLTLADWLASYGVSLVGMESTGCYWKPVYYLFEERFECWLLNPRHLRNVPGRKTDVADSAWICQLVEHGLVRASFVPPRPIRELRDLTRYRKTQVEERSREVQRLDKVLQDAGIKLSSVASKTLGVSVRRMLDGLVAGTHDPELLAELACGRLRRKLPALKEALSGRFRSEHHGLLVAQILAHIDYLDETIATLSERIEQLIAPYSRQHELLETIPGVGRTGAEVLIAEIGVDMSVFPTDAHLASWAGQCPGNHESAGKRRSGRPRHGSRSLQATLTESAKAASRSKGTYLGAQYTRLRGRRGPGKATGALRHSILIAAYHILDENNAYRELGADYFDRRSTEQRTKRLVRQLEQLGHNVTLEPLAA

SEQ ID NO: 319909 - protein, 450 aa, unidentified
MREPREIEDREDELAVARVAAVDVAKASAVVCTRVPREGGPGRFVTRVWPVGATTNEIIELAAHLAGQRVEKVVLESTSDYWRPFFYLMEAAGLHVELVNARDVKNAPGRPKTDRLDAVWLAKLAGWGMLRPSFVPPAEIRQLRDYTRLRTDLTRERTRHWQRLEKLLEDALIKVTAVASRIDTMSVRDMVEALIAGQRDPRKLADLARGRMKAKRAALIEALTGRFDAHHGELAAILLAQIDGLTAQIGALGARIEELIAAIPGAQGVDADGTTGPQAGRGPDAAVLPAIDRLQEIPGISRHAAQVIIAEIGLDMTRFPTAGRLVSWARLCPRTIQSGASQRPGKTAKGNPYLKGVLGDAAAAAGKTTTFPGQRYRRLARRRGKLKALVAVARTLLVIIWHLLADRAARFEDLGDDYYLNTIDTDRRARSHIRQLQALGFTVTITPAAA

SEQ ID NO: 319910 - protein, 341 aa, unidentified
MEEYIGLDVSMKETSVSIRRAGERIWRGKCASDPRTIAELIRKRAPAVKRVVFETGPLSIWFYHSLRTEGLPAICIDARHAKAALDMATNKTDANDADGLAQLAEVGFFREVRVKGFDSMLTRTLVAARTRLVRITTELSNQIRGVMKTFGLLVPAGKGSTFEKNVRSLLADQDGLASIVLPMLEAWRGIRIRAAELGRQLVRDARQSQACRILMSIPGIGAITATAFSTAIERPDNFKNSRSVGAWIGLTTRRYQSGEVDYDGHISRRGDCHLRGLLYEAAAVILTRSSTDSTLRTWGRKLRERIGFKRAAVAVARKLAVIMHTMLKSGELFNPNAGAAA

SEQ ID NO: 319911 - protein, 312 aa, unidentified
MNDKKTSVYAGLDIAKASLQLHLQSKFFDLPNTAAGHAQLIKRLAAIPGIHVICEATGGYERAVVAALHAAALPLSVINPARVRQFARASGELAKTDPIDAAMLTAFGQAFAPEPTPARTPTELKMAALVTRRVQLLELRVAEAQRAHTCADLDLRKLFTPWLAQMEKQITKVEALIEALLKAQASLADQVQRLDNIMGVGRLTAVMVLATMPELGQLNRRQAAALAGLCPYNRDSGQWAGKRCISGGRAEVRRALYMAALSASRSNHLLKPFYDRLIAAGKPAKVALTAVMRKLIVLMNHLLKNPNFSLAH

SEQ ID NO: 319912 - protein, 338 aa, unidentified
MEEVSTIGLDLAKNVFQVHGIDAAGKVLVRRQLRRGEVLSFFGRLQPCLIGMEACATAHYWGRELIQLGHTVKLMPPAYVKPYVKRGKTDAADAEAIAEAVTRPTMRFVAVKSMDQQAILMLHKVRDLLVRQRTMLINALRGHLAEFGVVTARGPAGVKAAIVELHAMQDSLPPLARMAFHRLIGRLESIGDEIRKVEREIVAWCRHNDASRRLMTIPGIGPITASAIAAAVPDASLFRSGRQFAAWLGLTPRAHSSGGKERLGGISKQGDGYIRRLLVTGATAVIRMARQGNPSKVWAARLLERKPARLVSVALANKTARIVWAVLTRHQSYMAPAM

SEQ ID NO: 319913 - protein, 472 aa, unidentified
MYTLKKAYYKEVSPERIQQAMIMEEKEHGNYNLLRLVSVGNKNTLTGGVTAMHRKNDNRQVEKRQRITDATLVIGMDIGCEFNAMCLMSKEGTILGRYPKIYNSRKGFDYFHGIVESMKEKYGFTDVLIGMEPTGHYWRKIAYFAMDKQYEVRFIRTTALKHQRELDESSSAKNDIRDAYTIANIAREGKYIDTVIEDNIFRQLRTLAHTREKIQRISTGAKHALKGMLEDYFPELKHIFWSMKAKGLWALLEHYPFPEDVLKTDIDTVTELIAQSTRRKIQAHEKALQIYKAAQHSIGLQRVGDADRWRVAAYLSEIRHSETQLKEIEAQMEALLKKIPFAEYILSMPGIGTLTCGVFLGELGNPCNFTNPKQIVKYAGYDPKEHDSGQRTGRRIISKKGRWLLRKYLYFMAMRVVHRSPFLKDYYENKQKTMTKKEALCAVVIKLIKVIFALLRDKRTFTEKQSCLKQAA

SEQ ID NO: 319914 - protein, 344 aa, unidentified
MYFIGVDDHKQVSVMTVLDEDGQEWKNRRVPNLRRYVEQFLEDCRPFTAVLEAGRSSYVMADLLRELGGEVKIANALQVKAIAHARIKTDKRDSRTLAHLLRANLIPEVYQRGGWNRRAQRVMRMRAYWVHKQTEVKNKVRALLAQQREEVRLEVEKRESGLFSSKGLEFVAKLPLESREKEVLEDLPQGYQEIQAHIKKSDGLVNALYGEMEEASRIDTVPGFAKTLSVLVAVEIADVKRFARAADLHSYAGVIPSTYSSGERTYHGHITKQGSSWLRWAALEAVYPAIKKDLVLRTLYSQLARRKGPNVAKIAVARRLLTIIYRMLTEKRDYIPDVMKQSAA

SEQ ID NO: 319915 - protein, 348 aa, unidentified
MLADELDFVIGVDTHRDEHALALVACPSGARVQERLIGADERGYAAALAFAVERAAGRRAWAIEGTGSYGKGLARYLTQRDERVHEVERPKRQGGRARAKSDRLDALRAARSLIAAEKPALPRAAGLRESLRVLLQVRTSAVAARPVALNQLRALLVTCPEPLRAELRSLTRARLLRRCRELEPERTDDPELRSTLQALRLLAARVESLTAETRELEQELRAEAEQIAPALLAERGIGPIGAAQALVSWSHKGRFRSEAAFARLAGAPPIPASSGKTVRHRLDRGGDRKLNNVLHQIVITRRKHDPRTIAYIERRRREGKSEREAIRSLKRHLARHLFRLLETTATPT

SEQ ID NO: 319916 - protein, 338 aa, unidentified
MALQCGMDLHGKNVLCSLTDEKDKVVAERRVATKLDEVLLFLGPYKSDIKGIAVESTYNWYWLVDGLIDEGYCVHLANPNAVKTYDGLKHGDDKGDARHLAHLLRLGLLPTGFIYPREQRGMRDLLRRRMLLVQERTRFILSLQSLCERVNGGKHAAEKFKRMKPEKLVELIEDPYHQAGALEYLDVVRRLNQGIYRLETKVLGECKDTRVFELLNTIPGVGRVLGMMIAFETRPLKRYAKPGNYASYARTVNANRYSDGKKKGENNRKCGNKYLAWALVQAAHQLIRYCPEARSFYDRKKAKKNGAVATKALACKLARCIYHMLTNDEEFDVKKIFG

SEQ ID NO: 319917 - protein, 345 aa, unidentified
MDHFAGLDVSVKETSVCIVDDTGRIVREVRVASEPEDLLQILSNPAYHFKRIGLEAGPLSQWLFSALAEAGLPVICVETRHMRAVLKAQINKTDRNDARGMAQMMRAGLYRPVHVKTLRSQKLRMLLTHRKLLQSKAIAIDNDLRGTLRNFGLKVGVVGTVKFEARIKELVENLPDLADLVEPLLVVRRVLREQFVIQHRRLLAIVRDDEVCRRLMTVPGVGPVVALTYRATVDMPARFRKSKAVGAVFGLTCSKYQSGEIDRSGRISRCGDEMMRVMLYEAAQVMLLRTAKWSWLKAWAMQIARRRGMKKAIVALARRLAVIMHRLWVDGTEFHWTREQVAAAA

SEQ ID NO: 319918 - protein, 339 aa, unidentified
MRYFIGLDVHSNNTVIAVLDEKGKRVYSRRVKNFIKLVLEELEPFKGKVQAIALESTFNWYWIADGLRDQGYQVHLANPSANKQYEGIKHTNDFSDAFFLAELLRLGILKEGYIYPRRERAIRDLLRKRLMLVRQRTAHILSFQSLYNRVKGCSFGGVMYVKRLKEDEMDDYFEDENFALAAKANIASIRFLTQQIEKLEKTVLKKIELLPEFEKLKTVPGIGNILALTIMLETGDIRRFPKVGNYVSYCRCVPSERSSNKKKKGENNRKNGNKYLGWAYVEAANFARRYCSKAKRFYQRKSAKTNNIVATKALAHKLARASYFVMRDRVDYEPERLFG

SEQ ID NO: 319919 - protein, 410 aa, unidentified
MLKIIYPICCGIDVHKKFVVACIASTDDRGVTTYRSSRFSTFTSGLRKLSGWLYSNSCTHVCMESTGKYWIPVYNILEDTCQVTLAHPKYIKAIRGKKTDKKDARWIADLFKHDLVAASFMPPFRIRQLRDLVRYRFKLTGFGSSEKNRIQNCLTVSNIQLANIVSDTFGKSSMKIIDYLLENPFDKDFDFVPLLHGSMTGKADNIRLAIDGMITQEQRQKMNIILCHFSEVQKCKTDLESLILSLSEPYARQCSLVSTVPGIKNPFSVIAIISEIGADMSVFATAKHLCSWAGLTPQNDESAGKKHSVRISRAGVYIKPLLVQCANAVVRSEKHPEIRGRYLSIRKRRGHKRAIIAIARMLLTAIYHILAKDEPYNPELYKKADVLPKTRNITVDQAILLAQRYGYSVA

SEQ ID NO: 319920 - protein, 427 aa, unidentified
MGLIMPSVMHPERVEQPLPYEWFVGIDWGSQQHQVCVLDRDRRLVGERAVDHDGASLAHLAAWLWTLSAGQPQRVSVAIEVPRGAIVEGLVERGCHAFAINPKQLDRFRDRHSVAGAKDDRRDAFVLADSVRTDRPSFRRLQLDAPHLLLLRELSRAEETLLEEFRRSANRLREQLHRFYPQMLQLCSAADEPWLWDLIDLAPTPAHAALLREEHVQRVLKAHRIRRIKATEVLACLQAPALPVAPGTAEAAQAHCGFLLPCLRVLAEQLQACSQQVGTLLRTMADEPGEGESPSDVAIVQSLPGVGRKITAWLFAEAAQPLAERDYQVLRTHGGVAPVTKQSGKRRQVVMRHGCNPRLRHALYHMARVAMQRDAHFSSVYAALRAKGQRHGQALRNIGDRLLRILMAMLRHRTGYDASRIRCEPVV

SEQ ID NO: 319921 - protein, 343 aa, unidentified
MQVIIGIDPHKATHTAVAVNGSEDEISRLKIRASRDQVAKLLTWAAPFPARTWAIEGAEGLGFLLAQQLVTAGETVVDVPATLAARTRVLGTGRSNKNDPNDAMSVAVTALRTRDLRRVQSVGNSEVLRLLSKRNTDIGRQRSRVVSRLHALLVELAPGGISREINVSGAEAFLAKITPSSVVEQIRCDLARELIDDICRLDVQLKESHKRIAIAVRASSTTLTDLFGVGPMTAAVVIGNVGDVRRFRNRDHFAAYTGTAPVEFSSGGRIVHRLSRRGNRTLNAAIHMAAVTQLRHKRSDGRVYFDRKVAEGKTKREALRSLKRHVSNAVYRQLIVDANRIAR

SEQ ID NO: 319922 - protein, 412 aa, unidentified
MGRRCIGLDVHREFAQIAVWEDGKVRPAGQIALTAEALRVFCDSLGPEDEVAIEATCNTHAIVRLITPHVARVVVSNPQKTRAIAEAKVKTDKVDAAILAELLAADFLPSVWVADEATHALRRQVARRANIVRQRTRLKNQVQAILHRNLIPRCPAADMFGVKGRCWLSDQHLPADEELAVDALLRQLDFHGQELRIIDAALGRVALEREEVLRLMTIPGVDATVAVSLVAAVGDFRRFSRPERLVSYLGLNPRVRQSGNQAASHGRITKQGRAHARGMLVEAAFTAARTPGPLRAFFERVRARRGVQIAIVATARKLVCLCWTMIERGEDYAFARPSLTEKKRRALELRAGLPARQGRKGTAAAYSLKDVRLRELEVAQQAEHAYRQQVADWQASRPSKEGVVAANGTRLK

SEQ ID NO: 319923 - protein, 358 aa, unidentified
MTHVNMALSHAGVVVGVDTHADTHVAAALDSLGRVVGRLEVPTTRSGYSRLLSWSRDFDSNVAFGVEGTGAYGAGLARFLTAAGCRVAEINRPDRRSRRAHGKSDPLDAEAAARSVLAGRDAGLAKADHDRVGMIRTLRVARRSAVKMRTQTINQMKALVVTAPDELRSHLRQLNSTGLVAVSANARPGLIGTPTAAAKMALRSLAIRHQGFTAELNALDRELDRLTVEAAPALTTLKGVGSDVAGALLVAAGDNPERLRSDAAFASLCGVSPVPASSGKTNRHRLNRGGDRIANNALWRIVMVRLTCDERTQSYVARRTAQGMAKRDIIRCLKRYVAREVFHALVDAGTPLQGLAKA

SEQ ID NO: 319924 - protein, 342 aa, unidentified
METRHIGIDLHRNNFTCCVRLENGRNYLSAWKLEALPQFVKKLRATDEVAVEITSNTRLFYEAVVPHVARVVAVNPIQFRVISQSVKKTDPNDARNLALYLAKGLLPEVRMKEKTQAQIASLTQTRDTLVKLRTALKNKVNNILSAHGINLEKEALSAEKKLNEVLAMQFDPMVRTELKVIVEQIRSLNESIVELEKTIAEEGQKLPGHKNLTSIKGIGPLTGSILLSVIGNIHDFPEEGKLAAYFGIVPRVSNSNETERSGRITKRGSKLGRTALVQCALIAQRYSPYLKRFYEKTKARRGTGKAIIALARKLLGIIYRTLKNNWVFADFPNFVLAEEAAA

SEQ ID NO: 319925 - protein, 446 aa, unidentified
MSLDCCYEHAGLCPGRGPSGPAPSGDGRLTEGRRDVMEVMFDRVAGLDVGKETVAVCLRIPGSKGRRHAETRTFKTMLGSLRVMRDWLVEAGVSIAAMESTSVYWKAPFYCLEEVMDVWLLNAAHMKAVPGRKSDVRDAEWVAQLLEHGLLRPSFVPPPEIRRLRMLTRYRVQLMGDRRRDIVRLELMLEDASIKLSSVASSLKTVSARAILTAMINGETDPLRLAELAKGKMRRKIPDLAQALTGHFDANHARLARSMLRRLDLVEQAMAELDAVIVEACQPWAHQIELLQTIPGVGPKVAEVIIAETGGDMSRFPTAAHLAAWAGLAPAMNESAGRQSPAGKRHGNKWLAAMLVEAAGSVGRMHGKNYLAAQHARLMRRRGMGRAQVAVAHSILVSAYWMLKRDEPYHDLGTDWHTRRNDEAHTRRLITQLEHLGHTVIINPAA

SEQ ID NO: 319926 - protein, 363 aa, unidentified
MFTERTSVGLDVHARSVAAAAIDGVTGELFQSKLTPSPEHIRSWLAVLPGPVAVAYEAGPTGFGLYRHLTAAGLRCEVVAPSKLQKPAGDRVKTDAKDAVHLARLLRLDEITTVSIPTVDQEAARDLVRAREDCRGDLMRARHRLSKLLLRHGVVYYGGKAWTGKHDTWLRTEALPQLGPRATRLAFDSDYETVLVIKARRDRLDVAIEEIAADSEFTPLVRRLGCLRGVGTLTGFALAVEIGDWHRFSGNTIGSFVGLVPSEHSSGQSRSQGSVTKTGNGHARRLLVEAAWHHRPRYTVGKTMRERWNLAPAAARIRGDEGNRRLHQRWVKLIDRRKRGTIANVAIARELAGWCWSLAVMED

SEQ ID NO: 319927 - protein, 342 aa, unidentified
MYYIGLDVHKKTISYCVKDASGQVHQEGKVGATRWELDDWMKTLPQPWTVAMEATIFTGWIYDHLLPHAQQVKVAHPLMLRAIAAAKKKNDRIDAGKIADCLRCDFLPECHMASTAIRDRRRTVRYRHLLVGQMVQMKNRISGLLMETGVSHNKQRLHKVGYFRELLASNEEVNESIRPLLRVSRDSIVRLQKTEYALVSSLQRDPLLAERIKRLRTVPGVGPITALTWALEMGEVSRFPSIRQAISYCGLCGDEKSCADKVTRTPLSKQRNKHIQRVLVEAAKLAPRQDHNLALVYEREKQKGNANRATLAVARKMVAYLLAVDRGQRDFVPFADSQSAAA

SEQ ID NO: 319928 - protein, 369 aa, unidentified
MEKTTTYIGLDVHKDTIVVALAELGVRGEVREYGKIANTAAAVKTLATKLASRHDALRFCYEAGPYGYGIHRQLASLGHECVVIAPSLIPRKPGERVKTDRRDAGKLAALHRAGELTPVWVPDQVHEAMRDLVRARQASVRSLRQARQQLSGFLLRHGHHYQRPAWTKTHQRWLSGLKFDQPVYYIVLEDAIAAVEAATARRDRLDAQIDAALSEWSLAPVVHALQALRGMRLVAAATVVAELGDMTRFTNPRQLMAYLGLVPSEHSSGSTRRQGGITKAGNGAARRMLIEAAWSYRFPARISRELLLRQEHLAKPIRDIAWKAQERLCRRYRKMTRDRKLPTVVTAAIARELAGFVWAIAQHVRFGAR

SEQ ID NO: 319929 - protein, 471 aa, unidentified
MAAKNGKAEDAGVPGHGGDGAEVAEDSTQVVEYAAAIDVAKGSGMVCTRVPGSRPDRRRQRTWRAEATFTEVTALMDHLRAEGIQRLVLESTSDYWRIWYYLAEAAGLEVWLVNARDVKHLPGRGKSDKADCVWLCKLNERGMLRRSFVPPQPVRDLRALTRTRSRLAQDQARHQARVEKILEDALLKISVVISDLFGASGRRFLDALVAGERSPAALAALGDKRLKATRAELAEALTGRFRDIHAFEISVHLRLTDAICAEITALDEQIGQQLALVPRTAPACVACGLAGGGHTPGCAGEDVPVLDLATRLEEITGVGAVNGRALIAELGTGPSQFPTPGHAAGWARLTPRSQQSGETAKPGRTGKGNRYLRGALGQAAMTAARTDTRLGAMYRRIARKRGKQKAIVAVSRVICETAWMLICDPSARYNELGPDYYRPLSPARQTQAKIREIERLNPGRKVILADACAAA

SEQ ID NO: 319930 - protein, 359 aa, unidentified
MEAQRKALSFKGQNIYIGIDVHLKSWSVTLMSEATQLKRFSQSPDPDALYAHLVRNYPEAEYHSVYEAGFCGFWIHYRLVGLGIHNIVVNPADVPTTTSEKLRKTDAVDSAKLARSLRAGELKGIYVPGSESLETRSLIRLRDSITKDQTRLKNRIKSHLRYLGIEIPEEFSGPGRCWNRRFVVWLKGSETGTAYGRQTLDFLVRQYEALRGQRLEMLRAVMALSRTERFEKPLENLMTVPGIGQLTGMSLLSEIDDIRRFKSADQLAAFIGMIPMCHSSGEREGVGDITVRRSARLRSVLVEASWVAVRQDPALSMAYGNYCKRMAPGKAIIKIARKLVNRIYFVMKRNQPYVKRVVA

SEQ ID NO: 319931 - protein, 373 aa, unidentified
MKQVTTYVGVDAHKKDLFLAMLVGTQANPVTWTIPNEPQAVKRLVRKLERETSGPVRVCYEAGPCGYALQRQATTARVSCQVIAPALIPRKPGERVKTNRRDARKLAELLRAGLLTEVQPPTPEDEAVRDLCRARDDAREDLQRCRHRLGQLLLRRGLHYPGRNWTRAHRRWVDSLTWTQPAERAVVDDYQLAIDQLKARLLELDTRLGEIADTERYREHVGWLRCFRGIDTLTAILILAELHDFRRFQSPRALMSFLGLVPGEDSSGEKHRRGRITKTGNALVRRLLVETAWHYQHRPGVGVALTRRRKGQPGRVIGIADKAQQRLCRRFRRLREHHKPAPKVAVAIARELAGFLWAALQPVATPATDGLRR

SEQ ID NO: 319932 - protein, 414 aa, unidentified
MSNPLLVGVDPHRKTNTVCTMDREGREVDERFTVQNNRPGTAAFVREIAQRAVDGDFDALHIATEATAWYWWHFFQTLDQDPLLHQWPVTLYPFNPRLTANYKKTFVDLDHDDFIDAFGVADRLRVGRDLPAPFHYEDRYLPLRMLTRYRYHLVHQLAREKAYCLAILYFKYSEYSRKDKRPFSNLFGATSRAVVQEFASIEEIAALPFDELVEFIDRKGKRRFPDPTDNARKLQRVVRDSYRLPQAMRQPINLILSLTLRLISSLEGLEKRLNTAIANGMQPIHQTLDTIPGLGPVFCGGIVTEIGGIERFHYDQAKVAKYAGLKWRKTKSADFTAEETRLTRTGNRYLRYYLCEAANAVRRCAPEYAAYYHKKFHEVRKHQHKRAIVLTARKLVRLVVRLLTTNEQYRHRRS

SEQ ID NO: 319933 - protein, 410 aa, unidentified
MEVMFDRVAGLDVGKDSVTVCVRTPGPRGGRRSVTRTFKTMFGSLRVMRDWLVETGVTIAAMESTSTYWKPPFYCLEEVMEVWLLNAAHMKAVPGRKSDVRDAEWIAQLLEHGLLAPSFVPPPEIRRLRMLTRYRDQLMGDRVREIVRLELMLEDASIKLSSVVSSLKTVSARAMLTAMIDGESDPLRLADMAKGKLRRKIPDLAQALTGHFDANHARLARSMLRRLDLVEQALAELDAVIVDACRPWQRQIELLQTIPGVGPKVAQVIIAETGGDMSRFPTAAHLAAWAGLAPAMHESAGRQTPTGKRHGNKWLAAMLVEAAGSVGRMHGKNYLAAQHARLLKRRGMGRAQVAVAHSILIAAYWMLKRDEPYHDLGADWHRRRNDDAHTRRLVAQLEHLGHTVTLDPAA

SEQ ID NO: 319934 - protein, 390 aa, unidentified
MDVLYQSCAGIDVHQANIVVCILHGPLTSTRPKREMATFDTTTKGLRACHDFLSQFHVEAVGMESTGVYWRPVWHALCDDFKLILAQPAHMKAIPGQKTDKKDAHWIAKLTRIGLLPRSFVPDETIQELRELTRQRKHYVESRNRETNRIHKILQSGGIKLTTYIEDIMGLSGRNLLQLLVDGTPITPRIVHQSVYTSLKKKVPQLLEALDGYFSDHHRFMLKQSLEIYDFYQKQIELLEERMNVYLSQYENHVEILDSIPGIDVITASVIISEVGVDMSQFPTAGHLASWTGLCPGNNESAGKKRSTKIRHGNSYLKKCLCQAAFAARNQKGSTLAERFYQIQSRRGSQKATIALAHQLLKIAYILLQEQITYPEFLAQKKTTGDELVA

SEQ ID NO: 319935 - protein, 338 aa, unidentified
MTYGAIDLHMRYSQIRIVDGEGQVLRDQRVPTTAERLVAACAGYPELRILVESSTESEWVAQVLEAAGHAVIVADPNYAPMYGEVRRKVKTDRRDAAALAEANRRGWYRAVHRVSATQRGRRQVLRSRRHLVQQRSGTISLIRTLLRQDGHRLPRCSAPAVPDRVAALVLPPARQATLAPLTRVVRMLNAEIAALDRELAATATSDPVVRQLMTVPGIGPVVALTFRAFVDDVRRFATAAQVSAAIGLVPREDSSAERRHRGHITKAGPRELRSLLVQAAWVCWRRAKASGTLAAWTEHLAARRGRRIAVVALARRLSRILYALWRDETEFNAATLAA

SEQ ID NO: 319936 - protein, 444 aa, unidentified
MARKSKKQPLKIVHPRCAGIDIGSKEHWVAVDPDCDDVPVRPFSSFSDDLYAMADWLKLLDIEVVAMEATGVYWIPLYEVLDARGFQVNLVNSRATRQVTGRKSDVLDCQWIWQLMTYGLLKGAFRPADKICSLRSLVRQRATKVQDQSRCVQHMQKALTQMNVQLDNVLSSLTGKTGLSILRQIVAGERDPHKLASLRDRRLRATEQTVARSLHDNWREEHLFALTQALAHYDFLGSQIGACDQAISEAVNGLPRLTDQTSTPVKPMRNPHRTSAQQTQLHQALNEILGVDLTTIPTLGVDTVLVLASEIGPDLSRFPSSRHFCSWLGLAPPTHISGGKTLSGPKRKVFNRAGQALRQAAVNARRSNTFIGASHRSRLARMDTAKAVKATAHQLARLIYAMLTQGQEYVERGIEAFEVRSRDRQLRSIQRKAKQFGLALVEAA

SEQ ID NO: 319937 - protein, 355 aa, unidentified
MTVTIVEEARPVTCRTAITGGVDTHADTHVAAALDPVGGLLGVAEFPATAAGYARLLGWLGGFGTVCLVGIEGTGSYGAGLARYVAAAGIRVVEVDRSDRQDRRRQGKSDPLDAVSAARAAQSGRARGAPKGRDGAVEAIRALMVARRSAAGERTRTINQARALLLTGPDDLRARFTRHTPAALVTGLASLRPRPGDVAGYAVRVALRELGQRARFLDGQLQRLDELIVPLVTARAPGLLAVYGLGPRTAALLLITAGDHPGRLRSEAAWAHLCGVAPIPASSGKVTRHRLNPGGDRQANHALWRIVFTRLGSHPATRAYAERRTAEGKSKAEIIRCLKRYVAREVYRHLRPAGG

SEQ ID NO: 319938 - protein, 400 aa, unidentified
MQQQHLLVGVDVGCRKHHVAIGGPGGITEQFEITHDALGFSHFFERISDQANRQSLPVIVGMEGTNGYARPLDQLVKDKGYALLNVNNLKLARFKEIFSSPAKTDSIDAQQIVTLMMMAPFMDQIKESLQPVLTVDVVEQQLKRLSRRRRQLVQEKVSVQNRIQADLQSVCPGFLDIINKVDSLYVLRFLSFRSDLRQLARLKTVTIRSIPGIGAAKAATLVRWQSSATFGAEIDWVGPMIVEDAKRLLQLKEMIDALEAKLQDLVKQSSLAPLLDSIPGFGTISAAEVSGEIGTITRFASEASLAIYLGMAPLDNSSGKYKGTKSPQQVNKRAKAAMMVGMGHHIRKVTESKAYYEKKRAEGKNHNQALRSLGRHITRVFWSMVKNNRLYEQRKQSPAR

SEQ ID NO: 319939 - protein, 392 aa, unidentified
MYIVGIDIGKNHHEASIVSPEGKQIGPSLRFATTHKGADSLMSFIFKNIGNSPCVFGMEATGHYWYPIYSFLKAKGYTIYVINPIQSDSLRKMYIRQTKNDSIDSFLIAEVIRFGQFGTTSMADENILAMRQLCRYRDSVISSRTEIKLRIGTIMEQIFPEYEKQFSSLWVSTSMGILEKYLTPENIENAPIDELFEITKDKSHNRLTKAKAISIKEAAADTFGIKIAQDAFSFQLKQLIDRMNFLDKQIEALDCQILEYYEKFDCYLHTIPGIGMIAAATILAEIGDINRFKSSSALVAFAGIDPTVRQSGEFSSTHNHMSKRGSPYLRHAIFLAATTRSFHNSPLNAYYKKKRDQGKHHLTATGAVARKLTTVIYAVLRDSKPYEPKKFC

SEQ ID NO: 319940 - protein, 414 aa, unidentified
MKQKMIYVGIDWADDHHDILITDDSAKTLEQFRIDHTCDGFALLHSHLVNHQTFPGLVLIAIETSRGLLVHELLQKGYTVYAVNPKAVNRYKDRHVLSKAKSDALDALSLGHLLRTDRHLFQPIKPLPEDYRLLSRLCEDLRKVVDERSRIVNQTISCLKEFYPKALEIFSLNSQIFIDFLKAFPDHGTLSACTKKTFLVFLKKHRYPYPAKAEELWKIIQSPALQPDRVVARTGRLRLGMLLDQLKNLKEHITHYEQEIQVILDNLPESTPVKSLPGVGERLAPELVATLGPNRKDGHHRFHAAEEIAKLSGCVPVVRESGKWRSVSLRYACVKPLRRTFHDWAFASINHSSWARAFYDYHKARNQSHCTILRNLGKKWIKILFAVWLKGTTYNETLHIQNLKARNVPWAMAL

SEQ ID NO: 319941 - protein, 318 aa, unidentified
MNTNTLQNINVGVDTGKSQLDIYIRPLDIYFTVPNTEKGIIDAIKTIRKHRPQRVVIEATGRLEMPFILACNKAKLPYVIANPLHVKRFAGAIGQRAKNDRLDAALIAHYAEAIQPKLTQLKSENIRLMSDLVTRRNQLLSMQTMEKNRTQILPQSLASSIKPILTALKNQITKIEEKITKLIDTSPEYQAKNELLQSMPGVGKIVAASIISNVPELGYITNKQASSLIGVAPITRESGRLKGKRMIQGGRAQVRTVLYMAMMSAIQCNPIFKATYERLLAAGKPKKVAIVACMRKMVVILNSMLRDGVMWDKDSAKN

SEQ ID NO: 319942 - protein, 343 aa, unidentified
MEQITTIGLDLAKSIFQVHGIDALGEPVVVRQLKRRQVLAFFAKLRPCLVGMEACATSHYWAREIAKLGHEVRMMPPRYVKPYVKRNKNDAADAEAICEAVTRPTMRFVPIKTPQQQSVLMLHRTRQLFVHQRTMLINAIRAHLAEFGIVAGIGRNGVEVLLELIAKGEDERVPAAARECLVALATQLQLVKRQILEADRRVLAWHRSSRTSKRLEAIPGVGPLIATALVASIPDPSIFRSGRDMSAWIGLVPKQNSTGGKQKLGSISKAGNRYLRKLLVVGALSVIKRAKKLGYTKHPWLVRLMERRSTKIAAVALANKIARMAWAMMTRNESYRTPLPQAA

SEQ ID NO: 319943 - protein, 355 aa, unidentified
MVQPRRPNMKRSNTVGMDMGDKKNQICILDHDGNVCSTDSVANTAKAIRKKFGAMQPSVVAIEAGTHSPWVSRLLEELGHRVLIGNPRKLRFIWDSDNKYDPRDAEMLARIARFDPRLLYPIHHRGEEAQSDLAVIKARYALIKSRSALIAHCRGSVKSVGGRISKCSAATFHHRLYAEMPDALRAALSPMIELLADLTARIREFDRQIETLSKDKYPETLRIRQIRGVGPVTALAFVLTIEESSRFKKSRSVGPYLGLVPKRDQSGQTDKQLGITKAGNEYLRTLLVNCAQYMLGHFGEECDLKRFGEKLAARGGKNARKKAIVAMARKIAVLMHHLWKTGEDYKPLRNATKAA

SEQ ID NO: 319944 - protein, 407 aa, unidentified
MDLLKTVFGIDVSSRKSNVCIMVNGQKVNDYAISNDMVGFNQLLDDLKQVTNPQIIFEATGVYSRRLQAFLNMHELRYVMMNPLEAKRKTKDDLHQNKTDKLDAMYLAKLQSEHPQRLAYVQSEEYQELMANNRIYEQASHDLITNKNRLHKAIQLTFPEIEHVMVNPRGKNYWSIVLRFPHPDIVLETKEADIIDFLKGLSGIGKKRANDIMQSLIRLAKVACPAVKKDSAHIRGLEMAINNILSAEEACQTALKEMTKLAPKRDLEILTSIPGIGENTALRIISELGDIRRFNNPSQLNAFVGVDPQVYESGNLTAHLSISKRGTAIGRKVLYLAINQIQSAKKAGNPCHIADYYEKRKRSSETASHKKAAIASIHKLLRTIFALIKNDQLYSYDVAKHNQRLLS

SEQ ID NO: 319945 - protein, 345 aa, unidentified
MKIIGCDFHPSFQQIAMCDSETGEFQERKLSHADGQAERFYRELGGPALIGIEATGNSQWFLDLVERLGYEIRVGDAAKIRASYVRKQSTDKRDARHLLTLLLEKRFPQLWTPSAAMRDQRQLLRHRDKLVEIRTKVKNSLQHLAMNRGMQKKSRLWTRLGMEQFQQLAMPGWAGVRREDLSHLLKQLNCQIETLDRAVEQAACQHPQAQLLMSQPGVGPVTALAFVLTIGDVTRFAGSKQLSSYLGLVPSEHSSGSKRRLGAITKQGNRFLRKLLVEAAQTAVRKDEGFRKEYQHRCRRRPKGVAKVAAARKLAVRLYWMLRSNVSYPEIVRVESNPRVPLGDV

SEQ ID NO: 319946 - protein, 344 aa, unidentified
MDHFAGLDVSVKDTSVCIVDETGKIVREMKLASEPDALVAVLKNPSYHFKRIGLEAGPLSQWLFSALAEAGLPVICVETRHMRAVLKAQINKTDRNDARGMAQMMRVGLYRPVHVKTLRSQKLRMLLTHRQLLLSKAIALENDLRGTLRNFGLKVGIVGKVKFEARIRELVENLPDLAVLVEPMLIVRRVLREQIVILHRRLLAIVRDDEVCRRLMTTPGIGPVVSLTYRATVDIPARFRKSKSVGAVFGLTCAKYQSGEVDWDGRISRCGDEMMRTMLYEAAQAMMRSKTWSWLKAWAMQIARRRGMKKAIVALARRLAVIMHRMWVDGTEFRWTREQAAAAA

SEQ ID NO: 319947 - protein, 344 aa, unidentified
MDHFAGLDVSVKATSVCIVDDAGKVVREVKVTSEPEALLAVLKNPAYHFERIGLEAGPLSQWLFSALAEAELPVVCVETRHMQAVLKAQINKTDRNDARGIAHMMRAGLYRPVHVKTLRSQKLRMLLTHRKLLQSKAIAIENDLRGTLRNFGLKVGMVGMVRFEARIKELVESLPDLAELVEPLLIVRRALREQVVILHRRLLAIVRDDEVCRRLMTTPGVGPVVALTYRATVDVPARFRKSKAVGAVFGLTCSKYQSGEIDRSGRISRCGDKMMRTMLYEAAQAMMRSKKWSWLKAWAMQIARRRGMKKAIVALARRLAVIMHRIWVDGTEFRWTREQAGAAA

SEQ ID NO: 319948 - protein, 430 aa, unidentified
MRDNYNMKSEKFGKINDKTLVGGIDVAKDIHEVKWVNWRGEQIGKGLRFNNNRQDFEKLIRQAKQVQEKIGAEKIIMAMEPTGVYGFALEEYLQQIGIDVLIVNGRDVKRTSEVLGNDSSKNDARDARIIGHLVSLGCYSESTRHKEGPYCELDILLRRRASEKEDLIRFTNRLHKELAMLFPEYGVFKNTGLSMGVLTLFKEFGNLEAIIQAGEEGIYACWRKHRTNGYGKGEAKQMHQMAKNSIGIRQTSQAVTYTMRVYIDDYLRSLKNLEAINQLIEQQLAEIPQAKRLMAIDGIGSIITAEILAGIGDIHNFTSPKQILKLAGLAPVTNESGKHKGKDKLSKMGRKRLKTAFYQVGLCLIANNDAFKQIYHYYTQERANPLIKMKGVIVIANKFIRVIYAMLKNGIAYDEQRMLADIQRDDQTAA

SEQ ID NO: 319949 - protein, 387 aa, unidentified
MPQLNDLSKSLVALEQDATLIAVIEMGQSSWLVAGIVPGVERQPLKKLTTDQDALLQLLHRWRKEANEAGHVIKRITVAYEAGRDGFWLARWLRAHEIEAYVIHPSSIPVSREHRRAKTDRLDTELLKRAFLGWLRGEPKHCSMAAVPTIADEDARRPSRERENLVKEVTRLVNRMKANLARLGIRGFRPHLAQAAGQLQTLQTPEGTAVPANTLAELRRDMDRLRFVKQQIKQIEAARVQRLESEPGERRHAMVYLLARVVGIGVESADMLVQEVFSRKLRDRRAVARYAGLTGAPDESGNKRRERGLAKAGNARVRRGMIQLAWTHLLHQKDSALAQWYRARTADARGRTRKIMIIALARKLLIALWRLVTTGEAPAGLLIRPAA

SEQ ID NO: 319950 - protein, 314 aa, unidentified
MSSKVIVGIDVSKARLDCFGLPLEQAWSCDNGPGGIEQLVCRVRELGCELALMEATGGYETQAATALAAAGLRVAVVNPRQVRHFAKAMNKLAKTDRIDARVLAEFALSINPQVRPLPDEGTRELSDLLARRSQLVTMRTQEKNRMLQAAPALRAGIKTHIKWLDVEITKLEVDLTAKLRASEAWCDKRDLLLSVPGVGSTTTLALLAELPELGQLNRQRIAALVGVAPLNDDSGKRQGRRFTWGGRAAIRSVLYMAALSAMRHNPVIRVFYQRLRANGKPFKVAIVACMRKLLTILNAMVKQNKSWQPTSQLA

SEQ ID NO: 319951 - protein, 343 aa, unidentified
MEYYVGLDVSLKQTSICVVDRTGAVVREGVVASDPEAISVYVNAKAPDAVRIGLETGPTSTWLWTELKRLGLPVICIDARHAKAVLKMQINKSDRNDAIGIARIMQTGWFKEVHVKDIDSHSVRALLASRALLVKIKRDLENHVRGLLKNLGLVIGRAKFNVFAVRAEELIEGRPELIAAIRPLLEARNAVGEQVSELDRKVMKLARHDAQVRRFMTVPGVGPITALAFKATIDDPARFARSRSVGAYVGLTSRRHASGEVDWSGRISKCGDGMLRSYLFEAAGVLLTRVPKWSAVKAWGVRLAKRNGLRKAKVAVARKLAVILHRMWIDGTEFNWSKEAITA

SEQ ID NO: 319952 - protein, 347 aa, unidentified
MLYVGVDLHQHYLFATVMDEKGKVLTQDKVETDVDSVKDYFGRLVESDFLELAVEPISSWYYFYEIVEEIGCNVHLVNPLKVKAIASARIKTDKIDSNILAHLLRTNLLPEAYIPNRSIRDLKELLRTRASLVHLRTEVKNKIHALLHKNGIQHDWTNLFGKGGREFLGNLGLRQPYQGALEHYLELTDTLDKQIDQLGLEIQLKAEDDQDALLLTTIDGIGYYSALLIKSEIGDIKRFPSWRHLASYAGVAPSVYSSGGKTRTGRITKQGSKWLRWAITETTVRQSRAESRIAEFYRRTKIRKGTRIAKVATARKLLEVIYSMLKNGRPYVAFPEGYSSNKCIPVY

SEQ ID NO: 319953 - protein, 373 aa, unidentified
MKKRNSSSKNQTRAAKTKRTLERVTIGMDLGDKTSRYCMLNNEGEILREGQVATTKAGMVEAFGSLGQTRIAIEVGTHSPWVSRLLQKLGHEVVVANPKQVKLITESSRKDDRLDAQTLARLARIDPQLLRPIQHRSEKAQGALMVIRVRAALLAVRTSLVNTARGLAKSMGERLPKCDADQMGVLQAVSLPPKLRQVLEPLLKEVESLTEKIKNSDREIEQIARKDYPETALLQQVGGVGPLIALTFILTVEDKGRFQKSRDIGCYVGLRPRRSDSGQSQPQLRITKEGDPYLRTLLVQGAHYIISRRGPDTDLKRWGLHLAKHGGKRGKKRAVVAVARKLGILLHRLWVTGEVYEPLRNHNLRQEQKKVAA

SEQ ID NO: 319954 - protein, 337 aa, unidentified
MLDEAGEVLLEQKLSTTPKAMKEVFGAMPRSRMALETGTHSPWVSRVLSELGHEVIVAHARNVRLIGESRRKDDRLDARTLARLARIDPQLLAPVQHRSAQAQADLMVIRARAGLVRARTSLINTARGLTKSYGERLRGCSPRNMNAEKARPLSPELQAALEPLLASIEALSERIYEYNQQIEKIAKESYPQAARLKQVKGVGTLIALTYLLTLEDAQRFRKSRDVGCYVGLQPGRRNSGQREPQLHISKEGDPYLRTLLVQGAHHILGPFGADSDLRRWGLKLAERGGKNGKKRAVIATARKLAVLLHRLWVSGEAYEPLRNSNRTMLAAGLVQIG

SEQ ID NO: 319955 - protein, 346 aa, unidentified
MRVAVTLDAESGELRSARLPGETTKVVEFVGKLPGPTRAAYEAGPTGYGLARALHAAGIGCVVAAPGKIERPAQDKLKTDQRDAERVLRLLMIDALHPVRVPTVEEEALRDLVRAREDVRGDLMRARQRLSKLLLRHDILYEDSATTWTQRHRAWLRSQQLGGGAQATLLDYLGAIDTLELRRDTLESTISELVPASPYAQTVSRLRCLRGIDTLSAAGLCAEIGDFARFDRAGNVMSYVGLVPSENSSGESRRQGPITKTGSRHARRLLVEAAWHYRKTPARGVTLQRRQDGQPANIIAISWQAQQRLHRVWHRLAEQRGKRRTIVAVAVARELAGFCWALARAD

SEQ ID NO: 319956 - protein, 323 aa, unidentified
MKDMMIGVDLAKNVFQVHGPPRTGEVQFRKRLTRTQFSVFMAQQEPCLVIFKACGSAHYWAREMEAVGHEVKLIAPQYVSPFVKRQKNDAADAEAIVIAARQPEMRFVEPKTVEQQSRAALFRGRERLVHQRTADVNALRALLYEHGHVFPVGMHHLNRITALVEDETVDLHALIREECLDLLTQIAEKTARVIERTTKLKTLAAESDRARRLQTMPGVGPLTAVAVEAFGPDMEQFKTGRDFAAWLGLVPKQHSSGGKERLGRMTKAGQADIRRLLIIGAMSRLGWLGQRTILEGSWLSRMLERKPMMLLAIALANKMARQI

SEQ ID NO: 319957 - protein, 400 aa, unidentified
MDERQQFRWFLGIDVSKETFDACCIPSRGERLFNLSASMDRKGFEELIKQLSALSIPRESVLVGMESTACYHVTLYSFLISLGYTVMVMNPLLISNFVKLQLRKTKTDKKDASVIAQFLLLNRDSFCQTLVSSDFSELRELSRQRESLVDQMSSIKSEIKRLLTVTFPELEQMAGVFTKSMLRLLSHYPSAHSIRQLKRSQIAKILIPGSYGKQTAVSVERIIRGAQESIGTTSPAKEIVLKQKVSLLMQLEQHLQELTDILKELCQAKIQENTRILTSMKGIGEKSAMNFLIEMGGDIKDFERHQKLIAMAGLDPALYQSGKIDRKGKISKRGNRHLRRVIWLMTTKVIQFNERFKQYYLKRIKDGLPYKKAVLATAHKLIRVMFAMLTNRTLFDPRMN

SEQ ID NO: 319958 - protein, 353 aa, unidentified
MNSLTDLREVVDVVIGVDTHVHTHSAAVLDTATGGVIDEITVEATAEGYAELVEFANNHATLRAWAIEGTGGHGAGLSRHLLEMSEIVIELDRPKRAARRNGAKSDPLDAIRAAREAMARPQLGTPRGGGERQALSVLLAARRSAINASTEAQLQVFSLVIAAPEPIRARFRGQKLAAMLNTAANLRVHSSWDVETASTVVALRSLARRAHAMLKEAREHQKAIVVIIRGWRPDPLEEFGVGPIVAATVLCAWSHPGRIHSEAAFAMLAGVAPIPANSGQVTTRYRLNRYGDRQLNRALHTVVQIRIQYQPATRDYVARRTAEGKTSREIKHCLTRYVARDFYRLLESGAAAA

SEQ ID NO: 319959 - protein, 346 aa, unidentified
MEYVALDVHKNYTWARVENSQGARLYESRLAHGHGTIKNFVNRWSGGSPVAVETVGNWYWVVDEIEAGGGTPQLVNARLAKLMMGNVNKSDKLDCQGMNRLQRTGTLPTVWIPSSSVRDGRELARTRMVLSRQRTQLKNRIHATLGKYGYTVKGASDAFGKKGREIIEELLLKLPPHTQQALRLILDELDHVTDNLKAIEGHMIEIFSPCPQTQWLKSLPGVADILAVVIWTEIGTIERFNRAEQLASYCGLVSRESSSGGKIRVGPVRRDVNVYLKWAFVEAANSALLNAGRCGYAHISRLYERIKPRRGHGKAKVAVARHLAEASFWMLKKGEPYREPMPSTQR

SEQ ID NO: 319960 - protein, 370 aa, unidentified
MKEPTTSYIGLDIHKESIAIAIADSGRAAPRFIGTINPVPAELCKAMRRVCTKETTLIVYEAGPCGYGWVRYLRKQGWACDVIAPSRITRKPAEKRLKTDRRDALLLARESRAGNLTNIVVPDERDEAIRDLVRTREDVRIARHRVRLQMQAMMLRHGRHYQGKRNWTQAHDRHLSTIRFEHPAQELAFNEYRLASKEACERVERITEALRVQCEDWRMNPVVKALMCLKGFDFVAAVTFVAEMGDLTRFAHPRALMAYLGVVPSEFSSGASRRQGGITKSGNKHARRILVEAAWNNRFKAQVSRELEVRQEGHPKIIRDISWKAQLRLSKRWRSLSMGRKLAQNKICVAIAREFAGFIWDVARHVKVKA

SEQ ID NO: 319961 - protein, 452 aa, unidentified
MNMETNEHGNYSLLRLILVGHKNTLTGGVTAMRKKNDNRQAEKRQRITDVTLVIGMDIGCEFNALCLMNKEGTVLGRYPKIYNSRKGFDYFHAIIEAMKKKYGFADVIIGMEPTGHYWRKIAFFAIEKGYEVRFIRTTAVKHQRELDESSSSKNDMRDAYTLANITREGKYIDTIIEDGIFRQLRTLAHTRERVQRSNTGAKHALKGVLEDYFPELKSIFWSMKAKGLWAILEHCPFPEDVLTLGPDLLTEIVAKSTRRNAKAREKARQILDAAQQSVGLKHIGEADHYRVAAYLSEIRHSEAQLKEIELQMKMLLQKIPCAEYILSIPGIGTLTCGVFLGELGNPGSFTNPKQIVKYAGYDPQEHDSGQRMGRKIISKKGRWLLRKYLYFMAMRVVHRSTFFKEYYENKQKTMEKKEALCAVVIKLIKVIFALLRDKRMFAEKRSCLKQAA

SEQ ID NO: 319962 - protein, 359 aa, unidentified
MDKNTQVPAVRVGVDLSKRVIQVHAVDAGGRALCNRALARDKFLAWCATLPAGCMVVMEVSSSAHHWARQLLLMGLDARIVSAHLAAPYRSEGHVGKNDANDAAAICEAASRPHMRFVPLKSVEQQSLLCVHRLREGIKADRTACINRIRGLLLEFGVAVPAGVRALRLVLDDVLEDAANEMNGLARMTLRRAQQQWRELDEHLAWCDDRLAAHERDNADVRRASALMGIGPVGASAAIATVGDFKQFKSGAQFGAWIGLTPKQHSSGGKSNLGTITKRGDAYLRTLLIQGAKSVVNSAHTRSDPISRWALALKERSGWQKAVVALANKNARILWAVMTRGERFDPHHISVKPGCAAPA

SEQ ID NO: 319963 - protein, 400 aa, unidentified
MSARHARIWVGIDAGKGHHWAVAVNAEGETVFSRKVVNDETEILQLISAACETGDEVRWAVDISGRASTLLLALLVAHGQPVVYVPGRTVHRMSGAYRGEGKTDAKDALVIADTAPMRRDFTPLGVPDETVATLRLLTAHRADLIADRVRLINRLRDALVGICPALERAFDYSAAKGPVVMLTEYQTPAALRRIGVKRLTTWLERRKVRSAGDVAARAVEAAQSQITALPGEKRAAKLVCDLAHQLLALDERIKDTDREIRDTFRLDDRAEIIESLPGMGPILGAEFVAIVGDLSGYESAARLASHAGLAPVPRDSGRCTGNNHRPKRYSRRLRWVFYMAAQTAMMRPGPSRDYYLRKRAEGLHHTQALLALARRRVDVLWAMLRDKRLFTSVPPVAQAA

SEQ ID NO: 319964 - protein, 315 aa, unidentified
MTTSSGRFVGIDVAKDKLDIAVLGEKKASQVGNDEVGIAKLIKKLQILNLELIVVEATGGYQRAVVLGMYEAGLPVAVVNPARVRQYARACGLLAKTDKLDAFNLAEFGKQVKPRQFEAKSEAGRWVSALLVRRRQVEEMLKAEKSRLRTVHAEMRVSIERMIEVLKEEVKELEKELDGFMKGHADWQAQEQILTSAKGVGRVTAATLLAELPELGKLDRKKIAALVGLAPMNLDSGKKRGYRKTKGGRIEVRNVLYMSTLVATRYNPLIKAQYQELLRRGKVKKVALTACMRKFLTILNAMMRDKVPFRQTVIA

SEQ ID NO: 319965 - protein, 427 aa, unidentified
MNSTRNKKIEQVKETTMIVGIDIGSEKHYFRAFNWRGIELTRKPVAFSNSMEGFNSFYNTIVELIQKSELEEALVGIEPTGHYWFDLGQFMGEKNIKFVMVNPHHVHKSKELDDNSPSKNDRKDPRVIAGLVRDGRYFYSYMPTGVYAELRNASNRRFVLVEEQTRAKNRLQKWIAVYFPEYKGIYTRIDAKGGLLVLKQAPTPEEIVRLGVEGIIKIWKDAKLRGNGHKKAMLILNAAMKSIGLKAGLTEARMEIQDLIEDYETKRLERVNDLIKELCQQIRYADKLLEIKGIGITTVAGFIAEVGDITRFDSAKELQKLAGLELVADSSGKHNGKTKISKRGRKRLRYLLFEAAISVVGKNEEFKEIHRYYTTREKNPLKKMQSLIAVACKLIRVFHVILTKGISYDASKMLKDIQHPGEPLKAA

SEQ ID NO: 319966 - protein, 345 aa, unidentified
MLTEHLDAVIGVDTHKHTHTAAAVASTGAVLEQLTVPADPKGYRQLVAFGRRHSATLWAIEGTGSFGAGLTTVLLASSARVVEVERPQRSARRDGVKNDDIDAVRAARQALAGVGVSEPRCRGEREAIRVLLTTRAQAIEFRTRAIAALHALVVSAPGVLRERLRSLPLAKLLHTCAGLRGSSRQSAEEFATVMALRATARRALACEHEAGELETQIDALVRRIAPELLDEVGIGPVVAAQLIVSWSHPGRVRSEAAFAKLAGVAPIEASSGSVVRHRLNRFGDRQLNRALHTIVMVRMRQDPETQQYVQRRVEQGKSIREIKRCLKRYVARQLFRQLEATRPTV

SEQ ID NO: 319967 - protein, 463 aa, unidentified
MSRRRKKARNQNAGWRNFKVQSLPKQLQHINVNAAGIDIGSEQHWVAVPEGRDEVSVRQFGAFTNDLLAIADWLEQCGVTTVAMESTGVYWIPLFEVLAARGFEVKLVDARHVKNVSGRKSDVLDCQWLQQLHTYGLLSGAFRPPEQLCAVRSYARQREMLTQAAAQHIQHMQKALQQMNLLLHNVVSDITGVTGMKIIKAILSGERDPQVLSQHRDKRCEHSRETIAQSLVGNYRDEHLFALRQAVDLYEIYQAKISDCETAIIEQLNTQPNQADDAPPPPDKPIPAHKRLRADADVRELLFKKSGVDLFAVPGLGADTLLMLSGEVGFDMQPWKTVKHFTSWLSLCPGTRISGGKVLTKKVRRNANRAKQAFRVAAASLARSRTALGAFYRRIKARCGGQHAVTATAHKLARIYYTMLTKGTAYVEVGQQAYEQKYQERRIAHLKKQAKSLGFQLVPCSAT

SEQ ID NO: 319968 - protein, 350 aa, unidentified
MIIIGCDYHPGFQEIAFVDTETGDCGEQRLENCEGAEKFYRDLASQGKKVRVGMEASGHARWFERLLAELNIELWRGDAAVIRAKRGRKAKTDRQDALHILNLLLTGAFPKIWVPSWENRDLRQLLWHRHRMVQARTRVMNQLQAVALNEGLRCKKKLWRKHGREQLEAFRLAPWASRRREDLLKLLDRLNPTIEELSEAIEQEAEKYPPAQRLMTHPGVGALTALAFVLIIGEAECFECGKQVGSYLGLVPLEDSSGERRRLGHITKQGNSLLRFLLVEAAQVTSRKIPEWHSKYVHLTMRRGKKIAKVAMARKLAVRLFWMMRKGWNYEQLLKFGSNVEQPGHRHGVK

SEQ ID NO: 319969 - protein, 339 aa, unidentified
MKVTTFGLDLAKHVFQLHWVEPETGEVRRKALKRDQMMKFFVQRAPSVVAMEACGSAHYWARKLIGLGHEVRLIAAQFVRPYVKRNKTDAADAQAIWEAVQRPEMRFVAVKDEHQQAVLTLHRMREQLVKMRTMQINQLRGLLYEFGANLPKGRQQGMAQVGAQLAQLEDTLPAMVIDALRGQLQRVQALSDDIEDIERKLALWKKEDAAAKRLMAIPGVGLLTATAAVATIGDATVFKNGRQFAAFLGLVPRQAGTGGKVRLFGISKRGDTYLRKLLIHGARSVITHQKARAPWLEQLLARRPFNAAVVALANKMARTIWALLAHDRTYQNGVTAQAA

SEQ ID NO: 319970 - protein, 372 aa, unidentified
MNSIVYVGMDVHASNFTLSCYTLTNDECFATVQMEPEVKNILKYLKKVQRNLGVPCEFLCGYEAGALGFSLYRQLQKHGIHCTVLAPSTMPSFHRNEIKTDRRDAMKIARCLAFGAFRPVHIPTKEDAAVKDFIRMRDDHKIALKKIKQQIQAFCMRYDLHFTEGRSYWTQRHLAWLKALALDDLLREVLDEYLVTLHQLADKIEHFDARIEELAQGERYAENVKKLSCLIGVRTHTALALVAETGDFRRFAKAEQYAAFLGLVPGERSSGDKQSRTGITKAGNTHLRRLLMEASQCYGRGKPGYKSRLLKERQQGNTSEDIAYADKANERLRRKFYRMVLRHNKKHNVVVTAIARELSCFVWGMMTGHTAI

SEQ ID NO: 319971 - protein, 420 aa, unidentified
MFMNIRSPFPYQATVGIDWADQTHDVFVRFANGDTYRRKIDSRPEAIQEWLLELRSACAEGKIAIALEQRRGALFYHLCTHLNWIDLYPINPHSLASFRLTFFSSRAKDDPVDSHLLEELVRTHPDRLRPYQPESTTERKLDQYCRHRRSLLDLATKTELKLISTLKQYFPLAVNLFAAVGMKSDIALNFLSRWPTLNELHRAKTHTVRSFFYAHNSRSQSLIEKRLQQIGEAHNVTDDLALIEPLVLTSKCLVGQLRQSNQAIKEFDRKIKELFKSHPDHFLFENLPAAGEQLAPRLLSLFGSNRLRWDDATDIQKYSGIAPVIERSGKSIWVHRRLSRPKFICQTFHEFAQQSVQHSSWANQFYRRQRERGKSHHSAIRALAYKWIRIIFACWKANKPYDESFYLQALAKKNSPLPST

SEQ ID NO: 319972 - protein, 306 aa, unidentified
MSKDTFHAAFDATEVVIFKNTIQGIDEFMSALIDRGCLKNDTKIGTEATGVYHLMFCERLRFAGWHVNVINPLITYRMFRSTIRHAKTDHNDALAIRKTMLTGAGYLYTDTPEILALKTIVQERMVLSRMRAETKQRVHAHQIRAKAAGLELHDSFGGTIKILSYELREIEKKMGGYASETQKLLRSIPGIGPVTAASLVAYIGDVHRFSSPEKLVAYIGLDCRVYESGTSVHGKGRLTKRGSGYLRFILYNAAFVAQRMNPELRHYLEKKMSEGKHYTSALCAVERKLVHLIYAVWRRGTPFEKR

SEQ ID NO: 319973 - protein, 392 aa, unidentified
MEAGTSQPHTPTAIRTDLAAIFVSLELSRSTWLITSLSPGNGEKMSKHSVVGGDVTALLGRFTQLQEKVRSRTGNQVPIVSIQEAGLDGFWIDRVLKANGIESYVVDPASIATSRRRRRAKTDKLDGEALVRALLAFKRGEPRVCAMVNAPSPEEEDRRRICRERKVLIAERIKHVNRIKGLLFGQGVSGYEPLRKNRRKQLDELHTGDGRPLPPHLKTQISRELDRLELLLSQITAVENERDMLLAAQKDSVAATLIPAGAMLCDIKGIGLEFAAILWTEGLFRHFDNRRQVAAYAGLAPTPWQSGTIDHEQGVSKAGNPRLRATMIQLSWLWLRHQPQSALSQWFTARVQSSGGRTKKSAIVALARKLLVALWKYVIAGIVIEGAVLKTA

SEQ ID NO: 319974 - protein, 409 aa, unidentified
MLKIVYPNCCGIDVHKTFVVAVIAITNNQGITEYHRKRFSTFTNGLTQLRDWLEYYSCFDVCMESTGKYWIPVFNILEEQTNVCLAHPKYVKAIRGKKTDKKDAQWIADLFKHDLVASSFIPPLKIRQLRDLFRYRMKLTQLQVGEKNRYQNCLTCSNLQIASVVSDVFGKSAQAIIKSILDNPQDKPNIEQLVHKRMKNKVQDLEIAMEGTLTPEQAEKIRVIKAHYDALAICKEDLEQMIRELGQDYQHQVKLIQTVPGFKEDLSALRIISEIGCDMTVFDSAAKLCSWAGLVPANNESAGKKFSTRISKGGKYLKPFLVQVANAVVKSDKHPELRNKYLKLKKRRGHRKAIIAICRRLLVSVYQVLRKQEDYNPVLQGLTEIRNPDKTMSVQDAVRFAQQHGFNVA

SEQ ID NO: 319975 - protein, 343 aa, unidentified
MKYYVGLDVSVKLTAICIVDEAGKVVRETVLVTEPLSLASYLEGTGLRFERIGLEAGPMSSWLHDGLLAAGLPVVVVEARHMKSALSAMRNKTDRTDARGIAQMMRMGWFRQVHVKSADAQELRLLLVNRHALMSKRRDIDNTIRGTLKVFGFKVGTVSRQCFEERVASLLADRSDLLELVTPMLTVRRVLLEQFFVLHRRLKKMAKEHEVCRQLMTAPSIGPVISVTYMSGVDDPRRFAKSRSVGAHFGITPRTHASGEVERTGRISKCGDGMVRAALYEAAHNILTRLKRWCALKAWGLRVAKRAGMQKAKVAVARKLAVILHRMWMDGTAFRWGKEVTAA

SEQ ID NO: 319976 - protein, 400 aa, unidentified
MRSIGMDVHRSFAQVAILDGGRVTEELRVELELDAVVAFGQALRKDDEVVLEATGNTSAIVRLLMPFVARVVIANPLQVKAIAHARVKTDKVDAKILAQLHAAGFLPEVWAADDETQNLRRLVSERAALVRSIRRVKSRVQAVLHANLVARYAGHLFGKGGRRWLSTAPLPKAERDLLARHLDELDWLDGKLQKLDAALARISLDDARSRKLMAIAGISSVIATAVIAAIGDISRFASPDRLASYFGLTPRIRQSGDHAAVHGRISKQGNTVARTMLIEAAWSAASVPGPLRAFFLRIKDRKGMNVAAVATARKIAGLIWQLLTKDAPYRWARPAFVAMKMRKLELRAGAPRAHGPAGPGRDYWIKEIRHRELELVAQAELAYAQMVEAWKERPPKPQNS

SEQ ID NO: 319977 - protein, 411 aa, unidentified
MGLYCGIDWATAHHDIVVINDNGKVVARGRVGNDAAGFAALLTLLVEAGDTATHPIPVGIETDRGLFVAALRETGRVIYPINPLAASRYRSRHSVSGAKSDATDAVLLANIIRTDAAAHRPLPADTELAQAIRVLARAQQDAVWARGQVSNQIRDLLKEFYPAALVAFADLDGGLARPDARTILAAAPTPTQAAKLTSPRLRRLLIKAGRQRYLDRDVERLRAIFTGTYLHQPPVVEDAMGIHLTALLGQFDAACAAADALAEAAITHFERHPDAEIITSFPGLGNLAGARVLAEIGDDRSRFTDARGLKAFAGSAPITRASGKKTVVLHRHIKNRRLNAVGPIWALASLRASPGARRHFDTRRAAGDWNHQAQRHLFNKFLGQLHHCLHTGQLYDEHRRFHLLSHSQLDF

SEQ ID NO: 319978 - protein, 338 aa, unidentified
MNIVFLGIDLAKNVFQLCGLNQAGKPVYTKRTGRKELLQTLANIPACLIGIEASTGAFYWQREFEKLGHKVKVISPQYVKPFVRGQKNDGNDAQAIAVALMQPTMQFVPPKSPEQQDIQALHRARQRIVNHRTATVCQIRGLLLDRGIPIGSAVSRARSAIPLILEDAENGLSSRMRRTIAELYDLFNDLGRRIHFFDKEIETVFRQSEACQRIAKVKGIGPKTATAVVAAIGKGTEFKNGRHFAAWLGLVPRQHSSGDRQVLMNMTKKGDKHLRTLFIHGARAVVRVATNNNDGHMNQWVNQLKERRGFNKTTVAVANKNARIIWSMLRNDTEYQVV

SEQ ID NO: 319979 - protein, 335 aa, unidentified
MYKKLNSTGTLIQRTTTEAPHGHMYYIGLDVHKKTISYCVKDASGLVHQEGKVGATRRELDGWMKTLPQPWTVAMEATIFTGWIYDHLRPHAHEVKVAHPLMLRAIAAAKKKNDQVDASKIADCLRCDFLPECYMASTEIRDRRRTLRYRHLLVRQMVQMKNRVSGLLMETGVSHNKRQLHRVGYFRDLMASNENIDDSIRPLLQLSRDTITRLQKTESALVRSLQRDSLLTARIQRLKTVPGVGPITALTWALEMGDISRFRSIRQAISYCGLCGDEKRSAEKVMRTPLSRQRNEHIQSCLVEAAKLAPRYDHDLALVYETKRRRGTRIEQPLR

SEQ ID NO: 319980 - protein, 342 aa, unidentified
MKVIGIDSHKATLAGCAVDELGTPVDERTLGNDRAGHVALADWARSLGVDRIGIEGSGRYGAAAARRLAAAGFDVRDVPPHLSYRERLRTRRPGKSDPTDALAIARVAAREQTLPPVRLADRSEDLGLLVTARDELVAEATQLRNRIHADLVVLLPGYGERVPNLVARRHRRGVALEFATLSGVRAELTRSRLGRLEETDAATKLLERRLAALLVGHPLLALPGVRVLLAARILAETGDVRRFRSADAFAMFSGTAPIPASSGQTERMRLNRGGDRQLNRALHAMALIQGRYHDRAKAYLARKRAEGKTQREAIRCLARKLARVVFEVLRRSTLATADAFAA

SEQ ID NO: 319981 - protein, 317 aa, unidentified
MTAVTRFVGIDVAKATLDVAVRPSGQRWQAANTPVGIVTVVRRLRRSRLATLVVLEATGGYEHAVVAALAAAGMAVVVANPRQVRDFARGTGQLAKTDAIDAGILALFAERVRPAPRPLPTDAARALDGLLTRRRQLLEMLTAEKNRMQGAAGPVQTSLAAHIAWLERELGEVDGELERQVEASPVWQAKEDLLRSVPGIGPVVSRTLIGELPELGRLTHKEIAALVGVAPLARDSGTLRGKRMVWGGRAPVRAALYMGALVGTRRNPVLRAFYERLRAAGKPRKVALTACMRKLLVIANAMVRSNTRWMEHRTVAA

SEQ ID NO: 319982 - protein, 399 aa, unidentified
MTTEYAITLGLDVGKTTHHGCALTPKGKRVYDHELPQDETALRKVITDLQQHGPVLVVVDQPNTIGALPIAVARDLGADVAYLPGLAMRKAADLYPGRSKTDARDAFIIADTARTMPHTLRAVDRNSEVLSALKVLSGFDEDLARESTRAINRLRSLLVQIYPSLERVLPGVVLTRAIVLDLLIRYHGPAGLKAAGKAGVKRWARHHSRKDPGPLIDQIFTALSEQTVTVPGADAVELVIPRVAAQIKELKHQRDIVAEEVEKLVDDFPLSTVLTSMPGVGVKTAAQILLAAGDLSAFPTPGHLAAYAGIAPVTRRSGTSIRGEFPARAGNKKLKNALFRSAWVASCHDPLSKAYYQRKRAEGKRHNAAVICLARRRLNVMYAMMKTGTLYEPRTPATA

SEQ ID NO: 319983 - protein, 368 aa, unidentified
MPSMPHPALPSQGDNTADDVVLDVDTHKDRHVAAVITVLGALVGSETFPATSAGYRQLLAWARTFGTPRRAGVECTGSYGAALARHLGAEGVQVIEVNQPDKATRRRRGKTDSIDAEAAARAVLSGRATGSMKTGDGPVEMLRMFKLAKASAIKARTQTINQLKAVLIAADPALRETLSGLSNPTLFRRCTELPSTTPSDVTSAAVYTLRLLACRIRALTVEIRDLEHRITDTVTQHTPALLERPGIGPDSAAALLVTAGDNPDRLRSEASFAALCGASPIEASSGKTQRRRLNRGGDRQANAALYRIALSRLRWDQRTQDYLDRRAAEGRTRRETIRCLKRYIAREIYYLITNPTPTSSRQPQSSAA

SEQ ID NO: 319984 - protein, 369 aa, unidentified
MKHSIIFVGLDVHKDSIDIALADDGRNGEVRFYGTIGGDLDSLDKAIRKFRRSGAELRFVYEAGPCGYEIYRHLTAQGFHCDVIAPSMTPKKSGDRIKTDRRDALSLARLYRAGELTSVYVPREDDEAMRDLVRGRGDAVNAARKARQRLSAFVLRHGFRYSGRNAWSAAHLKWLADIKMPHPAQQITLQEYIHSIEESSERVDRLTEQILNLISAWRMAPVVAALQALRGVAAIVATTMVVEVGDLRRFENPRQLMAYLGLVPSENSSGQTIKRGGITKTGNSHARRALIEAAQTYSFPAKVSRELRKRQEGLPREIKAISWKAQVRLCGRFRKLMAKGKNRNRTVTAIARELSGFMWAIAKEVPMPA

SEQ ID NO: 319985 - protein, 327 aa, unidentified
MAVYIGIDVSKRKFDCAWLRDPDRVKVKTKVFGNDTAGHAAVLDWLAQQTGTPADQIHIIMEATGIYHEALAQALYEAGLGVSVMNPAQVREFAKSLGVRGKNDRKDSVVLARYGAARRPRLWQPEPAAVRGLKARLARLEALDKDIQRERNRREKAEVVQAEEIIASIDTVLDALRAERDRLTRDIDDHIDRHPALKKDRALLESVPGIGPTVSRRLLATLRSRDFTSARQAAAFIGVIPVPWDSGSSVHGPPRLSKAGNPKLRQLLYMAAIVSTKHNPDIAAQYQRLTARGKSDMSALGGAMRKLVHLAYGVLKHQTPYQPQGAT

SEQ ID NO: 319986 - protein, 347 aa, unidentified
MNFYTQQHKHYCGIDLHAKAMYVCILDQAGTILVHKNLPTTPEAFLRILAPYRDDVVVGVECMFTWYWLADLCSKEGLAFVLGHALYMKAIHGGKAKNDKIDAHKIAVLLRGGMLPQSYVYPAEMRATRDLLRRRCHLVRKRAELLAHIQNTNSQYNLPEVGKKLAYKANREGVEEHFPDPSVRKTIELDVSLIDHYDKLLGEVELYITQSAKTHDVQTFARLQSVPGIGQILALVILYEIQDITRFPRVQDFVSYCRLVKCAKESGGKRLGTSGKKIGNVHLRWAFAEAAVLFLRHNQPGREYFTKLEHKHGKAKALTVLAHKLGRAVYYMLTREQAFDLQRFVTA

SEQ ID NO: 319987 - protein, 389 aa, unidentified
MKIFVGIDIAKFNHFAAAISSDGEIILEPFKFTNDADGFQLLISKLESFDKNSIIIGLESTAHYGDNLVRYLVTELYQVCVLNPIKTCQMRKNNIRKTKTDKVDTYVIAKTLMMQDNLRFVSFFDLDMMDLKALGRFRQKTIKQRTRLKIQLTTYVDQVFPEIQYFFKSGLHQKAVYALLKEAPSPKEVASMHMTHLANLLKVNSHGHFTKEQAKELRVLAQKSVGANDSAISIQITQTIQQIELLDSQLEKIEAEMTEIMKFNDSVIKTIPGIGYINGGMILGEIGDIHRFSNPNKLLAFAGLDPSVYQSGNFQAKTTRMSKRGSRVLRYALVNAAWNVVRNNATFKAYYDAKRAEGRSHYNALGHCAGKLVRVIWKMLTDNVEFNLE

SEQ ID NO: 319988 - protein, 318 aa, unidentified
MPDPMVVGIDVAKDTFDVAFGHAGEIKTISNDAAGHETLLAAFADRSIDLVVMEATGGLERELATTLQAAGFAVAVVNPRQVRDFAKSMGHLAKTDRIDARMLAEFAEVLSRHPKREKIVKPLSPPEQQELQALVARRRQLVSMLVAEQQRLSVSHKSTHKSIKAIIEAIRKQIDTVENELTTHINRHHADLARQLSSVSGIGPKTTATLIAEVPELGSLSRREIGALIGVVPFNRDSGKMRGKRIIFGGRASVRRGLYMATITAIRCNQVIRHFYERLVSCGKPKKVAIVACMRKLLTILNAMVKTKKEWDESLHLA

SEQ ID NO: 319989 - protein, 352 aa, unidentified
MRRPKHPVTRDEELFVGIDLHKHRWHVTIRTFDVELFSASIPGTWEALQRVLTRYAGYQLQAVYEAGYFGFRLHDRLEAHGIPCLVTPPSLVPQEYGNRVKTDRRDSSKLAHLLAKGMLKRVWVPSEEELYHRQVIRRRRQLVRDRVRTQSRIKAELSFYGIHLEEPRGRWTQIYFESLRSIRFGNRWMQESFNRLLEQYEFLSVQIDKQTQLLRELSETARYRERVEILQSIPGIGMISAMEVLLELQDVSRFRRAEQLAAYVGLTPSQYSSADKVRMGRITGIGKSTLRSLLVEASWTLIRKDQAMREKYERIKIRSGGKRAIVAIARTLLLRMRRMLLDGQAYALPLAA

SEQ ID NO: 319990 - protein, 340 aa, unidentified
MGTTTYGLDVAKRVFQMYWIDARTGEAINRQFRRDEIIRFLARRPPGRVALEASGSGHWWARKINSLGHEAVLLHAKFIRPFVQTNKTDAADVRAIWTAVHQPQMRLVAPKTEEQQAVLAQHRMRALLIKFRTMQVNQLRGLLYEFGVTFGGGRQAGLKEIRARMPELESTVPAAMFVCLQDQLRRIDGVQQDIEQLEARIGVWHKQEAACRAIAAVPGIGTLTASALIATIGDARTFKSGRELSSFLGLVPRQNGTAGKVRLGSISKRGDPYLRTLLIHGARSVIYHTRAPTKWQRDIQSRRPPNVVAVALANKMARTAWAILAHDRPYRTDYGCARAA

SEQ ID NO: 319991 - protein, 356 aa, unidentified
MSAYQSDWVVGIDVGDRKSHVCRLNTRTGEILEDRISTTPRAFDGFFKALDTRLVAMEVGTHSRWASELLEKLGHKVLLANPRKLHLISRSDSKNDRADAELLARLAAADPKLLSPIKHRSRQTQADLITLKAREQLVGMRTALVNQVRGFLKPFGIRLPKCSTATLPQKAKQELPRDLGPAIRPLLAMIDSLSQRIKSYDKRIVRLSENGYPETKILQQVRGVGPITALAFALVIEEPERFKRSRTVGAYLGLRPRQDESGSSQKQLRITKAGDRLLRTLLVHCAHYILGPFGEDCDLRRWGLALAKRGGKNAKKRAVVAVARKLSVLLHRLWVARATYDPLHQADRIALRSKAG

SEQ ID NO: 319992 - protein, 448 aa, unidentified
MKTLPIINPNAAAIDVGSEQLHVSIAGDEPVVFGTFTKEVYRLRDYFKAQGVTTVAMEATGVYWLYAYTVLEAAGLELVVVNGRHVRNLPGRKTDMADCQWLATLHAHGLLRGGFVPPAAIRRLQDYQRLRADHIVGAASQVQKMQQAMERMNIKFHDVISDLVSVSGLKVIRAILAGQRDPEALLGLCDAQIQKKKRDRVVESLQVTWAAEHLFGLGQALAAWEFYQKLLAECDQQIEAVLIKLAGPPPPQDPIRAAAGGGKKLGKNTPQIDQLHQLLVRLCGGRDVTAIAGIGDNLLLQLLAETGPDLKAWRTEKHFTAWLGLAPASRQSGKRKGSVKRQRNRAGRMFCAGARSLVQSVDKALGGFYRRLAARKGGLVALKATARKLAELYYRVLVYGLDYAEQGLRVYQEKYAQSQQRLLAKLAEKQGFRLVSVHLDALQPKINT

SEQ ID NO: 319993 - protein, 397 aa, unidentified
MYIVGIDIAKRKHEAAVIDGEGTVIIKPFSFTNNCSGYNRLLAMLTKAKLPLDEVSFAMKATGHYWLALFTRLQKEGFRVQVINPVQTNSIRSFYIRQAKTDPRDALLIAEVIRFGHFSESTLHPENIYELRELCRGRHAIVSMQADVKRKVVALLDQVFPEYETAFTNLFGDTSMAILQTCPTPKELSETPLEELCHLIEVSSHKRFRMAKAQELQALAHGSFGFAMAGDVFSTMIRLYAKHLVFLKQQVQEMDRKIAEIMDTLDTPITTITGIGPTLGAYILSEIGDISRFSSAAKLAAYAGIDPTMRQSGEYNGVRNRMSKRGSPYLRHAIWLAASSAVLHDPALKLYFQKKRDEGKPYMASVGHACRKMVSIIYAVMRDNKAYTPCIQNEISA

SEQ ID NO: 319994 - protein, 351 aa, unidentified
MKVTTIGIDLAKSVFQIHGIDERGNVVLRRQLRRAQMVLFFSKLESCRIGLEACGSSHYWARKLAALGHTVRLMAPQFVKPYRKSDKNDGNDAAAVCEAVGRPSMRFVPVKSPEQQAELSVHRVRHRLMRQRTALINQLRGLLAEYGLVLAQGATHVRSQLPALLENSSDSLPPLALELFQDLYEELCQLEQRLADYDRRVERLYRGNPLCQKLGELDGIGALTATAFVATVAHAAQFHNGRQCAAWLGLTPKQDSSGGKTRLLGISKRGDVYLRTLLVHGARSIMRHTPKRDDPKSRWVEQLRKRRGENIAAVALAAKHARILWALMVRSEPSAQLIAAHRIEPPAQPNL

SEQ ID NO: 319995 - protein, 391 aa, unidentified
MSMYFIGIDISKYKHDCCIISAADQKVVSKVTIKNNKAGFNELLTIIHSLANPADIRIGFESTAHYALNLELFLENSLLTFMEVNPVLISEYKKSKTLRRTKTDSVDCESIARWLMTVEYKPHSKGFYHAYSLKSLTRLRDKLIRQRSFYLVKITNVLDHTFPEFKPFFNERLSKTALYLLENYGSAEKMARMNSASYEKLRSVSRGKFSPQQFLRLKELASNTVGVNNSIFDVELNSLLSLYKSLVKEIDTIEKEINKLIEEVHPHYMSVPGIGPLSAAVIYSEYGDISNFTNPGQMLAFAGIEPGINESGTESHGGKMVKRGSSQLRYTLINCCLPLIRFDMTFATYYAKKRGEGKPHRVAITHVAKKLIRVIYALESQDIDFNAQKLR

SEQ ID NO: 319996 - protein, 428 aa, unidentified
MNEEDRTRLEEFRQFRREIRKSAEYLIVGIDVAKDKHHAFFGTATGKTLFKRLVFENDLEGFRKLLVQAEAMKVQEGLKKVVFGLEPTGNYHKPLGEHLMRCGQEVVLVSGVAAHENRKTVDGRWDSNDTRDAANVADLISQGKCLFYEFPVGGLQDLRNLLSLKRRLKRQEHGYRVRIRNHLVAKYFPELGRYFEQSEKTSLAVVRWCLDPSVIAGLEYPKFAEMVSSGQRRLSQENRLQAIWKMAVDSVGCEVGPAVAFEVQVMVEGLKQIREMIRDLDEKIYEICSPFPEYEFLLSIPGFGPDISAKVLGAVGDPFRFQNGKQVLKMAGLDLSAERSGKTSQSAIPVISKKGKADLRYALYLAAFVASTRNQNFIVYYTHKLRGREKEPGIKTKMRVKLAAKLLIIAWTLMKKKELFNPDYLVIE

SEQ ID NO: 319997 - protein, 339 aa, unidentified
MNITTLGIDLAKNVFQLCGVNAAGAIQFNKKVTRNSLVKTLAKLPVCEIVMEACGSANYWARVFQELGHTVKLIAPQYVKPYVKGNKNDSKDAEGIVNASKAIGMRFVSPKSIEQQDIQSILRIREGYIETRTKTSNQMRGLLAEYGIVVPVGLSKLRKILPSLFDRTQENGLTVMMKHLLETQYNFFLMVDEQIDSLDLQLKALIEVNEKCQRLMEIEGIGVITATALYALVGDGSGFKNGRHLAAFLGLVPKQNSSGGKNRLLGISKRGDDFVRRMFIHGARSVVLHAKKKTDARSNWINALKERASVNKVSVALANKNARIAMAILLSGKHYQKAS

SEQ ID NO: 319998 - protein, 324 aa, unidentified
MIFIGIDISKLTFDAAYSLNSRTIHKQFSNNPKGFETFYLWMNKSKKEVYTCLEATGIYSFDLAQYLSHKKINVMVVNPIITHAFFKMELNRNKTDKADAQLIARYCEHVVVTGGYEKKSYQPKGADYEAIQRLVTRCDQLEKSKTQENNRLEASANKQTSRSIKRLQKAIDNEIVRVKKEISDIVKNNQYLCQQVELLVSINGIGERTAWSILAYIGDINFFSNAKQIASYAGLTPKIIQSGTSIDKSSLSKLGHKRLRKSLYMPALVAIRYNPILKAVYERLVNNGKPKKVAIVAVMRKLLILSYGVLKSEKPFDINYQMTD

SEQ ID NO: 319999 - protein, 336 aa, unidentified
MNTNLRHFIGIDVSKNTLDFALIKDGDSSCPITGELTNNSAGMVKLEEFLKKQDLHLDETLFCMEQTGIYSRLLSQYLIEQMALVWLEMPVQIIRSLGIQRGKNDHIDAVRIAEYACLKKDQAILWQPPREVVLRINDLLTLRDRLITSRKSLKQPIKEFLEAGFTDTAKLIESKCSSTLKALDKETAQIESDLDKLIKKDSNLNRLYMLATSVAGIGQITALTLLYFTNEFQIYTNPRQLSCYSGVAPFEHTSGTSVRGRPRVSNFANKRLKKLLHMAALSTIAYDPELAGYFQRKVGEGKNKMLVINAIRNKIIHRLCAVIKRGTPYQLNYQPT

SEQ ID NO: 320000 - protein, 309 aa, unidentified
MPRNYIGVDVAKNWIDIFDAETGEHRRIETSKADLLSFARTLGDRIVVFEASGGYERPLMDVLSAAKVAFTRVNPRQARDFARATGLLAKTDKVDARMLSRMGSALELAPSTAPDPVRDRLASLMARRDDLTATIGRERNRHAQATDAWIRRQISSILRILARHLKRCDAEIKFHIQQHERLIEDHARLQTIPGVGPVLAAVLIASLPELGKLDRRKIAALAGLAPHACDSGMFKGKRRIWGGRANVRRALYLAAFIASRHDPNFKAFRKQLQDAGKPVKLAVTACARKLLTIINAMLKAGQDYSKTPA

SEQ ID NO: 320001 - protein, 402 aa, unidentified
MNAVGIDVSKGKSMVAIMRPFGEIISAPFEIKHTSSDINSLVKLINSVDGESRIVMEHTGRYYEVLAHQLSQANLFVSTINAKLIKDFDNDSLRRVKSDKADAVKIARYALDKWQNLKQYSVMDELRNQLKTMNRQFGFYMNHKTAMKNNLIGILDQTYPGVNAYFDSPARSDGSQKWVDFASTYWHADCVRKMSLNAFVDHYKNWCKRKKYNFSKSKAEEIYGKAKELVPVLPKDEITKLIIKQAIDQLNSTSTTVESLRTLMNETASKLPEYPVVMAMKGVGPSLGPQLMAEIGDVSRFTHKGAITAFAGVDPGVNESGSYEQKSVPTSKRGSSDLRKTLFQVMDALIKTHPQDDPVYQFLDKKRSQGKPYYVYMTAGANKFLRIYYGRVKEYLATLPKS

SEQ ID NO: 320002 - protein, 356 aa, unidentified
MKSQGIKSKPERTVGLDLGDRTCYYCLLDSAAELMEEGRIQTSEASLRKQFDNEAQMRIALEVGTHSPWIAPLLESMGHEVIVANVRKVRAISSNENTNDREDALLLGRLAAADPKLLHPLQHRSIQSQQDLGLIRARAAVVRARTLLVNCLRGLVKSSGYRLPSCSTEALPEQARQHLPADLKPACLPLAEQIGKLNQTIAEMDRKVVQLGNTYPEIGVLRTVPGVGPLVAACYVLTLDHPSRIRDSRQAGAYLGLRPRQEQSGDSNPERGIAKNGNTYLRSLLVQAAHYTLGRFGPDSALRRWGLKLAGTSKRNKKRAVVAVARKLAVLLHRLWRSGQTFVPFPHPLTAAVAAA

SEQ ID NO: 320003 - protein, 356 aa, unidentified
MQTQVTKKIDFTGKELFIGLDVHKKSWSVTIIVDGIEHRTFTQPPDPESLCNYLHRMFPGASYNSAYEAGFCGYGIHRELNSLGIRNIVINAADIPTTQKDKLQKRDPVDSRKIARSLEKGSLHGIHIFDRELEELRTLNRTRFYLMRDLRRSKNRIKSFLQYYGEPIPVEFDNNQWTLKFVSWLKQVKMKTVSGQDAFSHLIESYEHHRRQLLDLSRLVRQRIREYDNELYSLLKSISGIGPLTSSALITELGNINRFNNIDQLSSYVGFIPRIRESGETTHTGGITFRCNTFLRTLLIEASWQAIRMDPAMMQYYHKHLVNNKGHKVIIKVARKLLNRIRYVMKNRQPYITGVA

SEQ ID NO: 320004 - protein, 406 aa, unidentified
MRKQEPAAEQKGDPMIYAGVDIAKADHVIGAVDETGAEAAKPMAFKNSEAGFERCIAWLESVAQTEDDVFVGMEATGHYWMACFAHLTAAGYRVCVVNPMQVHAMRRLKGLSGVKNDRIDSLLIAETLRQGDYDQTRLATDEVQALKQLTRYHQGLKRELATVKTQAICVLDAYFPEYAGLFSDMFGAASLKVLSECPTPSEAARKRASSIAKMLSEGSHGRLGAERAARIKAAARSSVGIRLGEDAASFQIKTMVSQIEFLNATIAKVEREVGMLLERIEPNITTIPGVSTTTGAQIVAEVGDVKRFKNAASIVKYAGLNSGVDESGKFSAEGVPITKQGSPYLRRSLWLAANRARRFDPRLKAFYDKKRREGKPHRVAVTAVARKLCHVVYAVMRDGEPYDPGK

SEQ ID NO: 320005 - protein, 317 aa, unidentified
MEEVSFRQVVSRGCGIDVHQKVVVATIGGEALRTQTREFGTMTSSLTELKEWLLGNGITHVAMESTGVYWKPVYNILEPSGITVWIVNARHIKYVPGHKTDKKDSAWICKLLLAGLLKPSFIPPKAQRELRDLTRYRKKLIQNIASEKNRIIRILEDCNIKLSSVMSSTSGVTATKLIDKLCDGKIVTKEDIEEVYHGKIQCGKDDLYEACQGFITDHHIFLLHTIKQDIESTESLITDLNLRIEESLSEYESATEALRGIPGLSTKTVEDLIAEIGLDMTVFPTEKHLASWAGMCPGNNESAGKKKVEELPTGTNK

SEQ ID NO: 320006 - protein, 374 aa, unidentified
MSRSIIYLGLDVHKDSITIAVLPEGAPAPTRLERLPNDLAKLRRFCERLAAQGELRACYEASGAGYVIHRAMRSWGYPCDVIAPSLIPTKPGQQRKHDTYDAAQLARLYRAGELTTIRIPSEAEERVRDLVRCRETLQREVLASRHYILKFLARRGLVYREGTNWSTAHYNWLRRLAAASAPLVAEDQIVYGEYLALLEYKLSRRDELDHRIADLALTPALAPAVNRLQCFRGVQRHVAMVLTTEIGDWRRFASPRQLMAYLGLVPKERSSGDRERRGSLTKAGNSHCRHVLVQAAWAYRFQPKVGLALKARQRGQSPVVIAHSWKAQHRLHTLYRRLAFRTRPQIAVVAVARELVGFLWAVMQDQDRSTSVAA

SEQ ID NO: 320007 - protein, 402 aa, unidentified
MNCVGIDVSKGKSMIAVMRPFGEVVVSPFEVRHTASELSKLAGLLKSLDGETRVVMESTGNYHAPVAWLLHDAGLYVSVVNAMLVHDYGNNSLRRAKTDKKDAVKLANYGLDHWLTLPRYVPEEDTRLMLKTCYRQYQQYSKVQTMLKNNLISLLDTTFPDANRLFTSPPRTDGSEKWVDFVAAFWHCECVCGLSEKAFAAKYQKWCRKHGYHFSEDKALDIYASACGHFGVMPKTDTAKLLVEQAIFQLRATSAALAALKQEMQSLAASLPEYPVVMEMFGVGPTLGPQLMAEIGDVRRFHSKKALVAFAGIDAPPYQSGQMDVRSRSISKRGSAALRRTLFLVMGVYLQSAPMGEPVYQFMDKKRSEGKPYRVYMMASANKFLRIYYASVTAYLNTQTQA

SEQ ID NO: 320008 - protein, 338 aa, unidentified
MNIVFLGIDLAKNVFQLCGLNQAGKPVYTKRTGRKELLQTLANIPACLIGIEASTGAFNWQREFEKLGHKVKVISPQYVKPFVRGQKNDGNDAQAIAVALMQPTMQFVPPKSPEQQDIQALHRARQRIVNHRTATVCQIRGLLLDRGIPIGSAVSRARRAIPLILEDAENGLSSRMRRTIAELYDLFNDPERRIHFFDKEIETVFRQSEACQRIAKVKGIGPETATAVVAAIGKGTEFKNGRHFAAWLGLVPRQHSSGDRQVLMNMTKKGDKHLRTLFIHGARAVVRVATNNNDGHMNQWVNQLKERRGFNKTTVAVANKNARIIWSMLRNETGYQVV

SEQ ID NO: 320009 - protein, 392 aa, unidentified
MLFVGIDIAKRNHEASVIAQDGRVVRKTMRFANSQAGYNKFMDMVRSLSEPVVFGMEATGHYWLTLYTHLRNDGFTVHVINPIQSDALRGMYIRKTKTDSVDSVIIADVIRFGRYCETSVEPGDLQAMRELCRQRFYIIDMASDLKRKVIALLDQVFPEYEKLFSDSFGVSSMELLSQYTTPEEMLSVSSQQLAEVLEKASRGRLGAEKAVEIQDAARNSFGIVMASSSFSLIIRQYIEQIRSLESSVDIFDAEIARLLSGFDTQLTTITGIGPTLAAVILSEIGGDIRRFSSPAKLAAYAGVDPTVKQSGDFSGTRMKMSKRGSPYLRRAIWLASTVAAFKDPAIHALYEPKRAEGKDHMTVIGHICRKMISIIFAVLRDNTPYVPAGISD

SEQ ID NO: 320010 - protein, 360 aa, unidentified
MEMSITPIGTPVGVDVHKRRCRVAELRAGKIQRHPPMANTREEWLDMLAELPPDAEIGLEVSTAGYFAMSVLEAAGWRERAHWVHTAGIDSNRRQKNDRLDAERLARKLGAHHVDPLPEAWFPPPEIRALRLRARARCWLALLRTQCKNHLQSLLQMHGLLAPGSDPFGAAGQRWLAEQKLPAPLRENLPQILRLLKLLEEEIAISEQHLQAVEKQFPELALLRSIPGIGPILAPVIWSEIGTIARFRSAKALANDTGLVASYYDSGDMQVSGPITRHGSRWLRWALVTAANVVIQFRNPFARRYHRLRHGKKPNVAKAAIAHSLARCVYGVLKHGCPYREDRWGRKVGALEQETRGSHR

SEQ ID NO: 320011 - protein, 483 aa, unidentified
MKSKPEEQNKRATNHPTQHQWHEMNRKQRREITRQIQSEDLSLEVIHPDAGGIDIGNESHYVAVPPGRDNQSVRRFGCTTAQLKAMAAWLKQCRIRTVAMQSTGVYWVAVYDILEQAGLEVYLVNARDTKNLPGRKSDVQESQWLMKLHTYGLLRNSFRPSQEIREMRTYWRQRNDLVQSAGRHILRMQKALTQMNIQLANVLTDISGTTGQAIIKAILAGERNPHKLAEFRDPRVKASEEQIAQSLEGNWQEDLLFVLKQEHKGYEFCQKQMAECDRQLKQYLQQREDRSHGAPLPEEKRKGRLKKKKGNAPQFDLREGLFRMTGTDLTRIDGIDVMTATTIISEAGWDMSKWKTEDHFVSWLRLCPDNRISGNKVIGKGRLPTNNPITIALKMAATTLRLSKTYLGAQFRRLRTRLEAPIAIKAMAAKLARLVYRMLRYGMKYVDQGAAVYELRHRELQIKRLKAKAQKLGYRVTPIPAAA

SEQ ID NO: 320012 - protein, 414 aa, unidentified
MLSRLETFSSRSSGVVLEDLVAVPIDVGKHTAMAKVIDFTGATLVKPFEFTLDRAGVEQLVGRVRTVCPSSVRLVRVGLEAAGHYHLPLAGGVLPVEWDLRLLNPGHVATQRKANGQRGVKTDRVDLTAIGDLLLAGRGTPAPPFADPVVELAGRVAHRQRRSLLRRRTIQQLTTHVDRCFPGLGNTMWSVTLTKAGRLIITELPDPARVARLGPARLRDFAARRGVRMTTPTAERIVEAARQALPVPGAEIARQMLAEDLALLDRIEADITAADATITDLLPFTPFGILTTTPGWGPVRVANYGAAVGDPQRWPTHRQLYRASGLTPRLYESAGRRHDGRICREGSAVLRAALVDLGLGLWHNEPGAKHYGQTLRDRGKPGGIIITAMAHRANKIAHAMVRTQQPFDGSHWTD

SEQ ID NO: 320013 - protein, 363 aa, unidentified
MHYVGLDVHARRSSLCILDSCGKVVKRLEVKGSWPKLMERVAAEVPRPFSVCFEASCGYGHLHERLSALAERVAVAHPGKLRLIFRAKRKNDRVDAEKQAKLLYLDQVPQVHVPCGDVRAWRGLIELRRKLVGRRTAVKSQLRALLRGAGCCDAPAGKALWSKRGLKWLAAAALGEADALRRDLLLEELAQADERVGRVTRELDRRADAHPGVALLRTIPGVGPRTAEAFVAYVDDVRRFARTRQVGCYLGLVPCQDSSAGRDRLGHITGDGPATARMLLCEAAWQAVRRSPSVKAFFERVMHGEPGRKKIALVAVAHKLARSMAAMLRAGEAWREEVQEQGRGQGQDRGQGQDRGQGQEPGA

SEQ ID NO: 320014 - protein, 434 aa, unidentified
MIRYVGIDLHKHLIVGHVTDATGEVLDTFRYDSVTPVSLEYIGQHRLTAEDHVVVEATTNCWAVVRALEPYVARIVVSNPLITKAIAKAKVKTDKVDARVLSHLLRLDYLPEVWQPDTATSHLREWTARRARIVSQSTAVVNRIRGTLAQRLLNCPHLIRTARARQWMAAQELDDATRWLLESDLRILDGLQAEKKALEAQLAKRGYADPRVKLLMTLPGISQHSALSLLAAIGDISRFPSADALASYLGLVPSTRQSAEHCYHGPITKQGRTQTRWMLIQSAQTVGRHPGPLGYFFRRLKKRKPHNVAVVAVAHKLALLAWHLLTSGEPYRYALPRTTEIKLRDLRIQATGKTRSHGPTAGIKARANVPKGSRTIKPLAEVYRNEEIPVASPPPAGERRHLAASKLEAFAESLQHAQVVPHRSPPELAADTSP

SEQ ID NO: 320015 - protein, 400 aa, unidentified
MNKASIRGFLGIDISKDKFDAYCIDINGEKHFYLSCSMDRAGFEKLVGRLEALSIPQESLLIGMESTACYHINLFSYLLAGGYTTIIINPLLICNFVKMQLRKTKTDKKDALVIAQFLSVYADGLAQASVSPYISDLRDLSRQRESLLSQMTALKCDMKRILTITFPELEKHTGIFTKSILKLLSRFPSAQAIVQADSAEITQLLIDHSRGRNASRATEIIIKAAHSSIGTTSPAREVILKQKAEVLISLEGHLKELTVLMIKLCRSGMGDDIDIMTSMRGIGKKTATNFLVEMGGDIRRFKDHKKLIAMAGIDPAIYQSGKHDGQGKITKRGNRHLRRVIWLMSIRVIQFNDYFRRYYEKRIQDGLPFKKAVLTVAHKLLRTLFAMLTQKTSFRCMVNS

SEQ ID NO: 320016 - protein, 338 aa, unidentified
MEMIRQNAGIDIAKDSFVATLTILLKGQIVKHLGTKKFKNNKEGFEELYNWCKGLQKGVFEINFTMEATGVYYESLAYYLFDKEVTVHVLLPNKVKKFAESLNIKSKTDKIDSKILGQMGVERVLEKWNPGSKIYMHLRTLSRERQQLIKERTIVKNQLHAEEHTGFPMKTTMRRMGNRIKYLDKQIGGIERELEIIVSKDEYVSGKVKKITTTPGLAFKTVVAVIAETQGFVNISNIRQLNSYAGYDISIKESGKWKGKARISKKGNSNIRQAMYMPSLSSIQHSETYKTFYERINERKACGLIAGTAVQRKLLGLIYTLWKNDAEYIENYQIKKAG

SEQ ID NO: 320017 - protein, 329 aa, unidentified
MEHYVGIDVSLELLSVCVVDGRGKIVKEAKVASEPEALVYFLKELGFPVNRIGFEAGPLSQWLHAGLTQAGFEAVLLETRHVKAALSAMPVKTDRKDACGLAQLLRMGWFRQVHAKSIGSQEIRALLVARKQLLGRLLDVELSIRGILRGFGLKVGQVTRKTFEARIRELVTGHTTLERIAEAMLSARATLKAQYEKLHKAVLAIVREDAVCRRLITVPGVGPVVAVTFKSAVDDPSRIAKSKAVGALFGLTPRKYQSGEKDVTGGITRTGDEMVRTALYEAANVLLSRITRFSKLKRWGHGRRQAARFKAGEGRLGSQDRSNPAPHVD

SEQ ID NO: 320018 - protein, 400 aa, unidentified
MISVGVDVSKGKSTVCILKPYGEVVSSPFEIHHVEKDMEDLDNLLSKLDGEVRIVMEATGIYHLPVVTFLHDKGYFVSVVNPFAMKKYAKDNSIRGAKTDRLDSIMIANYGIEKWFKLQRYEGTEETYAELKLLGRRYRYYMELHVKALQELTHVLDYVLPGIKKMFNSWNEANGKDKLSDFVERFWHFDLITSMSLEKFTEEYIAWAREKKYHRSRSKAEAVYELASSGIPTLPSSTPSTKMLVQEAISVLRTVDSSLSLIVTRMQVLAKSLPEYSTVREMGGVGDVLAVKLIAEIGDVRRLHSAKALIAWAGIDPPPYESGQFIGSKRKITKRGSSTLRKIGYEVMRVLKSHPAPKDDAVYNYILKKEGEGKSKKHAKIAGLNKFLRIYYARVIAVYQ

SEQ ID NO: 320019 - protein, 412 aa, unidentified
MVLFVGDDWAEAHHDIEIEDDSGHVLTRKRLPEGLAGMTGLHELVAEHLDPDGEPDQVLVGIETERGPWVQALLATGYVVYSINPMQLARYRGRHATSGAKSDAADAHLLAEIVRLDRAHHRPVAGDSELAEHVKVATRAHQMMIWSRVRQVNALRSLLREYYPAALAAFGTDLADRDALAVLAAAPTPEHGRRLSQIRIETLLRKAGRQRNLTAAAGRIRAALQSEQLSARPGMVPAYAASASALIAVLTAMTEQTEVLAGQVEQGFGQHPDVEIYLSQPGLGMILGARVLAEFGDDPHRYADAKSRKNYSGMSPITKASGTKQVVLARYARNRRLGDALFLQAYSALRSSPGARAFYDRHRARGATHYQALRAVANRLVGILHRCLRTRTLYDENQAWHLRNDKLTTLAA

SEQ ID NO: 320020 - protein, 385 aa, unidentified
MSKDSKSFVSTAGMATVFGIDSHSRTTTVCALSRESGETETRTFRGNDYAAMARWMSGFPAPALGVYEAGCTGFVPARRLSAGSVSVVPIAPSKMPASSDSRTRKNDRNDAARLARLAVAGELKEVWVPPCEIEGMRELAHALDDLKAQRTRAFQHVLALLCRHGVIWDERTPRGALRKPWCAAFWTWLRGIDLGDAAAQAALRSAIRAAESADEQYGALLDEAHRLAGASSLAGIVRALQCLKCVQFVTALTFAAEVGDFSRFRSGRSITSYFGLAPSESSSAAKKRMGAISRCGCALTRSLLVECSWSALRCSPAKGKACPEPVDVRIRERARTLSARLCSHRRSLVARGMPACKANAATAAELARFMLFLGSEQQSLAAEAS

SEQ ID NO: 320021 - protein, 488 aa, unidentified
MVMWLRQGRPPGAIVRAWCPNRGAKGGRPVGKGSGTTRGDRRRNARRERLRALLPRDGAVVGIDLAEDKQALAVVDHEVRVLARKTVKVKAFRLGEALDWAVAQARMKGFAHVAVACEPTGARWMQVQRLCAERGLPLVCIQPLMSHIAREQQDYTAHKTDESDCVMIGRLAVELHCYLPEELDETWAHLRHLGRRRAQLITAATASVQRIRDFLSVAWPVVTEACAGPFDSVTWLAAVQVVADRCGGDPGTVTAIGEEAFTDLVRAAVEDWGGRRALRRITGRVFAATADTEGVVAWSRRGLLRRVADELDDLQRVRAQIRVAEAAMVAVLDELGLSRLREIPALTAVGAAAILAEAGDPRRYDSSSSLVKHAGLSPSENASGAFEGQARISRRGRPGLRLTVWRAVFPMLQFNPVIAAKYQAMTADAAAAARTGSRQAAAARARRAKARVACAASLLRWIYSMVVHGTSWDAAVASGTASSQIEAA

SEQ ID NO: 320022 - protein, 343 aa, unidentified
MKILKQSAGIDVSKSDFKVCLGKLDEQLSVAFSFQKAYDNNLKGVTLFLKEVSHLFTAEVTVQFILEASGVYHELLAHKIYQHGYEVSIILPSKSKAFFKSITQKVKTDKVDARLLSQLALERQLDNWVPADPIYTQMRSLTRERESLIKEKTVIINKIHAQQSAYQIAKSTLRRSKQRLKLLQKQITSIDLELKTLVESSEMLCSKVNRITKVKGLSLLTVATVIAETNGFGIIRNRRQLVGYAGLDVIINQSGQKSSKGRLSKKGNPHIRKALFMPALSSSRSNELMKIIYQQLNQRQAAKKQGVMVVAKKLLLLIYALWKNSTEYDPQKNIQSRLLLATV

SEQ ID NO: 320023 - protein, 304 aa, unidentified
MNGIGIDVSKRQLDVGTTDGEILQVSNSASGFAELDLWLRKHPASQIVLEATGGYEQTVLNFLHNAGHPVVRANALRARRLAQGMGQLAKTDRLDAYALAQMAALVKLPSYQPLEPWQQKMREFVRARRQTMDALTVARQQQEMVTDRELRRLLQANISRLQRIVGRLGKQIAEQVAQQPQLAVLKSMKGVGPGLQAVLASYLPELGKISGKAIASLVGVAPMSHDSGTMRGKRSIHGGRAEIRQVLYMASMSAMRHEPRLRDFYQSLRARGKEGKVAIVAVMRKMLVILNARVRDAESGLIPA

SEQ ID NO: 320024 - protein, 343 aa, unidentified
MKIYALGIDLGKTVFHLVGLDASGQVVVRKRCSRTQLLSFTSNLEVQLIGMEACSGAHFLGRALRDQGHEVRLMPAQYVKPYVQTNKSDYIDAEAIAEAVQRPRMRFVPIKTEEQLDLQALHRVRERWVMRRTAVVNQIRSLLLERGLTLRKGRSHLEQRLPEILEDAELNLSGSFRVLLAQLHVELEQLRARVEQMDAVIQQRAREDEACQRLTTIPGVGPVTATALIAAIGNGHRFRRGRDLSAWIGVVPRECTTGGKQKLLGISKRGNAYLRRLFVQGARSVLQHRNKQAPGLSCWLAQLLGRAHQNVAIVALANKLVRMAWAVLCKNEHYRAPLLAVAT

SEQ ID NO: 320025 - protein, 338 aa, unidentified
MAIVTVGIDLAKNVFAVHGVDESGKPVLVRPEVPRAKLLELIANLPACLIGMEACSGAHHWAREFAKFGHTVRMMAPKFVAPYRMSGKRGKNDAADAAAICEAVTRPNMRFVPVKSIEQQSRLFVHRARQGYVEQRTALINRIRGLLSELGIVLPLKAATVRREAHRHLEDLPGWSNTVVGDALSELTRLDERIKQYDQYITQAANEDAQSRQLMQLSGIGPTTASAIAATVGKGHDFSCGRQFCAWLGLVPGQYSSGGKQRLGRITKAGDPYLRTLLIMGGKAVLAAAKNKTDPVSRWAISVQERRGYWKAVVAIAAKNARMCWAMLQQGEAFKLPA

SEQ ID NO: 320026 - protein, 402 aa, unidentified
MTYDYVIGMDACKYFHHACVLDIDGTQVLSKRINQNEQSLRALFSALSAYDHKVLVVVDQPNNIGRLTVAVAQDIGIDVRYLPGLAMRQLSRIHAGNAKTDIRDAYIIAHAAKNLPESLRSVDRVEEAFLQLKVLNGIDEDLARSYTRLINQIRSALVGCYPQFEQALRGQIIHRKWVLHLLARYGGPTKIKRLGKAKAAAFARRYKARNPEPVLDAIFAAISEQTVTIAGAHYAEMGVAMSAKDALLKLEHRQQIEKEVIELINDIPHTQFLLSMPGIGPKTAAQILMTAGDMSDFPSAGHLASYAGLSPRTNQSGTSIMSNSLNRAGNKKLKNALWQSSFASIRFHERSWQFYERKRREGKRHNAAVVALARRRLNVLYAMMRNHEHYHDPAPSQEDLAA

SEQ ID NO: 320027 - protein, 392 aa, unidentified
MVISVGIDVSKDKHDCFIVSSEGEVLADVFTIPNNLDGFRCLLQRLQACAAPQDKIKVGLEATGHYSYNLLGFLLDNGLTTYVLNPLRTNLYRKSLSLRKTKTDRVDARTIAAMLLSDAGLKPYTDTVYHNEELKSLTRYRFDKVKERAKLKSSISRLVCILFPELEKLVPTLHMTSVYSLLEEFPGAKQVAAAHLTRLKSLLEAASNGRYKRDMALEIRDAARNSIGSRMPAKSLELQHTIRLIRELDREIDEIEEQIQSIMGELHSPITTIPGLGFRMAAMILAEVGDFTRFDSPDKLLAYAGMSPSTYQSGQLKNCYPHMEKRGSRYLRYALYNATKYVCYWDPGFADYLAKKRAEGKHYNIAISHAAKKLVRLIFAMEKSRQPYCSAS

SEQ ID NO: 320028 - protein, 394 aa, unidentified
MKLVGIDVGKNSHHFCVMDKETGEFNVAPSSFSNNKEGFDFLINSLKPYSKKSILIGMEDTGHYHVALLKFLLSNGYTVALINPKTTDLTRKMEGGITKNDKLDTITICDVLDTPERKKQYRITKVDRFDLYEQRQLTRHHHNLKEELNVYCNRLQKSIDLVFPEFNTLFSSKYSIVYMNLLKTFGSAEAIASTDIRTIRKCFEIKGRGNRISLTPEKLKECAKNSIGISSEVETIQIKHLVSQITLIKEQIAEIDKKIEEFSITNNSPILSIPGISHFSGTSILAELGDIGNYSKPSQIIKFAGVAPYHYESSQYNAQHTGITKKGSKYLRKTLYQIILTVINNNPVFKKYYRLKISQSKGHRCAQGHCIRKLLRIIYHLLETGQSFDPALLR

SEQ ID NO: 320029 - protein, 447 aa, unidentified
MAQRKRPTTQSAITLTHPNAAGIDIGSAAHFVAVPPDRDEQPVREFASFTTDLHRLADWLEACGVDTVAMESTGVYWIPLYELLESRGLTVLLVNARHVKNVSGRKSDVLDCQWLQQLMSFGLLRGAFRPAEQVCVLRSLSRQRTMLLRSQGRFVQHMQKALTQMNIQLANVISDVAGETGQKILRAIVAGERDGHALAQLRNARIRASEDEIAKSLQGSWRAEHLFALKQALDAFDFCGTQLAECDVQIQAQLQALHVREDEPAQGKKRGRARNAPKFDLRTQLFQMCGVDLTRIDGIDVTTALVVVSEVGADMGKFPSDKHFASWLGLCPGTKITGGKVMSGKTKRCANRAAQALRLAAAALRSSQSALGAYYRRLCARMDKPKAVTAAAHKLARLIYAMLTHGQEYTDQGQDYFEERYRQRVLHNLAQKAKAMGMQLVASDNPA

SEQ ID NO: 320030 - protein, 451 aa, unidentified
MKKKKMEMEIINPNAAGIDVGSRSHFVAVGQSLDDVQEFGVYAEDLTAICKHLKSYGVTSVALESTGDYWQNLFAELVKFNFEVVLCNGKFTKHAKGKKTDVKDARWIQKLHALGLLSSSFLPDEQTEILRTYCRQRANLVDQASSTSHKMQKFLKLLNFRLDVVVKDICGLTGLTIIEEICKGNLDPKELAKHRHYNCRKSEEEIAKALQGNNRQDYLFGLKQEFQAYQFFQKQIARCDKEINRLVKQYLKQFPERKKMKTSEKPYKRINKNAPQIKGFNQVAFKYFGGVDLLAIEGMSYATVLSIMSEIGPDGFKKFKTAKQFTSWLRLAPNNKISGGKVLSHKLPKGSNRLKIALRQAANSIGNLKDTHLSNFFKRIAYRKGRTAAVSATARKLAVIIWNMITKSVPYSPPTEYLFLDQKRKRGLVKRIKNQINKFDLNPQDLGFVTN

SEQ ID NO: 320031 - protein, 347 aa, unidentified
MNFYNNTHPYYCGIDLHARILYVCILDQEGNTCVHKEISADPAKLHKILEPYIGNIVVGAECMHCWYWVSDFCEDLGVDFILGHALYMKAIHGGKAKNDRIDSFKIANLIRGGNFPLAYVYPKKMRATRDLLRRRMKIVQHGADLKAHVVNTTSQYNLPPNKVNLKNKVAREQLRSTFPERSVQKNIDLDMVILDCYAEQLSKVEWYIQQQAKQHKPNHLHLLKSVWGIGPILALTIIYEIGDIKRFESVQKFASYARLVKCKAESAGKTYGTQGNKIGNAHLKWAFSEAAVLYLRGNKKAQQYLLKLQKRMSKAKALSALAHKLGRCVYFMLKNETVFDETRFLKS

SEQ ID NO: 320032 - protein, 429 aa, unidentified
MNCTQNKKIEQVKETTMIVGIDVGSEKHYFRAFNWRGIELTRKPVAFSNSMEGFNSFYNTIVELMQKSELEEALVGIEPTGHYWFDLGQFMGEKDIKFVMVNPHHVHKTKELDDNSPSKNDRKDPRVIAGLVRDGRYFYSYMPTGAYAELRNASNRRFVLVEEQTRAKNRLQKWIAVYFPEYKGIYTHIDAKGGMLVLKKAPTPEEIVRLGVEGIIKIWKDAKLRGNGHKKAMLILAAAMRSIGLKAGLTEARMEIQDLIEDYELQTKRLERVNDLIKGLCQQVRYADKLLEIKGIGITTVAGFIAEVGDITRFDSTKELQKLAGLELVADSSGKHNGKTKISKRGRKRLRYLLFEAAISVVGKNEEFKEIHRYYTTREKNPLKKMQSLIVVACKLIRVFHVILTKGVSYDASKMLKDIRHPGEQLKAA

SEQ ID NO: 320033 - protein, 373 aa, unidentified
MRKTIMIGCDLHDKTMLLKIAAGCEAPETHSVKNTAAGRAKMIEGLKQRAAAAGGARVLFAYEASGQGFGLYDELTAAGIECHVLAPTRIARSQRQASQKTDEKDAHQLLELLRAHVLAGNELPSVWVPDPTTRDDRELVRMRLELAEKMTMVKSQIQSLLKRNHIRREADSGKGWTRLFRSWLKCTLTESPSSPLGPAARLALASLVRQLDSLEEEQARLDEDVNALASAPRYAAAVEEMSSLCGVGVLTALVFLTELGELGRFANRRQLAAYLGLAPRSFESGNATDRKGHITRQGSSRVRKMLCQATWARVRWDRQEQQAYERIVARNPKKKKIAVVASMRRLAIRMWHRGQAPPGTLSRGRVLAAAAHP

SEQ ID NO: 320034 - protein, 340 aa, unidentified
MEITTIGLDLAKSVFQLHAVDAHGSVVWRKKVRRGALLETLAKVPACLVGMEACATAHYWAREISALGHEVRLMPPAYVKAYLRRQKNDAADAEAICEAVRRPTMRFVPAKSAERQAVLVLHRSRELLVRQRTMLINAIRGHCAEFGLVAAQGVSGSRDLVERIGQADSAVLPDMVKAAMMLLAEQLHALVLQIQSLNRRLLVWHRQDQASQRLATIPGVGVISATALAASVTDPAAFRSGREFSASLGLVPRQNSSGGKDKLGRISKMGDRYLRKLLVVGATSVVRRARTADTTAANWVRSLLDRKPARLVTVAMANKTARIVWAVLARGETYRSPGAI

SEQ ID NO: 320035 - protein, 349 aa, unidentified
MAEPRISYTGERIDVGIDVHKETYTVTCLRQRQIVKTATVPADPARLAESLPRWFPGARLFSAYEAGFSGFVLHRVLTTAGITNIVVNPASVAVAANDTVKTDRRDAKKLARELADGRLRGIYIPTEAEELARLLPRTRAQLVAHRATITRQIKAKLHQFGLITPGSRRLMSSRYLREIAAWELPPELHVSLTLLADQWRFATRQLLEVRRLLREQAKAQAALETVYRSVPGIGEVVARTLATAWGDMTRCANERALLSYTGLTPSEYSSGAAIRRGHMSRQGVSRLRHVLVETAWRALSGDPILQAMFDRIAATRGKQRAIVAIARRLIGRIRACFRHGTPYAVGTVG

SEQ ID NO: 320036 - protein, 355 aa, unidentified
MDSKKYIGMDVHKESISIAVINGAGKIVMESLIETKASMILQFIDGLRGDVQVTFEEGTSAAWLYDLLKPHVTKLVVCDPRKNASMREGHQSDKIDARRLAELLRLNHLHPVYHGEHGLRSLKELVRSYLTITKDLGRVMTRVKAIYRSWAIPCTGKRVYAPRHRAEWLGKITEPGVRRRAEFYYQQLDALRMVRQEVRRELLAESKKHQAWKLLCQIPSIGPIRAAVLLGILQTPYRFRTKRQLWAYGGVGIEASSSADYQVRKGQLERKKKPVEIRGLNRNYNHDLKNLFKGAAIVAASKAGPFQEFYTALLTKGMRPDMARLTLARKIATIVLMVWKRGVCFDAQHLKPQTA

SEQ ID NO: 320037 - protein, 351 aa, unidentified
MLIIGCDFHTRFQQIAMAEESTGELLLERRLDHESGEAHAFYRNFHEPVRVGIEATGPIHWFERLLAELGHQLWIGDAAKIRASEVRKQKTDERDARLILELMLAKRFPRIWVPTPVERDLRQLLWHRHKLVCLRTMLGNQLHFLAMSQGLCRKRKLFTKKGRVELAGLALGPWARRRREELLKLLDQLDAPIAELDRAVLEEAQRRDDAVLLMTHPGIGPVTSLAFVLAIGPVTRFPRSRKLVSYLGLNPSEESSGGRRRLGAISKQGNTMVRWLLIEAVYPAVRKDPALRQDYQRLKFRRGHAVAKVAIARKLAVRMYWMLRSGADYAQLVRRQGSPSATLVDASSSLG

SEQ ID NO: 320038 - protein, 360 aa, unidentified
MTDQHCTVDTSREVVVTGGVDTHKDTHTTAALDGLGRLLGTHTFPATRAGYTALLAWLHGFGTVTKVGVEGTRSYGAGLNSYLTDHGVCVVEVNQPDRHTRRRTGKTDTHDAVNAAHAVQSGRATATPKAGTGPAAAIAALRTTLTGAVKSRTIALNQLDNLIVTAPTALRESLTGYTRKQLITTCARLRPTGDLTNPTTATKTALRRLARRIQHLTTEINDTKTELTTLTTQLLPRTTALLGVGPDTAAQLLITAGDNPQRIHSDAALAHLCGTAPIPASSGRTDRHRLNRGGDRHANAAIYHIVIVRMRHCPTTRAYIQRRTAEGLPKRHTIRCLKRYVTREIFHTLTADITDLTNTT

SEQ ID NO: 320039 - protein, 343 aa, unidentified
MESYVGLDVSLRRTSICIVDRTGKVLCEGMVNSTPEAIVEFVKSKAPGAVRIGLETGPTSTWLWTEIKDQGLPVICIDARHAKAVLKMQINKSDRNDAFGIARIMQCGWYKEVRVKGVDSHAIRALLESRALLVKMKRDLENQIRGLLKNLGLIIGTARGQTFHARVQELVEGRPHLAVAVLPLLETRMAIVRQIADLDRKVLMLARNNNQVRSFMTVPGIGPITALCYRATIDEPSRFKRSRSVGAYVGLTTRRYASGEVDWTGRISKCGDAMLRSYLFEAAGVLLTRIQKWCALKAWGTRLAKRVGLRKAKVAVARKLAVILHRMWMDGTEFQWSASKVAA

SEQ ID NO: 320040 - protein, 327 aa, unidentified
MQYIGFDIHKRYTFFTQMDDTGAIQRQGRLPNTREAMGAFFADVVEPAQVAMEAGPTWYYIYDLLETLQIPVTLAHPLRTRAIAEAKVKTDKVDSTILAHLLRADLVPAAYIPPREIRDLRELLRYRAALVRLQTKVKNHVHAILLKHGYQAPVCDVFGVRGRAWLSTLPLRPVYQHSLHGFVQILDTLREQIQSASRLIDQEAQATPLAQSLCTLPGVGHYTALLLLAEIGDIRRFPSPKHLVSYAGLAPTVHASGDRTRIGHISRQGSSWLRWILVEVSHHASRKPGRFQQLYQRLAKRKGPRIASVAVARELLTTTYWMLRHVH

SEQ ID NO: 320041 - protein, 359 aa, unidentified
MQTQRKELNFEGQNIFVGLDVHLKSWTVSIFTENLHYKTFNQPPKAELLSEYLKLNFPNGSYFSTYEAGFCGFWAHFKLKELGIQNIVVNPVDVPTTQKEQMRKSDPIDSNKLGRSLRSNELRGIYIPRPETLEDRTLIRVRFAIVRDMVRLKQRIKSLLNLYGIEYPDELKNTNTHWSKRFINWLKTVHLQYSTGTDALNILIIEAEQHRLILLDATKKIRTLSKSEHYSKNIELITSVPGVGLITGMMLLAEIEDINRFNNSDKLAGLIGVVPNCHSSGEKEKKGEMTSRGQYFMRKGLIESSWVAACKDPALSLSYNTYCKRMEPNKAITKIARKLVNRIYSVLKNQQRYELGIVK

SEQ ID NO: 320042 - protein, 366 aa, unidentified
MNCTQNKKIEQVKETTMIVGIDVGSEKHYFRAFNWRGIELTRKPVLFSNSMEGFNSFYNTIVELMQENKLEEAMVGIEPTGHYWFDLGQFMGGKNIKFVMVNPHHVHKTKELDDNSPSKNDRKDPRIIAGLVKDGRYFYSYMPTGVYAELRNASNRRFVLVEEQTRTKNRLQKWIAVYFPEYKGIYTHIDAKGGLMVLKQAPTPEEITKLGEEGIIKIWKDAKLRGNGHKKAMKILNAAMRSIGLKAGLTEARMEMQDLIEDYELQTKRLERVNDLIKELCRQVRYADKLLEIKGIGITTVAGFIAEVGDITRFDSTKELQKLAGLELVADSSGKHNGRTKISKRGRKRLRYLLFEAAISVVKRIH

SEQ ID NO: 320043 - protein, 339 aa, unidentified
MKLTPVGIDIAKSVFQVHYVDQETGEIVNKPIKRAKFLEYFANRAPCLIGMEACGGSHHWARQLTNMGHEVKLMPAKFVKAFNIRNKNDAADARAIWMAVQQPCKPVAVKTEIQQAMLALHRMRQQLIKFRTMQINNLRGLLMEYGEIMSKGRSKLNKEIPVVLERIAERLPAVLIDTFREQWNGLAKLDEQVAEIERRMREWKKEDKAVKAVSEICGVGLLTATAAVSMMGDPKAFSSGREFAAWVGIVPRQTGSGGKVRLHGISKRGDAYLRTLLIHGARSVIEHAKEPGEWVEQMMKRRPKNVVVVALANKMARTIWAVLAHDRPYQKAYVSVKPA

SEQ ID NO: 320044 - protein, 343 aa, unidentified
MQTVTTIGLDIAKSVFQVHGVDAAGQVVIRRQLKRRTVLAFFQKLPPCLVGIEACASSHHWSRELQALGHTVRLMPPAYVKPYVKRQKNDATDAEAICEAVTRANMRFVPTKTPEQQGGLVLHRTRHLFIRQQTSVINAIRAHLAEFGIVAPVGRKGVEELLHVVADPADNRVPTIARACLAALGVQLRRFKEQILEFDRLITAWHRSNEMSMRLDEAPGVGPVLATAVVATVADPKSFRSGRNFSAWIGLVPKQHSSGGKDRLGSISKQGDRYLRGLFVAGALAVIRYAKIHGTKHRPWLTALLTRRPTKVAAIALANKIARMVWAMMVKGERYKEPIALAA

SEQ ID NO: 320045 - protein, 454 aa, unidentified
MGKRSPRKTSSKTMAPIHPDAAGLDVGSRFHVVAVAADRDVEPVRSFQSFTGDLHALADWLESVGITTVAMESTGVYWVPVFEILESRGFEVLLVNARHVKTVPGRKTDVNDAQWLQQLHQHGLLRGSFRPREGVARLRAMLRHRERLIEYGASHIQHMQKAMMLMNVQLHHVVTDITGVTGMKIIRAILEGSRDPKELAEHRDSRCKASVETIEQALQGNYRPEHLLALRHALELYEFHKVKVAECDEEIEAALRVLNSKRAQPEEAIPNVRHARGRNEPAFDVRDAIYTFLGADLSQIHGFGPYTVLRLVAECGDDMSKWPTAKHFTSWLSLAPGNKISGGRVLSSKTRRSTNRAAALLRIAAVNIGRTHTALGAFYRRLGARAGKAKAVTATARKLAVLFYNALRFGMKYDDPGADFYEVRYQTRVIHRLRQRASQLGFTLIEGERAEGVS

SEQ ID NO: 320046 - protein, 425 aa, unidentified
MKSLPGCEFAAFIGIDWADAKHDICLQVANTEKREFAVLPHRPDAIDQWACSLRQRFQSRPVAVCLELAKGPLIYALQKHEFLVLFPVNPATLAKYRGAFTPSHAKDDPTDAEYQLELLVLHRDKLKALNPQSAPMRTLESLVEQRRRLVDDSKRITNRLTSALKQYYPQAVEWFEAKDTVLFCDFLSRWPTLKQVKHARRATLQAFFREHNARSAKLVEERLTAIKSATSLTEDIAVITPHRLLVQALVDQLRVTLQAIERFDAEISAISRTLPDYPLFRNLPGAGAALAPRLLTAFGEQRERYDSAVEIQQYTGIAPVTERSGKQHSIHWRLQCPTFLRQTFVEWAAETIPRSFWAGAYYRQQRAKGCSHPLPCAPWPSSGSASSTAAGRRGRPMTNRSISMRSSAVDRRCSIGTRRLQKILD

SEQ ID NO: 320047 - protein, 312 aa, unidentified
MTSGRFVGIDVSKRWLDVQVHEDGQAWKVGNDLDGYTTLIAKLKLIGPALIVFEATGGYERHCVKALGEAGLAVAVVNPTRVRRFAEALGILAKTDKIDARVIAHFASVTKPVAISRQTPLGEQLAACVERRRQLLVELVAEKNRLSTSPDCMQSDIEEHIAWIDAHVEKLDTQIQACIAQNDEWQARAKIIDSIPGVGPVTATTLVAEMPELGLLNRQEIAALAGVAPFNKDSGPKKGKRRIFGGREGIRRTLFMAALSAAKCNPIIRAFYESLLKRGKEKKVALTACMRKLLVIINVMVREGKPWKYLPA

SEQ ID NO: 320048 - protein, 353 aa, unidentified
MKRIVKQAVGIDVAQDELVVCMGRMHEDLTLELYSHKTFSNTAKGFELLTTWVSKLSNADVELNYVMEATGVYHESLAYYLSDRGDHLSIVLPNKISNYSRTLDVKTVTDKTASEAITRFGLERKLDNWEPPKGVYRSLRQLTRERDQVVVTRTIAKNQLHAEEAEAYPNKKSIARTKKLIAFLDKQEQEIKEELAQMIKEDEEVKRIVVLLCSLPGIGLLTAATILGETNGFDLIRNKRQLASYAGLDVKEKQSGTSVKGKPRISKKGNRYLRKAMHLPALTAIRHDERFKAIFARIVSKHGIKMKAAVAIQRKLLEIAYTLYKRQEKYDSQYLNKSEDKIAVEITELSIKN

SEQ ID NO: 320049 - protein, 420 aa, unidentified
MNREVRAWIGIDWADEKHDVSVYEVATGRQERLEVKQSPEALAEWIGQLRTRYGNAGQVAVVLEQGRGALLNVLMGCEFLLLYVINPKSLSCYREAFYGSGAKSDPVDAELMREMVRQNPERFRAWHPDDVLTRSLRLMTEGRRDLVNQTTAVTNQLTALLKGYYPQALRWIGALDTHWACDFLDQWPTLQALQSSSRRQILRFYEKHPRHHLDLEQQIQQFHQTLPLTGDEAVLQYSILMVQALIPQLRALLDSIDEFDRKIAEVFRKHPDRPIFESFPGAGAALAPRLTAAFGADRDRYAAASEMQQFSGIAPVTEKSGKQHWVHWRMACPKFIRQTFHEFADHSRRWSAWAKAYYQLQIERGKKHNAAIRALAYKWIRILFRCWKQRVPYNEQLYLASLLKHQSALLSKSAPAVEKL

SEQ ID NO: 320050 - protein, 355 aa, unidentified
MESTKYVGMDVHEQTISIAVMNSAGKLIMESIIETKAITILQLIQGLRGDLHVTFEEGTWAAWLYDLLKPHVTKVVVCNPRKNALLKEGNKSDRIDARKLAELLRNGSLSAVYHGENGVRTLKELSRSYLTISKDLGRVMNRVKALYRSWAIPCAGTQVYAPRHRPEWLSKITEAGVRRRAEHYYQQLDALQALRHEVRKDLLVESQKHHATKLLRQVPCIGPIRAAQLVALMQTPHRFRTKRQLWTYSGLGLETHGSAQYRYVEGQLQRSKKPQQLRGLNTNHNHDLKNIFKGAATMASISSGPFHGFYEALLAKGMQPTMARLTLARKIAAITLIVWKKGARFDPQHLKQQAA

SEQ ID NO: 320051 - protein, 371 aa, unidentified
MLYLAIDQHSKQITICVRNADGDDVLRRQVSTRPEKIKAFFQQLTEMDSEFMAIIEVCGFNDWLIAELHKWKCREIVLIHPEKPSKKKTDQRDARKLCDLLWLNRERLAIGELVHGLRRVYIVSQQERENRQLTALRKNLGQRRTRTLNKIHRILNCHNLMWDYPTKTFQTQLGRRWLEKLELPEIDRLEMDALLQEWKTWDEQITQVDEKIAERASQREPGEILNSTQILMTAPGVSHYSGLTMASRIGPIERFPRPRSLANYFGLTPGCRNSGNTQDRLGSITKEGSKIARFILGQLVLHFLKHDPKMRSWYRRIKTRRGSNIARVAVMRRITTIFWHMLKHQEAYSIGGPPPRLRKQEDPPTERSDAA

SEQ ID NO: 320052 - protein, 334 aa, unidentified
MKYIGLDIHKKHTQACVRNEAGEILCEERIRTDADGMDRFFEKLESDPGEHLAVAMEATGFYFWIYDRIAARGHKVIVVHPGKAKPLMRAKAKNDRNDAAALSELLRSGCLEGIYVPPKEVREMRELTRHRESLVRKRGDLKREILSALMQLGIAVPEEFRSNFTKKQVRWMRSLKVFVICERLDLLEQTAVKIGNVEAIIAERWDADEDMKIIRTVPGIGLVTAAVIRAEIGDVGRFASAERLAAYVGLTPTTYQSGEKTWSGPTRRGNSRVKHVLIEALLSHTQHCPDSKISQYNLRKRDAIGKKKALVASARKLMEALYFMLTRREEFHAH

SEQ ID NO: 320053 - protein, 348 aa, unidentified
MLYVGLDLSRKRLDWHALLADGELVGADACPPDSDGLAHLVRRFERDWRQPVLAAIESMTGARFVHDQLELAGWDVRIADAQRAKGIAPLACKTDRVDAWVLAELARRDLVPEIWLPDPEVRGERERARFRLHLVHKRTALKNRVHAILFQHGLRAPVGDLFGAGGRRFLARGTLPEPWRSSVEVSLHLIDALEEQIEALERELRRLGGEHRYLPLLLTCPGVGWVLGATIAAEIGDIRRFPAAAKLVGYTGLCPRVRQSGDVDRRGALSKHGPPYLRWALIEAAHNAIRSHPPYRARAERTRERLGRKRGGAIAAISVARSLAEAIWWMLTRSQPFAPAGASTPLTA

SEQ ID NO: 320054 - protein, 394 aa, unidentified
MFYLGIDIGKNTHVASMIGEDGKQVFRAFSFSNTTEGGESLLARLSGIAPTELEIGLEATGHYWLALYSYLHDRSYKLHVINPIQTDGWRKGVEIRRRKTDVIDSVLIAELVRYGDFIEARLPEEAVLSLKNLTRFRSYLVDSIGDLKRKVICVLDQVFPEYQNVFSNVFGKTSKEILLQFSSPADLEDVSADTLADLLAALSRKKLGVAAAEKLSAAAAKSFGVTFCRDSFTFQLRMLIEQIKYIESQVKDTEAEIEAIMTTMDSPITTIPGIGKTTGAVILGEIGNIERFDNPAKLVAFAGIDATVLQSGEFEGTHNRMSKRGSPYLRRALYQAALVAATGRYPDPILREFYLKKLSEGKHHSTCIGAVSRKLCYIIYAVLKENRPFEVRTP

SEQ ID NO: 320055 - protein, 340 aa, unidentified
MGKGITVGLDIAKHVFQVHGVDVEGTVVFRRKLKRSEVLDFFDKLPGSLIGLEACATAHYWARQIRALGHEVRLMPPSYVKPYVKRQKNDMADAEAICEAVSRPTMRFVPIKSEVQQSVLMLHRARELLIRQRTMLINALRGHLAEFGIIMRQGKAGVGTLVALIEDDEQALIDRMTRDALRPLVAQLREMHERIGQLDRHIHAWHRSNAASRRLETVPGIGPITASAIVATITDPILFRSGRQLAAWLGLVPRQNSSGGKDRRGHITKKGDGYIRRLLVIGAHAVLRFARTGKGASTKWAAELLTRRPYKVAAVALANKMARIVWALLSRGEVFREHAI

SEQ ID NO: 320056 - protein, 321 aa, unidentified
MTGTVVIGIDVAKDTVEVALRPAGTTWRAATTPIELRRLAERLIGLHPTLIVLEATGGYEQPVVAVLSVAELPVSVVDPARVRHFARATGLLAKTDRIDALILARFAEQLRPAVRPLPDAAQRELALLVQRRRQLLDMLAAEEQRLDQQALFPRSPITGSLAAHVAYLRQQLADTDQALTTHLTAHPRWDTTHALVRSVPGVGPVTAATLLAEVPELGTLSRQQIAALIGVAPMARDSRQRRGARMISGGRATVRQVLYMATLTAVRCRQSPLRAFYHQLRARGKEFKVALVACMRRLLVILNAMVRDGRPWNPALCAAKT

SEQ ID NO: 320057 - protein, 321 aa, unidentified
MQKDLLYCAIDVSKDKLDVDGAALALPAQLGNDQAGFRQLIKAAKKYPGAVQFVFEATGPYHLGLALALWEAQIPLSVLNPARVRYYAKAQGKAKTDPLDKQVIGDFARSFRPPLTPAPDPVRRELTELLQRRDGLISTRAAEQNRLGQCRHKIIKGQIRRLMAQLAEQIGQIDGLMKKLVNSSQELKAKVKALCQVKGVGHLTAVTLLITLPELGTLGRNRIVRLVGLAPLNDDSGTQKNKRYIQGGRARPRCALYMPALSASRHNPVLKEVYERLLKAGKLKKVALTALMRKLLICLNALLRKLADQHPSPQGLCLAKP

SEQ ID NO: 320058 - protein, 406 aa, unidentified
MELVPIHKRVIGLDIHQAQVTACAIIEESGGETRLEQRQFGAFKRDRRELAVWAAALDPDEVVMESTGIYWKSPYAALEAVGIRATVVNARHVKQVPGRKTDVGDAQWLATLARAGLLRGSFVPPAKLRELRLIARQRQKLVGLLSSEKNRMHKVLTDAGIRLGVVVSDIHGQSARAMIKGILRGQAPHEVLQLASRRLKASREELHDALQGELTASHVFVLDELLRHIEELEARIARFDARLLAELASEHNALALLQTLPGVDLIGAAMLLVEIGSDMSVFGTSDRLASWVGLCPGNNESAGKRKSGRVRKGNPYVRRLLCEFAHAASRTKSAFQAKFQSLIVRRGHKRAIVALAHKMLRTIFFMLKRGEHYRDSATNYEQLSVQRNASRWIKALTRFGFIPAAA

SEQ ID NO: 320059 - protein, 369 aa, unidentified
MKKNITVQKSPKRAKAGEAGPITIGMDLGDKTSCYYVLGGDGEVLSEGSVATTKKAMTQKFGGMGRCRIAMEVGTHSPWLSRLLSRLGFEVIVANPRQVRLISASTRKNDRMDAQLLARLARVDPRLLRPIRHRSEEAQADLLKIRVRASLMEARTSLINAARGFTKAQGDRLPGCDADVMDVEKMEALPESLQETLRPLLEQVESLTEKIQKLDTTIEQIARTKYPETELLRQVNGVGTLIALTFVLTVEDRRRFQKSRDVGCYVGLRPKQGDSGESQPQLRISKEGDVYLRQLLVQGAHCILWRGPDTDLKRWGLKLAARGGKNAKKRAVVAVARKLAVLLHRLWVTGEVYEPLRNSQAQQKKGRAA

SEQ ID NO: 320060 - protein, 349 aa, unidentified
MTEQRLSYIGERVYVGVDVHKETYTVTCVCQRQIVKTATVQADPASFAVSLLRWFPGATLYSAYEAGFSAFVLHRALTTAGITNIVVNPASIAVAANDKVKTDRRDAKKLAIDLADGRLRGISIPTEAEERARLLPRTRAQIVEHRATIARQIKAKLHQFGLIAPSSRRMISHRYVREIAAWSLAPELRVRLTLLAEQWRFATRQLIEMRRLLREQAAVQSELEKVYRSVPGIGEVVARTLATELGDMTRFANERALFSYTGLTPSEYSSGNAVRRGHISRQGASRVRRLLVEAAWRAIPQDQVLKEMFDRIAATRGKKRAIVAIARRLIGRIRACFRQGTTYAVGTYA

SEQ ID NO: 320061 - protein, 357 aa, unidentified
MVDRKCLGFSSPYFSVGRHDASPNSPDSCLGPDRIPYFSQGRVKEIMNTPEQFIGIDVSKDTLDVGVWPTEERMTFANSEDGVAMVMDFIRPLAPLRVVLEGTGGWETLAALTLSTQGFPVVVVNPKRVRDFAKSIGILAKTDALDALTIARFAASTRPEVRPLKGEETQQLEALVTRRRQLTQMLAAEKNRLSTAPKWTRKNIEVHIKWLEKQIAQVHTELHALIKKTPLWREKDEILQSAKGVGPVLSSTLLCEVPELGTLNRRQIAALIGVAPFNRDSGKYRGRRMIWGGRASVRKALYMATRAAIRFNPIIRAFAERLLKSGKKRKVVITACMRKLLTILNTMIKNRCRWQTA

SEQ ID NO: 320062 - protein, 341 aa, unidentified
MKNLFIGVDFSKEKVDVAIIFADGLTETAARVFNEFKTTVSGYKQLVKWVEQNSYGIDSSLWLFCGENTGDYSKGLRNFLYGKGYDMWLENAKSIKDASGLRRLKSDRADASMIAEYAMRNYDKAIMYEPLSESLAQLRELFLYRQMVVRHRCSFQVRRGEKRLTMEKSPIKTMISQSGRHIVSELNKEVEKIDKRIAELIKSDEELTEVFTIVTSVPGIGTQNAVSLMVYTDNFRRFNYDSRKIACYYGIAPFGKDSGTSVHSDPRVHYMANRQIKAMLTQAALAAVNFNPVIARYYMRLVERGKKKQVALNNVKNKLVHLVTAMVRNRQLFTTEYKITA

SEQ ID NO: 320063 - protein, 422 aa, unidentified
MKRQTEQEQFAAYIGIDWATQTHYLSLCEADSRTVERSQLDHKPEVLGQWVNELQRRYPGRRIAVALEQSRGALVYALMNYEFLVLYPVNPKALAKFREAFYVSGAKDDPIDSDLLLELVTKHRDRLRAWQPDDELTRTITLLVEYRRELVDTQTGLTNRLSDLLKLYFPQALGWAGELATIQACDFLERWPTLAKVRQATDTELLQFYGAHGCRKAALIEQRLRQIETAQPLTTDGAVITASMAMVQSTIAQLRPLMVSIKEMDKQIAELFATHEDHELFRSFPGAGAVLAPRLLSAMGANRDRFVTAQDVQQLAGIAPVIERSGKTCFVHRRFACSKFLRQSFHEYAAQSIRWAPWARAYYDRQRQRGNGHHAAVRSLAFRWIRIIFRCWQNRVPYSEETYQQALRDRGSKLSALIVAQT

SEQ ID NO: 320064 - protein, 422 aa, unidentified
MLAESHDEEQIIARVAALDIGKAELVCCVRVPAPAGGKRRSQEVTTYSTMTRSLTELANRLIEMRVERVVMEATSSYWKPVFYLLEAHGLDAWLVNARDVKHLPGRPKTDVLDAVWLCKVAERQMLRPSFVPPWPIRRLRDLTRYRTDLVAARTAEKNRVEKLLEDACIKLSVVASDIFGVSGRAMLAALVAGERDPKVLAQLARARMRGKIDRLEQAFDGHFADHHRFLLSRMLSRIEGLDADIAAVDAQIEVQLAPFAEAAVHLDEIPGIGPIAAAAIIAEIGVDMSRFPTAGHLCSWAKFAPGINSSAGKTKGSASSGHGNPYLARVLGEAAVGTSKTDTFLAARYRRIARRRGQPRAVVAVGRSILVIIWHLLHDPDTRYQDLGSDHYTRHVDPSAKKRSHIRQLEALGYTVTLTPAA

SEQ ID NO: 320065 - protein, 430 aa, unidentified
MTDHSQSRTATAAPEAAAEPQHAFAAFVGIDWADEEHAVCVLDGERLQRDVLPHTPEAIAAWAAGLARDFGGRPVAVMLEQSRGALLHALLQYPQLVLFPINPKQAARYREALVHSGKKDDPTDAECLARFVREHHRELRAWRPADSTTRQLAELVELRRKTVESRKQTAQQLEARLKQYFPLALDLGDAAMAIAVVERWPTHQALARANPTTLPKFFAQHGRRNADQVNELITRIRAATPLTTDRALIDPSALAVKFLVKELRVQEAAVAEFDAAIAQCFAAHPDAGLFRSPPGAGAALAPRLLVAFGSDRSRFATADEVQAYSGIAPVTKRSGKSCLVAKRHFCNKFLRQTFHEFADHARKWSAWSKAFYDHLRARGHRHHAAVRALAFKWIRILFRCWKDRQPYDEDRYLHQLRSKGVPYLPSPQPA

SEQ ID NO: 320066 - protein, 333 aa, unidentified
MTAVLTIVTAYVGIDVAKTKLDVVLRLGERAIHQVFANTAEGFTALDAWLSSFGLSPVQVRICLEATGSYSDALALDLFARGYTLSVLNPAVLVDYRRSQNIRSKTDKLDAHLLARYAQDKQPRAYTPLPDEIVTLRARLHHRDDVQHMLRQERNRLEAGRMTQAIQQRVRTHVEGLQAEFKTTEGEIKAHLKAHAHLKAIWQRLQTIAGIGWLTAARLLAHLGEIERFEKVGSLVSLAGLAIKEHSSGSSVRGKAEIDRHGRKDLRQTLYMSALVAKRVSPHMQGWAKRLQAQGKPKKIILVAIMRKLLHMVYGVWKKEQDYQPALAFPVAA

SEQ ID NO: 320067 - protein, 343 aa, unidentified
MNAFYYIGLDIHKKVIAYCIKTLDGRLIGQGKIDADRKSLDDWVQGLPGPWIGAMEATIFTGWIYDFLKPYAADLKVAHPQMLKAITAAKKKNDRADAEMIADLLRVNLLPECYMLSEEIRELRRILRYRNHIVRTAVKMKNKMSGLLMEVGACYSKKRLHGKKYFNSLLERVEEIPHSVKELLKLSRASFEMFSAVQKRLVEALRTNSLIRDRVQRLMSIQGIGEVTSLTWVLEIGDPKRFGSIRKAISYCGLCSGQKESAGKEQRGPISKKRNKHLQTILIEAAKIAPLWNPQLAALHDRELKKGNRNRATLAVARRMVAYMMAVDKNETDFMLREEEKAA

SEQ ID NO: 320068 - protein, 512 aa, unidentified
MKVQASKPTFTIGYYPIGQYGSNICRQDIGRKRPYRSLLRQRYWAWSFTSKLITMAKVAKRKQTSKGLRLEVVNPNAAGIDISPKEMQVCVPSDRDGECNRTFGVYTEDLHYIAEWLKVCCIDTVAMESTGIYWLPVFRILKESGFEVILVNASDVKNFSGRKTDASDAEWLMMLHSYGLLKPCFQPENIARTMRNLVRHRDNLIRSASREVLHLQKAMEQMNLKLDNVFSDILGKSGQSVIKAILNGERDPKVLADLADPRCRTSKEEIEKSLQATWDEEHLFEMRQSDSLYQFYQQFIAECDAKINEIAMQYSATVDAPKTELLRSEKYNAKKNRIGFDVEKVAFELWGVNVMRIPGMSRGALLRLVGELGADFTTKFVDVKHFVSWANLVPNNKISGGALLSSKVPKKKNPVGMIFRQTANTLKAAKNPLGDYFRHMRAKGGYLQAMVATEKKLASIFYCMVQRKVEYNEKVYCNHRKQELQNKVAYLHKRLQRMESELANCGDRKSVV

SEQ ID NO: 320069 - protein, 387 aa, unidentified
MPELNSLHRSRVALEQDTTLIAVVEMSLSSWLVAGIVPGVERQPLKKLEADEGGLLRLLERWRGEAAKTGRTISRVVVAFEAGRDGFWLARWLHARGIEAYVIHPTSIAVSREHRRAKTDRLDTEMLKRAFLGWLRGEPGHCSMAAVPSLEEEDAKRPTREHESLVSERTRVVNRIKASLARLGIRGFKPMLRHGAERLKALRTPEGVGLPPNTLAEMRRDIARLQFVREQIKQIEEARTERLERASGEGGNAMVRLLVQVVGVGLETADMLVHEVLSRPLRDRKAVARYAGLTGSPDESGAKRREQGLAKAGNARVRRGMIQLAWRFLLHQKGSALAQWYRARTADARPGTRKTLIVALARKLLVGLWRLVTTGEVPEGIVLRPAT

SEQ ID NO: 320070 - protein, 383 aa, unidentified
MKKNIKTSVMDTASAVDVAAAQRQPAVDGAVLVTPQYQAVVGLDVGDRQSHYCVLDLSAGVVAEGVVKTTETSLRVLFEGKGRMRIALEAGTHSPWISRLLIALGHEVLVANPRKLRLIAESDAKHDRADAQLLARLAHVGPALLAPIHTRSAQTQIDLTLIRAREVAVQTRTKIVNAVRGMVKSTGHRLPASPRVTFARKATEACPKALQPALLPLLRLVQILTDDIAAYDRLVVEKARAYPETEAIQTIPGVGALSAVAFVLVLNNDRSRFKRSRDVGCYLGLKPKQRDSGRQSPQLGITKAGDPLMRRLAAQSAQYILGPFGRDSALRRWGLVLASRGGKNAKKRAVVAVARKLVVLMHRIWITQEVYDPMRGIRVRPAA

SEQ ID NO: 320071 - protein, 433 aa, unidentified
MQDVQEEPLFVQRVAGLDIAKAEVEVAIRVPSDTSPGRRQQETRTFGTTRRELDSLADWLRSWGVTKVGMEATGDYWKPVFFLLESRGFDCDLYNAAQVKALPGRPKTDRADSIWLAKITERGMISSSFVPPEAIRRLRTHTRYRRHLTQARTAEKQRVEKLLEDGHLKLSSVISDIHGVSGRDMLDAIAAGQRNPAALAQLARGTMRGKIRRLEEALDCSFFTGEHAAVLAMMLVTIDHHTAQIEALNVTIEKLAEPYLPQLEQLDAVPGIGTICAQDIIAEIGADMSVFATASHLVSWARYSPQVKQSAGKRKGSNSTGRGNPYLGAALGEAGISAGRTQTFLGARYRKLTRRMPRKKALVATGNSMLTIAWHLLSDPDATYTDLGADYYETRMHARRQARNHVKSLERLGYKVTIETINPDTGELLATAG

SEQ ID NO: 320072 - protein, 410 aa, unidentified
MEVLYPHCAGLDVHKDTVVACVRHMANGEVRREVRTFKTTTKELLALSDWLAGEGCTHLAMEATGVYWKPVWHVLSDGDFTLLLANAAHVKNVPGRKTDVNDAAWLADLLAHGLIRGSFVPDEQTQEMRNLLRTRKQLVRERSSHVQRLQKTLEDANIKLDSVISDIVGLSGRRMIEALIAGETDPQALAALAHRRIKATPDELEAALRGRITRHHRFLLRLHLQQIDAIDAAIGDVDQEVDQQVEPFRTAIQLLSTIPGINELSACVILAEIGRDMSRFPTAGHLISWAGLCPKNDESAGKRRSTRMRKGAPWLKTALVQCAWAASRKKASYLQAQFHRLRARRGAKKAIGALAASILTIVYNMLISGELYHDLGPDYFDRRAKTAQTNRLVARLQNLGWAVQIAPLAA

SEQ ID NO: 320073 - protein, 389 aa, unidentified
MIYVGIDIAKLNHFASAVSSDGEVIIEPFKFTNDGDGFQLLLSKLESFDSDSIIIGLESTAHYGDNLVRYLVASDYKVCVLNPLSTSSMRKNNIRKTKTDKVDTYIICKTLMMQKHFRFVTFYDLDLMDLKSLGRFRQKTIKQRTRLKIQLTSYVDEVFPELQYFFKSGLHQKSVYALLREAPTPEAIASMHMTHLAHLLKVNSHGHFDKEMAQQLRVLAKKSVGVSDSALSIQITHTITQIELLDDQLEDSVEKEMTEIMKFNDSVIMTIPGIGYINGGMILGEIGDVHRFSNPQKLLAYAGLDPSVYQSGNFQAKKTRMSKRGSKVLRYALINAAHNVVNNNSTFKAYYDAKMAEGRAHYSALGHCAGKLVRIIYKMLTDELEFSLD

SEQ ID NO: 320074 - protein, 410 aa, unidentified
MDVMFDRVAGLDIGKASVTVCVRTPGEKGRRKSETRTFRTMTRSLVVMADWLCECGVELAAMESTATYWKPVFYCLEDRMECWLLNAAHMKAVPGRKTDVKDAEWIAQLLEHGLVRPSFVPPPDIRRLRNLTRYRVQLQGDRVRDANRLEKLLEDASIKLSVVASNITGVSARKMLTALVDGEQDPAVMADMAMNKMRQKIPDLTEALTGHFDDHHRLLVGQLLDGLAHTERALKALDAHLAEQMKPWAHQLKLLQTIPGVGVVTAQTFIAETGGDMSRFSSAAHLAAWAGVAPAIHESAGKRSPAGSRKGNKFLTSMLVEAANSAAKTKNTYLAAQFSRLASRRGHNRAAVAVAHSMLVSAYWMLVRDEEYKDLGPEWLDREQNSAAHTRRLVAQLERLGHTVTLSPAA

SEQ ID NO: 320075 - protein, 355 aa, unidentified
MNSCIGVDLHSRNATLCHRVGGEERSLRTLELHSSEWQAYWKTIPAGTDVFVEMSRTTWWFARWVQEQGHQAHVIDPTRSRAMAAGLPKTDRCDARWLAEMGAKGVLNEVYVIEPETERLRELVRHRALWVRDQTRIKNRIHYQLAREQRCCPHRSVFTQKGLCWLEEQELSQPYAQSLQNHLAHFAYVHRAVEQTTEHLLDTEANPRALELLLSIPGIGELTARILLAEIETIHRFSDPEKLISYAGLAPRVRQSAGMDRRGALTKRGSVWLRTALVESAQIAVRRPNQFQKIFRRVSFRRGRNVGIIAAARRLAEVIWHVWSKNVLYQEPASPRKESGSNAIPAATASPSPTS

SEQ ID NO: 320076 - protein, 346 aa, unidentified
MRKSITDLSSVTTVGLDLAKHVFQVHGVDALGRVVVAKAIRRNKLLEFFASLPPCLVGLEASGSAHHWARELTKLGHDARMMPPAYVKPYIRRQKNDASDAAAICEAVTRPSMRFVGLRSLENQAALMRHKTREMLVSQRTQLLNGLRGHLTEVGVIAAQGPRHARELAELIETCDERIPFEVCEALAELVLQLHRLDEAIARLDRTIAKMAQNDETARRLMSIPGFGPITASAMAATIQDTSSFAGPREFAAFLGLTPKQNSSGGKQKLGRISKMGNRNLRKLLVVGAHAVLFHRKPHTDPLRMWAKKLMEKKPFKLVAVALANKMARIAFAIMRGRTVYREIPA

SEQ ID NO: 320077 - protein, 409 aa, unidentified
MEIIQERCAGLDVHKKSVFVCVRRLSGKKLTKEVRKYGTMTHELEQLCDWLKQLGVTHVAMEATGVFWKPVWNILETHFELLLINPRDVKKVPGRKTDVKDCEWICELLQYGLLRPSFVPTKDIRQLRDLTRSRTKLIEHKTSVVNRIHKVLQDANIKLSSVATDALGVSGRAMIRAMVAGNEDPIALAELAKQRLRSKIPELRLALKGHVNEHHRFLLQRYMSQLESVEAEIHLFDERIAQLMAPFEQLIDLLITIDGVERYTAECIIAEVGPSMNQFHSAAALASWAGVCPGNDSSAGKRRSGKTAKGSRWLRRALAQAAWGAARSKNTYLSVQYKRIASKRGKKRAIVAVSHSILIAAYHVLKYRVPYRDLGPDHFDKLNKTRLTNYLVKRLESLGHKVTLEADAA

SEQ ID NO: 320078 - protein, 346 aa, unidentified
MQSTTIAVDLAKSVFQIAVSRRPGKVCESHRLSRGQFLRFFAERRPALVLLEACGSAHFWAREIQALGHRVELLPPHLVRHHADGRSKTDKGDAKALLEAHRDDRVRPVPVKSVAQQTLAALHRLRSAWMADRTARINLVRGLLREFGLPIPVGARHVVVAALALLKEDKLPAPLRPGLAAACREIGEFETRIADVERQLRALAAELPVVERLQSIPGVGLLTSTALVALVGDVQRFPTSRHFASYLGLVPKEYSSGLRRRLGSISKAGDTYLRTLLIGGARSVLLATQRYQRQEPDRLRRWALQVHRLRGHNPAAVALANKLARIVWAVWRNDTRFASRPGTTTG

SEQ ID NO: 320079 - protein, 325 aa, unidentified
MQFIGCDVSKLTLDLAFLDKTNQHWNKPCRVPNTRRGWNTVINTFKPATNDELCIVMEATGVYHLKAAAYLSLVGFKVIIINPGRAAEYARSMNRTNKSDRLDACDLARYGAQLDEPHWYQVEAHEISQLKNLLSRLNQLDKDLRRESNRLEKCDFLNHSQLLAQSIRRSIRFIKLEQTAVQALIDQHITQHPNLKRNQQLMCSIKGIGKKTSQWLLPMLSTQRFNHAREVAAFLGLVPCHRQSGTSLNSKGHLSGRGNAVLRAKLYMPALCASIHDPELKTFYQSLLARGKTPKQALTAVMRKLVHICYGVIKHQTPYQANYVA

SEQ ID NO: 320080 - protein, 429 aa, unidentified
MTRISAGVDVSKNRSTVCIMDQDGKVIMRPFLVWHSTEELDFLADTLKRLNGEVRVIMESTSVYQYPIALQLKERGIFISIVNAYKVKKFANTDFRGGKTDKKDSRTIASYGISYWDKLVEWQIPKDTYFNLDLLNRTYMNAKKHRQIILQELQHYIDCAMPGMDKELHSLNLNTKKDFMLDFVEKFWHRDEIVNMTEAEFTEVFTAWAKKKGYRPVEGKAAKIYAIAKSCIPYYPANPTVKTILQCIVDKLSGVNRTLVTIVTQMIEEAKKLPEYQIVREMPGVGDPLAARFFGSAGDIRRFKNSKALVAYAGIDSPPDESGDFSSTHRHITKKGSKVFRDTGYEIMMALRAQKRTWEKVRKNPEVYDYMLRKEAEGKPRKVAKIAALNKFLRIVYARIKELYDNMALAERAKTKTRSKTRAKTKVTA

SEQ ID NO: 320081 - protein, 339 aa, unidentified
MELYAGLDLHSRNTYIGIMDNAFNRVFKKRVPNHLEQILQTLDPFRDQIKGFVVESTYNWYWLVDGLMDAGYSSAHLANPSAIKQYEGLKYSDDQHDAFFLAQLLILGILPQGYIYPKKDRPVRDLVRKRMFLVRHKTAHILSLQSLLQRCCAMKVRTNDMRHLTVEELEMWLEEEHLVLSAQANLDSINFLKQKIKQLEKAIIQKVKLNKAFKYLLTVPGIGNILAMTIMLEVGDINRFSKVGNFTSYCRCVPSRRLSDGKSKGYGNRKNGNRYLSWAFTEAAQLGRRHNERFRRYYNRKVAQANTSLATKALGNKLARICYYIMRDQVPFREELFCH

SEQ ID NO: 320082 - protein, 482 aa, unidentified
MTNMQSEAHDAFEHSFASAGALAFVNEYSESAAPPALYNAFAERKPAMSLGTTVPHAERSHMKQHVSEAFAAFVGLDWADAKHDVCLQAAGTAQREFLSLEHSPEAINTWVQTLRTRFNGQPVAVCLELNKGPIVSALRNYDFLVLFPVNPLTVAKYREAFTPSRAKDDPTDAELQVELLLKHRDKLTPLSPQSPAMRALAQLVEHRRRLVGDKVRCTNRLTSTLKNYFPQVLQWFPEKDTAIFCDFLSRWPTLKAAQLARRTTLEGFFRAHHVRSTDLIATRIEAIKSARALTTDDGVIAPNVLLVHALVAQLRVTLQAIADFDKVIAHRAQDHPDFPLFAALPGAGAVFAPRLLVAFGEQRERFTSADELQKYAGIAPVTERSGKKSWVHWRLQCPKFLRQTFVEWAAESTRHSFWAQVYYQQQREKGKAHQAAVRALAFKWIRILYRCWQERTPYDESIYLQALKRRNAPLLHNLANLS

SEQ ID NO: 320083 - protein, 355 aa, unidentified
MGSAKYVGLDVHKDTISIAAMNSAGKLIMESIIETKAITILQFFQGLHGDVYVTLEEGTWAAWLYDLLKPHVTQVVVCNPRKNALLLKQGSKSDQIDARKLAELLRLGALSAVYHGEHGLRMLKELSRSYLTISKDLGRVMNRLKALYRSWAIPCAGAQVYAPRHRAEWLAKITEAGVRRRAELYYEQLDALRSLHKQAKKELLSEGRKHSATKLLRQIPGIGPLRATQLVALMQTPHRFRTKRQLWNYSGLGLETHDSAQYCMVEGQLQRSKKPQQLRGLNDNHNHDLKNIFKGAAMRASTAAGPMHDFYEALLAKGRRPTMARLTLARKIAAITLIVWKKGASFDAKHLKQAA

SEQ ID NO: 320084 - protein, 339 aa, unidentified
MKTIMIGLDLAKNVFQVHGVDGTGEVLLRRQLRRSQLEGFFAKLAPAVVGMEACGGAHHWARLFQRLGHEVRLMPPAYVKPYVKRNKTDGRDAEAICEAMQRPTMRFVAVKSVDQQAVMVLHRSRALLVRQRTMVANHLRAMLAEYGVVAPQGIKGLRTLIAELPETSAVPGGAIEVLMMQARHWQALDADILALEGRIVAAARSDGAARRLMEIPGVGPIGASAIVAAVGDARQFRSGRGFAAWLGLTPRQNNSGNKRRSAGISKQGERHIRTLLILGASSHLRYQPQRKLKDPWLAGLLARRPVKVAAVARAAKTARIIWALLVKGERYRAPARLAA

SEQ ID NO: 320085 - protein, 340 aa, unidentified
MVFGIDIGKNLFHTVGLDAAGNLVQKVAFRRETLLQFFERAKPTLVGMEACPGSQWLARKLSAMGHTVRIMPAQFVKPYVKSNKSDIIDAAAIAEAVTRPTMRFVEMRSTDQVDLQALHRVRDRLVAHRTRLISQMRAFCLEYGIAIHQGAGKFKADLPRVLSDEGNDLTPAMRRILVTVFDELRELELRLSALNREIDAIAARSDTARRLMTIPGIGPLAATALLAAAGSGRQFGKARDMAAWLGLVPREHSTGGKTTLLAISRRGNKYLRRMLCHGARSCVVHLDRSRDRIGAWLDRLGARMHTNKVTVAMAAKMARIAWVVLTHPGAMYERRDPALS

SEQ ID NO: 320086 - protein, 346 aa, unidentified
MKQFVGLDVSLKEISICVVDRDGKVITRGSTPADPEAVAVFFAGKKLCPELIVHESGPLSIWLQRGLARLGLPAICIDARKAHKALSARLNKSDASDAEGLAQLARTGWFTKVHLRSEAAERMRALLGARDRLIRLRKDLEGHVRGVLKTFGVRMTGVNKGRLRQGFRDQLAVAGQTDPVLKIIADGFIVIHETLCAAAGALDKDLLCVARESALCRRLMTIPGVGPIVALSFTALVDDASRFRKPADVGAFLGLTPRRYQSGEIDYSGRISKCGDVQMRGLLFEAATCLIRLVKRFSPLKSWAVRLAARKGFKKAAVATARKMAVLMLTLWKNETEFCWKGNATT

SEQ ID NO: 320087 - protein, 385 aa, unidentified
MSKPYDLSKPLVALDHDSTLVCVIEMSGSSWLVAATVPGVSRRPLQKLPVDPARLLAQVERWRQEAARAGRTITRTVVAYESGRDGFWLARLLHKHGIEVYVIHASSVAVSREQRRAKTDRLDTEMLMRALLGWLRSEPGHCRMVAIPTVAQEDARRPGREREGLVAERTRLTNTIKAELALWGIQGFKPGLKKAAEHLEALRTVEGEPLPPNTLARLHRLLKRRTLISDQIKAIELAAAQAIERDPTGPNAMVLMLAQIKGIGLETAQMLVHEVLSRNLRDRRAVARYAGLTGTPDESGSKRREKGIGKAGNPRVRCGLIQLAWRFLMFQPDAALVRWYRERTAGGKGAIKKTMIVALARKLLIALWSYATAGVMPEGVVLKAV

SEQ ID NO: 320088 - protein, 340 aa, unidentified
MNATTYGLDIAKRVFQMYWVDAQTGEIANRKFGRDDLIAFLAQRPAGRVALEACGSAHWWARKIRALGHEVVLLHAQFIRPFVQTNKTDAADARAIWTAVQQPGMRTVAAKTEDQQVMLSFHRMRSLLVKFPTMQINQLRGLLYEFGVTFRAGRLAGLDEIRERMAELDDTLPRSILLNLLEQLRRIILFEEDINQLEKRIGAWQKHEAACRAIPEVPGIGRLTATALVATIGDAKTFRSGREFAAFLGLVPRQNGTGGKIRLGSISRRGDPCLRTLLIHGARSVLCQAKVPTAWQRAIQVRRPANVATVAMANKMARIAWAILAHGTSYEAHHVSSRPA

SEQ ID NO: 320089 - protein, 369 aa, unidentified
MQEHTNIATLVELRKREPVGRMTIGIDLGDRKSHFCVLNDQAQVIARGFLPTTITAFRREFEGLPASLVAIEAGAHSLWANQVLKVCGHEVLVGNPRKIRLITESDRKSDRVDAESLARLARADRLLLAPIQHRTQEKQVQLSVIRARHVLVRSRTALINCARGLVKPMGLRLPVCSTEAFAKRAASTSLPELLRAALAPLLNQIEALNQGIRDYDRQIEQIAATQYPETCLLKQIKGVGTLISLTYVLTLEDPHRFARSRDVGAFLGFLPREKQSGERAPRLGISRAGNEYLRTLLVQGAHYILGPLGPDTDLRRWGLQLAARGGGGAKKRAVTAVARKLSVLLHHFWKTGEVYEPLRKTQIVEIPAA

SEQ ID NO: 320090 - protein, 427 aa, unidentified
MPYRIAGIDVHKRMLTVVVCDVEVRGEYEFERRQYGSTPSHLRSLAAWLVEQEVEEVVMESTAQYWKPVWATLEQYWKPLQQGREGARPMSGTLHLAQAQSNRGPRGRKNDFADPERLVKRLVAGELILSFVPSAEQRVWRTVMRTKHQLRCNQVQLQNRLEALLEEAHLKLSSLVSDLLGLSGRRMLTAIAEGETDPAAVAARADYRLRATPEELCDALGACGDLHPVYRRLLKTALEDWQQTEARITQLGQEMATLLAAHQEKVQRLAEVPGLGVDSGQQILAEVGASAATFPSAKALSSWVGVCPGEEESAGVNHNRRSPKGNRHLRRVLNQAAHAAVKLKGSVFAVLYRRYVVRFGHNQTIAVIAHRLCRLIWKILYQGVRYEERGPAVSQKSKQRRTARMIRQLRDLGYRVELLNHTEGAPA

SEQ ID NO: 320091 - protein, 428 aa, unidentified
MAKTKAQPVIETDDDTLYYERCAGIDVHKKLLVVCLRIGRKTESREYGTTTGEIREIVRWLKENGCQMAAMESTGSYWKPLYNIFEQENLPAMIVNAYHIKNVPGRKTDWNDAFWIAKCLAQGFLKPSFVPNREQRELRDMTRFRKSQIEERSRNINRLQKFLEGANIKLGSWLSDIEGKSASELLELIIGKPDFTVDDVKARMHGNLKSTPEEIFAATQGYITPTQRDFFAHVMNTIREQTRLIELTDDMIKSSLNDEQKAAVKALDAIPGIGVVSAEQIIAETGTDMSHFRNQHAFSNWIGVAPGNNESAGKRKNGKTTYGNKTLKSTLTQCAKSAVKNKRTFFSAQYSRIVTHRGKNRATMAVAHSIAIAIFFVLQGYDFKDLGADYYNQFNREKKINSHFKQLSKLGVTLPDEVLLNIAEQSSA

SEQ ID NO: 320092 - protein, 369 aa, unidentified
MKKNTSKKQMANKGKKEIKEDLAFYIGIDLGDKNSDVCVLDPRGEVGKEFRLRMKEEAFQEYFASIPRSRVAVEAGGQSRWVAEVIEKCGHEVYVSNTRKVPYIHQSDAKDDPGDAYKLAELVHFKPRLLHPIQHRRREAQADLSWIRAREVLVESRTQLINAVRGLSKAFGGRLAKCSTESFTAKLAGQVPEAIRGAVAPLLETIDHLNEQIRYYDQMEEQIARERYPKYRLLEQVNGVGVHTALSFMLTIGDPERFAKSREVGSFLGMRPRKQDSGETKPQLGITKAGDVYLRKTLVNCAHHILGPHGKDSDLRRFGLRLCERGGKNAKKRAVIAVARKLSMLLHCLWISGEVYEPLRNSKQAKAAA

SEQ ID NO: 320093 - protein, 354 aa, unidentified
MLIIGCDFHTRYQQIAMAREETAEMLVERRLDHESGEAHAFYRSLQGSSEPVRVGIEATGPIHWFERLLTELGHELWIGDSAKIRASEVRKQKTDERDARLILDLLLAKRFPRIWVPTPAERDLRQLLWHRHKLVSMRTMLGNQLHALAMSQGLCRKKKLFTKKGRVELGSLTLGPWAGRRREELLKLLEQLEPPIAELDRAVLEEARRREDAISLMTHPGIGPVTSLAFVLAIGPVTRFSCSRKIASYLGLNPTEDSSGGRRRLGGISKQGNTMVRWLLIEAVYPAVRKDPALRQDYQRLKFRRGHAVAKVAIARKLAVRMYWMLRSGADYAQLVRRQGSPGGTLMNASSSLA

SEQ ID NO: 320094 - protein, 413 aa, unidentified
MEIVIERCAALDVHKDTVVACVRVPDPPAGRQQVIETFRTTTPGLLALRDWLAAYQVTLVGMEATGVYWKPVYYVLEEAFTCQLVNARHSRQLPGRKTDVADAAWLCQLLEHGMVRASFVPPKPIRELRNLTRYRTAQIEERTREAQRLDKVLQDAGIKLSSVASNVLGVSGRAMLQALVEGTRDPAVLAELAKGALRKKLPQLRAALLGRFGAHHALLVGTILAKLDFLDEAIAALSAEIEVAIRPFAAEVELLRTIPGVDRRIAEGMVAEIGVDMTRFGAAGRLASWTGMCPGNHESAGKRARGTTRKGSKWLRSYLRQAAKAAGGSKGTYLAAQYTRLRGRRGPAKATVAVGHSIIVAMYYMLERRQPYHDLGPDYFLRRHTREHHARRLARQLQALGYKVTLEPAEAAA

SEQ ID NO: 320095 - protein, 359 aa, unidentified
MVTVVGIDTHKNTHTLVAVDGLGRRLQELTVEARPSGHEKVLAWLSSQGAVKVAVEDCRHLSRALEVDLLLAGHQVVRVHTRLMAGMRRGARERGKSDPIDAEAVARVALREDDLPTAVLAGPERDLKLLADHRRSMVARRSALQSKLRWFLHEIDPAIEVPSRALRRYCVLDSLQEQLAGRDGVVVEIAADMIAEIVSLTRRINELEARLGRLVRTEYPHLLAVDGLGVLGAATIVGETAGAARFHSKDAFARFNGTAPIPVWSGNHERFRLNRGGNRTINTALHMAAVTQQRLGYEGADYVAKQLARGKTHTEAMRLLRRRISDRVFAALRADEKAKESPIDLRHRPGPEPVLEVAA

SEQ ID NO: 320096 - protein, 406 aa, unidentified
MSVYIGIDWSETKHDVLFMNPAGAALAKLVIAHTPDGFAKFDQQCRNLGFQPADCQIALETAHNLLIDFLWSHDYQQVYVVPPSQVRANRGRYSASQAHDDPRDALLLADILRTDRSRLQPWQPDGLLVRQLRAKISLHRHLLSQEQRLANRLRAVLLCYYPAAITVFSELTAQIALQFVCRYPTPAAAQALSYAEFTHFAQEHNYSHPKQLPTCYARLQVKQPTPTPDTVLVYQAEAVQLAELLLPTGEAKRTNLRAVDKLFTQHPDAPIFTSLPGTGDYLAPGLLAKFGDHRPRFPTAASVQALAGTCPVTEQSGKHRAVYFRTGCDHEFRQIAQQWALASLEQSPWAASYWQEVRPHCQSDSHATRCLANRWLAVAWKLWHSHQIYDEAYHTQQRQARRQPRT

SEQ ID NO: 320097 - protein, 407 aa, unidentified
MQGSVITLDVSKGSCHYQGFIKKNQPSTKTRILKFTKKSFAELSAYRERLAIKAGQEDIPFIFEATGVYHKPLQKYLDDHGFTYYIISPLMSARYRKLELHSNKTDPLDCANIAKVFYEYDKLRVYQRMDKEYESLRDMNRNYEDMLVHLRKYKVRFKSMLDVIFPYYQKCFKNDGIYADLPLILLKEYKHPDIIHQTSEDIMVKKLSKLCPKHQTGYIRNKVQKVKELAEDVYSGCESTDIYVELFTELIETLQKQMKECDEQLIKIIETAAKSPYFDLIRSVAGIGDNLAARILAEIGDINQFDTRNKLISYAGLDPMIRQSGKKDGIHLSVSKKGNRYLRCLLYQAASANYRLKKHDVIYRFNQKKRQQSNPLNSKAANTATAHKILVIVYGMCKNGTYYNPCE

SEQ ID NO: 320098 - protein, 403 aa, unidentified
MRMMYERCCGLDVHKKTVTACAITPAGQEVRAFGTMTRDLLQLTDWLHSHGVSHVAMESTGVFWKPVYNLLEGAFTVLVVNARNMKALPGRKTDVKDAEWIADLLQHGLLTASFIPDRPQRELRELVRHRTTLVQERVRVVNRVQKVLEGANIKLASVVTDITGVSGQAILQAIANGMEDPAVLAALARGRLRNKRDALEQAVHGQVGAHQRLLLKSHLRHLGFLDDEIEGLDEEVAERMRPFADQLERIDEVPCIGPRTAEIVIAEAGVDMSPFPSSGHFSSWTALCPGNNESAGKRKSERRRKGNRWLTSALVEAAQSAVRVKDTYFHALYLRIAARRGHKRAIVAVAHSLLEVIYHLLKDGTRYQDLGANYFDERDRQQTVRRSVHRLERLGYHVSLEAA

SEQ ID NO: 320099 - protein, 466 aa, unidentified
MAKKTRKISGRGHFCQAVAFQKSLLPVTTHCAGLDIHKDLIWACAGPFEDGCTPEVRTFPTHTSGLEALAAYLRERQVETVAMESTGVYWLACFELLRDRGLSPMLVNAQHVKGIRGRPKTDRQDCIWLCRLCMYGFLTPSFVPSDEILILREHIKLRQDLLLDYTRYLHRCLDEMVKMNCRLDTLVSDLAGMSAQRVIRAVLSGVHNPHKLVALLDPSIQKRHKAEDMLNALSGNFAPRHLLILEEWLCEMDYLHQRLEVVCKKIASLLKALPKAAVIQPLPPRHDHKHYKENLFFDEPLRPIFNDIFGMDLTQLPGVGCGLLLTFVGVVGTDLSAWPSSGQFASWLGLTPVNQISAGRCRSSKTKRVKNRLTQTLKTAVMSLQRTKTMLGENYRRLNRRMTGAKTRTAIARKLAIILYDCLTGKTTPEAYDEDRQSHVLKERRIKSMSRQLHKWGYDVSPRKTA

SEQ ID NO: 320100 - protein, 367 aa, unidentified
MKKSLAVLPVPSAKQISLREPERIVGLDLGDRWSHYCVLDCAGGIVQEGRIRTTALGVEEWFAELPPTCIVMEAGTHSPWVSRQLQGYGHKVIVANARKVRLIYESDRKNDRLDARMLAKLGRVDVSLLAPIQHRSAQVQTDLAVIRSRNALVAARTQLINAARGLVKAMGGRLPTATSAAFTHKIGASIPAAMKPVLSPLLKTIQELSRQISSYDARVEELAQRKYPQTTLLRQVKGVGPLTALAFVLTLEDPHRFAKSRAVGCYLGLSPQQSQSGESAPQLGISKAGDRYLRRLLVQCAHYILGPFGADTNLRRWGLKLARGGGKSGKKRAVVAVARKLAVLLHRLWVTGEVYEPLRPPQQTVAA

SEQ ID NO: 320101 - protein, 391 aa, unidentified
MTILVGIDVAKDKHDCFFMNSEGEVLAKPFTIFNNKEGFDFLYEKIQSVSSSDNIKVGLEATGHYSYNIIGFLLNKGLATFILNPLHTNLYRKSLSLRKTKTDKIDSKTIAMMLLSDVSLKSYSDISYHNEDLKSLTRYRFSKVEERAKLKTSLSRLAQILFPELEKLVPTLHMTSIYQLLEEFPSASAIASVHLTRLTNLLSKASKGHYDRETAIKIRDAAKNSIGSNMPAKSLELKHTIKLIRALTIDIGEIEAEISKMMDMIASPITTIPGIGRNIGAMIISEIGDFSRFSSPDKILAYAGFSPSIYQSGKLDNCYAHMEKRGSRYLRYALFHAAKLVCHWDKTFADYLAKKRAEGKHYYVAISHAVKKLVRVIFHIEKTKQAFLKAS

SEQ ID NO: 320102 - protein, 402 aa, unidentified
MNAVGIDVSKGKSMVAIMRPFGEIVSAPFEIKHTASDIHSLVELINSVEGESRIVMEHTGRYYEVLAHQLSKANLFVSAINPKLIKDFDNDSLRKVKSDKADAVKIARYALDKWQNLKQYNVMDELRNQLKTMNRQFGFYMKHKTAMKNNLIGILDQTYPGVNTYFDSPARSDGSQKWVDFASTYWHVDCVRKMSLNAFIDHYQNWCKRKKYNFSQSKAEEIYGKAKELVPVLPKDAITKLIIKQAVDQLNSASTTVESLRTLMNETASKLPEYPVVMAMKGVGTSLGPQLMAEIGNVSRFTHKSAITAFAGVDPGVNESGSYEQKSVPTSKRGSSDLRKTLFQVMDVLIKTHPQDDPVYQFIDKKRAQGKPYYVYMTAGANKFLRIYYGRVKEYLSSLPES

SEQ ID NO: 320103 - protein, 323 aa, unidentified
MATAATDGEVFVGIDVAQDELVAAIRPGDGVTRWPNDEAGHEGLARHLRDRHPALVVLEATGGLEQAASAALAEAGLPVVIANPKQVRDFARGVGKLAKTDPIDAAILARFGEVVRPAPRPAAGEAGRALRALVARRRQVRDRRVADQQRRLRADPAVRPFLDRAIAAATEELAELDAAIAARLAADPSWRATRAVLESVPGVGPVVAATLVAELPELGALGAKQVAALAGLAPRTRESGKSRGAASIGGGRRGVRCALYLAAVTGIRWNPTIRAFYEHLLASHKPKKLALVAAARKLLGILNAMVRDGTLWDPPARESAPTP

SEQ ID NO: 320104 - protein, 370 aa, unidentified
MAEPTTLFVGLDVHKETIAVAHASPDRSSDVVYVGQIGTREADIDKLLRRLHSHAARLVIAYEAGPCGYGLYRTLAKKGISCMVVAPSLIPKKPGERVKTDRRDAAQLARLLRSGDLTSIYVPTIEDEAVRDLSRAREASIGVLKDAKLRLKSFLLRHGLHYTGRATWNEAHLRYLAKVVCPTPAQQIVFQESLRAVTEQTERAHRFEAELVEIAATWRLRPIVDAFQSMRGVQRHTAVTIASELGDLTRFDNPRQLAAFVGLIPSEYSSGESRRLGPITKAGNGHARRALVEAAWAYRYPAKVSVHLQQRIERCPKPIQDISWKAQVRLCRRYRRMVARGKNPNIVVTAIGREILASLWAIAREVPIGA

SEQ ID NO: 320105 - protein, 346 aa, unidentified
MKIIGCDFHPSFQQIAVFETETGEITEHKLVNGNGEAERFYRSLPVPSRIGIEACGNSHWFIDLLGRLGHEVRVGDAAKIRASYVRKQKTDRRDAGHILTLLLENRFPKLWTPSRQERDQRQLLIHRHKLVQIRTRIKNSLQHLALNQGVQKKQKLWSKAGQKVLIQLPLEGWTAVRRQDCRELLAQLDQRIARLDKAAEQAADAHPQASLLLQQKGVGPITALAFALTIGDVSRFEHSNQVASYLGLIPSEHTSSNKRRLGSITKQGNSFLRMLLVEAAQSVTRLDPQFHKHYVHLCRNKPKAVAKVAAARKLAVRLYWVLRTDQNSQKAVPIESSPRVPLVGAS

SEQ ID NO: 320106 - protein, 310 aa, unidentified
MERIFVGLDVSKNRLDVHVRPAGESFTLAYDEAGLVTLVTRLSALRPALIVLEATGGYEAAVAAALANAGLPVAVVNPRQIRDFARATGQLAKTDALDARVTAWFAETVQPAARPLATEQAQVLGELVARRRQLVEMVGAEMNRRRQVRDRGLQTRITAHVTWLTRAIEELEGDIQRLIRSSPVWRETEDLLTSAPGIGDITAHALIAELPELGQLNRRRIAALVGIAPFNRDSGLWRGRRMIRGGRPAVRRALYMATMVAIRHNPPITDVYRRLTRAGRPKKVAIIAAMRKLVTILNAMLRDQRRWQPA

SEQ ID NO: 320107 - protein, 288 aa, unidentified
MKTLKKVLKKRYGGEGNETVRFIYEPTGPYSNYLRAFAAEHEVQVYEVNPKKSANFAKVVGNRSKTDVVDAKMLYSFHLLLKESEFSIPAMDEIAEQLGAELGSYEMIQKTRTMLSNHVQSLEEKSGVTRKLKESLEKEMEACAADHEETREDLHNLLSMKGISVVSAMSLLYLFRKYPGANRNEITALAGLDPVQRQSGSSLNGGRKISRAGDPMLRKVLSLACMNSIQHNEHRGTFYKHLVSDNHKKPKVALVACMRKLLLITHHLYVTKSPYRTLEHDANLCLTS

SEQ ID NO: 320108 - protein, 318 aa, unidentified
MTQSSTGIGGIDIAKDKLDVAVHGMPGGIAVENDAAGWQRLAQFFAQAGVVKVGVEATGGYERGVVRYLQRAGFCVAVLQPNQVRAFAKMRLQHAKNDRIDARLIAACTHVLEARARAPREERFDELADHLTFIEQIEADAARIKTRLEHISDRRRRGIYERMIKSLEARAKAERLLLMKHLADHPDLVRRVELVSSIPGCGDKTALAIVIRMPELGQISREEAASLAGLAPFEHQSGKHKGKTHIGGGRAPLRRALYKAVLPAASFWNPALVALSERLKSRGKGHPCTQIACARKLLIFANTLVRRGTPWEARPIAA

SEQ ID NO: 320109 - protein, 386 aa, unidentified
MQTLNDLSRSLIALEPASTLIAVIEMSLSSWLVAGIVPGIERQPLKKLAVDESALLRLLHRWREEAEKAGCRIERIVVAFEAGRDGFWLARWLTARSIEAHVIHAASVAVSREHRRAKTDRLDAELLKRAFLGWLRGERDHCKVVAIPTLKDEDAKRPSRERESLVGEQSRIVNRMKAALIRLGIRGFNPKLKRAAGRLDDLRTPEGEPIPPNTLAELRRDMERRRLISNQIRQIEEARLKHLEQAPNDGPHAMVLLLARVIGVGIETADMLVHEVLSRNMHDRRAIARYAGLTGSPDESGRKRREKGLARSGNGRVRRGMVQLAWRFLTYQKESALAQWYRARTENALGARKPMIVALARKLLIALWRFVCQGVVPDGIVLRPAQ

SEQ ID NO: 320110 - protein, 494 aa, unidentified
MPQLAKNATLFNWAGEPKTRRPTKRRASKGKGSKGKTDPTEGLQVANPNAAGIDIGCSEHWVSVPPGRAERSTQRFGCVTAELNRLAEWLKGCGVDTVVMEATGNYWVVLYDILEECRLNPVVVNPRYAKNMSGKKGDIPDCQWMQKLHTYGLFANSFRPTKEIRILRSYLRQRERLVVASSQEIQHMQKALTEMNVQLANVISDISGETGIAIIDAILAGERDPVALAKLKGPRIAASKAVLERALEGHWKQEELFVLEQARLSYTHFQEQIQQCQRCIEQQIEAIQSRLSLEVQVPSERSSQSQVPCDSESGVSPRGNQKVQSFDLGAQLKRILGVDLTQIDGVGPVAAQVILSEVGTDMSRWRTEKHFASWLGLCPDHRISGGKILGRSTRPVVSRARNALRLCAYTLTHSKSWLGAKYRRLKSKLGTPKAIVAMAHHLARLVYRMIKSGEEYVDKGMEVYEAKYRAQRINWLQKQAKEMNMELVQMQTVA

SEQ ID NO: 320111 - protein, 318 aa, unidentified
MLNESFVGIDVSKDWLDVGWEPAGQSERLAHDEVAMVGLCERLARERPCLVVLEATGGLETHLASALAAAGLPVAVVNPRQVRDYARACGRLAKTDRIDALVLAAFARAIRPQVRAPRDDETLELGALLARRRQLIDMRVQEKLRLERASPVQRDSIKEHIAWLTERIARLDTDLRHRLRSSSLWRDKEDLLKAIPGVGTITRVTLIALLPELGKLNRREIAALVGLAPFNRDSGQHRGERVIWGGRAQVRRVLYMAAVAAIRSNPVIRAFYQRLRAQGKPGKVALVACMRKLLTIMNAMLKYNTPWNPNALDLEHSC

SEQ ID NO: 320112 - protein, 342 aa, unidentified
MQHTTIAVDVAKSVFEIGMSHRPGHVDKHYRVSRNQLSIFFANQPPATVVMEACSSSHYWARQFMRFGHDVKLLPPFYVRPYVQRSKTDRTDVKGMLEAWRNSEIRPVPIKTEAQQQLIALHRVRSTWIATRTARINTARGILREFGIVVADGASRVPARVTELIEDAGTELPMGVRDLLNELVVEIRQLTSRIENVERQLAAMAGETPVVERLRSIPGIGLLTATALIAFVGNVERFPSSRHFACYLGLTPREHSSGLRRQLGHISKRGDAYLRMLLTHGARSVLWAAKSKAKPDKFSTWAVDIHGRRGHNKASIAVANKMARIVWAVWKHGNSFGIRSDG

SEQ ID NO: 320113 - protein, 415 aa, unidentified
MEIVYPRVAGIDVGKKLVAVAVRTPGPQPGQRHQQVRKFKTFYPVLQQMVGWLVAQGVTQVAMEATGVYWRPVFHALCEAEQLEVLLVNARHVKNVPGRKTDAKDAEWLAQLCEVGLLRGSFIPPPEIAAIREVCRYRKKLTQARTSELQRLCKVLEDGGVKIDSVASSITTVSARAMVEALIAGERDPRVLAELARGVMRKKIPDLAMALAGRFGAHHALLARMHLEHIDHLSQMIERLDTQIGQMVAPFCEQVGLLCTIPGIGERTAQVLIGEIGVDMSRFPTADHLASWAGLCPGNNESAGKHRSAKTRKGNREVREALVEAAWAAGRTGTYLGARFRRLHRRFGKQGGSKAAVAIAHNLLVIVWFVLHDRAGYRDLGADYFTRHDNPDATKRRLIRELQALGYTVDLTPAA

SEQ ID NO: 320114 - protein, 321 aa, unidentified
MQSQNTVVYAGVDVAKATLQLHVQGQQREFHNTPKGLLQLVAQLQTVPSVQVVCEATGGYERAMVKVLHQEQIPVSVTNPARVRAAAQAQGQRAKTDRIDARGLTDYGQRYQPKATPPVSATQEQLVNLTQWLKQLIHGRALAKTQAEHHQDPFVRRQHAKLMTHLESQIEAVEKQIEALIEQDAALQQRVTCLDKIQGVGPRTAWMVLAHMPELGQLNRQEVAALAGLAPWTRESGTMKGMRCIGGGRPEVRLALYMAALSAARCNPVLRILYKRLRAKGKLPKVALTAVMRRLLTYMNHCIKALPSETAGAQTEELKAA

SEQ ID NO: 320115 - protein, 370 aa, unidentified
MANSVTLFVGMDVHKESISVAYARGNDSGPPHFVGKIGTRKSDIDKLIRRLHSKASRLVFAYEAGPCGYVLYRYLTSKGLECQVIAPSLIPKRPGDKVKTDRRDALELARLLRSGDLTSVYVPSVEDEAIRDLCRARDATRLTLKSAKLRLKSFLLRLGLNYTGRANWTDAHRRYLATVACPTPAQQIVFQESIRAVDEQVDRLHRLEEELIERGSQWRLAPVVLAVQALRGVQWVVALTVIAELGDITRFDNPRQLGAFVGLIPTEGSTGTKRRLGPITKTGNGRARRALIEGAWAYRYPAKMSPLIQKRNESLPKAIQDIGWKAQVRLCKRYRRLIARGKHSNIAVTAIARELLAFMWSIAKEVPIKA

SEQ ID NO: 320116 - protein, 386 aa, unidentified
MQKLNDLNRSLAALEPDGTLIAVIEMSLSSWLVAGIVPGVERQPLKKLVVDESALLKLLHRWREEAEKAGRRIERIAVAFEAGRDGFWLARWLKARGIEAYVIHASSVAVSREHRRAKTDRLDTELLKRSFLGWLRGERDHCKMVEIPTMKDEDAKRPNREHDSLIGERSRIVNRMKAALVRLGIRGFNPKLKRATTRLDNLRTPEGEPIPPNALAELRRDMERRRLVNNQIRQIEEERLERIEKTPCDGPHVMVRLLARVIGVGIETADMLVHEVLSRNLRDRRAIARYAGLTGSPDESGRKRREKGLARSGNVRVRRGMIQLAWRFLLHQKNSALTKWFRSRTENARRTRKPMIVALARKLLIALWRLVREGIVPDGVVLRAVQ

SEQ ID NO: 320117 - protein, 413 aa, unidentified
MKQFPSHFVAHIGLDWSDCKHDVCLIASDSEKFEYDVINHSPESIEEWVLALQQRFNNQSIAICLELKAGPVVYALLKYDFIVLFPLPPKALAKYREAFTQGGAKDDPSDAFLQLDYLLKHTSALKPLMPDNEETRILQRLVEDRRVLVNDKVRLTNRITAALKSYYPQALQWFDDIDTKIFCDFIAQWPTLKQAKRARALTLSTFFKAHRCVRPTVIEKRIKAIKSAMPLTEDNGVIIPFERLVRALTLQLGQLLITIHEYDLDIARRFRQHSDYEIFDSLPGAGPVFGPRLLVAFGTNRERFDSSDEVNRLSGVAPVLKRSGKSAWVHWRYSCPTFLRQTFVEWANQSIRYSFWAKEFYDEKRAMGKSHQATLRALAFKWIRIIFSCWKNKTPYDESAYLFALKKRKVIVN

SEQ ID NO: 320118 - protein, 455 aa, unidentified
MRRKAKRKAKAATALPPGLESINLNAAAIDIGSTEHYVAVPPGRSAEAVRTFGSYTAALHEMALWLKECAITTIALESTGSYWIAPYQILEANGFEVVLVNSRHVKNVPGRKTDVLDCQWLQKLHTHGLLSSSFRPEDKICVLRSYLRHRENLVRAAGAHIQHMQKALIEMNLSLHHVLSDITGLSALAIIRAILAGERDPWKLAALKDNRVKKSKEEIARSLEGDYRKEHLFALSQALELYEFYQTKIAQCDCEIEAQLHKFQARIDVGEHPLPEKSKKKTLKAQDNFELKNHLYAICGADLTQIDGMEVLSVQALLSEIGLDMTRWKSEKHFTSWLNLCPPSRISGGKPLSRQPRKGHNRAADILRLCAQSALKSKSALWRLRPPLESTARCSQGDQSRGAQTGPDRLPNAQIRPAVSRRRRALLRREIPAPPRPPPPQTSRRFWLPTHSSTA

SEQ ID NO: 320119 - protein, 400 aa, unidentified
MKYYVGIDIGKYIHQAILCDKEAKPLASPLRFHATYEGYQLFIAYLKKVVDPKDFGDVSVGMEATGSYWFSLYEHLRKLGLQVMVLNPLQVKAYRNEGIRWAKNDRIDAQLIVKVLRFGDYKISDIPKEDIFALRQLTRLRSDLVSMTTDLKLKTISIFDQVFPEYKDLFYDIFATTSKALLDEAVVPQAIGAIPTKKLTQLLDKASRGRQGEKEAKHIKSIAEQSIGVTIGIDAFTLSLKILLAQITHLEEQIQRLDKEIMQRVEIQQTTLTSIPGIGVNTAGTIIAEVGNFERFKDDKNGAEKLVALAGIDPRVKESGKYKGKAKMSKRGSPYLRQAIRQASFVAACGLKHDPMFAALYQKKIKEGKPFEVALSHVENKMLHVIYSLLKSKKEYKPKI

SEQ ID NO: 320120 - protein, 365 aa, unidentified
MPEGMRWVGLDVHARGTACAIFDGTSGEVESFSLVGRPHELLEWLERLERPFRAVYEAGPTGYGLARRARERGLEVAVCAPGHIARRPGDRVKTDKRDALRLARLLAAGDLTLVTVPPVEHEQLRDLVRCREDVRGDLMRARHRLSKFLLRRELYYPGRGRGGRAWTRHHRDWLAGLRFPDAASELAFGDYLHAHDVLLARRERLDSQLGRAASESPWAPLIARLRCLRGIDTLTALGLCAEVSDFRRFGSPRALAAYLGLVPSEDSSGERRRQGAITKAGSAHARRLLVEAAHHYSRAPRVSGELKQRQQGQEPWVVELAWRCQRRLYGRWLRLRGERGKRPGIVAIAVARELAGFCWELSVTD

SEQ ID NO: 320121 - protein, 367 aa, unidentified
MMRWMAPLRHLSAKLLCDRISSEWEPSMGEVTTIGLDLAKQVFQVHGVDAKGATVLRKQLRRAQVLGFFSRLPPCLVGLEACATAHYWARELAALGHELRVMPAQYVKAYIKRNKHDAADAEAICEAVVRPTMRFVPVKTADQQAAVLLHRGRERLVRQRTGLVNALRGHLAEFGVIAPQGLRNVGKLIAIVRDEGDARVPDLARQVLQVLAAQIEQLEAAVAAIEKQLMAWHKSNPVSQRLASVPGIGPIIATAIAATVVEPSGFRSGREFAAWLGLVPRQNSTGGKHRLGGISNRGNQYLRRLLINGASANLLRSKATNADPWVIGLRRRRPPLVVAVALANKTARIAWAVMHRHENYQRVAAAA

SEQ ID NO: 320122 - protein, 345 aa, unidentified
MNITTIGIDLAKNVFQIHGVDERGKGGLKKQLKRAQVLPFFANLPPCLIGMEACGSAHFWARKLKELGHTVKLMAPQFVKPYVKTNKNDAADAEAICEAVSRPSMRFVPVKTGEQQAVLSLHRARQGFVKGRTAQANQIRGLLAEYGIVMPVGINNIAKRLPNILEDGENDLPGVFRQLLQRLGDHLKELDRQVDELSGQIQLWHKENELSLKLADIPGIGPITASALVASIGDAKSFENGRQLAAWLGLVPRQHSTGGKQTLLGISKRGDTYLRTLLIHGARAVIRVSEHKHEQANDWLNQLVLRRNKNIAAVALANKNARVVWALLAQKREFRSDYAPAKAAA

SEQ ID NO: 320123 - protein, 397 aa, unidentified
MQISVGIDVAKEFHWATAVDERGGELLSRRVDNEPAAIQALIDELERLQAEHGRVRVGIDVVGGIASLLTAMLADAGVRLVHVPGLAVNRARQGTTGGEHKSDPRDARVIADQVRTRIDLRSIETAGEVDVELRLLVGRRRELVTDQTRRIGRLRDLLASIHPGLERIVEPTQKASLVLLGRYVTPAEIRRAGKTRLVNHLLKAGRLPRPHVERLTEQALAAAKAQQIALPGERLAAELVRELAAEALAVRERLARLDTQIEEALARHPDAALIRSLPGMGATLTAEFIAEAGGIGRFPTPDRLAAAAGLAPILKQSGKVRYLRRANGGNKALKRVLYQSAFCSLSHPASRAFYTRKRREGKRHHQAVIALARRRIDVLHAILRTREPYRADHAKAA

SEQ ID NO: 320124 - protein, 516 aa, unidentified
MVPKECANISGDTCGGRVIPFGRMQRAHLRARRVPMNPRCKGEAPMSTTPTRAKRRRQVRIASKLKVPLPPQLQRVNLNAAGVDIGSEEHWAAVPPGRDREGQDVRRFGAFSGDLCALADWLQRCEIETVAMESTGVYWIALYELLVERGFEVLLVDARRVRNVPGRKTDVLDCQWLQELHTYGLLRGAFRPADQVCVLRSYLRQRSMLVAYASHHIQHMQKALEQMNLKLAHVVSDITGVTGMGIIKAILGGERDPVKLAKLRDPRCNSSEATIARALEGHYREEHLFALQQALELVEFYQRQINACDCQIEACLQQFEDRSPKTPLTDRSRRRRRSGVGFDARSYLYRITGVDLTQIDSIEANTALTVIGEIGLDMSRWPTEKHFGSWLGLAPGSKISGGKRLSGRTKPSANRAAAALRLAAQSLNQSQSALGAYFRRLKARLGAPKALTAAAYKLARILYRMLKYGAGYVDQGETVYEERYRDRLLRNLKRRAAELGFELTAISSSTGQPALT

SEQ ID NO: 320125 - protein, 365 aa, unidentified
MTIRERSTSSSMDPPNRREVVLGVDTHGEVHVAALVSPLGKVLGTESFPATAAGYRQLLVWARKRGTVRRAGVEGTGTFGAGLSRYLLAQHVQVLEVNRPDRSARRLLGKSDPLDAQAAARAVLSGRAQARAKSGDGPVHSARIYKLAKDSAVKARTQAINQLKAVLVIADPALRERLSSLGNAELFRTCARLGPHDGGGDEDAVAQATHMTLRMLAERIEQLTGQINELNQRLTRLVERHAPQLLVPVGIGPDSAVTLLITMGDNPERLSTEASFAALCGVSPIEYSSGRRRTRRLNYGGDRQANAALHRIVFTRLRHDPRTQVYYERRTQEGKTRREIIRCLKRYAAREVFNLVRPVPSTPAL

SEQ ID NO: 320126 - protein, 403 aa, unidentified
MIFVGVDWAEDHHDICVMDQDGAVLGKRRVPDSVAGIGELHELVAEHAEDDEAVAVGIEIDRGLVVTSLVAAGYQVFAINPMASSRYRDRHGTSGAKSDPGDAKVLADLVRTDRHNHRALAGDTDLVEGVKLVARVHQSAIWGRQRQLNALRSALREYYPAALVAFGTDLSHSDATAVLALAPTPELGRTLSRSKIASALRRGGRIRNVERRTEEIQTALRAEYLQAPPTIASAYGTITRSALRLIETYTAEIGSLEAALSEHFEKHPDAKIVHSLPGMGTVLGARVLGEFGDDRTRFANAKCRKNYAGTSPITKASGHSRVVLTRFARNRRLSDACDQWAFCSLTRSPGARRYDELRARGKTHRQALRQLANRLVGILHACLEDNTLYDETVAWQAAEQSAA

SEQ ID NO: 320127 - protein, 375 aa, unidentified
MKDHSEAFVAFDTSKLRNAVAIAEAGRSGEVWFVGEIDNTPVATAKLVAKLAKQYGRLLFCYEAGPTGYGLYRQITGLGHGCLVAAPSLIPKKPGDRVKTNRRDALGLATQLRAGELTAVWVPDQRHEAMRDLIRARGAAVEDLRRKRQHISSFLLRLGIHYTGKKTWTKTHMKWLASQKLEHAEQRIAFEEMLLAVRQAEERIARLEEAIRAAVPDWSLAAVVEALMAMRGIDMIAATAFLAEIGDLSRFRTPRELMAFLGLVPSEHSTGDKVKRGGITKTGNRRARCILAECSWAYRHPPRVGKDKQARVAAAPRGVREIAWKAQHRLYKRYRALTRKGKLKTVVITAIARELAGFIWAINREITTAGMVASP

SEQ ID NO: 320128 - protein, 346 aa, unidentified
MLYAGLDLSRKRLDVCLLDEAGGKVAVTAAPPDADGLRGLAERLAGYDEPIYAALESMNGARYVYDTLEDLGWQVALADAAKVKGLAPLAAKTDRIDAYVLAELARRDLVPTIWLPTPGVRAERERARFRLHLVRHRAALKARIHASLIAHGHPCPVSDLFGVRGRELLERLDLPETWRSSTEAALCLIEHLDREIGACEAELRRLGAEHAYVPLLMTAPGIAWVLGYTIAAEIGEIERFSNAKKLVGYSGLCPKVYQSGDSDRRGPLAKNGPKYLRWALIEAATHAARDPAYAVHYQKTKRRLGRQRGAKVARVEVARKLAEAIWYMLTRKQPFAPAGPAPALVA

SEQ ID NO: 320129 - protein, 454 aa, unidentified
MAQSKRSSSMPSIHPNAAGIDIGSQFHAVAVPLDRTDEPVKTFKSFTGELHAMARWLKSCCIETIAMESTSVYWIPAFEILESYGFEVFLVNAREAKNVPGRKTDINDAQWLQKLHQFGLLRASFQPTKEIAELRAYLRQRERLLDYKASHIQHMQKAMMQMNIQLHHVVSTITGKTGMEIIRAIVAGQRNPEHLVKFRDIRCHNSVETMKAALTGNYKAEHLFALTQALELFDIYTEKVDDCDRVIATVLERLQNMTAVPTQLIPKQKHKECNKNAPSFDVRTALFNFTGKDLTQIHGLGSYLALKLIAECGTDMTRWPTSKHFTSWLCLAPGNKISGGKVLSSRTRRTASRATALLRLAATTVGKSDTALGAFYRRLAARSGKAKAVTATARKIATLFYSTLRYGMEYADKGADYYEDQYRKKVLNNLRRRAEAFGFTLQEKALPGITMEVS

SEQ ID NO: 320130 - protein, 424 aa, unidentified
MKVVAINPEIKTEKVLDVAFDVGKDKLNSVFEAGLSRYEDEFRNAGNVIRGKLKLYMELAKKHGMDRIRVLVEPSGGYENALLKTAHRLGCRTAYVSGEASCKFRMVVHGDPGKTDTRDPQPLLGVAAQGKLLTHRVLPADYELLREINREYDWVSERRVEIRCEVHALLVRLFPDFPMESDFLYESGGMAVARDYGWNPGRIVEKGQERLRMCLKAASPHVRATTVTKIWEAALESSGLHDGGGAVEFLTERVQRLYESFIRLDGQRMALRARLEEVYLRLRETDPNLPFAVSGVVNLYMLARIVAETGPLSDFRSIQQLYRFAGINLCERKSGSYVGKIRISRKGRVPLRRVLGLAILPLVRAGGLYGAWYHTSAGETKKSKGMAALMRTFLKMIFGWYKSGRGFDLRRVFTSASQYAVRAA

SEQ ID NO: 320131 - protein, 380 aa, unidentified
MDILHPRCAGLDVHKASILACALLIIDGEITRQSRRFGTDTAELLALADWLASLGVTHVAMESTGVYWKPVYHILEDRFAPLLVNAQHIRRVPGRKTDVADAEWIAQLLQHGLLAPSFVPPPPIRELRDLTRQRTQLARERAAVVNRIHKVLEDANIKLACVATDILGKSGRDMIAALIAGETDPEPLADLARGRLKGKEPALRRALHGRVTEHHRFLLRMLMQQEGHLEGQIGHYGARIEAVMGPLEGAAARLRQIPGVGDRAAEEIVAEIGPDMAALPTAGHLASWAGLCPGNHESAGKRRSGRTTRGSQWLRTTLVQVAWAATHTKRTAFGAAYRRWVKRLGKKKALVAVAHKILTVIYILLKRGVDYREPWTPEAA

SEQ ID NO: 320132 - protein, 402 aa, unidentified
MNAVGIDVSKGKSMVAIMRPFGEIVSAPFEIKHTAGDIHSLVELINSVEGESRIVMEHTGRYYEVLAHQLSKANLFVSAINPKLIKDFDNDSLRKVKSDKADAVKIARYALDKWQNLKQYNVMDELRNQLKTMNRQFGFYMKHKTAMKNNLIGILDQTYPGVNTYFDSPARSDGSQKWVDFASTYWHVDCVRKMSLNAFIDHYQNWCKRKKYNFSQSKAEEIYGKAKELVPVLPKDAITKLIIKQAVDQLNSASTTVESLRTLMNETASKLPEYPVVMAMKGVGTSLGPQLMAEIGNVSRFTHKSAITAFAGVDPGVNESGSYEQKSVPTSKRGSSDLRKTLFQVMDVLIKTHPQDDPVYQFLDKKRAQGKPYYVYMTAGANKFLRIYYGRVKEYLSSLPES

SEQ ID NO: 320133 - protein, 381 aa, unidentified
MTQTASPEKSIAVGDRMLVAFELGLKDWKLAFASVMGERPWQVTIRPRDLIGLSEALGKARRRLGLAAGCGVFSCYEAGREGFWLHRQLAEIGIVNLVVDSSSIEVNRRARRAKTDRLDARKLLSMLLRYGAGEKDLWSVVKVPTPEQEDGRHLQREIRTLKKEQTRLTNRIKGLLASQGVAVRMGRRGLGDGLDAIRIWDGSPLPSGLRRRLEMEIARHDVVHRQLLDLESERDARIRKGQDRAAEIARRLKTLRGIAEVGAETYARELSWREFKNRRQVGCLVGLTSTPYQSGDLFRERGISRAGNRHVRGVVVDLAWLWLRSQPQSELTQWFNQRFARGGPRLRKIGIVALARKLVIALWRYADFGEIPKGALLKSQA

SEQ ID NO: 320134 - protein, 339 aa, unidentified
MAEVYAGLDVSDKMTHVCVADGSGEVVWAGACATDPDVIARTLKARAPRLVRVVLETGPLSAFLYHGLEERGVPVTCICARHAKGVLSARVNKSDPHDAEGLAQMARTGWFKAVRIKDEGTPMDRARLKIRDELIDAHQAMAGQLRGLLKLFGLRLGKVTTANKRRERLEALFGQKPELEPIMAPLIQSLEALEAQIACSSRQLAAQAAADPVAARLMTAPGVGPITALVFKTSIEDPSRFARGEDAGAFAGLAPRRNQSGERDHKGRISKAGDPMLRSALYEAANSLLARVKRPCALQAWGKRLAETKGPKRARVAVARKLAVLLHRLWLSETEFRWA

SEQ ID NO: 320135 - protein, 316 aa, unidentified
MTTTAVVVGVDVAKDRLDVAVRPSGEVWSEANDETGITTLVARLRPLGPALIVCEATGGFERAAIAALAAAGFPVVVANPRQVRDFARATGQLAKTDQLDAGILALFAERVRPTPRPLPDAAAQLLDAVLTRRRQLLEMLVAEKNRLGFAPKPLHRGIQAHIRWLERQLDDVTKELAGLIEASPVWRAKDDLLQSVPGVGPIVSFTLLGDLPELGTLSHKQIAALVGVAPLARDSGTLRGKRLVWGGRASVRTALFMAAMCGRRWNPTLKVFYERLKAAGKPTKVALIACARKLLTILNAMVRDQSRWTSNVQYSC

SEQ ID NO: 320136 - protein, 391 aa, unidentified
MEITTIGLDLAKSIFQVHAVDAAGTVVVCKALRRSQVVPFFTKLPPCLVGIEACGTSHHWARALAKLGHEVRLMPPAYVKPYVKRGKTDANDAEAICEAVTRPTMRFVPVKSPEQQAALALHRTRDLLVKQRTQLVNMIRGLLAEFGIEIVRGLHHAIELAARIAKGDAPEVPDLAVRVITGLAGQIGDVQVRLVALEKELLAWHRSNELSQRLGTIPGVGLISATALGASVTDPGRFRSGRQFAASLGLTPLQNSSGGKERMGRISRMGDRYLRRLLVIGMTSLVRRARAKPDSVDPRIATMLARKPARVALDATAGRDGDAGHGGSGGLRAGQTSIHVEPHLLVGDVSARHRSPPHADKTRRERPACEANAIGGFRSGYALPKAPDRSS

SEQ ID NO: 320137 - protein, 382 aa, unidentified
MAGTEPHAWGTGRMDDITYVGLDVHKATVCVAVAESGRGGEVRQIGVFDNRPEILCRLAAKLGKGGRRLSFCYEAGPCGYGLHRLLTGRGHSCIVVAPSLIPMKSGDRVKTDRRDAVMLAKLHRAGELTAVWIPDAAHEAMRDLVRARATAGRVLAKARQHLQGFLLRHERIYRGPRAWTLAYRRWLTTVRFDHPAQQIVLQDYIHAVEDAEARRDRLTRQIEELVPSWPMAPVVRALQAMRGVALVVAVTVVAEVGDFRRFAQARQLMAYLGLVPSEHSSGNTIRRGGITKAGNALARRVLIEGAWTYRMHARVSRKLHDRLEPLSSAIRDIAWKAQVRLCARYRRLAASGKPKVVVTTAIAREMVGFIWAIARVAQPALD

SEQ ID NO: 320138 - protein, 471 aa, unidentified
MTTMNYIGLEVHKKTISYCVKDVSGRIQQEGKVGSTRRELDCWMKTLPQPCTVAMEATIFSGWIYDHLLPHGTQIKVAHPLMLRAIAAAKKKNDQIDASKIADCLRCNFLPECHMMPAEIRDRRRTLRYRHLLVRQMVQMKNLVSGLLMETGVEYNKQRLHKVSYFRELLSASKEVTPSIRPLLKLSRETIERCQKTEYALVNSLQRDPVLADRIKRLRTVPGVGPITALTWALEIGDVSRFRSIKQAISYCGLCGDERSSADKVMRMPLSKQRNKHIQRALVEAAKLAPRQSHELAVIYDQERQKGNSNRATLAVARKMVAYLLAVDRQQRDFVPAEETQDFGSIKYCRNQQDEQNAQPARSCMLPTERRRSHSRGSLRIVSGLAENTNSILCDGSSELGCSREVRRGGVAYLPPYLPVVAGRHRSACRGAAEVLRHAQVATTMNIYGNALMGAKREANSKVVRMALRSA

SEQ ID NO: 320139 - protein, 443 aa, unidentified
MSELAVLDPRAAFVDVGSEKMHVSIAGGPPALFGTVTSQLHALRDYLAEHQVRSVAMEATGVYWLPLYGVLEAAGMEVVMVDGRQTRNLPGRKTDMKDCQWGATLHAHGLLRAGFVPPAHIRRLQDYLRLRGDHIAAAAGHVQHMQKALERMNIKLHEVISSLTGASGLTVIRAILAGERDPQVLLGLCDIRIRNVKAERVVESLRGDWAEEHLFALAQAVQSWDHYQGLIAACDRQIAVVLRQMPDAKVPPPAASTKTGKPRTRPGVNAPDIADLREILAQICGAKDLTTLPAHSEYSVLQLIGEVGTDLTKWRTEKHFTSWLGLAPGSAQSGKRKASVKRRRNRAGQIFCVMARALARSKYVALGGFYRRMAARRGGLVANKALARKLATLFWRVMVKGLDFVETGVAQYETRVLETKHRILHRLARQLGQQIVPNPAAVV

SEQ ID NO: 320140 - protein, 363 aa, unidentified
MLYLGIDQHSKQLTVNLRSEAGDVVLHRQVSTQPTKVRQFLEELARRAEPEGGYVAIVEVCGFNDWLLDLLPTVGCRETVLVQPTRRSRRKTDFRDAAALSELLWVNRGRLLGGHGIQGLRRVYIPTPAEREDRKLTALRREKGAERTRIINRIQHLLACKNLQHDCPTKGIQAAAARQWLQDLPVETLGALDRLTLNQELEKWTLLDRQLKQLTALIEQRKALHPQARVLSSVPGCGAYTALAIASRVGPVKRFRTPRSLANYFGLVPGCRNSGEATQRLGSITKEGSPLVRFLLGQLVLHVLRRDPWMRAWYKKLRLRRGSKIARVAVMRRLTTIIWHMLTKQEAYQAGGPPRQRLAPSKP

SEQ ID NO: 320141 - protein, 338 aa, unidentified
MAIVFVGIDLAKNVFAVHGVDEHGKPALVRPAVARARLHELIAALAPCTVAMEACSGAHHWARLFAAHGHSVRLIAPKFVTPYRMSGARGKNDAADAAAICEAVQRPSMRFVPVKSIDQQARLMVHRARQGFVEARTACINRLRGLMSELGIVLPLKAATVRRQAGQALEDLPGWANTVVGDLLSELHRLDERIAQYEHHIGIIAREDERARQLMRLSGVGPTTATAVVAMIGNGHEFRCGRQFSAWLGLTPGQYSSGGKTRLGRITKAGDAYLRTLLILGAHAVLAAAKNKTDGLSRWAIALEQRRGYWKAVVAIAAKNARLCWAMLARGEQFKLPA

SEQ ID NO: 320142 - protein, 344 aa, unidentified
MLHVGMDLSRTRLDVHVMNEAGETLEVSAWPPDRAGLDRLAGRVRILGGPVVGVIESMNGARFVHDRLELAGWSVEIADAAKVKGLAPLACKTDRIDAWVLAELSRRDFVPAIWLPSPAVRAERERARFRLHLVRHRTALKNRVHASLLAFGHPCPVSDLFGVTGRALLASFRLPEPWASDVAAALSLIDTLDEQIKGIEVDLRRLGADHPYVRLLQTVPGVGWVLAYTIAAEVGDISRFSSPKKLAGYSGLCPKVYQSGGKDHRGSLAKNGPKYLRWALIEAATGAARHPAYKDHYQNTARRLGRQRGKKVARVEVARKLSEAIWHMCTNGEAFNPAGVPKAA

SEQ ID NO: 320143 - protein, 407 aa, unidentified
MSVNGLPGECFDGGLIVAIDPGKAMHRVWVTDRAGMVGEPVSLPNSRIGIERLEALVGEASATFAVEATGALHRAWAAELERRRPGALRLFAPSQTHAARAQLGTRRFKTDDRDCAALVWLARQGAGRPARSSGVEAMLAAVSHRRQLVLALTPLRQRLHDQLNALAPGLSAPAGHGRALLLSTPTGHAVLACAAAFAGRPPSPRSLQARANGRLTAATAALWAGRWRQCLAPPPDAELRAARLARDLDRFQALRADIAFVDGQLEHLLADSAGQILTTLPGVATARAAALTAYTLPIERFPTPEHLYSATGLAPASYESASVRRRSAIARTGLPEHRDALMGIAWGLGQFAPAFQRRRELNQRGKTGIQARVALARHACRLCWRMLDTQQPYDDRRYDRARRDRGR

SEQ ID NO: 320144 - protein, 421 aa, unidentified
MKRESQEEFAAFVGLDWADAKHDVCLQATGTERREFLILEHRPEAIDAWVHTLRTRFNGQPVAVCLELNKGPIVSALRQYDFLVLFPVNPLTVAKYREAFTPSRAKDDPTDAELQVELLLKHRDKLTPLAPQSAMMRTLAQLVEHRRRLVGDKVRLTHRLTSALKNYFPHVLQWFPDKDTVLFCDFLSRWPTLKAAQLARRTTLEAFFRAHHVRAAEVIASRIQAIKSALALTTDDGVITPNALLVQALIAQLRVTLQAIADCDTAIAQRAQEHPDFPLFDALPGAGAVFAPRLLVAFGEQRERFTSAEDLQKYAGIAPVTERSGKKSWVHWRLQCPTFLRQTFVEWAAESTRHSFWAQVYYQQQREKGKAHQAAVRALAFKWIRILYRCWQDRTPYDESVYLQALKRRSAPFLHNLASGS

SEQ ID NO: 320145 - protein, 431 aa, unidentified
MVINPSVAGIDVSDREMMVAWPTGPDQLEVRPFGCFTSDLHSIARALLGSGVTSVAMESTGVYWVPLFLLLQEYGLEVCLVNARHVKNVTGRKDDEGDAEWIQKLHSCGLLSASFQPDAMTRTLRGMVRHRKSLVGTSSTYINRMQKALELMNIKLHTVISDIDGKTGLLIIEAILAGERDAGVLADLRDGRIKAGREEIVRSLEGHWTTEHLFELRQCHHLYRTHREMIDECDREIEKQLMEQIASKNDGVLPDIPKVKRKVSGKHKVPFELTALLREILGVDVTEVFGISELSALSILSEVGTDMSKWKSERHFTSWLGLAPNTRISGGKVISSRIMKKRHHAGQAFRMAANGLYNSKSPLGDFYRRLRARSGAGKAVVATARKLAIIFYKMVGNQEAFNPKALADYQEKYRQKKINQLKKKLELLEAA

SEQ ID NO: 320146 - protein, 381 aa, unidentified
MSKSSTVYVGLDVHKDSIDIATADAGRDGEVRHVGSIGGDVAALDKALRRLISRGRRLHVVYEAGPCGFVIWRHLRAQGIHCEVVAPSSIPKRSGDRIKTDRRDAMLLARLARSGDLVAVRVPDTADEAVRDLVRAREDAVRECRNARHRLKALLLRSGIRYAGKSAWTAAHLRWLATLKMAHAAQQVGFQEYLHAITESTARIARLEQALRDALADWSLRPLVQALQALRGVQLIAAMTLVAELQDFLRFDSPRKLMAYVGLVPGEHSSGAKRRQGSITKAGNSTARRMLVEVAWHYQHSARISPIIAVRQDQLPKAVTDIAWTAQLRLHGKFKRLMARRVMKTKAVVAVARELSGFVWAIGREVQTSGWPGVKTPTAAN

SEQ ID NO: 320147 - protein, 352 aa, unidentified
MQYFIGCDVHTRNQMVAWIDEQTGEIKKRRLEHEGKEVREFYTQFPRGTVVGIEATFPAHWFERLMGELGHELWVGDAARIRASEVRYQKTDSRDAELLLDLLRTGRFPRVWVPTLEERDLRQLLVHRMKQVRTRTQVKNQLHALAISQGVCRKGKLWSVKGRKELESLALLPWAARRRKELLESLDRLDEQVRELDRAVEEAGRGREDVALLRTHPGAGMVVALAFVLTVGPVERFRNSRKLVSYWGLNPRENSSGGRQRLGSISKQGNTMMRWLLVEAAQTAARLDPQLRRLYQRLKKQKTSALAKVAVARRLAVRLFWMLRTRHNYTQLVHMSGSPSSAVVPPQGEPTV

SEQ ID NO: 320148 - protein, 337 aa, unidentified
MNEQATCVVGIDISKRKLDIALLANSKIKSKVFDNTVTGHRELVQWLLERGAEQQRTHICMEATGPYSEAVAIALVESGWHISVVNPARIKGFAQGELARNKTDRADASLLARFCVAMRPSLWAPPPTEWRELRGWVDRLQALKDMHQQESNRLEAHTTTGQASLIKSVQTHLDWLAQQIRMLEHDINDHINRHPELKHDAELLRSIPGIGSTTVAKVLAYAGDVRRFTNAKALAAFIGVTPRQRLSGSSVKGRTMMSRTGHADLRRALYMPGLVARRHNPVLRAFGDRLSTTGLAPKAVVGAVMRKLAHLIYGVIKSGQPFDVSFAGRNLDFQDGI

SEQ ID NO: 320149 - protein, 324 aa, unidentified
MTNPQREIYVGIDVSKRSLDVCILREDTHQEGGESFVVSNDQEGVQKILSRLEGASVELAVMEATGRYERLAATMLAASSICVAIVNPRQARDFAKAIGRLAKTDKIDAFVLARLARAVEPRTSVIPEEEAQHLQGILARRRQLIEMLVSENNRLKMASKPLTKRIRAHVQWLEKEIERIDGDLDSAIEENAAFKANEALLRSVPGVGRVLSRTLLAELPELGTISHRRLCALVGVAPFNRDSGQRSGKREAWGGRAPVRTVLYMSALVATRHNPHIKEFYERLLSAGKPKKVALVACMRKLLTILNALMRDRANWRCPHALTP

SEQ ID NO: 320150 - protein, 360 aa, unidentified
MSVYVGIDVHRKRSQVAVIDGEGKVLANRNVPNGVEPVLGVIGGLPPGTPTAFEAAFGWGWLVELLEDYGFSPHLVHPLQCKAIASARLKNDKVDAAILAQLLRADLLPEAWIAPPPVRQLRAMLRHRAQLVRLRTLLRNRIHAVLADHGHDRPGGCWSGPGRAWLASLELPAASRAVIEDDLALIDALAQPIDRLDWQVHQWARSEPAVKVLTQLPGVGPFTALVILAETGDVSRFGSARKLAAWAGLTPTVRGSDRTVRHGHISKQGSTWLRWVLCEAAQTAKRHPDFAASYQALARRRGKKIATTAIARKLLTRAYHLLTDAGITAPQATTTARAASPGPATDREGSPCPGRARVSA

SEQ ID NO: 320151 - protein, 387 aa, unidentified
MTDSFDVRKSDRPFDQNHTLVAVIELSQTSWLVGGIVPGLKRSPLKKLKPDREALFRLLVRWRDEAVKAGQEIMRIAVACECGRDGFWLVRWLRTQGIEAYVIHAASVAVSREHRRAKTDRLDTELLKRAFLGWLRGEVRHCSMVTIPSFEEEDAKRPSRERETLVKERTRVINAMKSDLTRLGIRDFNPKLRTAREKLETLRTPEGALIPPNTLAKLLRDMERLRLVVAQIKAIETARLKRLESSPQEKPHAMVILLARVVGVGIETADMLVREVLSRELRDRRAVARYAGLTGSPDESGSKRREKGLSKAGNARVRRGMIQLAWRLLRFQKDSALVQWYQARTADGRGGTRKTMIVALARKLLIALWRLVTFGEVPEGLILRPAL

SEQ ID NO: 320152 - protein, 335 aa, unidentified
MKVFYLGVDVSKKKLDLCLRSNGKDILYDVIPNDLSSIKSWLTRTFEKFFLSEDSLVVCAEHTGQYTYPLVCATKSIGVYLCLEDAAKIKYCHGIPRGKNDKIDACRIAMYAERYNDCLQPYTASELIIQKLKNLSTERSMLVADRAKYQSQLKDQVDYMEHSIYIAKCNRVEGIINTFTDYIAQIDLEIKELINQAPVIAHQMDLLMSVDGVGERVALKMIMETDAFTSFTDPRKFCSHAGVVPFVYVSGSSQRSKNRVSNRADKSIKHLLHMAALSVSQVKNSPLKKYYDRKVEEGKNKMSVLNAVRAKLVTIMFAVIRTDAFFSRNYQNSLA

SEQ ID NO: 320153 - protein, 351 aa, unidentified
MRLPPGPCNKLRFVNTDTGELQERRLQHREESEKFYRDLAAQGMKVRVGMEASGHARWFERLLAELNFELWIGDAAEIRAKRVRKQKTDRQDAQHILSLLREDRFPQIWVPSWENRDLRQVLWHRHRMVQARTRIMNQLQAVALNEGLRCKKRLWRERGREQLESFRLAPWASRRRRDLLELLDRLTPTIAELTQAIEQEAGKCPEAQRLMTHPGVGALTVLAFVLIIGTAEPFQCGKQIASYLGLVPLEESSGNRRRLGHITKQGNALLRFLLVEAAQLSARSIPEWRSKYFHLAMRRGRKIAKVAMARRLAVQMFWMWRKGWDYEQVRKFGSQGRKFSSHTVVTKGSTR

SEQ ID NO: 320154 - protein, 356 aa, unidentified
METAYDGRQVVGMDLHRRRSVLVRMTEDGRRLGTARITNSPAELRREIARAGKSPKVVLEATYGWYWAADTLAEAGAEVHLAHPLGVKAFTYRRVKNDERDSADLADLLRMGRLPEAWIAPHEVRELRELTRYRQKLVHLRTSCKDQVHGVLAKLGVTVTCTDIFGTAGSAWLDQLRLPQPYAGKVTSLRHLAGELTTEITMLGEVIASLLAGDRGYQVIQQLPGIGPVLAAVIIAEIGDVTRFKNAGQLCSWAGLTPRHRESDTKVARGHVTKQGSRLLRWALIEAIQRIPRDSVIGAVKDAIIARRGKEARNIAKVAAARRLLTLVFYGMRDGQIRCLSRPREDPPPAQTPQAA

SEQ ID NO: 320155 - protein, 533 aa, unidentified
MWGATTSSAGQNNEALRRPLHVLCAGWTCRNRRFPLVLIQEPDELGRKGGDTATTAPALVTSPERVAHAPKERIYVGLDIGYREHVAAASPLSVFNVGRNPDGWKRVKPIHFASDAAGFGRFQRYLDRHSPDPRDFLILLEPTGSYGLTVLLYLLGKGYRVLQVENRAVKDDREKIFGSETKTDDTDARLMARMGFLHELVGEEFSIQPVLLMNPDAAALRGMVHDLAKLQKEITRRRNQLQQMAALTFPKLKTFFKGSTAAPAARALLEYFATPQELATASTEHVAEVLRSAHAYSHATRAAELQALARATAGVPTLTHHQWRQAWLIKQLSVVERARQELVEEVALATATHPYTRVIESLPVKSPIWTATLIGAIGDVDRFSNVNQFKAYLGWSPQLTRSGSSVDHSELAKTGVRPARNVLGQMTVIMLSPTITASPFREVYHRLTGRGMRPASALGHVAGKLSVVLYGMLKNMTPYDQDKHRRQLGLVQSADQTGSPPVDVSLELVDLADSRNDLVDDDLTVAGEPQLGL

SEQ ID NO: 320156 - protein, 426 aa, unidentified
MTAPAVREETVRAEPFDFAQDRLVEALRRRFEYEGTSPIPRRYQSTKIDLRKFNLKGKGEVMLEVTRLSVSRVGVDLSKRVYHVHAVDRSGRKMLSKAMSPQAFYAWCEQLPPGCLVATEACGGAHHVARRLCTMGLDARMIAGDFVAPYRMAGKRGKNDANDAAAICEAAGRPHMRFVPVKTAQQQGLLAMHRMREGFKEERTALINRIRGVLAEFGLVYPKSPEALREVLATILEDASNELPDIARLVVHSAHKHWGDLDEQIARCDERIVGHVRSDERAKKAATLMGIGPVTASAVTASVADFKQFRDGRQFGAWLGLVPSQNSTGGKASLGRITKRGDDYLRTLLIQGAKSAVMTAGKRDDRISRWLLQLKERVGWQKAVVALANKNARILWAVITREVAFDPDHIPPTPKARTSPALQPAS

SEQ ID NO: 320157 - protein, 364 aa, unidentified
MSSLSQRSLIHLGMDVHKDSISIGILRPDDSLDVERIFHDEESVRRFIARMGEPHRLVACYEAGPTGYELQRLLQRLRVPCHVVAPSLIPKAPGDRVKTDRRDCRRLARLHRAGELVAIRVPSPEEEAVRDLCRARGDVVIDLDRARRRLGAFLLRHGQVFRGGSNWTLRHESWLLGLRFDDAALASTFAHYRSIVEERRLRLQALEADLLPYCEKDPYAEGVARLCCYRGVDTIGALTLVSEVCDWRRFAKASSFMGFVGLVASEYSSGEHDHRGHITKAGNVHLRTQLVESAWAYQRGPHVGERIRRAQERCPPATRERAWAAQVRLCGRFKRLAARKNVKSVVAAAVARELAGFLWGEMTA

SEQ ID NO: 320158 - protein, 346 aa, unidentified
MNKDIILAVDYHDENLEIRRFNCATGEERCENRPTTRGGILEVVDCAVAEAAAAGGQVVWIMESTTGWARVKDLIGSKAKMVLTNVLQMPLPPKAYRRKTDKIDTGRLLREYLNGSLPQAFQPSVWLRRVRRLASTRESLVRRQTALRNWTTRYLSHETWEDRRGLWSERGLSRLRRLAEVSAGPDRLVLTVKLAELEHLEPLLKTVEKEMIAVYQQWPEAQAVDAIRGIGVISAVSILAHIGPVGRFRKPEALVAFAGLSPGVRESDGTRRSGHIGGGGTDTFLRHYLIEASVWARQIPRYRKTYERVESKRGKKIARIVVARLMLRSIYKMLRYGVSFNQAPAA

SEQ ID NO: 320159 - protein, 341 aa, unidentified
MKKFIRIGVDLAKNYFQVHALVSDVGPAVTRKLRRSKMHEFFSQIEPSLIGMEACGSAHYWARELKAMGHEVLLMPPAYTKPYVKRGKNDAVDADACCEAMSRPGMRFVPVKSAEQQATLMLHKTRELLVKQRTMSVNALRGHLSEFGIIAAKGIGGVDELLDLVESDTTLPNAARASATVLAHALEGLDKAIDDLEDEITNAQAQNEMTRLLYKVPGIGKIIASVIAASVPDPSVFKSGRDFTAWLGLTPRQNSSGGKQALGAITKQGNRYIRKLLVLGATSLLNVVGKRKGALRDWIVGLLAKKPARLVTVALANKLARILWAMMKTGESFRTEMFAKA

SEQ ID NO: 320160 - protein, 426 aa, unidentified
MKYTQNAKIMQITENTLIVGVDVASELHYARAFDFRGIEYGRLLKFSNDGEGFAAFVEWIGKLRAENNKDHVMVGMEPTGHYWFTFAQHLKDHRTKIVLVNPFHVKRSKELDDNNPTKNDRKDPKTIAMLVKDGRYMEPYMPEGIYSELRNAMDTRWRLVKGLISIRNRVKRWISIYFPEFNQVFGKWEGKAALMTLKEFPTPARILELGLEGIVASWRREISRAVGTKRAKRLIEAAKGSVGMRQGLRAAENDLKCLLAEYELLMGQYESTMALIEELALQVPGVEEMLKIKGVGLIIAAGFVAEVGDITRFKHPKQLQKLAGLNLKENSSGKHKGKTTISKRGRRRLRAILFQGIMPIVAKNHEFSELHQYYNTRTNNPLKKKQSLILLCCKLIRIFFTLMTKKVAYDPEKMMRDIKRPEIQAA

SEQ ID NO: 320161 - protein, 356 aa, unidentified
MARTSLSNIHEFVEHAGNAGLYVGIDIHKKTYSVAIRRYDGMVLTWAGPSDPHGLVRSLLDTRTPISCVAYEAGPTGFGLARAVENAGLPCIVAAPNKIPRPVTTGAKTDRLDCIKLAEFAAKGLLKPIAVPTPQEEAERSLLRRRAQIVDSIRRAKLRIKSLLLVMGIKEPAGLVKWSNFAVKELSVIQLEPFAKLTLDSHLRELNWLKQELSVVMADLKAILHTERHKEAVKRMCSVVGVGITVAATFRLELFRPERFNRQEEVTSYLGLAPMVRHSGDRSPHGRLVPVGQKRLRSLLIEAAWLWQGKVPVVKKLYNKLLARTGIPQKAIAAIARRLAVLLWRLSLSVQNPQTI

SEQ ID NO: 320162 - protein, 338 aa, unidentified
MKVYAGIDLHSSNNYIGIIDEQDHRLYQKRLPNNLENILMALEPFKESLEGVVVESTYNWYWMVDGLQEDGYKVHLANPSAIKQYEGLKHTDDKWDSFWLAHMKRLNILPEGYIYPKEERPVRDALRRRLLYVRHRTSHILSLQSAITRNLGYKMSGRDIKKLNESDADKLFDEPFLILSATNSISTIHFLGKKIKEIEKAVKSHVHLKPEFKHLLTMPGIGDILGLTIMLEAGDMSRFPTVGKYSSYCRCVKSERISNKKKKGEGNRKNGNKYLSWAYVEAANFAIRFYPEFESFYKRKKAKTNGIVAIKALSNKLARASYYVMRDQVPYDASKLFR

SEQ ID NO: 320163 - protein, 310 aa, unidentified
MDAIVVGIDVSKDRLDVAVRPTGEVFAVVRDAEGLDALVARLKPLAPVAVAVEATGGYETVVAASLAAADLPVVVVNPAQVRSFAQALGKRAKSDPIDALVIAHFVEATRPEIRPLPDAETRLLGDLVSRRRQIVGMITAERQRQKILTGKRLQRSIARLLAALQKELSSLETDIDQAVRGSPAWREKEDLLASVPGIGKIIARTVMAELPEIGTLDRRQIAALVGLAPWTRQSGTWKGKSFIGGGRAAVRAALFLGAMVAARHNPELKLFRDRLVQAGKPKLVAPVATARKLLTILNAVIRDRKPWQPA

SEQ ID NO: 320164 - protein, 343 aa, unidentified
MESMHYIGLDIHKKIIAFCIKTAGGQMIKRGTLSATRQALNKWLENLTQPWTAAMEATLFTGWVYDFLKPHAYKIKVAHPAMLKAITAAKKKNDRDDAEKITDLLRVNMLPECYMAPVELRELRRILRYRNYIVRTATKEKNKISGLLMEVGGAYNKKRLHGKKYFDELLAKIEDVPESVINMLKLSRSNLEVFTDIQKRFVRALKENQLIRERVRRLMTIPGVGEITALTWALEICEPERFNSIDQAVSYCGLCSAQKESAGKEYRGPISKKRNKHIQTILIEAAKLAPSWNPQLAEIHKKESAKGNANKATLAVARKLVAYMLAVDKNKKDFRIIESKKAA

SEQ ID NO: 320165 - protein, 410 aa, unidentified
MTEIVITRDPPVLVAIDIAKARHEVLIAIPDKKRRRRLTVLNELADFNRLIAALRDYGCPVRVAFEATGNYHRALAYHLATAGFEVKLVSSVALARTREALNNSWDKNDPKDAQVILHMMEIGNEQFYHDPLMHGTNDIQELSKTHDIVSKSKTELWHRVLTHYLPLYFPEADRFHRSSRSDWFFAFLERYPSPHLITAMGKAAFTADAWDVIGRKVAKERLLADIYETAKSSVGLPVAPDSDAIRMFRLVLGEGRSLIAQRNQIEDRAVALLKDLPDYQLLTSIPGIGPINALTILAEAGDLRRFGHHRQFLKFCGMDLATIQSGTFRGQTKLSKYGNARLRRTLWMAGQVAILQRTNSFRDKFERYIAKDRQNTHLRRKAYSAIAAKMARTVHGIIKHGEPYRPFFEG

SEQ ID NO: 320166 - protein, 348 aa, unidentified
MTIVEPVSARAVTGGVDTHLDVHVAAALDDMGGLLGVESFEASRAGNDKLLDWLRSVGDVTQVGVEGTGSYGASLARSLRVARVKVVEVDRPNRQARRRTGKSDPADAVEAARAALSGRAQGAGKTRDGNVEAIRALVVAKRSARSTKIKSLNQIRHLGFTAPDELRDRLRGITRQQLGAAAAVLRPRAGGDPVMVATKTAMRILGRRVLALDAEMTTLDARLADLVAATAPDLLELHGVGVDTAATLLVAAGDNPGRLRSEAAWAHLCGVAPIQASSGKVTRWRLNRGGDRQANGALWVVVITRMSSDPRTRAYVERRLEEGRSKPEIIRILKRYVAREVFHHLPRG

SEQ ID NO: 320167 - protein, 424 aa, unidentified
MNSRVEIACGLDIHRSKIVGSIVTSEGTMETRTFTTTIDDTLALKEWILTHECERVAMEATGIYWYPVYDMLEGHVTVQVANPLFIKVIPGRKTDQLDAEWIATLCLNGLVKPSFIPGIQVRIRRDMVRTLHRLVQIRTRHKNRIHKFLVRSGIRIASHLSDLFGPSGLRILHGLLEGQSIDTILKNLKNAKITKKREELTKSICGTLDENDVYLIRLELDAIGSVNRLIDDLKLRISHLMIPENEDLNALISIPGIGYDSAVNILAEIGDVRQFPTGKHLVSWAGLAPGMNESAGKQGPGHITKRGSKFLRTFLIEPAHSIAVMKRNNRLKYFFSRMRAKIGYKPAIVALARKLLMLIHHLLVNRESYCEDNLSKKILIKPKLSSLPSLNPDQILQIVSEAFVSLTGSDREQFIQKLNRIGIS

SEQ ID NO: 320168 - protein, 360 aa, unidentified
MKKTSTAVAKQSRNISRQRLTIGLDLGDRNSWYCVVDEAGQVQLEQCVRTNAKALQEVFGPMPRSRIALEIGTHSPWISRLLSELGHEVIVANGESRKKDDRLDAQTLARLARIDPELLYPVKHRSAQAHADLMMIRARASLVRTRTGLVNAARGLAKSYGERLRGCNVRNMDAEKADGLSPELQRALEPLLAAIAEVSERIVEYNDRIEALAQASYPQVELLKQIKGVGTLIALTFLLTLEDPHRFPKSRDVGGYLGLQPGRRNSGASEPQLHISKEGDPYLRTLLVQGAQHILGPFGIDCDLRRWGLKLAERGGRNGKKRAIVATARKLAVLLHHLWVSGEVYEPLHNRSRTTVAAAA

SEQ ID NO: 320169 - protein, 316 aa, unidentified
MNKSEPVQRPAYAGVDISKEALDVSLTGQSPCHYANNSVGIAQLVEALKKLPELPQVICEPSGGYERGLLEVLWAAGIAVSLVNAARIRSFARAQGLLAKTDEIDASVLREFGELLRPEALEAPSPQRQRLAALVQRWEQLVMLLTMEEQRLDQTHDAVIRKMSTSLVKEMKRQIVQIEKLIETEIDDDTTLKGQSARLQQVKGIGKVTASTLLAELPELGTLSRNEAGALAGVAPYNRDSGQHRGRRSIRGGRVKVRRVLYMAAVVAARYNPILKAFYQRLVAAGKPKKVALTAVMRKLVVLLNYLLKKPDFMLA

SEQ ID NO: 320170 - protein, 351 aa, unidentified
MDVIGVDCHKEMHAAVLVDAHGHEQGRWQGENSLSGWHALVDWGYSHTTSVVWGIEGTGQYGRGLAQLLVASGQTVYEVNPRLTAAQRRVSRTRGKSDATDALAIARVVQQEPSLPVVQSVDATAVLAVQVAARAALVGDCTALRNRLHQHLAHLRVYRATPWPKLTSRTGVTALTDLQLPDADALAQAHAQQVRLLTQQMLLVMAQIDELTRSIETLSTGWTAPLQAVIGVGRLSAGMLAAHLGGKTFETDAALAMYAGVAPLDASSGRQLRHRLNRSGNRALNAMLHRIALSQSRHSPEARAYLAKQRAAGKTAKEALRCLKRMLARLILTAWRQCQPPPLAHISLPLT

SEQ ID NO: 320171 - protein, 433 aa, unidentified
MGNCAGVDWASETHDVLIADPSGRELFAGTFAHDEPGITSLCAALIKRDVEVVAIERPDGLLVERLLETGIQVLALHPNQVKAARDRFRASGGKSDRFDSFVLCELARTDRHRFRSLEPDSDETKALRALTRAREDLVAARVAMANQLRAELERFWPGPVGLFADLDSPISLAFLARYPSPADAKGLGEKRLAAFLKSHGYSSRKTPAQLVERLRSAPAGRAGDVETRTRRSIVLRLTRTLQIMVEQIRELESEIAEALDAHPDGEIFRSFFLTRTSVICAATLLAEIGDCRARYPHRDAIAAQAGHAPVAVESGKRKSAKFRWACNKRLRRALETVAMSTVRWNPWAADRYAQARQRGHNHRRALRSVGRAWSRILWRCWQTRTPYDPARHTGLQQHITVTIPSQSGPRPDHAATQRMAPHLTRQKAEPTRG

SEQ ID NO: 320172 - protein, 372 aa, unidentified
MNQDTTFVAFDTSKETIAVAIAENGRRREVRFFGAIANRPEAVRKLVDKLARRHRRLAFCYEAGPTGYGLYRQIHSLGHDCQVVAPSMVPVRPGGHIKTDRRDATALATMFRAGELTAIWVPDDAHEAMRDLVRARHAAMEAVRRARQQLLSFLLRHGRIYPTKSHWTRGHRRWLAEQRFELAAQQIVLEELIQAVEQAMARRDRLEQQMIALTPSWSLQPVVSALQALRGLAVVGAITLVAEIGDFRRFANPRQLMAWLGLVPCEHSSGASTTRGAITKAGNGRARRLLVEGAWTYRLVARIAPALLARSAALPEAVRAIAWKAQVRLCARYRRLRRAGKPTNVVTVAIARELAAFAWAIAIAAMPQPKAI

SEQ ID NO: 320173 - protein, 373 aa, unidentified
MQETTKIHVGLDVHKDSITVGAAAPGRAPGRVVGKITHDVNKLVKVLNKLGPPQQLHVVYEAGPTGYGLQRALQTKAYECEVIAPSLTPKRPAASRVKTDGRDSVDLAECSRAGQLRAVWVPEPADEAIRDLSRAREDAVNSRTKVRQQLKGFLLRHDSRYGGKTSWCKAHYRWLAEQNFGAGASQVAFTEYMLAVQAADERVQRLSQALQDSISGWRFAPVVAALQALRGVDVINAIGLVAEIGDLSRFDHPRKLMGYLGLVPSEHSSGERVSRGSITKTGNAHARRLLTEAAWNYRFNARIGLRAQQRQEGLSEEVRAMGWKAQLRLSKRFAMLKGRGVQPNKVCVAVARELAGFVWAIGTQAQREQATQH

SEQ ID NO: 320174 - protein, 364 aa, unidentified
MVVVGTDAHKYSHTFVATDEVGRQLGEKTVKATTAGHATAIMWAREQFGLELIWGIEDCRNMSARLERDLLAAGQQVVRVPTKLMAQTRKSARSRGKSDPIDALAVARAVMRETDLPLATHDETSRGLKLLTDRRDVLVAQRTSAINRLRWLVHELDPERAPAARSLDAAKHQQALRTWLDTQPGLVAELARAELTDIIRLTGEINTLAQRISARVHQVAPALLEIPGCAELTAAKIVGEAAGVTRFKSEAAFACHAAVAPIPVWSGNTAGQMRLSRSGNRQLNAALHRIALTQIRMTDSRGQAYYQRLQDAGKTKRAALRCLKRRLARTVFQALRTVHQPSSEHTQPAAACHRSYCSRSCLSG

SEQ ID NO: 320175 - protein, 348 aa, unidentified
MRFYTQQHRYYCGIDLHARRMYVCILDQSGEILVHRNGPATPEHFLAVVRPYREDVVVAVECMFTWYWLADLCSRESIPFVLGHALYMKAIHGGKAKNDKIDAHKIAALLRGGLIPMAYVYPAEMRATRDLLRRRCHLMQKRSQLLTHIQNTLSQYNLPPLAKRLAPRANRTHVAEHFPDPAVRKSIEMDLSLIDRYEEILTEVELAIVRTAKVHDPNAFYRLRSVPGIGKILALTILYEVHDIRRFESVGQFASYSRLVRCEHSSDGKRYGYGGKKIGNAHLKWAFSEAATLFLRKNPPGQAFFSRLAQKHDKAKALSILAHRLGRTVYFMLERGQAFDPGKFYASS

SEQ ID NO: 320176 - protein, 426 aa, unidentified
MNNTQKLEAITTSTLIVGVDIAKNVHWARFTDYRGLEIGKALKFNNDKEGFDSILASIEAICKFKKLDKIIMGMEPTGHYWKPLANYLILRGITVVMINPFHTKRAKELDDNSPTKSDKKDAITIARLVRDGRYYEVYMPHDVFAELRGLSNARVSLMKRHNALKNTITTVLDEYFPEIVTVFKNPLKGKASIQILKSCPFPSLILELGVDGVLVEIRKAVVKTVGLKKAQQLIDVAQTSIGVNYGLRAAKLKLELMIEELELLTGQLEQIEKAMELALDETGIKEIILGIPGIGVVTAASFLGEIGDPMRFAHPRQISKMAGYNLVEDSSGKNKSGTIISKRGRKNLRSVLYQMARTMVAKNPEMKELYQYLKTRPDNPLKKKQALVVISKKIVSIIYNLVKKQTEYKAELVLGEYRKNQIKQVA

SEQ ID NO: 320177 - protein, 338 aa, unidentified
MTYGAIDLHMRYSQIRIVDGEGQVLRDQRVPTTAERLVAACAGYPELRILVESSTDSEWVAQVLEAAGHAVIVADPNYAPMYGEVRRKVKTDRRDAAALAEANRRGWYRAVHRVSATQRGRRQVLRSRRHLVQQRSGTISLIRTLLRQDGHRLPRCSAPAVPDRVAALVLPPARQATLAPLTRVVRMLNAEIAALDRELAATATSDPVVRQLMTVPGIGPVVALTFRAFVDDVRRFATAAQVSAAIGLVPREDSSAERRHRGHITKAGPRELRSLLVQAAWVCWRRAKASGTLAAWTEHLAARRGRRIAVVALARRLSRILYALWRDETEFNAATLAA

SEQ ID NO: 320178 - protein, 399 aa, unidentified
MTTEYSITLGLDVGKTAHHGCALTPEGQRVYDQELPQDETALRKVITDLQQHGPVLVVVDQPNTIGALPIAVARDLGADVAYLPGLAMRKAADLYPGRSKTDARDAFIIADTARTMPHTLRAVDRNSEVLSALKVLSGFDEDLARESTRAINRLRSLLVQIYPSLERVFPGVVLTRAIVLDLLIRYHGPAGLKAAGKAGVKRWARHHSRKDPGPLIDQVFTALSEQTVTVPGADAVELIIPRVAAQIKELKHQRDIVAEEVEKLVDDFPLSTVLTSMPGVGVKTAAQILLAAGDLSAFPTPGHLAAYAGIAPVTRRSGTSIRGEFPARAGNKKLKNALFRSAWVASCHDPVSKAYYERKRAEGKRHNAAIMCLARRRLNVMYAMMKTGTLYEPRTPAAA

SEQ ID NO: 320179 - protein, 418 aa, unidentified
MKRKKTKKVTYVNEKTLIIAVDIGKSVHHGYMRAPYGKEVKPFPFYNNGHSFKEFWRKICCFQREQGLEKVVIGFESSGPYAEPLCEFIRRKHVTMVQINPMHTKRVKELTGNSPNKTDKKDPRVIADIILLGHALTVVVPEGAAAELRRLTHAREREIKNQTADKNRLQHLMFIIFPEFLTILDVSTKSALYLLKHHPAPEDILSLGFESLCAILKKVSCGQPGKERAQELFKVARNSVGITQGKQSILIEINHLVDRIECEQRFIESLEEMMKKHLGQIPYSQHIHSIHGIGTITTAGIIGEVGDFSEFTTSNEMTKLAGFDLFEVSSGKHKGQRHISKRGRSVLRKLLYYAAVNTVKSHGIMHDKYQQMLNRGKPQTKALIAIARKLLKIIYAIARDKTMYGEQYTNDLKRSVAA

SEQ ID NO: 320180 - protein, 345 aa, unidentified
MKKGITIGMDLGDKKHQVCILDKTGKIIAEEEVTGTRAAVTQFFKQYREAVVAMETGTHSRWVSQIAEAEGLNVLVGNARKLRMIWQSRQKSDTRDAVMLARIARMDPALLYPIRHRGEQVQMDLEIIRARDLLVRERTRMVTHVRSVVKSMGERLSPSSAASFGHKAKMPEALNETMKPMLEMIRELTKKIRGYDLMIKEAATEKYPATERLSQVGGVGPLTALAYVLTLEEPQRFAKSRMVGAYLGLVPRLDQSGQTDKQLRITKHGDGYLRRLLVGSANYILGPFGPDCDLRTFGLKLMQRGGKNAKKRAVVALARKLAVLLHALWRSGQQYEPKRKQPLAA

SEQ ID NO: 320181 - protein, 401 aa, unidentified
MRFFVGLDWASDAHAVCLIDERGTVRWQTSVPHSATGLDTLARRLRRWRQRGALAIALERPSGLLVDTLVHAGFDVVPIHPNVVKATRPRYSAAGGKSDPGDAFLLADLLRTDGHRFRPLQPPSDDTRALRTLVRGRDDLVAQRVALANQLRALLERVWPGAAQIFADIDSPIALAFLARYPTAHSAARLGQNRLAHFLVQHAYCGRRSACELLARLQVAPPARLGEGETEAAGDLVRCLVTVLTPLVAQIQQLGAAIAAALQHHPDASVVQTLPRTGTVNAAQMLAELGDDRARFTSAEQLAAEAGVAPVTHASGKHRDVTFRWACNKRLRSALTTFADNSRHASAWAADVYRRARARGCDHPHAVRILARAWVRVLWRCWQAHTPYDVTRHRAAAAFAA

SEQ ID NO: 320182 - protein, 341 aa, unidentified
MGQAHTIGLDIAKRVFQAHGADASGRVVFRKRLVRAKVLAFFAAQPPCTVAMEACAGAHHWARELGKLGHIVRLIPPAYVKPYVKRQKNDRADAEAICEAAQRPSMRFVPVKTEEQQANGVVFRARDLLVRQRTQCINALRGHLSEYGYVFPQGITHAEAVIAHVEDPDSAVPESVRAVLKVLIGTFQALEAQIQALDAEITQRAKADPVARRLMTIPGIGPIAATAITALVPAPEGFRAGRDFAAWLGLTPLQTSTGGKQKLGAISKMGERTIRRLLILGASAVVRWAGQRGTPAGSWLARMLARKPKMLVTVALANKTARIVWALLVKGGGYRAPAPAA

SEQ ID NO: 320183 - protein, 341 aa, unidentified
MAEVCTIGLDLAKHVFQAHGADASGAVLFRKTLRRAQVLSFFATQPPGTVAMEACGSAHHWAREIGKLGHAVRLIPPAYVKPFVKRQKNDAADAQAICEAAQRPTMRFVAPKSEQAQAAALVFRARDLLVRRRTQIINALRGHLAEFGIVVAQGPAHVSSLVRAVEDPAEPVPEIARAILSVLIEMLHTLDGRISLLDREIAQRAKEDVTARRLMTIPGVGPITATALTALAPPAETFKRGRDFAAWIGLTPLQHSTGGKQKLGATSKMGERSLRRLLIIGASAVLRWAARHGAPAGSWLSRMLARKPPMLVRVALANKMARMVWALMAKGGVYRAPAVSV

SEQ ID NO: 320184 - protein, 417 aa, unidentified
MKIVYPICCGIDVHKTFLVATIITSNGITPHYSKRRFSTFNNSILQFKQWLIDNKCFDVCMESTGKYWVPVNNFLEDTIRITIANPKWVKAVKGNKDDTKDSKWIGDLFRLGLVPGSYIPQKPIRILREYTRYRSKLVSCKSSEKNRFQNAFTVCNVALDAVVSDMFGKSATYITDYLISSDTFDPEYCTSLLQKSLKKKASSVIESIEGYQITQAQKERIVMVRSHLNYINNSIDKLDQALNKMVNPYESAIGLLCTIPGVDRKSAITIISEIGTDMSQFSNSKRLCCWAGLTPSNNESAGKKKSVRITRAGVYLKPALVQVAHAAVKSDKFPYYKIKYERIYKRRGKKRGIIAIARMILTAIYYMFTTGEEFNPCDLYKIDMPLEMQDKQKEKAVKEAVRFLIAQGIIKDSDISI

SEQ ID NO: 320185 - protein, 428 aa, unidentified
MRTALGQKRPKLPWLPAAKRCYGAGDEGMAPSLLPNNLMERPVKRNDLSQSLIAFDHSSTLVAVVELSFGSWLAAGLVPHLSRQPLKKLRPDPDALLRLLLRWRDQGIKAGGPIKRIVLAFEAGRDGFWLARWLRARGIEAYVIHPASIPVSREHRRAKTDRLDTGLLMRAVLGWLRGEPKHCNMVAISTIAEEDARRPTRERETLVRDQTRSVNRIKATLIRFGIRTFKAKLRQATKHLEQLRSPEGEPLPPNTMAELRRDLARLQLIRGQIGEIERARLERLKRAPRQGTHPMIRMLARIMGLGIETADMLVHEVLSRKLRDQRAVARYGGLTGSPDESGSKRRERGLARAGNARVRRGMIQLAWRWLMFQSKSTLTKWYRARTAGAKPGLRKAMIVALARKLLIALWRYVTIGEVPAGAVLRSGT

SEQ ID NO: 320186 - protein, 370 aa, unidentified
MDHHNGAFVGIDTSKLRNAIAVAEEGRGGDIRFLGEIDTTEAATRKLITKLATKYRQLTFCYEAGPTGYGLYRLIRKLGHDCIVVAPSLIPKKPGDRVKTNRRDAIGLAKLSRAGDLTAVWVPDERHEAMRDLSRAREAAQKDLRGKRQQVSSFMLRLGRHYPGKKTWGRAHMNWLMQQKLEQREQRIALEELLGAVRQESERVERLEQAIRDATPEWSLAEVVTALQAMRGIDLVAAVTVLAEIGDLSRFQTPRELMGYLGLVPCESSTGDTVNRGGITKAGNGRARRILVEAAWSYRHPPRVSLKKQIKVAASRQTVREIAWKAQMRLCGRFRSLTRKGKRPNVIVTAIARELSAFIWAINREVMAGR

SEQ ID NO: 320187 - protein, 467 aa, unidentified
MTKLFVAGDISKGYADFTFLDDSGQYLSESTRLDDTPRGHQRMAETLEALEQKLGPLRFSVGVEATGGLERNWLALFRDLGQRHNILLYQINPLKVHKFGEQVLHRTVTDAHSSRTIAQFLRVGQNLGKPYEPKLQDELSFYRSICNHVTRLGAMKAELQQALTTAHPGLIQYSRDGLADWLLKLLTKWPTAHKLSKAKPEVVAKIPYVTTDKAARLVSDAQVSIGCAQSRGAEFLVESLASEILTLASKIECWKSELSKMLAEDQVFLILKSLPGVGSWTAIALRLELGDFSRFPSESALVAFVGLDPTPKMSGDGVRRLGISKRGPAELRALLFMSALVSLRVSPVFRAFYDRLRAKGKGHLPALVACMAKLLRVAYGCVRAGKAYEIQYHLEQCGREHKPAHPNPGLPRAEGEEPDLQAPVSRQEKKKREAAMPQTSSTRQNVVQAASQSQHTQLSGAHQVRRT

SEQ ID NO: 320188 - protein, 337 aa, unidentified
MTLYCGIDLHSNNSVVAVLDEQDRTVYEKRLPNDLETITGALCIYQSELAACVVESTYNWYWLVDGLMDAGFPVRLAHTSALPEYSGLKYSNDFSDARQLAHLLRLGLLPTGYIYPKEERALRDLLRRRLLLVRQRSLHHVSLQSLIARHSGQRLNSLQIKQLTKGQLTDYLQGHALLGGEITHQARCWLEAAVKKIERELQRHIKPREDYQLLQSMPGVGSVLGTTITLETGTIERFASPGNYASYARCVKSEKISNKKYKGQGNKKNGNKYLAWAFMEAGHYGAIWDPRIKRFYQRKKAKAHILVAKKAVANKLARACYHMLKRGEAFDVTRAFS

SEQ ID NO: 320189 - protein, 337 aa, unidentified
MKDFYFIGIDVSKKHLDCCLLFNSSVVRQDVISNHQKSIENYLSILCSEENIDIEQIVICAEYTGLYIYPLVIACQNNSYKLWLEDPTQIKYSSGLQRGKNDAIDAKRIALYASRYIDRIKIYKKPSVGIESIKLLSAELNMLCVDKAKYQAQISDQKEYMPNDMYKIKSKRLTLLIKELDKAINEIENEIENIVKNDVLLSRQMELLLSIEGVGKKTSLKMILETQAFTKFTDSRKFCCHAGVAPFSYVSGSSQHSKNKVSQRANKSIKTLLHLAALSAIQKKNSELRVYYERKIADGKNKMSVLNAIRAKLIYRIFAVIKNDQSYDLNHISQYTN

SEQ ID NO: 320190 - protein, 420 aa, unidentified
MSPLPEQRFTAYVGIDWADTKHDICVQAAGDTRRESGCIQHRVAAIDEWANGLRRRFGGPIAVALELAKGPIVAALQKYDFLVLFPINPATLAKYREAFQPSGAKDDPGDAELALDLLLHHPERFGPLRPQSTAMRSLMSLVERRRELVGDQTRLTNRLGDTLKQYYPQALEWFDDRGTVLFCDFLERWPTLRAVRLARTRTLQAFFGAHHCRSTRLISERIGSIREATALTDDPAIIGPCRLHVLALVAQLRTVLAAITQFDREIAAVARTLPDYALFGNLPGAGAQLGPRLLAAFGEQRERFSSAEELQQYAGIAPVTERSGKKSWVHWRLQCPKFLRQTFVEWAGQTIGRSFWAGAYYRQQRAKGSPHQVAVRALAFKWIRILYRCWQTRTPYDETVYLNALRKRGSPLIANFGVPG

SEQ ID NO: 320191 - protein, 428 aa, unidentified
MQTATANSELVAWVGLDWADQRHEIRLRAAGSTRVESCTVEQKPEALHDWVAQLRARFPQGKIAVALEQSRGAVIYALMNYDFLLLYPVPPKGLARYREAFFPSGAKSDRSDADLLLEMVWQHADRLRVWQPDDPLTRQLRLLVEHRRHLVDDRTRLTNRLTALLKTYFPQALDWAGELSKPAAGEFLRQWPSLEALQAAGRSTWRRFYHRHRRLSPQELDQLLNAIAQAQPLTRDRALLEASVLMTGALVEQLRTLLVILERLDKKLQVLFDQHPDQGLFESLPGAGKALAPRLAAAFGRDRQHYQNVQELQQFTGIAPVTEASGKMRWVHWRMACPKFLRQTFHEFADASRKKSRWAEAYYQQRRQLGTSHHAAVRALAYKWIRILFRCWKTSTPYDESMYLKALKRRRSPLWLAAISLSTQEAHG

SEQ ID NO: 320192 - protein, 342 aa, unidentified
MDEYDGRQFVGIDLHRRRSVIVRQSESGEQLSAVRIVNDPVALGLQLEQAGSDPEVVLEATYGWYWAVDVLQACGAHVHLAHPLGVKGFRYRRVKNDVRDAADLADLLRMGRLPEAWIAPPQTRELRELVRYRAKLVAIRSGLKAQIHAVLAKAGVLIAASDLFGVTGRQRLAKVPLGAAYAQRIGSLLQLIDIFDSHEARFAALIAEQLDTHTGYHAIQQVPGIGPVLAAVFVAEIGDVDRFTDPAHLCSWAGLTPTHRESDTVVHRGHITKQGSKAVRWAAIEAVQRHPTTAKIAADKHRIEARRGKNIAKVAAARKLLTLVYYGLRDGHIRALDRTRAA

SEQ ID NO: 320193 - protein, 350 aa, unidentified
MESKVSRVSIGVDMAKDSFYAAVIYLMNDQTIICKGTRKFPNTAKGFNDFIEWVQRKVKVDNVVSYIMESTGVYYENLACYLYNSDKQVHVVLPNKAKKYSESLDNKSKTDKLDAKVLGRMGAERKLKQWNPGSKIYQTLKQLTRERETIQKDSTRIKNMLHAEQYSAFSESDVVTRLEDRLTLLNTQLKAVNKDIISTIKKDAEVNRKVKQIEESTPGIAITTIAVVIAETFGFAAFNNMKQLTSFAGYDVVHKESGNFKGKTRISKKGNSHIRRALYMPSLCAIQHNETLNTFYENLNERKRNGLISGTAVQRKMLCLIYTLWKNDTPFIEDYHQKQNGKCLNILFKQ

SEQ ID NO: 320194 - protein, 392 aa, unidentified
MFYLGIDIAKVNHVASLIGEDGSVLLKAIKFTNSNDGLQKLIDSISVYDLSQIYCAMEATGDFWLSLFSALTDKDFNVSVFNPYQIKSFRGAYSNRKQKNDVIDSIIIADFLRFNGVNQTCLPNDDLLALKNLTRYRSNLVNNIAKIKTQIKGILHKVLPEYSDIFSDVFGNSSKQILLNCPTPSEVVNFNTRKLANLLKKASKGRHGSDTVRKIKDLAKNSFGIKFTGDACSFEIKQLVSQIIFLEDQVDELDLKIKEIYSNLDSHLESIPGIGKTIAPIILAEIGDINNFSTTSKLTAFAGIDPSENQSGNKKSTNEKTSKRGSPYLRHAIYQAAFIATNNDPVMHDYYIKKRAEGKHHYVALAGVERKLLGIIYHVLKENRDYRPPKSS

SEQ ID NO: 320195 - protein, 294 aa, unidentified
MFFFWGRPSCKTLRLLVSTSASILSTFTVSDKSGKALLCTKFTRTKLIEFLAGCTPATVVMEACGGAQFMARPIADLGHEPKLIYPQFVRPFVKSNKNDFVDAEAICEAASRPSMRFVQPRTEVQQAMRALHRVRESLVRDKVKTTNQMHAFLLEFGISMPIGVTVIKRLSTVLAENELPPYLAQLLMRLHAHYLYLVEQITELETALEQELSRDETEQRLQTIPGVGPITANVLSSQLGDGKQYSCSRDFAASTGLVPRQYSMGGKNTLLGISKRGDKNLRRRLLTNLDDSIL

SEQ ID NO: 320196 - protein, 364 aa, unidentified
MKIVGCDLHARQQSIAMVDTETGELTEKRLMHEGNTVRDFYASLEGPVVVGIEATGAMQWFLELLEELGIKCRVGHPAKIRAAETRKQKHDRRDAEVILDLLVMKDRFPDIWMPSTEQRDLRTLLRDRHQWVKMRTRLQHTLQAIALNHALREGRALWTAAGQGALQGLALPPYTDQRRDELLSLYTQLEKRIQQLDKQVETEAQQRPRARRLLTHPGVGPVTALATEVFLGDPTRFATANQVASYVGMIPCEHSSGKKQRLGKLTKEGNSLLRYLWVEATLHAVIKDAELKRFYRRKLIQKGMGKARVAAARKLGIRLWIMLRDEIDYEEFCRRGKLRQKGKAHAGMPDFNSGPARAVTGLTE

SEQ ID NO: 320197 - protein, 341 aa, unidentified
MKSFIRIGIDLAKNFFQVHAIEREGAPAVARKLSRGKVLGFFAQAAPCRVGMEACGSSHYWAREIQALGHEVVLIPPAYTKPYVKRGKNDANDAAAICEAMSRPDMRFVPIKSADQQAVLMLHKTRELLVKQRTMAVNALRGHLSEFGLIAPKGIHRVKELLALALADETLPEEAKQASAMLASHSGGLDEKIDDLEKTIARASGKNQTSQLLDEIPAFGPLIASAIAALTPDPRVFRSGSDFSASLGLTPSQHSSGGKDKLGAITKKGNRYLRKMLVVGCTSVLRVAHKHKGALAEWIVAMRARKPERVVAVALANKLARIAWAMMSTGESFRTELYTKA

SEQ ID NO: 320198 - protein, 356 aa, unidentified
MVQSNKKDFSGQNISIGIDVHLRTWSVTVLTPSGFMRTHTQKASAKELFEHLNKHYPNGSYHAAYETGFSGFSTYYALTELGIKCTVVHAADVPTTQKEKISKSDPVDSKKLAKALMRGELGSVYIHSKDSLDDRALVRHRATIVKLSGGIKSRIKHLLYNNGVEYPEEYFRSNRHWTRSFITWLQNDVRLLSDTRVSLDLLIAEVLHYRERLLDVNRRLRSLARSDRYAEKYGILMSVPGIGSTIAMSLLAEIDDIGRFSNQRQFASFLGLVPMMSSSGDKEYVGEKTFRGNKFLGPKIVEASWIAIRHDAELSAKFGALCTRGMKSQEAIIRIARKLSNIIFSVLKSNRRYECR

SEQ ID NO: 320199 - protein, 349 aa, unidentified
MRKLMAGMDLHSNNVVAGIVDQDGKRIAHQKLDCDLGKIIAFLKPFKKELVKIAVESTFNWYWLVDGLKAASYPVVLANPAKIDQYSGIKHADDKNDAFFLAELCRLEILPTGYIYDPELRPVRDLLRRRLSLVHQRTALMLSFESLFARTTGEKMGLGRLKKLDVPAAQKLYDHPANQLIAGVQMKHIEQLTESIEQIEKVVIKAAKQLPYYAKLQTLPGVGIILGITITMEVGDIKRFKDAGHFASYCRTVDSKCLSNGKKKGENNQKCGNKYLAWAFVEGANFAKRYDEDCRKWYDRKAAKKGTVIATKALACKLAKAAWYLMTQGVDYDRNRIFPELAGALSKRR

SEQ ID NO: 320200 - protein, 411 aa, unidentified
MENVFACCAGLDIHQKSVEACVRRLEPTGPLHQQTRHWGTMTRDLLAMADWMAAQGVTHVAMESTGVYWKPIYNILESRFTVLLVNARHLKQVPGRKSDVRDCQWIAQLLQHGLLKGSFVPPRAQRELRDLTRHRAQLVEEKTRTVNRLHKVLEDGNIKLASVTTDILGVSGRAMLEALMEGQEDPVKLADFAQRQLRGKIPELEKALEGHLTEHHRFMLRLLWKELAQQEELIAELDRKIEEHTRPFANEIERLDAVPGVDRRVAEVALAEVGSDVKPFPTHSHVASWAGMCPGNEESAGKRRRGRITPGNRWLKRSLVQAAWAASHTKHTYLASQYRRLAGRRGRKRALVAVGHSMLVIFYHMLKDRTTYKDLGGDFFDRLEPERLTRYYVKRLEDLGHKVTLESSVPA

SEQ ID NO: 320201 - protein, 342 aa, unidentified
MDEYVGLDVSKEDTCFCVMDAEGKVLAQGKALSDPGSLFEALREHSLCPERIVLETGTLSSWLARGLRDRGLTVEVIDARQAHAVMKLQHDKTDKNDAHLLADLARTGFYRSVSVGSEAFQLQRILVKARRHLVCQRRDTENAIRGFLCALGLRFPRGSGKLAARVRDALDARPDLKPMIEPLLASVEALKAEIKRLDEEVMAEAKVSPASRLLMTMPGIGPVTAMAYAATIGDATRFARSRDVGAYVGLTSRRFQSGEVDYSGRISKMGDNLLRSLLYEAANSLLTIVRRPHPLKDWARRIKKRSSHKKACVALARKLAVIMHRMLITGEAFRWPQIQAAV

SEQ ID NO: 320202 - protein, 316 aa, unidentified
MDNKSSVYGVDVSKANLVIGCYGSGETLSVSNTAEAIARWLSTIPPHSVVAMEATGAYHQALASLAHALQMRVYVLNPRVLKHYAEAIGQRGKTDPVDTLMIARYAMHEQSQLRAWQPSAPEADKLAQLLQRRDRLVTACQMVSQSLAGVSALKAQREELLASIKRMIKNTELLMRAELANAPQLAQLHKRLSTIVGVGFVVAAQLVVALTRLHFTRVDSFIAYTGLDPRPDDSGQRRGRRRLSKRGPQLLRCRLYNAGMAAAHSKLFKPLYEGLRARGLRSTEAIVILARKIARIAFALYRSESTFDPAKHLQAA

SEQ ID NO: 320203 - protein, 377 aa, unidentified
MTCKGRGRVAKLTRAMQYLTNTELSSHEETRRQFNGSKAVIKLGIDAHQEFYVVVMQEGGSNPKPPQRFAKKAFLYWAAKLKGRSEQVHAVYEACGFGFALQRKLSALGINCHVVCSQKLDEQNKRVKTDGLDAKALCLRLDRFVEGNKEALAGVRVPSEKEEQLRAIHRQREQLVKARKRLEAQGRSLMVNHGLEPVTSWWKGRSFAALPVPAWMKELLGNSQPILVALQEKIRALTVQLQSAADPQQPRRLGALTSVVIDREIGNWERFNNRRQVGSYTGLCPGEYSSGNTRLQSCVTRHGNPRLRAALVELAWRLVRFQPNYKPVLKWRETLCKGALATGAARKAIVAVARQLAVDLWRIRTGRVTPEQLGLSI

SEQ ID NO: 320204 - protein, 405 aa, unidentified
MIFVGIDWSESHHDVEVQAGSGKVLKQLRIDADVAGLTRLQETLSELAEEPSQVVIGIESNHGLLVNALVASGYRLYSINPLTSARAREGESPGRSKSDRSDAHVLANLVRTKRQDLRPLAGDSEQAQAVQVQARSHARAVRMQQRLRNQLRSALAKFYAALLPLLSEGEDLRDALAVLSVAPNPELGRRLSLNKLQSTLGRHGRQRNLAGKAAQLQAMLRAPQLELNSPKVVSAYSDEVSYLVRSLLQVRSEIKLLEEQLAEDFRGHPDAEIYLSLPGLADVLGARVLGESGDDPTRYPDARARKNYAGSAPITQRSGKRKLVSRRIARNRLLADTTFLWGLCAISASAGARRYYDQLRARGKTHNEALRVVGNRMVGILHGCLRRRCLYDEAIAWRPSLEQAA

SEQ ID NO: 320205 - protein, 344 aa, unidentified
MSEVIIIGLDIAKHVFHAHGADGRGRAMFSKRISRGKLLDFFAAQPSCTVALEACGGAHHWARELTQLGHQVRLIPPAYVKPFVKRQKNDAIDAEAICEAAQRPSMRFVAVKSEEQQAAGLVFRTRDLLVRQRTQLINAIRGHLTEYGWVAPKGPSHVAMLADLIEEEEMVNSLPGAARTMFRVMLDLLDSLNGKIADLDKEIARRAREDEVSRRLMTIPGIGPISATAIAALAPPAETFAKGRDFAAWLGLTPLQRSTGGKQKLGATSKMGERTLRRLLIIGSSAVVKQASKRGAPKGSWLEQMMARKPRMLVTVALANKMARIVWALLLKQENYRAPVAAKA

SEQ ID NO: 320206 - protein, 429 aa, unidentified
MKIIYPRVCGIDVHKKFIVAVICISESVEPVYLKKRFSTFHNDLIRFRDWLIQNDCQNVCMESTGKYYIPVYNILESHISNIVVANPKWVRAVKGEKDDDKDAKWIADLLKLGIVKSSFIPQKDFRILRELTRYKYKLVNMRSSEKNRYQNALTSGNCKLDMVFTDVFGKSASNIIDLILSDNPYTDEDILSKVHKNCKASPDMILNSINGTDLTSIQKSRIELVNDHIKQLSSNIQRLDKLIDLMIEPYEDYISFLCQIPGVSRNSAIIILSEIGVDMNQFTSTRRLTSWAGLTPSSNQSAGKKKSVRISRAGVYLKPCLVEVAHAAVKDTNHPYYANKFNKISKRRGKKRAYIAIARKILVAAYHMLLTGEIWNPADLAEVETPVEQRIKYVKNNLKSDIKQLLDIGLTVEELTLMIQQNANNIATQ

SEQ ID NO: 320207 - protein, 361 aa, unidentified
MFTERTSVGLDVHARSVVAAAIDGDTGEVFKKRLTPASDDVIAWVRSLPGPSAVVYEAGPTGFGLARAFDTAGIRCAVAAPSRIQRPPGDRVKTDARDAMLLARLLCLDDIVPVTVPTVEREAARDLVRAREDVRGDLMRARHRVSKLLLRQGIVYYDGHAWTRKHLLWLRKQHFDTPGLQLAFDAEHEAVLQAEARRDRLDAAIEAMAADSEYTSVVHRLGCLRGVATLTAFGLAVEIGDWDRLTGSSIGAYLGLVPTESSSGRSRSQGSITKTGNTHARRLLVEAAWQHLKPYRTPGATMRARWELAPAAARARGHAGNQRLHERWLHFNDRKKDPVIANVAIARELAGWCWSLAVMDN

SEQ ID NO: 320208 - protein, 404 aa, unidentified
MVFLGVDWAEEHHDAWLENEQGEMLGKARIGNDVGGVRQLHELVAEHADDPSQVVVGIETDRGLLVAALVGAGYQIYAVNPLSVSRYRERHRTSGAKSDRADAKLLADLVRTDRHNHRPLAGDSDLSEAIKVLAREHQDLVWTRKRFINRLRSALREFYPAALEAFETDLGGLDALAVLERAPTPWQGRQLSQAKIVSALRKAGRQRYLEHKAAEIQRALRSEQLQAPSQLQAAMATVVSSCVAMIKSLNLQLEQVAAEMTASFKGHPDAEIYLSLPGLGVVLSARVLGEFGDDRARFADAKARKAYAGTAPVTQASGSKKIVLARFARNRRLADACYWWAFSSLTCSPGANHYYRALRTRGKTHHQALRGLANRLVGILHACLAASQTYSESVAWPQPQDIAA

SEQ ID NO: 320209 - protein, 346 aa, unidentified
MNQIIRIGMDTSKHIFQLHGVDAAEQPVLRKRLRRRQVVAFFAKLPPTVIGMEACGAAHYWARELRKLGHEVKLIAPQHVKPYVKRNKNDGRDAEGTCEAMGRPTMRFVPVKTAEQQAALMLVGIRERLIARRTQLSNAIRGYAAEFGLVAAKGLDKIEPLLAWVAQDENVPTLARELFAMQGREYTQLQVELKAIEARLKAWHRANACSQRLTQIPGLGPIGATALVMKTPDPRAFPSGRHFAAWLGLTPKDHSTAGKTRLGKITRAGDEFLRSVLVAGATAVIQQVRRGRGHPSRWLLALLKRKPPKLAAVALANKIARIAWKLMTTGESYDGAPMPRVSAVAA

SEQ ID NO: 320210 - protein, 370 aa, unidentified
MRHSSTELFVGLDVHKESISIAYASSAPGTDVVSVGKIGTRQCDIDKAFRALRGKASQLRVVYEAGPSGYWLHRYLTRQGIECQIIAPSLIPKRAGDRVKTDRRDAAQLARLHRAGELTAIHVPGVEDEAIRDLSRAREDAMRDLKAGKYRLKAFLLRQDIRYEGRANWSPAHLRFLARVVCPTPAQQIVFQEYLRAITEQNERVERLDQQLREHVPQWWLAPLVEALQAMRGVQFTTAITLIAELGDLRRFDHPRQLMSYLGLTSSEYSTGERRRQGGITKCGNNHARRVLVESAWAYRHPAKVSEALQKRFESLPKGLQDLSWKAQVRLCQRFRKLRARKHINQVVVAIAREMSAFIWAIAKAVPLAR

SEQ ID NO: 320211 - protein, 470 aa, unidentified
MIRHRSDSVLLGPLASVRKPVSQPVIAAVRFMQVELPLHVRLTPQEIESAMRNAGIHADSLLEVRRMYNAVGIDVSKGKSTIAVLQPGGTVIRKPFDVSHTSQSLIELAYYLGSLEGSTKIVMECTGRYHEPMLKALYEAGLFVSVVNPHLIKNFGNNSLRRVKSDPADARRIARYTLDNWAELRQYSGMDNTRTQLKTLNSQFSFFMKQKVAAKANLIALLDNTYPGVNKLFDSPPREDGSEKWVDYAYSFWHVDCVRRIGLKTFTERYRAFCRKHHYIFQPDKPEKLFHASKELVAVFPKEKTYKLLIQQSIQQLNLASGHVERLRQEMNALASTLPEYSTVMGIYGVGKTYGPQLIAEIGDVSRFTHREALTAFAGVDPGVDKSGQHKSKSNRASKVGSARLRKTLFQIMTTLLQNAPEDDPVYRFLDKKRAQGKPYYVYMTAGANKFLRIYYGKVKECLRNLEQAE

SEQ ID NO: 320212 - protein, 339 aa, unidentified
MKLNVVAIDIAKKVFQLHWVDADTGSIERLKLKRSQVLQWFANRTPSLVLMEACGGAHEWGRQLIKLGHDARLLPAKMVRPFVQRNKTDAADAQAIWTAGQQPGTRFVPVKTEAQQIVLALHRLRAQLMKMRIMQTNEIRGLMYEFGIVMSEGHRALLKELPAAIEEAKANLPAMFIECINEQVRRVNDLERDIATIERRLAEHMRKSAACKTLAEIPGVGLMTATAVVSAMGTPTAFKNAREFAAWIGLVPRQTGTGGRVRQLGISKRGDAYLRTLLMHGARSVVRSDRATSWPWLSELLKRRPYSVVVAAVANKLARTMWAVLARGQEWRPEAWQAV

SEQ ID NO: 320213 - protein, 425 aa, unidentified
MIYKQNEKINQVKESTLVVGIDIGSTTQYARAFDWRGIELGKVFPFSNSREGFESFKAWMQHLQDKYKKLDAIVGIEPTGHYWFDLGAYLEDEGILLVMVNPYAVKQTKELDDNSQSKNDRKDPKVIAKLVTEGRYSAPYTPDGVYADLRIMVANRKRLIREMTQIKNRFARWFAIYFPEYTDVFGDYEAQSSMLLLKKVCTPEAIVELGAEKINQIWRDAKLRAVGMKRATTLCETAKRSIGLKKGSSAARYEMKLLLEDYEYKKAQLDAVMEEIEKLCRKIPESEQMLAIKGIGVITVAGFLAEVGDVRRFESPRQIQKLAGLSLRENSSGKHKGQTTISKRGRSKLRAVLFNAAIPLIAKNPEFKSLHEYYTTRANNPLKKKQSVIAISCKLIRVFYAILANGVTYDAQKMLSDIHRQPQAA

SEQ ID NO: 320214 - protein, 482 aa, unidentified
MANQKKSTFQRLINGRLNRKQRRELGRKLSAEDPGREIVNRNVAGIDVGNESHFVAVAPGRDPQPVQEFGSWTADLERMADGLKAGGIRTVVMQSTGVYWIALYDVLEARGFKICLANARHTKNLPGRKSDVQESQWLLKLPTCGLLRDSFRPPDEIRALRSLWRLRDRHVKEAARAVQHMQKSMITMNIQLSNAISDITGVTGQAIIRAVLAGERNPGELAKLRDRRVKATEQEVARSLEGNWRADMLFELQQAVDAYDFIQKQVAECDQRLQTLLAVLPTREVEADVVTTQAAGKPARKKRSRGKHKNVPRFDLHAELKRVCGVDLTSIDGVDIMTAQTVVAELGTDFSRWKDEFHFSSWLGLPPSRDISGGKVLRQGTLKVKNRVATALRTAANTLLHSDSYLGARFRSLPTRRGAPKAIKAMARYLACLIYRMFTHGQAWVDRGAQEFENKRAQRELSALKRKAAAHGFKLVNLEVCA

SEQ ID NO: 320215 - protein, 405 aa, unidentified
MNAVGIDVSKGKSTVAVLRPYGEVVASPFDVAHTGSDLRALADSIKKLPGETKVVMEATGNYFEPIARCLHEQNIFVSVVNPVLISDFGGNTLRKPKTDKKDSVKIASYALTYWHDSKKYTPQEDLRKSLKLLNRQYQQSIKLKTMMNNNLISLLDLTFPGVNKLFTSPSRESDGHEKWVDFVLEFPHCDIISKLTIRAFARKYKKWCSNNSYHFTESPCEKIYAFSKECVSSVSSDEAIVFSVVQAAKMLVSATENCHAIQTEMNRVASQLPEYDTVMNMYGVGKAVGPQLMAEIGDPRRFHSRKAITAYFGYDSENNDSGQKTTRSNPMTKKGSGALRRTLFIIMKVLLQNKPQDNPVYDFLIRKQSEGKHYYSYMNAAANKFLRIYYAIVKEVLHTTETPLT

SEQ ID NO: 320216 - protein, 348 aa, unidentified
MLTYLKLKPKVMENSPQCQWVLGIDVSKDSIDACLIRQTDGQLFEQKFHNNLSGFKHLKSWCKEKQCECKGQTLCCMEHTGLYTRPLVHYLVSREVKVWLESSLQIKRSQGLVRGKTDKVDAQRIARYANVYQKKAQVIQISSLTLEKLKDLQANRTRLMKALQSLRVSAQELQQFDPDSGKVIEKVNREAIRGLETSLDKVDEKILAYIRQDEALKQKYDLMLSVKGVGKVLAALLLVYTQGFTRLADSRKLACYSGVAPFAYQSGTSIRGKTGVSKFANNDLKRVLHMAAVSSIQHDSELHLYYQRKVQEGKNKMSVINAVRNKLLSRVVAVIKRGTPYQLQLKNN

SEQ ID NO: 320217 - protein, 372 aa, unidentified
MKIMVGIDLHSNNALCGLMDESGQRLVHKKLPCDLTSILKLLEPYKERIATVAVESTFNWYWLVDGLQDRGYHVVLANPAGMQPYSGMKYTDDVSDAYFLAELLRLNLLPTGHIHDRKTRPVRDLLRRRLLLVRQRTMLILSFKSLNERTLGQRVSLARVKSMKVEEAQARFTAPADQLLSGTEIELVGHLTAAITKLERHLLGVAGKWKTYQRLQEMPGIGKILGLTIALETGEAKRFADAGNFASYSRCVKSLRTSNGKKKGENNRKCGNKYLAWAFVEAAHFACRYDDQCRRFYDRKKKQTNPVIATKSLACKLAKAAWHVMAEDAPYDAARVFGPARKSDLGETGREPAKGLDARPQGGASPKSLPTE

SEQ ID NO: 320218 - protein, 352 aa, unidentified
MQYVGIDWAYRRAAWCAMREGGGIVDEGLVPADADGLARLVVGVGQDVRACVEMMSGAVWVRDRLEAAGWEVEVADARKVKGLAPLACKTDKVDARVLAELCRRDLVPSVWLPSLDDRALRERLKRRMQLVRMRTMARNRIHGVPTQWGLKLSTTRLRQRDALELLEARGVPEVWRRSVAEALAVIDMLDERLAPLERELRPLALADRRVELLETIPGIGPLLGLTVAAEIGEVARFSSARKLVSYSGLAPKVKQSGQSSRTGPLSKAGSKTLRWAAVEAAQQAWRPNNPWHGLYLETAKRQGKTNAGKAVVARKVLIAAWHVLSRGEPFKPCRRHGGTDPVPASSHFHLAA

SEQ ID NO: 320219 - protein, 344 aa, unidentified
MQSMYYIGLDVHKRTISYCVKEVSGRIYAEGSVPATRLDLNRWMKTLPQPWTAAMEATVFSGWIYDHLRPHAAALKVAHPLMLRAIAAAKKKNDRIDAGKVCDCLRCDFLPECYMASTAIRERRRTLRYRNLLVRQMVQMKNKIAVLLMEAGVSYNKQRLHKAGYFRELVASNPDIDEGLCSLLRVCREMVVRLERTESALVRSLERDALLRDRVERLMTIPAVGPITALTWALEVGEVQRFSSIKKAVSYCGLCGEEKSSANSVQRTPLSKQRNKHLQTTLIEAAKMAPRYSAGLALLYDKERRKGNANQATLAVARKLVAYLIAVDRRQRQFEVVEASRTAA

SEQ ID NO: 320220 - protein, 381 aa, unidentified
MPSMQLRRDDVIVGVDTHKDNHVAVAIDGFGGRLGDIVVPTTIAGFEELLAFCLAFVGSAGQLIGFGVEGTGSYGVGLARYLRNHGHDVHEIARPARAAERRLAGKNDTIDAEHAARQLLAGHGLSTPKTADGAVETIRLVKIAYDGAVQARTTAMITLKATLATGSEALRAELETLTDHKLILACAALEGPTPLPPVRRGAPAVVVPGDPDVAMRHVLSSMAKRWLALHEEAKAHAASLKALTAAAAPQLVEAVGVGYDTAAQMLITAGDNANRIKSEAAFAKMCGACPIPAGSGKTNSRHRLYRGGNRQANAALYRVVIVRMRWHQPTIDYVARRTAEGMSKREIIRCLKRYLARELFRLLPATDAIAKPVNGELEIAA

SEQ ID NO: 320221 - protein, 314 aa, unidentified
MAASICGVDVSSISLDARIGAQGTEARFENNPEGVAGLIAFCQQHAVELVAMEATGGYERLAFGLLWGSRIPVALLNPRSVRRFAQGMGLEEKTDRIDAGVIAWFAAVKNVVPTEPASAAQARLEAMVTRLRQLTELQAAQRNQRLLVTDRSVLESFSELLALTKAQIRTLEKAIAELIAADPLWQQLDAAFRSIKGVAGRTVSRLMAEIGTASNKAVSKLAGLAPLAQDSGKTQGKRMVRGGRSNVRTILYVVADIVRRYNADFAAFADRLRAAGKPKRVIRIALAHKLLVRLNAKARDIRQRYASLPCCQTC

SEQ ID NO: 320222 - protein, 350 aa, unidentified
MEYNIGIDLHSNNSVLGVLDQHAQRVFSKKLPNDLDLILKTLAPFKSPQSGVVVESTFNWYWLVDGLREHGYTVHLANPVESRQKYSGLKYTDDKHDAYWLAQLLQLNILPTGYVMPYDQRAIRDLLRKRWHLVKLRNSLILSLQNIVARNTGQSVAASQIKEETFENIAPPAFVNEHIQLAGQASKETIDFLSVQIDRLETVILRSLEPNAQYHRLKTIPGVGTIIAWTLLLETGPIDRFPSPGRYASYCRKVGSARISNNKKKGEGNTKNGNRYLAWAFSEAAVFARRYYPECQKFYDKKLKKRNEPVAHNALAHKLCRAAYHILKNETEFDMTKLFHQPVVEKTASQ

SEQ ID NO: 320223 - protein, 363 aa, unidentified
MQVRHIFVGIDLGDKNSVARIAVDRDKSERFGFLNRRQGRARLFREVKRRSEDSDGANIVMAYEASSCGFVLSDEAEALGIKCWVLAPTKMEKSVEQRQHKNDDRDADDVLEKLRGHVLAGNRLPTVWVPDVQTRDDRELIRTRLDLTEKQTQIKAQIRMLIKRHGLEKPSGIGAGWTIGYRRWLQALTESEQQLGWSTRQGLDSLLRQLQFLEAEIDRVQKLLEELANEPRHKPIIEELRQEAGVGLLTAMVYRTEIGQAGRFGRGRQVGKFVGLTPRSHESGQQSDRKGHISRQGSPRLRKVLCQASWVHIVHDDRAGRIYQQLVWRNPKKKKIALVAVMRRLAVRMWHRMRKIELQQVQA

SEQ ID NO: 320224 - protein, 419 aa, unidentified
MSNRVAKHLASIPPDTLFAGVDLSLDDLVVVVLNATANRLDRFRSDNHAAGYADFRERLQRTVEKQGASGVWVGMEPTNYYWKQLGYDLEQHQIPFRLVNALTVKRHREGDQLDRSKDDWRDAFTIADLLRQGKFTETRLPHGVYAELHTGYIAYQRLRRDRGRQATLLVNAVRQLFPEFEQVFKDVTGATARAVIGAGLVPHIIGTHPENTFLASVRSHLTGHRLSVRQVRQLYALAAQSYGCTEATHALRQMAQQHVQMIELLDAQAEQLLQTLLTLFEALPEAPYLLSIQGLTAPSALGLVAYTGDLTQYPHGSALIKLAGTQPTPNTSGRKTFSATPFSHQGRSGLRTVLYFIALRLITQNDALHYHYQRLTTRAEDPLPKMQAIGACMNKLLWYAWHVVKRREMYDPHRWQTLN

SEQ ID NO: 320225 - protein, 310 aa, unidentified
MEQRFVGIDVAKDRLDVHVRPSGEAFAVARDGEGLMALIERLRALEPALIVLEATGGFETTVAAAVAGAGLPLAVVNPRQIRDFARAIGQLAKTDALDAAAIARFAGAVRPEPRPLPDDQTRLLAELVARRRQIIEMMTAERNRRSHLSRPRLIKGLDRHLAGLQKDLSEIEQEIDTTIRGTPAWREREDLLISVPGVGPNLARTLLADVPELGKLDRKQIAALIGVAPINRDSGTLRGRRTTWGGRAKVRAALYMAALVASRHNPVLAAFYNRLLAAGKPKKLALTAVMRKLLVILNAMLRDKRQWQPA

SEQ ID NO: 320226 - protein, 447 aa, unidentified
MSLECWCSSLHSGETDYDQSTAYAPNAVLVAIDIAKVRNEVLIEASHHKRRRRLSVLNTRAEHDRLIETLRAYGKLVICAFEATGNYHRPIAWRLIEAGFDVRLVSSMALARTREALHNGWDKNDPRDAQVILHMLRIGATQCYLDPLKAGINDVQELSKTHEAIAKAKTEIQHRILTHYLPLYFPEIERFRGNSRSDWFFAFLDAFPTPASIVALSKEVFIEAAWDVVGHKVSKERLLADIYETARTSIGLPLPTDAPAIRMFRMVIAEARSLIRQRNEIERMADDLLIDSADYQALRRVPGIGPIIALTILAEGGDLRRFGHHRQFLKFCGLDLSTQQSGQYRGQTRLSKFGNARLRRTLWIAGQVAIRQRENGFRHKFERYIAKDRDNPDLRRKALTAITAKMARVVHAIIKSGSDYRPFVEGRVPGGRTSLSKGREGAHGVTL

SEQ ID NO: 320227 - protein, 350 aa, unidentified
MDIVGAFDLHRKQITFDYIEMDSGEVHRGRIQPADRENLRLWIDGFTERFPAQHAAIAVEATTGWRFVVEELRRAGIEPHLAEPAETNSLRGRKKRAKTDRLDAGHLRDLLVIERLPESWIPPEHIQEIRTLMRMRHTMIEERRAHQQRIHAQLFHNGYPQQRNVLAADRRERLQKMELPRAARKVVDLSLAMIEHINEELEPIEAELRTYALSQAGCRALMEYYGIGELTSVAMLAELGDTRRFSSSKKAVRFAGLDVTVQSSDEKQAAGRLSRQGSPVLRWAAFEAAMVARRRGSPDHDYYVETKERIGTNRAALSIARKLIRRAHHTLRELGEEAMSEPAAVNNSSV

SEQ ID NO: 320228 - protein, 309 aa, unidentified
MKEELVYLGVDIAKSHLDAAIGAQKHRFCNDTVGHRELVRWIEQTEAAVQVICESSGGYERRLVQALAGARIKVSLVQANRVRQFARAAGILAKTDRIDAEVVCEFGKVMQPQRVTAATLEQEHLRELESHRRHLTHLLVMEQNRGARVSDASVVRLNRSLINQIKKPIEKLDLLIKEHIEQSPRLSAKAEKLTSIKGVGERTAALLLAQMPELGQLNRREVAALVGVAPFNRDSGKMRGKRAIYGGRRFVRHGLYMAALVAARHNPILRNFYLRLRAAGKPAKLALTATMRKLLIVLNSALKRDLRYA

SEQ ID NO: 320229 - protein, 380 aa, unidentified
MGSLRIDHSPQGLAKLNTFLQQIIGTEPKEQMACIIETSHGLLIAHLLEAGWPVYPVNPRTVDRRRSASGAKTDTIDAYLLAKTGRADWADLRRLSPDSEVVAELKMLTRDQDGLIKTQTRLTNQLTACLKAYYPVALELFSKLPQRTTLIFLRTYPTPHAAMGASSEQIGGVLKEAGHPTAKATASSIVERLHGPHLLADSVTTRSKSRLMLALVSQLLPLNEQIAQYDKEIDTLFLTHADQVIFSSLPRAGQRLAPRLLAEIGEDRQRYRDAASLQALAGTSPVLFQSGMYSKAHRRLGCIKPLRNALHQFAWQTTQSEAWARDYYQRKRAEGKSHTVAVRALANVWVRIIFAMWFNRTCYESAIFEQAQQQHARPAA

SEQ ID NO: 320230 - protein, 393 aa, unidentified
MICVGIDVAKDKHDCFILSSEGAILADVFTIPNNAEGFDTLLHTIRRCARPEDKIKVGLEATGHYSYNILGFLLNKGLPTFVINPLHTNLYRKSLSLRKTKTDRVDARTIAAMLISDVDLKSYTDTAYHNEELKSLTRYRFDKVRERAKLKQSVSRLVTILFPELEKLVPTLHMASVYALLSEFPGAKQVAEAHLTHLKTVLSDASKGRYRRDMATTLRDTARCSIGSVMPAKSLELRHTIRLIHELDAEIEDIETAIQSIMYEIHSPITTIPGIGVRMGAMILAEIGDFSRFDSPDKILAYAGMSPSTYQSGQLSLSGTYSHMEKRGSRYLRYALYNATKYVCLWDPTFAAYLSKKRAEGKHYNVALSHAAKKLVRLIYAMEKSQQSYRSAA

SEQ ID NO: 320231 - protein, 413 aa, unidentified
MNKRWDKACGADVHKRFIDATILTLDGTKKYRRFLTDIDSLLVFRDWLIEEDCQVVALESTGVYWIPINTVLEGIVKVLVANAYKIKHIPGRKTDIKDSEWIAELCINGMIEPSRIFPKKDRELRDLTRAREAIVNSRSQVKNRIHAILDTANIKLSSVFTDLFGKSGLELVTGITSGQSIEAIISGTNNRWIKNRAEEIRQAVKGTLGTAQTFVIKECLEVIKTIDKSVENITAEISSRMKVKNEDLKISMSIPGIGFVAGSTILAEIGDYRDFETPEKLAAWTGIVSSVYQSANKLSLGRITKQGSKHLRWILVEVANSVIKVKGRNKLKSFFLRVKSRQGFNKAIVALARKILCILHHLLTNRELYMEEGETWVKKSKIPKENVSGTMTADEMIKILSEAGYVVSKPVLG

SEQ ID NO: 320232 - protein, 419 aa, unidentified
MTTKLFAGIDISANDAVLCCLDQDGNQLGPSRKFANDLQGANELWDAITAFPVNEVHIGLEATSVYGVHLRDFLAFAKEVHPNWVVYEINPSLVAGFKKSFPKRPKTDHQDAWLIAERVRFGRIEPFSLRKITTAPLLQLTRHRLHLIELVTTEQNRACNMIFLKFSNYRKDNPFSNTFGKASQAILRDFSPDELVSMDMEQLVSFIAQNGNNRIKDVGQIAADLKNMAKRAYQLNPKIQNSINVTLTMTLHNIDFFKSQIKRLDKIIAQELQAIPQTLTSVPGIGPVWAAGLTAEIGDISRFRDEAALAQYAGLTWSRYQSGNFDAEERRLTKTGNRYLRYYLVEAANSLRVHNEEYKAYYQVKYKEVTKHQHKRALVLTARKFVRLVFALLSKGQLYTPACPPTGGQAGVRKQIDWR

SEQ ID NO: 320233 - protein, 338 aa, unidentified
MKITTIGIDIAKSIFHLFAVNQIGRLVKKNQLKRKQLLSHLAKIEPCLVVMEACGGANYWAREIMALGHEVKLIAPQYVKPYVKGNKNDYNDAEAIAEASQRPNMRFVPIKSIEQQDIQNFHRQRERIKKERTALVNQTRGLLAEYGMVINKGVAAVRRDLPLILEDAENGLNMLSRELFSELLDELRVLDKRFEDCEKRIKALNKDNEICQRLDEILGIGGLTASATYAAVGDGKEFSNGRHYSAWLGLVPGQHSTGGKPALLGISKRGNAYLRTLYIHGARAVLRYSATKQDSFSRWAQAVLARRGHNKACIAVANKIARMAWVIMAKGESYRTPA

SEQ ID NO: 320234 - protein, 346 aa, unidentified
MDTIGVDLHKRESQLCMLAPDGTATEQRIVTSRDRFTAVLGQRPPARILLEASTESEWVARHLETLGHEVIVADPNFAPMYATRTRRVKTDKRDARTLAEACRLGAYRVAHRVSPARRHVRAELAVREALVRTRTRYIALAKALVRRDGLRVPRSASHLVMQRIAALDLSPTLRAELVPLVHVLAPLNAEIAAADRRLVALSTDDPVVARLATAPAVGPVTASAVVATADDIRRFRTAHQFAAFLGVVPGERSSGEKRRVGAITKTGNARVRSLLVEAGWGLLRTRAPEAAALRAWGLAIAARRGKRIAVVALARRLAGILYAMGRDGVAYDARHLRARGRLPATG

SEQ ID NO: 320235 - protein, 414 aa, unidentified
MLVQSNQRSYCPTEFDIFLGMDVDKKSIDFTCSDSKRIIRSVHIPNHSDHLVSYVRRHFPDQKVLFAYEAGPTGYGLFDGLTAAGFVCLVSPASMIPTAPGQRVKTNRLDSKKITEALRAGQLKSLHVPSPTYRHLRHLTKIRDLVVRQIGGTKCRIKALLLFEGIPFPEAPRGGQWSRSVVAQLHQLRCSGAVRFRLDRLLEAFEFQRQQYLKITREIRKFCRQDPELKRCLSYLMSIPGIGQIVAPHLLARIGPWQNLQQHRVNELAAFLGLVPTEHSTGDRVHRGSISRSGDSRLRSKLIQSAWAAIRQDPELGEFYRSVYRRHPRQLAARKAIVAVARKLTTRIFAVLKEQRPFVVRPEIHSRPLLPGEIGPRERLDASQKEEDRDLPSFVRETEVLPGPPPKWGASKPV

SEQ ID NO: 320236 - protein, 403 aa, unidentified
MNAVGIDVSKGKSMVAALQPGGKLLARPFEVLHTKNGIKELVSFVRSLDGDTRIVMEHTGRYYEPMLQWLAASDLFVTAVNPKLIKDFGNNTLRRVKTDKADAKKIARYALDNWCDLRQHTGMDTTRTQLKTMNRQFAFCMRQRTACKNNLIALTDQVYPGANTYFESPARADGSQKWVDYVAAFWHVDYVCSMRLSTFTERYRKWCHRHGYNFQSDKPRMLWEKAKDLIAMLPMDKMTKSLVQTAVAQLNVLSKTVETLRTQMIELAEKLPEYPVVIAMNGVGATLASQLIAEIGDITRFPRRGSLTAFAGVDPGAKQSGTMQLRSNKTSKAGSPHLRRALFQIVSGLLMRAPDDPVYNFMAKKRSEGKPYYVYMTAGANKFLRIYYGRVNEYLAGLSKEQE

SEQ ID NO: 320237 - protein, 416 aa, unidentified
MPQAGRDGSELGSKDHVTDDETVDVYLGLDVGKGEHHATALTPAGKKAFDKPLPNTEPKLRELFAKLQAKHGTVLVVVDQPASIGALPLAVARDMGCRVAYLPGLTMRRIADLYPGEAKTDARDAYVIADAARTMPHTLRAIDPADETTAELQMIVGFDDDLTTETTRIKNRLRGLLTQVHPSLEQVLGPRLDHPAVLALLERFGSPAQIRKAGRRRLVTLLRPKAPRMAERLVEDIFTALDAQTVVVPGTEAAALIVPSLASSLTALADQRKTLAARIEELLEAHPLSQVLTSMPGVGVRTAARILIDVGDGTAFPTAGHLAAYAGLAPVTRASGSSIRGEHPARRGNKQLKRALYLAAFASLKQPESRAYYDKKRKEGKHHVAAIVALARRRIDVLFAMLRDGTFYQAPAVTPA

SEQ ID NO: 320238 - protein, 318 aa, unidentified
MDQPVIGIDVAKASLDAYVHPSGARFRVANDDLGIKTLLEQLKTFPQATVILEATGGLEFRVAAALASAGFPIAIVNPRQVRDFARAMGRLAKTDPIDAEILALFGERVRPEPRPIPDATLRSLEAHVARRRQLVDMITAESNRFGQATDPDIKKQIKRHITWLQHELKSVDTDLGDAMRHSPIWRAKDQLIQSAPGVGRVTSFTLLAQFPQLGTLRGKQAAALVGVAPFNVDSGTLRGRRHIWGGRASIRSVLYMATLSAVRYNPVIAEFYQRLLRAGKAKKLALVACSRKLLVILNAMLRDNRPWTPAHLDPQHGC

SEQ ID NO: 320239 - protein, 317 aa, unidentified
MIVLGVDIAKRKFDCALLNDGRFRTKVFENNAGGIEACLSWLTRHAGQPVHACLEATGPYAQALAEELYDAGHTVSLINPARSSAFAQSLGVRTKTDAVDARTLARMCQALVPEPWVPAPKSVRELQELVRRLDALIEMHTQEINRLAVAHEAVRGSIEESISFLDRAIAEIKQAIAQHIDHHPDLKAQRDLLDSIPGLGPVTCAWLIAELSAKRFACARSAAAFVGLTPAHRLSGTSVQGKPRLSKRGNARLRKALYWPAITALRCNPIVQALGARLTARGKHKMAIIAAAMRKLVHIAFGVLKSGKPFNPDLARA

SEQ ID NO: 320240 - protein, 368 aa, unidentified
MKIMTGIDLHSNNALCGLMDESGQRLVHKQLPCDLPAILQLLDPYKERIATVAIESTYNWYWLADGLRDHGYHVVLANPARMKPYDGLKHTDDVSDAFFLTELLRLNILPTGHLYDRKTRPVRDLLRRRLLLVHQRTSLILSFKSLNERTLGQRVALSRVKAMKVEEARALFTEPADQLLSGTEIELMGHLTGAINQIEAHVLSVAGKWSTYQRLQELPGIGKILGLTIALETGDAQRFAGAGNFASYCRCVKSLRTSNGRKKGENNRKCGNTYLAWAFVEAAHFACRYDESCRRFYERKKQQTNPVIATKALACKLAKAAWHVMAQDVPYESERVFGPGKKRDLEKTDLGETRREPAKGSGHPSQQN

SEQ ID NO: 320241 - protein, 332 aa, unidentified
MYYIGMDLHKQDLVMAVEDEHGPVGRVRRIACRDVAAIRAAVARWRPFRAVVEASASYRWLYDLLSPQGEVVLAHPLRLRAIATARAKTDKLDAALLARLLRANLIPAAYVPPAPYQRLRDLTRTRARLSCNATLAKNQVHALLARANVHPPLKTLFGKRGRKWLAGLDLGLSGNLARDELVRRLEHYGREIATLDAYLEGVAAEFPQAEALQVLHGIGRYSALLVVAEIGEPERFRNARQVGAYAGLTARVHQSGKTEHRGSISKQGSRWLRWILVQAAMKLVRRDERLANFYQRVRKRAGRNVARVAVARKLAGICWVRLRRWQREQAAA

SEQ ID NO: 320242 - protein, 438 aa, unidentified
MSNKFIFNLDDLFISVGIDVGADFSWMSIALPNQQLVGKPYKILHNQMTSLTTAVSKIKEAEELYSLESRIFLESTGIYHYPLFCYLRDKGFNCSVINPIITKNSTNINIRKVHNDRFDSKKAALVGLKPDLKVSLMPSDLALNCRNLCREYYDLMDNRSAYVNKLQGELRMAFPQYLGIFSKITANTSLTLLETYTSPSAFIEADPQEIIDTIKSTARFGAAYAAGKYNAIIQAAHDAHEFGYILDSNIKRIRLYISFIRKYDEEIKGILDAMHELVDANEGTDFVKQIHLIETFKGAGFLSAVTLMGEIGNFSAFSKPKQLFAYFGLDPAVKQSGKFEGTKIQISKRGSAIARRAIHTLTLQSISTSRTGEAKNPVLRDYYLKKCESKPKLVAMGAVSHKVCNMIFAILRDNKPFEIITPQEHIQQYNAAKCDIAA

SEQ ID NO: 320243 - protein, 388 aa, unidentified
MVFKKPFRVENSLDGYSKFIDKLTKISSKTSEFIIGLEATGIYGENLWEFLNSKGYNVKLLNPFQTSRYREQITMKKVKNDNIDSLIIALLLKDGKFSSGYVTDDEYQSLRTLYRNRASIQSDMKEVKKRILTQVTVTFPELENFIDIFTVSGLALLNKYPTAKHYERSSVDRILKVFRHIQGNNFNQTKALEVLNLSQVSVYSGKAKDARAIAIRSSIRLLKMYQEELSIIENEITILLSKNSTSSKEDETTEPNTLIQNLKTIPGVADKTIAAILSECGDITRFNNVTKFIGYLGLFPTENSSGNSTKTGHLSKRGSSLVKHALYMSSVSCLVHNSQLKQLYDTKRSQGKSKQEAIVVLSRKLATIIYAIFKYNTPYNPARVFAKS

SEQ ID NO: 320244 - protein, 309 aa, unidentified
MKEELVYLGVDIAKAYLDTAIGNEKSRFSNDALGHRQLINWIKQMPAKVQVICEPSGGYERALVRALVGAQLKISLVPANRVRQFARAKGILAKTDRIDAKLLCAFGEAMQPGTISASQLEQQHLRELESQRRHLTHLLVMEQNRAARMSDLCVCKMNRCLITQIKKQIEQLDLLIQGQIKASPELSTKAEKLTAISGVGPRTAALLLAQLPELGELNRREIAALVGVAPFNRDSGRMRGKRAIYGGRKPVRHGLYMAALVAAHHNPILRNFYLRLRAAGKPAKLALTATMRKLLIVLNSALKTDLNYA

SEQ ID NO: 320245 - protein, 476 aa, unidentified
MEKKVLDKREEVINLLKKQKIREVKDLDAYKLSICHPHSAGIDLGSRELYLALSPEIAAEMGVEIVHRFQTHTSGLTSCRDLLLACGVNTVSMESTSVYWTTIYEILQDSGIEVCLVNPKKFRMVPGRKTDILDCQWLQTLHLYGLLRGSFHPTSEIASLRSYMRERENLIQERSRFVQRMQKALTQMNLLLHNVIDDITGKTGLLIITSILKGERDPKKLAAHRDPHCKKSEEEIAESLTGYYKEDQLYLLQSNYDSYLFFEKQLNAIDNQITKTLQKFPIKKEQKEVRPDNGKKGKSGRGKNSIRTTKNLEDILFHITGADLSALPGLRANAILQIISEVGIDMSKFPTANHFASYLGFVPHNKITGGNIISSRTDRIKSSAAQAFKKVIPSISQTDTALGSFYRRLMPRLGKGQAIVATCRKLAILFYNTLAFGGQYVEYGEAQYKQKQEEWEKKKLAKLAKKYNLALSPNIE

SEQ ID NO: 320246 - protein, 348 aa, unidentified
MRTYIGVDYHLKYSYMTVMDEQGKIIDQRQVANNAEAVKLFLNRAGVNGESAAVMEATRNWTVMHDWLEELVDEVHLVHPLKVKAIAEAKIKTDKIDAKILAHLLRSDLLPEANVPAPSAREARNVLRQRIRVRTMIKNRIWGLLDRYPDLVDSRPCKELFSKQGLAWIEALSLKERDREMLDEDLKLYDALEERISQSERLVQKMADGDRRVELLRTIPGIGKFFAVLIANEVDDIRRFATEKKFFSYIGIVPSTYSSGGRTFHGRLTKQGNKYLRWALVEAIWPAVRSDPELGAYYQSIKAKKGANPAKIATARRLATIIYRVLSRDRSYSVNGSRLPSRCLGGPA

SEQ ID NO: 320247 - protein, 310 aa, unidentified
MDATFVGIDVSKDRLDVHVRPSGEAFAVPRNGKGLSELVERLRSIAPAPIAVEATGGFETIVAAAIAGAHLPLAVVNPAQVRYFAQAVGRRAKTDPIDAAVIAHFAEAVKPEPRELPDEAARLLAELVSRRAQLIEMVVAERQREKRASSVRVRKSLARHIAALEKELPVIDRDINTMVRGSPLWREKEDPLVTFPGVGNTIARSVLADVPELGRLDRRKIASLIGVAPFTRRSGKWKGKSMIGGGRPAARSAIFLAALSAIRCNPVLRAFYQRLLAQGKPKMVALIAVARKIVTILNAMLRDKKQWQPA

SEQ ID NO: 320248 - protein, 402 aa, unidentified
MNAVGIDVSKGKSMVAIMRPFGEIVSTPFEIKHTTSDINSLVELIKSVEGESRIVMEHTGRYYEVLAHQLSEANLFVSAINPKLIKDFDNDSLRKVKSDKADAVKIARYALDKWQNLKQYSVMDELRNQLKTMNRQFGFYMKHKTAMKNNLIDILDQTYPGVNTYFDSPARSDGSQKWVDFASTYWHVDCVRKMSLNAFVDHYQNWCKRKKYNFSKSKAEEIYGKAKELVPVLPKDEITKLIIKQAIDQLNSSSTTVESLRTLMNETATKLPEYPIVMAMKGVGPSLGPQLMAEIGDVSRFTHKGAITAFAGVDPGVNESGSYEQKSVPTSKRGSSDLRKTLFQVMDVLIKTHPQDDPVYQFLDKKRAQGKPYYVYMTAGANKFLRIYYGRVKEYLSSLPES

SEQ ID NO: 320249 - protein, 414 aa, unidentified
MEKQWNIVCGADIHKKFLIATILSRDGTKITKRFGMTLDELLNFKNWVIENGCEQVAVESTGTYWVPIHTVLEGSIGLIVGNAYKIKHTPGNKNDLGDADWIAELCLNGMIEPSRIFPKADRDLRRLTRIREGYVNDMTREKNRIHNALESCGIKLSSVLSDIFGKAGQSILSGLLEGRTIDDILKGVNLKRIKATAEEIREAIKGSLDFTQILLIRGSLEQMEAIQKRIDEICKEIKSRIAYRKEDLKIAMSIPGVGFTSASTLLAEIGDITDFKKPEQLAAWAGLVPSVYQSAGKLITGSITKHGSRHIRWILVQVARVIARGRNSKLKRFFLRVKSKKGSNVAVVALARKILCILHHLLTNREMYKEDGINKKIKIDIGNEFSQREMDLEEMIKYIVRAGYEVRKGSAGGG

SEQ ID NO: 320250 - protein, 346 aa, unidentified
MEHYAGIDVSLELSSVCVVDAQGKIVKEAKVASEPEAVVAFFEALGFAVKRIGLEAGPLSQWLHAGLKEAGFETVLLETRHVKAALSAMTVKTDRKDARGLAQLLRMGWFQQVHAKSMASQEVRALLVGRKQLLGRLIDVELSIRGILRGFGLKVGAVTRKGFEARIRELVTGQATLERIAEAMLSARAALKAEYEKLHKAVLAIVREDAVCRRLMTVPSVGPLVAITYKSAMDDPSRIAKSKAAGALFGLTPKKYQSGEKDVTGGITRTGDEMVRTALYEAANVLLSRITRFSKLKRWGMDVAKRRGSKRAKVALARKIAVILHRMWIDRTTYRWAEAKPIAAQA

SEQ ID NO: 320251 - protein, 424 aa, unidentified
MKKRSYRSVSVKVVDTKQLCQELAGKRVVVGTDVAKEKFMAVLMTEDQQVGSTVRWNHPKETPLLIGLLVELKNSGAEIEVVMESTGSYGVAFQYALRKVGIPIYQMGAKRVHDAAEVYDGVPSKHDPKDAAIIAKLHLDGLSKPWPAPSDEQRELGAAVAIMRVFQEQASIQVSRLEGLLAMYWPELPRELELGSAAMSRLILKFGTPAEVSKREDEARKMMRRMCCPAEWEKKIERVIESAKTSLGVPPVAGELEALQTLVMDMNRAQRAYRQRRKVVQEMGQQNEAARNMSTVLGKTTAAVIVSEVGDPRDYSSASAYMKAAGLNLKERSSGEHKGQVKITKRGSGVARQYEYFTVLRLIFRDEVVKAWYLRKVERDGGVKMKAIVAIMRKLHRALWYVARGALFDSTKLFDVRRLGLVAS

SEQ ID NO: 320252 - protein, 314 aa, unidentified
MNDTSMICAGIDVAKGKLDIALHPTGKHLQVTYDAAGLKRLDAFLVKHGVGRVGFEASGGYEWRLLVHLRASPVPAARFQPAQVRYFAKSRLKLAKNDKLDAALIAAFTANLDALPALPDARFDTLNAELTYLEQIEDQVSVLKTMAETTRAPSLKRLHEQDIARLQKRREARMLLIAALVAKDDELARRRALLVSIKGIGLRTALALVIRLPELGSLSREEIAALTGLAPYDDDSGKRRGRRHVRSGRARLRKSLFMGAFTASRCNPDLKTIYQRLRKNGKHHLLATIAVARKLVILANAIVARGTPWTPTHA

SEQ ID NO: 320253 - protein, 325 aa, unidentified
MEAKKLCCGIDVSHITPDVCYQNNLGELFHMQVGNNIKGFEKILEHTGTDYHFVMEATGVYYIRLAFHLQQQGCKLSVVNALSIKRYIQMHLERNKSDKKDAGWICRYAIEQRPPYWEMPDSAYFESKQLYNTIREYAEQIKRFNNQLHSLRLLPIPSKDTIKSLEKMKQILNREMDHLESKLEALLQQWQPDQLKSVSSIKGIGKRTTAMLIVFTQGFKYTNNHRQLISFAGLSPTEYSSGTSIQGKPRIYKKGGKNLRDVLYMCAMNAIKTNNACKALYERLRKNGKTGKQALIAVCNKLLKQVFAVVKNNSIYQPNYCSAKP

SEQ ID NO: 320254 - protein, 338 aa, unidentified
MKFKRVAIDTSKHVFTLHGVDEQERPVLRRELRRDQVEAFFSKLEPTEVVLEACGGSHHWGRLLARLGHRVRLIPPQYVKPFVKRAENDRADAEAISEAASRPTMPSVAVKTAEQQAGAIILKHREMLVAQRTQAINALRGHAAEFGVIAAKGTAQVQALLDKLAATEAIPAVARAMFAQMGAHIAALDQQVAALDADLAALHKATPVSQLLAEIPGVGPVTAITLALSIEPGSFASGRHFAAWLGLTPKEHSTGGKHRLGRISKAGNERLRQLLVVGATALIRCAKPGSKSASAWLLQLLERKPRKLAAVALANKMARIVWAMMARGEAYRRQPTAA

SEQ ID NO: 320255 - protein, 315 aa, unidentified
MDAILERCTGLDVHQDNVVACFLFGPLDKKPSKETETFGTTTKELLRLLDWLQERECSHVAMESTGVYWKPVWNILEDNCRLTLANPERIKNVPGRKTDYNDAHWIALLHRCGLIEPSFVPEQAVRDLRDLTRYRRKLLQNVTQEKNRVHKILQDANVKLTTYLSDIFGVSGRALLESVANGEKLQEEGIRSKVKSTVKRKVPELVEALNGRLRPHHRKMIHRHLDHIAYLQHEIGELEREIHSMLMPYREEMDLLDTIPGIDQEAAASILAEVGPDMTHFPTDGHLASWAGVSPANHESNGKKNEKRTEGAIKG

SEQ ID NO: 320256 - protein, 423 aa, unidentified
MMNKDANRFERVIGLDAHPDTFTAAVLRGQTPAQALTEKVFNKVSMSQLQSWARKHTTGQDLIVLEASGNSFQVARSLAAIERRALVLESCQMGKLKEAHASNDKISAVRIGKAYLAGTAKTVWLPDTQTQERRDWFHAYRKATKRLTQMRSRLQSYLSDNGVRFKKGTSLTQPNDAEAQLRKAREWSVRQWAVIEGMLTELRHAEQQRKYWRSLIAQEVLADPLLLSLVRLCGVKEVIAFALGALIGDINRFVRPGSLVKYVGLNPAFDDSGKGKWSGGIGGHGRKDLRGLLIQGAQAILRSKEPLAQWGKRLMARKGSLKLAVAAVARRLTVAIWYLLKGQWTRVEDIDRKLTAKLGTIITRMGKEALIKTGKTPQTLRQDCYQLLKAGRTYLLNPNKKFTGKSQPDSPGCRVRIGVSFSL

SEQ ID NO: 320257 - protein, 360 aa, unidentified
MKVQRTSVGLDVHARSVVACGLDGETGELFERRLTPDHGEILAWLGDLPGPVAATYEAGPTGFVLARSINAAGIRCSVAAPSKLQRPVGDRVKTDKRDARHLARLLHLGEIVEVEIPGVEQESARDLFRAREACRKDLMAARHRLSKLLLRRGIVYYGGTAWSRNHERWLQSQRFDDPALAIAYDTAFDTVLTTTARRGRLDAAITAMAADSTFTPVVTRLGCLRGVSTLTAFGLATEIGDWHRLSGRSIGAYLGLVPCEYSSGDNRVQGGLTRTGNGHARRLLIEAAWHHRPSYRPGEVMRRRWDAAPPAARARGQAANRRLHARWLRFNERRKRPVVANAAIARELAGWCWSLAVMDD

SEQ ID NO: 320258 - protein, 374 aa, unidentified
MPNSITYVAMDTHKKQHRIALKFPGQEHLIEMSILNNVREITKMVKKIIKKAPGPVTFCYEAGVCGFTLKRRIEALGPRCIVIAPSLVPKKPGERVKTDRRDARKLLELFQANLLTEVQAPDEKQEADRELTRLRETAMENLKRARHQLLKLLTRHGYVYTDGKHWTQRHLLWLRGLEFHLPQLRKVFDSYFDEMTYGLRRLESLDHEVEQLAHQPEYRDIVGALCCFHGIQTLTAITLLTEIFDYGRFATPRELMSYLGLTPSEYSSGDRQKKGSITKAGNKRIRRLLNETAWHYRHRYLPGKGLKLRRKGQPQWAIDIADKAGRRLTRRHRHLIEAGKMPCKANIAIARELAGFIWALMREYEAQKTKNEVA

SEQ ID NO: 320259 - protein, 343 aa, unidentified
MKLMRIGVDLAKNVFQVHGVDCHEKPIWRQRLQREHWLQTLLAKIEPGCEIGMESCGGAHHWARQLEARGYRVKLIAPQFVKPYVKSNKNDANDAEAICEAMSRPSMRFVSIKTVEQQDIQATHRIRSGLIEQRTAKANQIRGLVSEYGLVAPKELLSLRRAIPCWLEDAENGLTLRFRHLLDGLWGDLRALDERVKELDSEISVIAASEPDAQVLQQLRGVGPMIATALIVAIGDARQFSNGRQFAASLGLTPRQHSSGGKDRLLGISKRGDTYLRTLMVHGARSALRTAKSKEDRLSQWAVRLAERSHANVAAIALANKTARMAWAMLRNGTDYQPDRAAA

SEQ ID NO: 320260 - protein, 399 aa, unidentified
MFYCGIDIAKYKHEASVIDINGKTLLDSIPFSNDKQGCGKILAVFEKFEIAPDDVIIGMEATGHYWLSVYAFFLELGYTVKVINPIQSEAFRKMYIRQTKNDSKDSYIIAQIMRFGEYSATSLSEENIIALRQLSRYRLALVDACGDCKRRVIALLDQVFPEYDKLFSDTFGSSSTELLLNCPTPEDMLAISTRKLTNILNKASHGKFGKEKAEELKAAAKNTFGIAFAKDAFSFQIKQLMQQVVFLENQLSELEEQISNLLHETNQYITTITGIGDVLGAIIVSEIGDINRFERPNQLVAFAGLDVTVKQSGEFSGTKNKISKRGSPYLRRAIWLAAQRAAFCDPVLSEYYQSLRARGKHHLTAVGGVARKLCNIIFVILKENRPYLPTPTKNPKNLS

SEQ ID NO: 320261 - protein, 362 aa, unidentified
MGEVIVVGCDPHKLSLTLAAVDGLGVELDVLSVANDAAGIADVLQWLGSLGAVTRIGIEGSAGHGQQLAVALVDAGHDVREVPARRTAQRRRERRRPKTDREDALAIARATAADPGLGPVRAIHGDPVLAELEAVNSWRDELVDRRKRLLNRAEGILSALPVELLDEIGRKGATIARARAAAAVTATTPTPAAAIRLRHLTEIVADHDELTARIKAVEVDLRRLVRTTGSTLRDETGIDWVLAARPLVEVGDPTRFRSESAFARWCGSAAVAVSSSEGGGSPTRHRLDLGGNRRINSVLHIASVVQGRVHHDARAFIARKRSQGKTAKEARRAHKRHLANRIIRRMWQDHANRTGRTLDAAA

SEQ ID NO: 320262 - protein, 334 aa, unidentified
MGKITTVGIDLAKNVFSVHAIDDAGGVVLRRVLTRAQLPAAVAQWPACVIGIEACSGAHDWARRFQQFGHTVRIMAPRFVSPYRKSGKNDGNDAEAICEAVQRPNMRFVPVKSVDQQAVLALHRVRHGFVEERTATINRVRGLLAEFGVVLAHDARHVRHAATAAAETLPILARHCVEDLRDHLRVLDERIAQYDKELEHLARSDEAVVRLMGIAGVGTLTASATVASVGPAREFANGRQFAAWLGLTPKQWSTGGKSRLGHITKRGDPYLRNLLVMGARAVLQMATRRDDKMSRWALALKERRGYHRAAVAIAAKNARIMWALLAREATFKAA

SEQ ID NO: 320263 - protein, 339 aa, unidentified
MELYGAFDLHSNNNYLGIIDSNDNRIYRKKLPNDPQTILTVLEPYKENLAGLVVESTFNWYWLVDLLMDHDYSVHLANPSAVKKYEGLKYSDDNHDAFWLSHLLRLGILPEGYIYPKNERPIRDLLRKRSHLVKLRTSLILSLQGIISRNCGVKINAKQIKAVKENNVSPLLVGDEDLELSGSVSKETIDFLSRKIRIIENSVKKKVKSKKSFKCLQTISGVGDILSLTIMLETGTISRFPKVGDYVSYCRKAPTGWTSNGKSKGKGNKKNGNRYLAWAFSEAAEFARRFDENARAWYNRKSAKKNFMVAHSALSSKLARAAYYIMKNNVAFDPGKLFS

SEQ ID NO: 320264 - protein, 317 aa, unidentified
MGEAKLDKYVGIDVSKTTLDLMVRPTGTRQQQANDADGIAQLVKQLRQLRPALVVCEATGGWERLLVGALAAARLPIVMVNPRQVRDFAKATGRLAKTDRLDAEVIARFAEAVQPEPRALPSADAQALDELVTRRQQLIDMRTAEGNRRRLAAGRLREQLDEHLAWLDRQLHDLDKELDHTLRSSPVWREQAVVLRSAKGVGPILTATLLSALPELGHLNHKEIAALVGVAPFNRDSGMWRGKRQIWGGRGPVRAVLYMATLSAVRTNPVVRSFYQRLINAGKLQKVALVASMHKLLTILNAMARDGRTWQPTKITS

SEQ ID NO: 320265 - protein, 339 aa, unidentified
MQEKKKMIWAGFDVGKETFSASLDQVTENGKAKITSLPCRDFKRTPEGLAKFFQWADGIISGMDLHIVMETTGCYSQQLTDWINLNYPEVKVTIENARNIHAFIESLNLPHKTDKLDAQAIARFGAERQPHPTKRPSKTILTIRELSRERTALIKNRVDLQNRRDTITSSVVRKINAQTIATLTMQIEKIEQEIKACIVEDEEILTEIHIMTTMPGVKFVSAYSILAEIGSLKQYSIKELSAISGLAPRIRQSGSSVHSSFMSRRSSGRLRQILYLDSLPGVPKIPVLQDFQQRLLAKGKTKMTVRCACMRKMLLMLRSMVVHNRAFDEKFLKNLSIRT

SEQ ID NO: 320266 - protein, 307 aa, unidentified
MFVGIDVAKDRLDVHVRPSGETFDVARDGEGIEELVRRLSVGVPTLVVVEATGGFETIVAAGLAAAGLPVAVVNPRQIRDFARATARLAKTDTLDAAVIAHFAEAVKPPPRPLADPQTQLLGELMARRRQLIEMIVAEGNRRRLLTARRTLKSVDRVLATLKAQLQQIDDDIDTAVRGTPAWREAEDLLISVPGIGPRIARTLIAEMPELGHLDRRRIASLTGVAPFNRDSGTLRGRRTIAGGRTVVRSALYMSILVSIRRNLPLAETYHRLRATGKPAKVAIVACMRKLVTILNAILRDRKPWADA

SEQ ID NO: 320267 - protein, 374 aa, unidentified
MLSARPAGACRPPPDQQKELAITTIAHPERPRVTVGVDTHLDVHVAHAKDQLGRRMETVSIPTTPAGYQDLLAWARGLGEVEAWGVEGTGCYGAALTRFLGDQGQVVLEVNRPDRQARRRRGKSDPVDAEAAARAVQAGEVTTLPKAGTATVEMIRSLRVARQTAVKARTQAINALKALLVTAPAQLREQLRGRSAAMLVRQAAALEPGPLVTPTAAAKLALRCLACRYQALHAEVATLDAELARLVAKAAPGLVARFGVGPDSAGALLVAAGDNPGRLRSDACFSMLCGSSPIEASSGKTRRHRLNRGGDRQANAALYRIVVVRLRWHQPTKDYMARRLTEGKTTKEIIRCLKRYVAREMFTVLNQTVPTPAT

SEQ ID NO: 320268 - protein, 386 aa, unidentified
MNADKSEPLTAIHTELGAIFVSLELSRSSWLITSLSPGGGEKMSKHSVPGGDFAGLMERFAQLQEKARLRTGQSFRIIVVQEAGLDGFWIHRALQNEGIESHVVDAASIATSRRRRRAKTDKIDGETLVRALLAYKRGEPRVCAMVKAPTPGEEDRRHLCRERKALTAERVRHVNRIKGLLFSQGISGYQPLRRDRRQRLEELQTGDGRAFPQHLKALVNRELDRLELLLKQIKTVEAARDALLAVGQTAKPAPAAMLLDIRGIGPEFAAILWSEGLFRHFENRRQIAAYAGLAPTPWQSGAVDREQGVSKAGNPRLRTTLIQLAWLWLRNQPRSALSLWFHERVRRNGGRLRKTTIVALARKLLVALWKYVTAGVVIEGVTMKVA

SEQ ID NO: 320269 - protein, 429 aa, unidentified
MRTESTPGARGPVFCGVDTHADSHWLCVLDWRGRKVLSRQFPADAAGYEALAGAIAAAGEPACVAMEGTSSYGAGLTRHLASLGMPVREALSPARMQRRRPGQGKCDEADAERAARAAMSGSGLGTPKSQDGWVDGVRCMLAARSGAVKARTSAINTARSLLTTAPEGLRSRFRGMGGPRLMEELPSVRAEGALGAALGALADLWEAARDAALDMERAIEASLEENCPALLAMYGCGPVSAAKLAVAAGDNPGRLRSEASFAAICGACPIPASSGKTVRHRLNRGGDRQANSALHEIARQRVMRDPETAEYAERARGRGKSDREVMRCLKRYVAREAYRALMHPHEIRRPEDASELVAARRAAKVSQVRAASILGTSEKYISMLERGQRELKPIRRAYEAWVEAGLPLDWDRRAFEAERKMDSKKHLAK

SEQ ID NO: 320270 - protein, 327 aa, unidentified
MRYIGIDVSKATFSVAYPLLKGGYKPREFKNTAKGVHEFIRTLEADDHCVMEATGNYSYLLLYLLNQANITTSMENALKVKNFARTMLSVTKTDKADAQLLSLYGERMRPAPFKMPSDAILLLKQKRAALRQFQKQLHSTTNLKKSLEALPQKDAATFKAIDKIIETLEKQIRKVEEDLIVLTQKEFERQMQRLTSIKGVGVSLAAAIILATGGFTYFDNAKQVSRYLGICPTYQQSGTSVHFKGHINRNGDAHLRSQLYVAAWSMSQHNAECNKLYMRMREKGKSGKLIMIAVANKVMRQCFAVVKHDTDYVDGFVSQKPQSSNFN

SEQ ID NO: 320271 - protein, 346 aa, unidentified
MLIVGCDYHPRWQQVAWFDTETGEIGEQKLVNGDGEAARWYGQLPVPSLIGLEATGNSQWFLDLLNQLGHEVWVGDAAEIRASYVRRQKNDRRDAGHVLKLLREGRFPRLWVPSAEQRDLRQLLIHRHKLVQIRSRVKNGLQHLAMNQGMQKKSRLWSVAGQKAFRQLPLVGWAQCRRQDLLQLLVYLDQQIAPLDQAAQQAAEQDPQARLLLSQPGVGPITALAFVLTIGDVTRFPRGKQVASYLGLIPREHSSGGRQRLGAISKQGNSFLRMLLVEAAHSVVRLDEGFRKQYAHRCHSKPKGIAKVAAARRLAVRLYWMLRTNTPYPEIVRIESSPRVPLVGKS

SEQ ID NO: 320272 - protein, 353 aa, unidentified
MKSRMESKMSSPVVIGVDIGKDVFHLVGFTADGKIAFRRRIKRLALKDVFEKLPPCIVAMEACLSAHFVSRTLRALGHEPRIIPAIYVKPFVKGQKNDYNDAEAIAEAALRPNLRFVQEKSQDQLDLQACHRVRSRLVSRRTATINQIRAFLIEQGIAVRAGPRALRKSLFPILENRKDEISPRTAKLIRGLYDDWCCLDERIETVTGEIEILSRSEAKCRQLMSVPGVGPLISTAMVAAIGSGEAFERGRDFASWLGLVPRQYSTGGRSILGRISKRGSKYLRTLLIQAAKVLLMRPHNWARYSFGPWLNAASERLHSNKLAVALANKLARIAWSVLRNDKAFDTHLEVAAI

SEQ ID NO: 320273 - protein, 336 aa, unidentified
MSSIPVHLGLDYHQSVVQVCVMDAAGQILANRDCPNQWEAIARLGARHGQVAGAALEACTGAASLADELVGRAGMPVQLAHPGFVSRMKHNPDKTDWGDARLLADLHRVGYLPQVWLAPPEVRELRRLVRYRQQLVHECRNRRLRITALLRDQRVGPGPGRRWTLRWLHWLRQEASLTRHGRWVIERHLKWIDLLTREILLVERQLSRLTAKDPIVQQLLNQPGIGPVTAWVMRAEIGRFDRFRSGKQLARFCGLSPCNASSGLRQSDAGLIRAGNRYLRATLIEAAHRLRRYQPRWKALGDALEARGKPASVVAAAIANRWMRWLYHQMVSQPAA

SEQ ID NO: 320274 - protein, 410 aa, unidentified
MEVIYKRCCGLDVHKEIVVACLLIREGGKVLKEIRTFLTMTVDLVVLHDWLKAHQVTHVAMESTGIYWKPVFNLLEDFTVLLVNAAHIKTVPGRKTDVKDCEWIADLLSHGLLRGSFIPPEPIRDLRDLTRYRKSLTDERVRQVQRLQKFLEGANIKLASVATNVMGVSGRAMLEALVSGSTDPQVLSELAKGRLRKKLPELKKALQGRFRSHHGFMVAEILTHLDFLDEAIERVSQEVSSRLVPFSKIVELMDLVPGINQRVAEGVLSEMGVDMSCFPSHRHAASWTGLCPGNNESAGKRKSGKTRKGNQWLRRYLIEASWAAVRKRGTYLSALYYRLVPRRGKNKAIVAVAHSLLVMIYHILKDQVPYHELGSDYFNKLNAAYVQRHHVKRLESLGFKVILEPLPKAA

SEQ ID NO: 320275 - protein, 421 aa, unidentified
MKNNAARKLRQVPVGYLRVGVDPHKKRHVAVTMTEDFLVQGKFKFDNTRNGFEEALERARADMEKAGCHGVIFAIEAASHLWRNFAYFLDEKGIFFRLINPFSLKRRREGKDLNRRKNDFRDAEVAAQLLCTGEFTETTLPQGVYAELRSTYNAYRRMVKERSRLINLLKGLLDGLFPEFTQVFKDLSGQTALRVLSVCPIPGLISVMTEDEFMKFVREGYQGRLMIGKLLALHYAARHSSGIRVAARSVSFEVSLLVERLCLVGRHIRQIEQTLARLVDEAEEGKYLLSITGLGYISVAGLLAELGSFRSYRDARQMIKMAGSNPTESESAGKRKSRTPMSKKGRPGLRHCGWMAVVSLLRRNPDFRAWAKRLRERPAHANPLSGREIVGAGINKLLRVGFALVKKQTFYQTPQVARLVS

SEQ ID NO: 320276 - protein, 439 aa, unidentified
MSNLNKQKEATPFAAHIGLDWADQKHFWAMRTAEGTQHCGPLINTPEAIQVWAGELAQRFGGQLIAVALEQSRGAVIAMLSKYAHLVLFPIHSTTVANYRKAFCPSGAKSDPGDGRLILELLWTHPDKFRGLYPDTVETRKLQFLTEERRQLVNQHTSEVQRLISWLKQIFPQIVTWFEKPSCEMVGDLLKRWPTLEALQKASPKVLRKFFHQHNCRSEERIEERIDQIGHAVVATTDEGLLQTGLLCIRHSVAMLEILRASIETFDQQIAEVYQNHPDRFIMESFPGAGPALEPRLIAAVGTMRDRFHSANTLASFSGIAPVTESSGKSVWIHWRWACSKFIRQTFHEWAGCSIRSCDWARAFYEKQRGKGKGHHAAIRSLAFKWIRIFFRCWRDRVPYSEELYLKALQRHAPKPTSAPVEITWKTAAGFAKLSALSS

SEQ ID NO: 320277 - protein, 343 aa, unidentified
MNELYYIGLDVHKKSVSFCTKTKDGTIVARGTVEATRAALSDWARSIQHPWVGALEATLFSGWIYDHLQPFTRELQVAHPAMLKAIACGKKKNDRLDASKICDLLRCDLLPRCYMAPPAMRDLRRVLRYRNLLVSEAVRMKNKISGLLLEAGEPYEAKRLHQRGYFYPYLDSLTNTPESVIELLAITRGSLEMFDGLQEQLLRGLERHPLLEQRVERLRSIRGVGEITALSWALEIVEPARFGSLRRAVSYCGLCAAQRESAGKQQRGPLSKQRNKHLQRVLVEAAKVAPRWSEPLRRVHERALDRGSRNRATLAVARKMVAYLWAVDTSGRPFTPPVEAAAA

SEQ ID NO: 320278 - protein, 314 aa, unidentified
MSAKIFVGMDVSQGCVDVAVHPGTAFQFPHDERGIAEAVERLHALHPTLIVLEATGGLEVPLTGALAAVGLPVVVINPRQVRDFARATGQLAKTDRLDAQILAWFAEAIRPPVRPVPNEQTQALAALVARRRQLIEMLTAEKNRLRLAAQPIQKRLRAHITWLEKELASTNTDLEATIRVSPVWREKEEVLRSVPGVGPVLVTTLCANLPELGTLTRKEVAALAGVAPFPRDSGTLKGRRAIWGGRAHVRAALYMAALVTTRRNSVIRAFYQRLCQAGKAKKLALTACMRKLLTILNAMLKSGMPWRMAVSQPA

SEQ ID NO: 320279 - protein, 396 aa, unidentified
MQAWRAPAQSAAKFSATRQRVSLVSWLCALEEAKQSGYEIIVSLGQSVKLRPFGVRSVAAMCLFNSNSYKSDGTPEVLVSSYLQGGVSHVKEHVVYCGIDVAKGQLDGALLGKRWQVPNTKAGIRRLIKMLRQRNTCPQVICEASGGYEQDLVELLHQAAVPVTLVQPQRVHQFARASGILAKTDKIDAQVLVRFGQALAPAPNAAPGAQTLLLRELDRQRAHLSGLLVAEQNRRAQLRDPSLRQLSAQLIKQIQGHIVRIDARTQAIIAADQELKAKAKMLTSFSGVGLRTATMLLAQMPELGQLNRREAAALAGLAPFNRDSGTWRGQRRVCGGRSLVRRGLYMAALTAARRNHILAPFYQRLRAAGKPPKVALTAVMRKLLIALNSALSPTPA

SEQ ID NO: 320280 - protein, 345 aa, unidentified
MTNILKQVLGIDVAQKELVVSLGRMNSNLEPEIYAFKTFANKLSGFEALLKWIKKHGSSDLPVRFVMEATGVYHENLAYYLSDQGHEVSIVLPNKISNYIKTLEIQTITDKTASQAICQFGLEKKLSFWERPKEIFREMKQLTRERDQIIAERTVAKNQLHAEKAEAFPNERSIARLKQRIQLFNTQEKEIKSEIAVIVRKDKELIEKINNVTTIPGVGHLTVAIVLGESNGFNLVKNKKQLVGYSGMGVKEKQSGISVKGKPRISKKGNRHLRKAMHMPSLTAIRIDDHFKSIFVRLVSKHGVKMKALVAVQRKLLELIFILWNTNTKYDKDYFKKIISDNAAA

SEQ ID NO: 320281 - protein, 419 aa, unidentified
MKGNHTKKVKHINNKTLIVTLDIGKTVHYGYMRTPTGEEVKSFPFHNARKGFNELWDNVCQFKKAQGLKDIVVGFESTGPYAEPLFHFLRNKPVHLVQVNPLHSKKLKELTGNSPCKTDKKDPRVIADIISLGHALTLVVPQGAAAHLRRLTQARERAVQRRTAMLNQMQHLVFVFFPEFLNVIKNVHSKTSLYLLQNHPTPQDIVALGRELLTVTLRRVGRGKVTRERARQLFEAAQVSVGITEGRDSILVEVSHLIAAIEHEDHLIHDVEEQMNYYVKQIPYSHSMLSIKGMGIITVAGLIGEVGNFEAFSTIAEIMKLAGLDLYEVSSGNHRGQHHISKRGRALMRKLLYFAALSVVRKQGIMHEDYQKMLVRGMPKIKALVAISRKLLRLVFALVRNRTVYVTNYNQTRILERAA

SEQ ID NO: 320282 - protein, 344 aa, unidentified
MQATTIGIDLAKNIFQVHGADAHGKKIFNKALKRDQMAAFFVNLPPALVGMEACGSAHYWARKLQSMGHTVRLMAPQFVKPYVKGNKHDAADAEAICEAVTRPTMRFVPIKNAEQQAVLSMHRARQGFVRARTAQANQIRGLLSEFGLIVPQGIAHITGRVPPLIEDASNELPGGLRILIDRLLEHFKALQAQIQQLEAQILAWHRSNPASKRLEQIPGIGPITASALIASLGDARSFKDGRQVAAWLGLVPKQHSSGGKQNLLGISKRGDTYLRTLLIQGARSVIYHADRPSQEASATCQWVCRVAQRRNKNIAAVALANKNARICWALLTGDKDYDERSQTA

SEQ ID NO: 320283 - protein, 427 aa, unidentified
MKKIKIDYLSTLFVGIDIGSRTNVISALNFDQDFLIRMLPVANAQGGAEQMEEMVAQVLSQHHEFRAVIIGLESTGFYGVHIANYLSTSEKLAPFSTKVYCLNPNEVKQYKKSFNSLDKNDGIDSFVIADFARVGRIHTEPWRGAQYLALQRLTRHRLHITECIAREKTYMLNNIFLKFSEFAMLNKDEHPFSDKYGATAEAVLTDYLSTEDIVDASVDDLVAFISSKSRGRISDPEQTTYLLQKAAQDSYRLDKCLYEPLTVSIGCSFNCISAFEKELKAINGAIQRAVKGLNPTEYQILTSVPGIGPVYASGILAELGTIKCFKSNDALAKYCGIVWKENQSGEFQAEDTPMNKAGNRYLRYYMIEAAGSVIQHCPEYKAFYDKKFAEVRTHQHKRALALTSRKLIRMLFGLLANGKLYSMEKSR

SEQ ID NO: 320284 - protein, 387 aa, unidentified
MPQPNDLSRSLVALEQDITLIAVIEMSQSSWLVAGIVPGIERHPLKKLEPDEAALLRLLWRWRDEAAQKGRTIMRIVVAFEAGRDGFWLARWLRARGVEAYVIHSTSIAVSREHRRAKTDRLDTELLKRAFLGWLRGEQDHCSMAALPTLEEEDAKRPTREHETLVGERTRIVNRMKGTLARLGIRGFKPTLRKAPERLETLRTPESAALPPNTRAELQRDMARLHFVIDQLREIERTRLERLEQRPAEGQNEMVRLVARVVGVGIETADMLVHEVLSRNLRDRRAVARYAGLTGSPDESGSKRREKGLAKAGNARVRRGMIQLAWRFLLHQQNSALAQWYRARTAEARGGMRKTMIVALARKLLVALWSFVRTGEVPSGIVLRPIA

SEQ ID NO: 320285 - protein, 351 aa, unidentified
MNILAMDLSKSNTVFCLYNKDSAKSRYGKVKTTPQQIHDLIVKYSPDRIVFEVCSAAGWVFDTADGLCSEVQVANPNTQAWRWKNVKNKNDKKDALKLAQLSAMNQLPTVHMPKPQVRQKRALIQYRQTLVSRVVGIKNSIRSILDKQGYSITAGKSGWSKRQVEILERLSLPFERCDIDNLWRGQLYVELEMLCSAQKALADVTGKLDELAKSDKNIVLLQTAAGVGPRLAEAIAAFIDEPARFTSGKQVGSYVGLTPRQYQSGSMNRQGKISGQGNKLLRALLVEVSWLGLRHNAWISRTYHRLLRGSPSRKKISITAVARKLLVRCWAMLRDGQPWRDIEAETEKQAA

SEQ ID NO: 320286 - protein, 346 aa, unidentified
MKILALDLGKYKTVGCAYESESGAHQFKRGFTSPAGLTRMVQEVKPDRVVIEICSIAGWVCDLLWELGIEVQVANTSDDAWRWRKVKQKDDRRDALKAARLSAVNQIREVYIPALEVRQWRALITYRQQLIRRRTKIKNHIRDLLLREGQILARGSSCWSEVGIEPLAAQARSFSECGPAELWRGELQLELEQLREVQRQVVTVTAQLDKIGAGDTRVKLLRTVPGVGPRLAEAIVALLDQPQRFRKASQVSGYIGMVPKALDSGETERRGHITRQGSRVVRSLLVEVAWAGLRHNAWVRQTYQRLSGGKKARKKIAIVAVGRKLLVRCWAMLRDNRAWDWQPQIT

SEQ ID NO: 320287 - protein, 490 aa, unidentified
MGEGRFAGIDWASQEHAVCVNDADGRIVEGRRYRHDERGLRAMCNRLIELGVLLVAVERPDGLLIERLLDCGLHVIAIHPNQVAAMRPRFSNAGGKSDSFDAFVLAELARTDSHRFRVLVPDSDATKALRALTRAREDLVDTRVALANELRAQLECFWPGAAAIFAEIDSPIALAFLKRYPSPADARGLGEQRLERFLARNHYCGRRPVHQLLARLRGAADGRAGTLQSEARRQIVLGLVAALEPLVTQITQLTSEIRSALHDHTDGETFSSLFRDPKTAICPATILAEMGDCRPRYPTVAALAGDSGQAPVAVESGKSKRARFRWACDHRLRDAIATLADTSRHTNPWAADLYDRARARGCTHPHAIRILGRAWCAVIWCMSRDPHPRPRLVRRHLVHVARPQHLRPCPPRRPATPHRTAGLTQGVSWRLPTERAIRRSPGAASRTPTGDRWRAATRAGGRRFPQRVARRRAGARSRTPAAGRACRCRA

SEQ ID NO: 320288 - protein, 290 aa, unidentified
MSNDGAGHDALLERLQGRTIGLIVLEASGGYERALAGALQAAGFAVAIVNPRQARDFAKGMGYLAKTDRLDAQMLAQMGDVLMRQPDLNCRVKPVPTAERQRMHALVVRRRQLIAMRVAEQQRLTLADVVMSRSVKAIINALNHELARVDRELQRQVEVHHAELANLLRSAKGVGDATLSTLIAEVPELGKLNRREISALIGLAPMNHDSGTLRGKRAIAGGRAFPRQALYMAALVASQHNPVIKVFYARLLAAGKPKKVALVACMRKLLTILNAMVRTGRPWDASLNHA

SEQ ID NO: 320289 - protein, 335 aa, unidentified
MLYVGLDVHQRTTTMCILDDNGRRIKQQTIRGPWDDVIAVVRELEGPLSICFEATCGYGYLYDALRRIAGRVIVAHPGHLRLIFRSKRKNDRVDAEKLAKLLYLDEVPPAYVPSMDVRHWRQLIEYRRRVVDKRTRCKNAIRALLRGSGVAAPRGLWTRKGLAWLKALAWPDLACRVQRDLLLTELETFNQQVRTVTGVLDQLGRAHPGMTLLQTIPGVGPRTAETIIADVDDPGRFGRTRQLGSYFGLVPSQDASGGYNRLGHITKQGPATARKYLVEAAWQATLRSPTVRAYYQRILNDQPERRKIALVATAHYLLRCMHAMLRSGEVWREAA

SEQ ID NO: 320290 - protein, 361 aa, unidentified
MIVAQSNRLDFKGQNIYIGIDVHLKSWSVAVLSEHSVLKKFSQNPEPDALHKFLVSNYPGASYHSVYEAGFCGFWIHAKLVRLGINNMVVNPADVPTMLKEKLRKTDAVDCNKLARGLRSGDLKGIYVPDAETLEIRSLIRLRNSIVKDSTREKNRIKSLLRFHGIEIPAEFTRHSIGCWSKRFLQWLREVELTTEYGRQALDLHIEQLVNLRGMLLQEARIIRKLSRSESFAEPLRLIMSVPGIGITTGISFLTEIDNTDRFKSADQLASYIGLVPMCHCSGEKDATGEITIRKHAMLRCNIIEAAWIAIRKDPAMTMAYEGYRKRMKASKAIVKIARKLVNRIFYVLKRKQEYVPCVVS

SEQ ID NO: 320291 - protein, 365 aa, unidentified
MLNLGIDQHKRQLTVNLRSEEGSVILKRQVSTQWEKVRAFFADLAEKARPEGGFLAILEVCGMNPWLLEMLHDYGCRETVVIQPTERSKQKTDRRDAGDLSHLLWVHRQQFLEGKHPQGLRRIQPPTPQQADDRQLTALRARLTKKRTAVLNGLHKILRKHNLEQKCPTKKFQTQKVRRWLTEIELPGVDRLEVNLLLPQWELLDGQLEVVEVKIAERAADDEQVKLLESVPGMGHYSAVAIASRIGNIQRFKRADSLANYFGLTPGCRNSGDVTQRLGSITKRGSKMVRYLLNQAVIKVLRFDGAMRGWFKRIKRRRGAKIARVAVMRRLATILWHMLTRKEKYRYDSPIKKHQEFEAFEGATA

SEQ ID NO: 320292 - protein, 424 aa, unidentified
MKPHSDVEFAAFAGIDWSDTKHDICLQAANSEERELAVIPHRPAAIDAWASALRQRFGGQPVAVCLELAKGPLVYALQKHDFLVLFPVHPATLAKYREAFVPSHAKADPSDAQFALELLLRYRAKLRPLTPQSVPMRTLLRLVEQRRRLVGDQSRISNRLTDALKQYFPDVLAWFPDKDTILFCDFLTRWPTLKQLKHARRATLLSFFHGHHVRSQARIDERLHAIKSASPLTDDPAVIRPNQLLVLALIEQLRVTLQAIERFDTEIDAVSETLPDYALFRALPGAGATFAPRLLAAFGEQRQRYHSAAELQRYSGIAPVTESSGKQHWIHWRLQCPTFLRQTFVEWAGATIPHSFWAAAYYRQQRDKGCSHHAAVRALAFKWIRILYCCWQIWTAYDELIYLNALQRRGSPLLASMTGLAKNS

SEQ ID NO: 320293 - protein, 430 aa, unidentified
MKSNTQNAKIEAITEKTLVLGIDVGSETHYARAFDYRGIEYSKKPFKFSNTEAGFATFKEWILDLKERHEKDKVVPGMEPTGHYWFNLGKFLQDNEMKPVLVNPHHVKKSKELDDNNPTKNDRKDPKVIAGLVREGRYMIPYLPDGVYADLRTASNIRFQLQAELTRIQNRISRWFNIYFPEYKTVYGKPDAKSGMLILKAAPLPEDILTLGIDGVNQIWRDAKLRAVGKARAKTLIEAAEHSVGSKEGAVSARMEIRMLLEDYESRNTRLQEVMVLIEELVRKIPMAEKLLEIKGVGIRTVSGFLAEVGDISRFNNPKELQKLAGLALVENSSGKHKGETTISRRGRKRLRYLLFEVAMSLVSKNQEFRELHNYYTTRRLNPLKKMQSLVAIAAKLIRVFYAMLTKGVDYDPKKMVSDIKRPAVYLQAA

SEQ ID NO: 320294 - protein, 314 aa, unidentified
MSQPIFVGIDVAKDTVEVACSDASRRCFTNDESGHLKLTRWLSRHPVALVALEATGGYEAGCAAALAAAGLPVSVLNPRQARDFARAMGRLAKTDRIDALVLAEFAAVLHSKGHQPRALASTEQRELAAVVARRRQLVAMLVAERQRLGVAHARAKPSIEAVIELLLRQLADLDDDLKRTLKDRHADLAELLQSVKCVGPTTASTLIAELPELGLLTRKQITSLVGLAPLNRDSGTLRGQRHIFGGRASVRRVLYVAALVGTRFNPALKTCYQRLVAAGKPKKVALVACMRKLLITLNAIARTKTPWRSDFGSV

SEQ ID NO: 320295 - protein, 321 aa, unidentified
MERMKTYVGVDISKLHFDVAIEESGKYHHYRFENERKGFKLFSKLLVKEVSQVVMEASGPYYLKLADYLNEEGIVVSVINPLVIRRFCQMRMTRTKTDKKDAKMIAEYGKTEKPKEWSPEAEYVAELRQLQATSDLLNKNRTSLMRQKESVSVLPFVSKEVLKTIEKSIKECEQHIEELEQRMQEIIRFHHGKMYEQLQSIPGLGKKTALLLIVLTSGFTKFENARQLSSYIGTCPRIFESGSSVKGKSRITKMGMSRIRAMLYMCSWSAKKCNETCKALYDRLVENGKAKRPALIAVVNKLLKQAFAIATQGTLYKSPSI

SEQ ID NO: 320296 - protein, 335 aa, unidentified
MRAIGLDAHLEFCEVAIVEGGEVRSAGRIETKPEQVELFAQSLGKKDRVALEVTGNAWEIKRLVEPHVAEVLVVSPNDTGIRGARAKTDRLDARTLARLLAAGELDSVWMPYRATQVMRRQLQRRGQLVWGRSRAKNQIHATLMRQLVGRAPFSDLFGVKGRRWLGGLELPEEERESVDSALRQIEFLDSEIEAVERLIATDALGSPEIRRLMTVPGVNVICAATFIAAIGDIGRFESPRKLVGYLGLDPKVRQSGSGPATHGPISKQGSMRARHALVEASWSTVRQPGPIRAFYRGSGPVAATRSRSSPRRASSPACSGACSHGRRTTPTNSPR

SEQ ID NO: 320297 - protein, 438 aa, unidentified
MSNKVIFNLDELFISVGIDVGADFSWMSIALPNQQFVGKPYKILHSSTDSLSTAVSKIKEAEELYSLESRIFLESTGIYHYPLFCYLRDKGFNCSVINPIITKNSTNINIRKVHNDRFDSKKAALVGLKPDLKVSLMPSDLALNCRNLCREYYDLMDNRSAYVNKLQGELRMAFPQYLGIFSKITTNTALTLLETYTSPSAFIEADKQEIIHTIKSTARFGLTYAQNKYHAIIQAANEANEFGYIIDSNIKRIRLYISFIRKYDEEISNILTSMHELVDTNEDTVFVKQIHLIETFKGAGFLSAVSLMGEIGDFSAFSKPKQLFAYFGLDPAVKQSGKFEGTKIQISKRGSAIARRVIHTLALQSISTSRSGEAKNPVLRDYYLGKCESKPKLVAMGAVSHKVCNIIFAILRDNKPFEIITPQEHIKQYNAAKCDIAA

SEQ ID NO: 320298 - protein, 449 aa, unidentified
MKMRPVEIPDDDHELVIERVCAIDVAKASGKVCVRVPHPSGGGRRISRVWDVEATTGAVTELADHLVGIGIEKVTVESTSDYWRIWFYLLESAGLAVQLVNAREVKNVPGRPKTDKLDSVWLAKLTEKGLLRPSFVPAAPIRALRDYTRLRVDLTRERSRYWQRLEKLLEDALIKVSCVASTLDTLSVRDMLEALIAGERDPRRLADLARGRMRTKRTALVEALRGRFDDHHAELVRMLLDQIDALNGQIATLTARIEVMLDTMTTPAPVLDPTDRGAHHGPCSAHELSAVDRLAEIPGVGPVSAQLIVAEIGVDMTRFPTAAHLVSWAKLCPRTIQSGPVHRGGKTGNGNPYLKGALGEAAAVAARTDTFLGARYRRIVKRRGKLKALVAVARSILVVVWRLLADPTARYHDLGSDYHTRRLHTERQLRNHLAQLAALGYRVTVEPAA

SEQ ID NO: 320299 - protein, 269 aa, unidentified
MKHYAGLDVSVKETSVCIIDEAGKICREVKVPSHPEDLVDVLKDPAWRLERIGLEAGPLSQWLFSGLVEAGLPAVCIETRHTKAFLKAQVNKSDRNDARGIAQMMRVNLFRPVHVKTLTSQKRRALLTARKILQDKAVAIENDIRGLLRNFGLKVGAVGVAKFDERIRELVEGMAELVEIMEPLLAARQKLREMFTALHRKLLSIVRDDGVCRRLMTIPGVGPVISLAFCATIDVPARFRNSKAVGPSLGLTPVLNQSGESLRVGRVSL

SEQ ID NO: 320300 - protein, 338 aa, unidentified
MTTGLAAGTYELFVGIDIAATTAEVSTQRPGAKAGRSFKIDQTPEGFHRLVHTLQATDNEPSHVLVVMEATGSYWMSLATRLVHEGFRVSVINPSQAHHFAKALLKRAKTDAIDAQTLAQLAMVLQPAPWMPPPQIYYELQQRLAQRDDLLNLRQQVRNQLHALDQYPEVIASVRTRMERLLVLFQSQIDEVEGEIAAALNQDSAWAAAAERLQSIKGVGWVTAAWTLVTTLNFTTCDTVDALTAYAGLAPMPRQSGSSVWHRPSIGHSGNGRLRTAFYMATLTAARFNPAIKAFYNRLLEAGKPEKVARCAAARKLLHMAWAVVKKDRSFYPNYAQM

SEQ ID NO: 320301 - protein, 370 aa, unidentified
MAEPTTLFVGLDVHKESIAVAHASADYASEIVYVGQVGTREADLDKLLRRLRSRASRLVVAYEAGPCGYGLYRRLTEKGVSCLVVAPSLIPKKPGERVKTDRRDAAQLARLLRSGDLTSVYVPTVEDEAVRDLSRAREASIGVLKDAKLRLKSFLLRHGLNYSGRATWNDAHLRYLAKVVCPTPAQQIVFQESLRAVSEQTDRVRRLEDELVEIAATWRLRPIVDAFQSMRGVQSHTAVTIAAELGDLTRFDNPRPLAAFVGLIPSEYSSGESRRLGPITKAGNGHARRALVEAAWAYRYPAKVSAHLQKRIERCPKPIQEIAWKAQVRLCKRYRRMVARGKNPNIVVTAIAREILAFLWAIAREVTIGD

SEQ ID NO: 320302 - protein, 340 aa, unidentified
MQVTTIGLDLAKSVFQVHGVDISGRAVIKKKLRRAEVLKFFQALPPSRVGMEACATAHYWARELIALGHDVRLMPPAYVKPYVRRQKNDAADAEAICEAVTRPTMRFVPVKSAERQSVLVLHRTRELLVRQRTMLINAIRGHCAEFGIIAPQGARRADELVEQVRRAQADVLPDLARDALLMLADQLEALAVQIHALERRLLAWHRQDQDSLRLATIPGVGLISATALAASVPDPSLFRSGREFAAFLGLVPRQNSSGGKDRLGRISKMGDGYLRKLLVVGATSVIRRARTGASAASSWIQALLQRRPARVVTVAMANKTARIVWAVLARGDVYRAPATA

SEQ ID NO: 320303 - protein, 411 aa, unidentified
MSYKIAGIDVHKKVLMVVVIDATTPEEKPERRRFASMPSDLQRLLIWLREQGVEEAVMESTAQYWRSVWLELEPHMRLHLAQAFSNRAPRGRKHDFKDAERLVRRLIANELILSFVPGGEQRTWRNMTRMKLQLTRDRVRLQNQMECLLEEMRIKLSIVVSNLLGASGLRMLRALAKGETDPKQLAQLGDERLQCSEEQLVDALRGRAQPLHREMLALQLERLQWIDSQIAQLNGMIAQAMKPHQEAVMRLAEVPGLGVDSAQQIIAEVGEQASTFPSAAELTSWVGTCPGKDESAEQNHSSRSAKGNKYLRRVLNQAAHAAVKRKGSYFQVVFRRLLPRLGYQSAIWAVAHRLCRVVWKILHEGVRFIEHGIEPDPKAKMRHARRLAQALRKLGYQVTITPTNLASGMQM

SEQ ID NO: 320304 - protein, 430 aa, unidentified
MCYRIAGIDVHKKMLAVVVADVEVEGEYEFERRKFGSNPEHLRLLAEWLLEREVEEAVMESTAQYWQPVWGALERYWRPSCQKREGVGPMSGKLHLAQAHSNRGRRGRKRDFPDAERLVKRLVAQELVLSFVPDPEQRLWRTVTRRKLQLRRLLVRMQNQLEALLEEAHIKLSSFVSDLLGVSARRMMHAIAKGETDPAVLAAMADKNLRATSAQLADALGACTELNPVYRRLLKMALEELEFLERQIGLLDQEMANLLRPHEDAVKRLAEVPGLGADSAQQIIAEVGPTAATFPSSKELSSWVAICPGDDESAGVNHSHRSPKGNRQMRRLLNQAANAAVKTKGSIFQIVYRRLVPRMGHNQAIGAIAHRLCQLIWILLHRKVRYEERGPAVTESSKRKRTARMVRELRRLGYRVETATSQLVQLANPA

SEQ ID NO: 320305 - protein, 338 aa, unidentified
MIMYAGLDVSDKSTHVCVVDADGTVLRRDVIASDPEVLAKWFSKHCSGLARAVLETGPLSTFLYHGLVERAVPIECICARHAKGVLATRVNKSDVHDAEGLAQLARTGWFKRVHMKASATHIDRAALRIRTQLITARNSMANQMRGLLKLFGLRLGAAKTPGRRADRLATLYRQRPDLEPLFAPLVASMEAIEKQLHASNRLLEERAAADPVCSRLMSVPGVGPITSLTFTASIEDPRRFARSEDVGAYAGLAPRRSQSGERDVRGNISKAGDPMLRRALYEAANIMLCRVQRPFAMQIWGTRIAEAKGQKRARIAVARKLAVLLHSLWLNETEFRWA

SEQ ID NO: 320306 - protein, 320 aa, unidentified
MQTPTEVLNIGADVAKDEIVVACSQGSFPVRKLANQRSALLAFLKDLPAGSRIGMESTGAYHELLADAAHKLGFVVFVLNPKDARHYAKAVGLRGKTDRVDAELIARMVAHEHTKLHPWIPPTAEQREMARLIKRRAKLSSLRQALAMSLQGLEGFATDLKALRARFDQVLVRIDQRVKALVEASPNRKQHVTHLRTICGVGPVVSAALVNTLERVPLKSADAFVAFTGLDPRPDDSGQHRGKRRLSKRGPAELRRLLYVAAMSAKKKQAWKPLFEHYRAKGLSSTAALVIMARRIARTAWSIYTYKTDFDPARLTKSLT

SEQ ID NO: 320307 - protein, 386 aa, unidentified
MQTLNNLSRSLIALEPASTLIAVIEMSLSSWLVAGIVPGIERQPLKKLAVDESALLRLLHRWREEAEKAGCRIERIVVAFEAGRDGFWLARWLKARSIEAHVIHAASVAVSREHRRAKTDRLDAELLKRAFLGWLRGERNHCKVVAIPTLKDEDAKRPSRERESLVGEQSRIVNRMKAALIRLGIRGFNPKLKRAAGRLDDLRTPEGEPIPPNTLAELRRDMERRRLISNQIRQIEEARLKRFEQAPNDGPHAMVRLLARVIGVGIETADMLVHEVLSRNMHDRRAIARYAGLTGSPDESGRKRREKGLARSGNGRVRRGMVQLAWRFLTYQKESALAQWYRARTENARGARKPMIVALARKLLIALWRFVWQGVVPDGIVLRPAQ

SEQ ID NO: 320308 - protein, 358 aa, unidentified
MTNLAEKLDFSGHTISCGIDVHLKSWTVSLYLGKQYLRSFVQSPPSVDGLWNFLLTNYPKARYECAYESGFCGFWIQRAFAVRSISCIAVNAADVPRTDKGIKNKNDRNDSRRIAEALQAGQLAGVYVPDPELEADRQLVRLNERYSNDLTRSKNRIKGILRLMGIEIPQRFGKANWSGAFVKWLKEVSCGEPSIRIVLDRQLSIMEVIRIQKLETLREIRKLMGKARYRTILGLLCSIPGIGPVTAAVLIVEIGDISRFKKFDRLNSFVGLCPMEHSTGENERKGSITTRQHRRLRYMLVEAAWVAVRTDPALTLCYSRWTAKVGSRRAIIKVGRKLLSRVRHVWNNRTPYVSGLVK

SEQ ID NO: 320309 - protein, 350 aa, unidentified
MIQDIDNGEIRHLGVDLGKRSFQLYGVDGRGRTVVTKKLSRTKVKSYVANLPPSQVAMEACGSAHYWARTFRSYGHAVSLIAPQFVKPYVKSNKNDAADAEAICEAAQRPNMRFVAVKSVEQQDIQALHRMRQLAVEQRTAQVNQIRGLLLEYGIDIPQSRASVRRSVPEILEDAENRLSMRFREALAMLYDEMVHFDERIRWYDERIDRVAQMSEAARLLLTIPGVGPKIATALVAAIGDIHAFKNGRELAAWLGLVPRQHSTGGKARMLGISKRGDVYLRMLLIHGARSVMRFVHRRSDRISCWAARLEQRRGKNVATVAMANKMVRMAFALLKKGEVYEVRTAPTAA

SEQ ID NO: 320310 - protein, 449 aa, unidentified
MSKIKTKKEQVKRITQLVVINPTAAGIDVSDKEMMVAYPINSEQLEVRVFGCFTRDLHLIAETLKKNGVTTVAMESTGVYWVSLFLLLQEYGFEVYLVNAKHVKNVTGRKDDESDAEWIQKLHSCGLLKASFQPDNMTRTLRSLVRHRKNLVQTSSIYLNRMQKALELMNIKLHTVISDIDGKTGILIIEAILAGERNPEVLADMKDKRVKASREEIIKSLEGYWTTEHLFELKQCYQLYSTHRQMINEGDKEIEKQLIEQIALKNEGVIPEIPKVKRKISGKKSRVPYNLTAYLNEILGTNVTEVAGISELSALSIFAECGTDMSKWKTEHHFTSWLGLAPNTKISGGKEISSRIKKKKHYAGQAFRIAANSLYHAKSPLGDHYRRLRAKVGAGKATVATARKLAIIYYKMVSNQEAFNPKALEEYQQRYKAKKINQLKKKIALLEAA

SEQ ID NO: 320311 - protein, 404 aa, unidentified
MWYAGLDWADTHHDVVVIDESGHQIASKRVEHTKAGLEALTRFLEGVTGPTQKQQLACVVETKRGLLIAALLEAGFPVYPVNPKALDRRRAPSGAKTDLIDAYLLAKLGRSDFTDLRQLRPDSPLIQELKSLTRDQEQLIQMQTRLVNQLTACLKAYYPVALSLFSKLHQRSTLRFLQAYPTPQAASAASVEQLTSVLKQARHPQAKRAAANVFEAVHQAQLTADPITTRTKSRLMLALVTQLLPLLEQIAAYEQEIDTLFLTHADSPIFASLPGAGKRLAPRLLAEWGDDRARYACGRSVQALAGTAPVPYESGNYRTAHRRTACLKPLRNALFQFAWQSTLTEPWAKDYYYRKRAQGKSHTVAVRALSNTWVRIVFRMWVDQRGYERDIFEAAQGAHALRVA

SEQ ID NO: 320312 - protein, 446 aa, unidentified
MATPAGAIVVVPSASCLPDISDPRPYVVPLLSKETSMTITGIPLPSTPVAGVDTHTDTHTVAAVAATGQHLATATFPATTSGYAQLALFLHTHGVDTVGVEGTNSYGAGLTRHLVDAGYTVVEVLRPSRAVRRRNGKSDPVDALAAARQILTGEALSIPKDSIGPVESLRTLYITRKQLVATTVRIMNTIKSLLITAPDDIRARYSSMTNHAMVLALSRCRPQTDDHAPAHTVVSSLKILAATYLQVRERCDDLEARISALVSSIKPYISNMVGSGPLIAAELIVSIGENPERIPSEAALAQLCGVAPLPASSGRTTRYRLNRGGDRRANSALYRIAVVRMRCDQRTKDYVAKRTAEGLSKKEIIRCLKRAIVREVYRVVCAQSSRPEPRDLRRPDLKQRRQAQHLTQAEVADRLGCAPARISDIETGKRPLTELAAAYENLLQSA

SEQ ID NO: 320313 - protein, 455 aa, unidentified
MPRKKKKQRPIQVNEDMPVINHNACGIDVGASEIWVSIPPGRDEEPIRRCEMFTRDLYAMANWLKQCGIESVAMESTGVYWIPVFQILERRGIAVVLVNAKYAKNVAGRKSDWADCQWLRILHTFGLLSGSFQPAAQMAVLRSYVRQRQMLVEYAAAHIQHMQKALTQMNLQLANVVSEITGATGMRIIRAIVQGERNPQRLADMRDWRTKNDAETIAKALEGHYQDEHLFSLQQAVELFDFYQKQITSCDQRIAEYLRSLESKIDMEANPIRPARTKKKNRRNEPGFNCRHEAYRISGVDLTQIDSINESVALTIWSEIGIDMSPWKTEKHFASWLTLCPNNKITGGRIFQRRTRKSSNRVRDVLCLCAQTLFNSKSALGAYARRMRSRLGPEKAVVATAHKLALLIYRLIKFGKDYVDIGQDSYEQQYQQRAVKNLARKAKEFGFQLVALTLT

SEQ ID NO: 320314 - protein, 412 aa, unidentified
MKRIRDRVAGLDVHRDTVVACCRVVDPDGEVEVTKQSFATTRNGLSELATFLSAASVETVAMEATGIYWRCVYYALEGMFNELWLCNAQHVKNVPGRKSDLSDAEWLADVAAHGMVRPSFVPPPEIRELRELTRYRRTQVDARGREIQRLEKALQDAGIKITSVASSVWSASSRLIIEALITGERNPEVLAEMAKGRMRAKIPHLEEALSGHFGAHHAILCRQIIGHIDFLDQSIGSLTEEITTRLVPFESAVAIVTSIPGIARTTAEVIIAETGADMRRFPSPGQLCAWAGVAPASYESAGKRRPAGTRHGSPWLRRALIEAARSGARTKGSYYSQQYARIARRRGPNRACVAVANSMLFTIWHLLSDGQLYEDPGADYFSRRHDPAVEAKRLACKIEMLGYDVNLIERAA

SEQ ID NO: 320315 - protein, 312 aa, unidentified
MDAVIVGIDVSKDRLDVAVRPTGESFVVSRSGAGIDDLVGRLLALAPKLVAIEATGGFETIVAAGLAGKGLPVVVVNPAQVRSFAQALGKRAKTDPIDAAVIAHFAEATKPAPRPMPDETTRMLADLVARRRQIVEMMAAEGQRARRVTDNRLKKSIARLHKALQKELTELDASIDDHVRGSPVWAEKEDLLASVPGIGKTIARTLIAELPELGQLDRRQVAALAGLAPWTRQSGQWGGKSFIGGGRKSVRRVLFLGAMVAARHNPILKQFRDKLVAAGKPKLLAIIAVARKLLTILNAILRDQTPWNPKNA

SEQ ID NO: 320316 - protein, 361 aa, unidentified
MQSTTIIAFDHHAATTVAAVLLPGQRTPALHSLPSDILTIRRFVARVHRQGPVTCCYEAGPCGFELHRALTAHRMPCEVIAPALIPRRAGDRIKTDRRDAGQLAVLYRAGALTAIHIPSDHEEAARDLLRCREDIRADLLRARHRLSKFLLRHGRRFTATKKAWSKRHDAWLRAQTWPLPALDQTHRAYLRAVDEVLARLRDVETQLRELLDLEPLRPRVQRLRCFRGIDDLTALTIAAELGDARRFATAPSTMAFVGLVPSEHSSGAKRVQGGITKTGNAHLRRVLVESAWHYRHHPFVSATLRARQRGAPAEVIARAWTAQQRLHRRYQRLAARGKPKQHIVTAIARELTGFVWAALTQ

SEQ ID NO: 320317 - protein, 411 aa, unidentified
MDTLYPGCAGIDVHKNNVVVAIRCQEGAAKIHEEVRTFATMTADLLALSDWLAEHAVTHVAMESTGVYWKPVFNILEGRFGVILVNAEHIKQVPGRKTDVKDCQWIAQLLQHGLLKASFVPPEPIRELRDLTRQRAQLIGEKASAINRIQKVLEDANIKLASVATDVLGVSGRDMLEALIAGETDAAKLADLARVRLREKIPALRRALQVQVTDHHRFLLRMHLDHSAHLEELIGRWSVRIEEKMALFAEAAQRLQTIPGISQRVTEVMVAEMGTKMEQLATADHLASWAGMCPGNNESAGKGRSGGTTKGDRWLRTALVQAAWAASHSRGTYVAAFYRRLVRRRGRKKALIALGHTLLVMVYHVLKRGTTYAELGGDFLDRLEPERRTRQLVKRLEHLGHKVTLEPCSAA

SEQ ID NO: 320318 - protein, 411 aa, unidentified
MRRVIGIDVHRTFGEVVIWEDGRLRHAGRIDMTRTALEGFGKTLLASDEVVVEATGNSMAVSRVLAPFVARVIIANPLQVKAIAQAHVKTDKIDAGTLASLQAAGYLPQIWTPDAETERKRRLVARRYQVVRHRTRLKNEVHSILHAHLIPKCPHADLFNGRGRAWLVAQPLPDDERAAIDRHVRELDRLAEDLALLDREIAQDAIDDSAVNRLMTITGVNLAVAAGIMAAIGDISRFNSPQKLVSYFGLNPRVRQSGLGAAHHGHISKIGRSHARAMLVEAAWAAAKAPGPLHAFFVRIRARRGHQIAAVAVARKLTVLCWHLLTKGEDYLWARPALVAIKTRAMQLQAGHPQQKGSRRGPAYAYNIKALRDREMLIAAQAEQSYERLVTQWKPRRPKTGARAPQLGKTK

SEQ ID NO: 320319 - protein, 307 aa, unidentified
MAESVGVDVAKHTLEWCVGAEGKIQHARNEPRPIAQLVRQLVALDPVRIVVESTGGYERTLVTKLAEAGLPVVVVNPHRVRSFAQGLGILAKTDAIDARLLALFGEKVEPPVRPILQGRARLLADLVARRRQLVSIVVAEKSRRETASAAVRRSIEALLRVLAQQIRELDRRIDAALGEEAESAELAALLQTVPSVGPGVARTLLVDLPELGHLGRREIASLVGVAPFARDSGRMRGLRRIRGGRASVRTVLYLAAMNAARFNPVLRALYQRLRQAGKPPKLAFVAVARKLLTILNAIARERTAWQA

SEQ ID NO: 320320 - protein, 364 aa, unidentified
MNSNNTQNNPERALVETGVIIKLGLDVHAAKEAICVQIDGATPRPSQMVPSERVMGWISALRARYPGARVVSCYEAGPIGYVLHRKLLAAGIENMVVTPQRLDTDGRRQKTDRLDARALAERLDRYVRGNRNAISIVRVPTPEEEQARSIVRMRSQLMRTRRKHEARGRGVMLAQGIRVQGAWWSPKKWNELAPTLPDWLRPIVEVWQRMAAEADAEERKVREQLEETAPAELPRGIGALTWVTLSREILDWSRFKNRRQVASYTGLCPGISQSGERTHYRSVNRHGNPAIRHALIELVWRLALWQPQYPPVRCLVEKSLSPRLRRKAAVAAARRLAIDLWRLATGQTTPEKVGLTAAFAPRTS

SEQ ID NO: 320321 - protein, 388 aa, unidentified
MTQASCPLSPPVTLDYENTLVLAIELSKTKWVLSAQVPGLLRVKAKQTIEPKAEALLAAIDGYRNRSRAAGRTVERVVAIYEASWSGFWLARWLGRHGVETHIVQPSSVPVDRRARRAKSDGIDAELLLRTLLAWLRGEPRVCSMVPIPDEADEDERRRVREREDLVADRISLVNRIGAVLATLGVDDYNPLRRDRRVRLETLRTALGGPLPPHARARILRLLDRLDLVCAQIAELEQERDAALEKEAPDKAEKMIRQLVGLRGIGVQSATVLVREGFVREFANGKALGSYAGLTPTPFSSGSTEREQGIGKAGNRRLRTVMIELAWLWQRYQPGSAQVSWFRERVGGTGRRMRKVMVVAMARRLLIALWQFATQGVVPEGAIVNPAG

SEQ ID NO: 320322 - protein, 373 aa, unidentified
MGHFIMCACDHHDKTLVLKLAEGTQASVKRVFSNDWEGRMAMQRELLDRSKAAGGAQIIFAYEASGQGFGLYDELTLAGMICHVLAPTRIARSPQHRRRKTDDRDAEQILELLRGHVLAGNALPRVWVPDRAIRDDRELIRVRLDAGEKLASLKAQVQSLLKRHGMRWTGPGRSWTQKHRGWLKRLSQLDAVLDERPDQSWGRGAGLALSSLLRQIQSIEQEIETLNTEVQVLADTPRYASAVQALMTIQGVGLLTAMVFLAEVGDLNRFSNRRQIAAYLGLVPSSNESGECGDRKGHITRQGSSRVRKVLCQAVWSAIRTDPKIKASYNKLVRRNPKVKKIAVVACMRRLSIRMWRRGLTGAGPSPRETRAA

SEQ ID NO: 320323 - protein, 326 aa, unidentified
MQGKEASEQETRGQSSVGIDVSKHRLDVCVLPCGERLAVANTPEGIRRLKRWLARFDLHLVAIEATGKWHRPLWRSLHATAIPVAMVDPFKTRMFAKATGVFAKTDRLDAAVLARFAAVMAPAVRPPPPQIQEELCELVAGRAAAVAEQTDLKNQLAAAAVALFRQQLTRRIARLDKDIEALERAILTRIKADAGLARRFAILTSIPGVGATVAATLIARLAELGTLTDKAVAALAGLAPVARQSGERDDKRVIFGGRASVRRMLYLAALSAARHNPDVATFYRRLRANGKPAKLALVAVARKLATLANLLIAQDRTWLPIPPNQA

SEQ ID NO: 320324 - protein, 468 aa, unidentified
MTSHLRTSITVEIVSPGPSRATIEARPERAADRAPAHGRTSLPPRGPVGCCRRGTRRPRRLIGKCRAGAAAGNVSAEGEAIRSNDYRKDTTVKAPSTRPAAVLGLDVGKSSHWACLIDRDGEVLSSAPVRNREAELDALFASVPAGTLVVVDQFRNIGSLAVRRARAAGLGVAHLPGLAASRAAGLFAGEAKTDERDAAVIARTALGVPDSLSGVPGRGEALEAARALSSQRDHVVACATRDKNRLRAVLLESCPALEAAVDLSDRRWLELLAGFGGAWGIARSGAEGPRAEAAGEAAAASTAPPPALIEAENRQVRFLATRISEALDEAGALEAETAALLEGDETYACLLTVPGIGPRTAAQLAVSVDIGRFPDHDHLASYCGIAPRVRSSGTSVRSVRASRRGDARLKSLLIFSCNSLVRSSGRYGEYYRACRARGMGHGRALKAVARKRLRAIYAVMRDRVPYRE

SEQ ID NO: 320325 - protein, 338 aa, unidentified
MALYAGIDLHANNSVVVVLDEQDHVVYQKRLRNELAEILPALVPYQGTLQGVVVESTYNWYWLVDGLRAAGYRVHLANTAAIQQYAGLKYTDDHSDARWLAHLLRLGILSQGYIYPAAERAVRDRLRKRSQLVRQKTANLLSIENVLTRNTGLPWSGNRVKQLTGEEVEHLLPVSEVALAVQSTLAVLRCLAEQIENVERVVLKRVKVRAAFQPLLTVSGIGPILGMTIMLETGDIGRFATVGHFASYCRCVGSTKLTNGKRKGEGNTKNGNKYLAWAFVEAANFAVRYNPQVRRFYPRKQAKTNGVVAIKAVAHTLARACYYILRDQVPFDVSKAFA

SEQ ID NO: 320326 - protein, 383 aa, unidentified
MKSVCGLDVHKDSVYLCILSEFGELIEKVFGVLTYQLEEMRDLMLHHHVVEVSMESTSVYWIPIWRVLSPHFKLNLANPYFIKQLPGRKSDVKDAQWIAECTMKELIRGSFVPPEIIQQLRQYDRRIFDLNEEIVRKLSKLDAVLQRCNIRLSNYVSNVDSKSYKAVVRAISQGITAPEELVKLIHGRIINHHGIDVITASLKGVVSLAEIDMISQLRDELDMAEAHKEKCQARMLEICEREFPEELKRLQTIPGIKERAATSLIAEIGTDMNKFETANHLASWSGLKPRNDESNKKIKSRSITHGNVYLRKTIIECAWAASRTKDCFFSRFSYHQTQVRKKNKMKVLVAVARKMLIAVWHVLHDNTIYIDFTTDRKTSRTKG

SEQ ID NO: 320327 - protein, 455 aa, unidentified
MRKPQVIPDEDHEVVYERVAAVDVAKASGVVCLRTPDPQRPGRFVNRIWEDVPATRARIAELGGELLRCRVQMVTLESTSDYWRIWYYVLEGLGLAVQLVSASQAKNLKGRPKTDRLDAMWLARLTQWGMLRPSFVPPAAIRRVRDFTRARTDLVRERTRVLQRLEKLLEDAMVKITSVVTDGLKAKSSVAMVAALVAGERDPRTIADLAKGSLRGKRDQLAEALDGMFDSHHGVIARMLLDQVAFLDQRITAMEDQAIAALAQVEESWGVDATGETGPGRGTTPDSPVLAAAHRLAEIPGVSVWLAIVIIAEIGLNMAVFPTPAHLVSWLGLCRSAAQSGTRHGKGRQKKGNSYARGAAGQAALAARDTATFLGERYRRIARRRGGAVAQVAVARSIMIIAWYLLNDPAARYRDLGPDWHARHTNRDKKIRTHIQGLKALGVTVAITDDEQQAA

SEQ ID NO: 320328 - protein, 349 aa, unidentified
MTTQRLSYVGQSVYVGVDVHKDTYAVTCVCNKQIVKTATVKADPAGLTASLSQWFPGARLYTAYEAGFSAFVLHRALTKAGIMNIVVNPASIAVAANDKVKTDRRDSKKLAIDLSDGRLQGIYVPTEDEELARLLPRTRAQIVEHRATIARQIKAKLHQFGLIAPASRRLISNRYLREIDAWPLPPDLRVSLTFLAEQWRFATRQLIEMRRLLREQAKAHPAIEQVYRSVPGIGEVVARTLATELGDMTRFANERALFSYTGLTPSEYSSGPSVRRGHMSRQGSSRVRHLLIETAWRALPRDAVLKEIFDRIAATRGKKRAIVAIARRLTGRIRACFRQGTTYAVGTYA

SEQ ID NO: 320329 - protein, 307 aa, unidentified
MQIHSVGIDLGKTTFHLVALSAAGKVLLRKKFTQKQLITFTANMQTSLIGIEAYSGAHFLGRVLRAQGHDVKLIPAQFVKPFVKSNKNNFLDAEAIAEAVDRQNMRFVPIKTDDQLDLQAMHRVRDRLVARRTSVINQLRTFLLERGMVFAKTPFKLKQAMPEILGNADANLTPRMRNLVSLLWSEWKDLEQQIVAMNVEVEQIASSDPACQRLRQIPGIGPLVATTIVAAIGNGAAFHKGREFAAWLGLVPRQHSTDGKARLFGISKRGKDTCASCLSTVHDQPCSSSSENDPRSVHGNSERPSVW

SEQ ID NO: 320330 - protein, 447 aa, unidentified
MSKKKFENLPVVNGYAAGIDVGSRSHYVAIGQDPEKDVCEFGVYSTDHQKMVDYLKEHQIKTIAMESTGSYWQSLFTKLQNEGFEVWLVSGHQTRNVRAKTDVKDCIWIQKLHSLGLLRGCFLPDTPTSRLRNLYRHRLFLIEESARMSNKMQAALRLMNFRLDVVVSDITGKTGIRILTAILEGETEGIKLAQLADARVKKSKEEIASALIGEVDQELLHELRDCYQLYLSYQEKIKVADEKIAGLLDGFTDNTVIESGTQITKKQTKGKNQPKFDLPALSYKLFGTDLFAIDCISSSTVLTLICEIGTGIYKFQSAKQFTSYLRLAPNNRVSGNKVISSRTPKGTNRLALALRNAANTIDRLKEGTLTSFFKRIAYKKGRGAAITATARKLAVIIWNMVVKKEPFNPIDNTLYQEMIKARKIASIKKTMQKMGITAQHLELDSGS

SEQ ID NO: 320331 - protein, 450 aa, unidentified
MGSYAGVDWAADKHDVLVCDEAGEELLSATFAHDEAGLRLLCRQLLRLKVALVAIERPDGLLVERLLDAGLRVLALHPNQVAATRARFRVSGGKSDRFDAFVLCELARTDNHRFRVLEPDSDETKALRALTRAREDLVKTRVAVCNQLRSELERFWPGPIGLFADLDSQISLAFLERYPSPVETRTLGEQRMAAFLARQGYTGGKTAAELLAKLRSAPAGRAAEQETKVRRQIVRGLVGALKTLTAELKTLERELEDAVRAHPDGEIFLSLFKSRNSFVTAAELLAEIGDCRARYPNRDALAGDAGQAAVAIESGKRKSASFRWGCNKRLRSAFCTLADTTRHWHPWAQDLYAAARQRGHDHPRALRTVGRAWCRVVWSCWQTRTPYDPARHRALQQHCTVWITDTSGRRRPDLAATQRMLGAAVTEMAARRAEREALDAKPTSANTPGT

SEQ ID NO: 320332 - protein, 345 aa, unidentified
MGPMYYIGLDVHKQKISYCVKDVGGKIHAEGWIPATRFDLDRWMKTLPQPWSAALEATMFSGWIYDHLKPHAAELKVAHPLMLRAIAAAKKKNDRIDANKICDCLRCDFLPECYMAPTAIRERRRTLRYRNLLVRQMVQMKIKTSTLLMEAGVSYNKQKLHKAGYFRELLASNPDIDESLRSLLRQCREMVVRLGKSETALIHSLQQDRLLVERVERLMSIPAIGPITALTWALEIGEVQRFSSIKKAISYCGLCGDEQRSANTAQRTPLSKQRNKHLQTTLIEAAKMAPRYSPTLALLYDREKQKGNANRATLAVARKLVAYLVAVDRGQTHFLVLDQETRTAA

SEQ ID NO: 320333 - protein, 453 aa, unidentified
MKSRKNKALKVVEVDALSQINANAAGIDIGAEEFYVAVGKDRDAESVRTFPTFTADIHRLADWLTQCKVETVAMESTGVYWIPLYEILEERGFEVYLVNAKHLKNVSGRKTDVLDCQWLQQLHTYGLLKASFRPNEQICAIRSLVRHREMLVHYRAAHIQHMQKALQMMNLLLTNVLADITGVTGMQIIRAIVAGERNPEVLASYRNGHCAKTEEEIKKSLEGNYKREHVFALKQALELYDFYDQQMQTCDKELEALYAEFNPPDQPGTEPPQQRTAKRRNNQPTFDLAQSLFRMTGGIDLTQIDGLDALSIQNILSETGTDMSKWPTVKHFSSWLCLAPNNMITGGKIKNSRTPATQNRASNTFRIAAQSLSRSQCALAAFYRRIRAFHGAPKAVTATARKLAQIVYFMLKRRQPYQALDPVYYENQFRERTIRNLQRKAASLGLRLDPAAI

SEQ ID NO: 320334 - protein, 378 aa, unidentified
MPTMPKRAALSNPGMFDLGVSHLDAAGVPPLVFGGVDTHADTHTVAAVSHLGVMLGNASFPATAGGYRQLYCWLAAHGSLIRVGVEGTGSYGAGLAAALTERGVELVEVNRPNRVIRRARGKSDPIDAEAAARAALNGVATAVPKARTSVVEAIRVILVARRGAVQARTAAINTLHHMIITAPRQLRDQLQPLTRRHQIAVCSGLRSTDITSPTRATKLALRRLACRINHLTAETSDATKDITALVRGHAPQLLAEVGVGALSAAQLLITAGDNPDRMTSPAGFAALCGTTPIPVSSGKTSRHRLNRGGDRQANCALHTIINSRLRYHPETQAYAAKRTAARKTERDIRRSLKRYLARRLFTLILNPNQAAENLPAAA

SEQ ID NO: 320335 - protein, 345 aa, unidentified
MEVHVMLRKNIVQTLDAATSWKVFGLDLAKHDLAVVAIPADGSEVQYVKRYSYADFLEFTAQIPSATMVFEPGNGANHFALRLQAQGHTPKMVSGASVKSWITLHMSGQKTDLNDAYALARLSEDPDLKTVRIKSVDQNRLQSLQAMRKQLVEQRTKTIVSIKGIFQCWGILFKKDSRSLKKFKEAANNNKELLGEEVVEAMILQIDRIADLDKDIKHVEELLKKVTMQDPRAQPMLDIPCVGLQTVSRLCAIMGDIKDFETPRSFVAFIGLVPKNMISGNKTTTPSGYEQVDQGKVNRRGDKMARSLIIQCASSMYMNFHKDNFPECALKDWIQKQKDAHKPYG

SEQ ID NO: 320336 - protein, 445 aa, unidentified
MPVVHPNAAGVDIGSQFHVVAVSPDRTDEPVKTFKSFTGDLHAMAHWLKFCGIETIAMESTGVYWIPAFEILESYGFGVFLVNAREAKNVPGRKTDINDAQWLQRLHQFGLLRASFHPSCNIAELRAYLRQRERLLDYKASHIQHMQKALMQMNVQLHHVVSDITGHTGMDIIRAIVRGQHEPKELVKFRNVRCQNPVEIMIDALTGNYKDEHLFTLKQLLELVDFYAEQLKACDQVIESKLKQLQEMVELPQKPLSKRKKTGYCANVPEFDVRGTLYNLLGIDLTEIHGIGPSLALKLVAECGTDMSRWPSSKHFTSWLCLAPGNKISGGKVLSSRTRRSSSRAAAHLRLAATAIGKSDTALGAFYRRLAARARKAKAVTATARKIATLFYNALRYGMEYVDQGAGYYEELYRNRVLGNLQRRAESLGFTLTEMPQTLSTAGVS

SEQ ID NO: 320337 - protein, 349 aa, unidentified
MGLDVHQATISVAVMDSQGKVVMESILETKAATLLEFFAGLRGSLFVTFEEGTWAAWLYDLLKPHATEVLVCNPRKIPLLKQGNKSDKIDARKLAERLRLHDLKPVYHGESGVRMLRELARSYLTVVKDLSRVMNRLKALYRSWAIPCAGRDVYYTRHRSQWLEKIREAGTRRRAEQLYQQLDMLQHLRQQARRELLAESRKHAITAKLRQIPSLGPIRSALAVALIQTPHRFRSKRQLWTYSGLGLETRDSGEYHYVQGQVRRRKKQATIRGLNKDYNHDLKGLFKAAATRASVQPGPFQEFYQRSLAKGIKPTMVRLTLARKIAAITLTLWKKGEDFDIDKLNSQAA

SEQ ID NO: 320338 - protein, 360 aa, unidentified
MRCLKRQKVTGEDLFVGMDLHKARWYVTVRSADVELFCGSIPGEWEALRRLLDRYEGNRIQAVYEAGCFGFWLYDRLVEHGVECLVTPPSLVPQEYGNRVKTDRRDSRKLSFLLAKGLLKRVWVPSQEERYHRQVVRRRRQLVRDRVRTQNRIKSELQFYGILLPAPKGRWTHIYFDNLRRIRFGNRWMQESFNRLLEQYELLSKLIDKQTKVLRDLAKTESYRKRVEILTSIPGIGVITAMEILLELQDVARFRRADQLAAYVGLTPSQYTSADKVRMGRITGIGKDSVRTTLVESSWWLIRKDETMRNKYEKIKARSGAKRAIAKSSKGVPRVINKICDYALTAAFSAGKPNESYPIG

SEQ ID NO: 320339 - protein, 329 aa, unidentified
METEKQNQNYAGLDIGLEWIDAAWYEQNKLHHAKVSNNVSGFKHLIKQCGTSRHYVMETTGPYYVALALHLHLKSIKVSVVNAIVIKRFIQMNLEKNKSDKKDAAWICKYAISQRPNLWQAPQEHIISAKQMQTAIMQLTKNRTAFINAQKSLNQMPVISKESKRSYQHMIDQLNKEINALEKSLDTLLKQHEEKKMKALATIPGIGKRTVAMMIISTDGFRKVDNYRQLSSWAGLSPKEYSSGKSIRGKIRISKMGGKELRNTLYMCSLSAIKSNKACKELYDRLKAKGKNGKLALAAVGNKLIKQCVAIAKSGVPYDEKYLSEKTCF

SEQ ID NO: 320340 - protein, 409 aa, unidentified
MEVIVERSAALDVHKAQVTACVRVPGPGRERVQEVVQFQTTVRGLLTLRDWLRAYRVRQVAMEATGVYWKPVWAVLEDDFELLLVNARHVKQVPGRKTDISDAAWLCQLLEAGLLKASFVPPKPIRQLRQLTRYRKALIKERQREANRLHKALEDTGIKLDCVATDILGVSGRAMLDALCQGTTDPEVLADLARGKLRKKLPALKEALEGRFDSLHALLVGSILAHLDFLDEQIERLSEAIEEQLRPFRPAVELLRSLDGIETRTAQNILAEIGVDMSVFPSAAHLASWAGQCPGNDQSAGKRRSGHTRKGSKWLNDALKDAAMAAIRTNDSYLQAQYQRLRPRVGHGRALGAVKHSIICTCWHMLTTGELYRDLGGDYFRRRDPERQTRRLVAQLEALGHTVTLKEAA

SEQ ID NO: 320341 - protein, 344 aa, unidentified
MPCFAALDVSQKTTAICVVDDAGTIIAEKTVVTCPEVITSFLRDAAPELLRVGLETGPLAVWLWNELASRRLPVLCIDARNANAALKMRPVKTDRNDAAGLAQIMRVGWFKQVRIKSRDCYQVRSLLAARETLVRIRVKIENELRGLLRTFGVLFGKRVGGFTGRAREIISGELDASPEMRIIAETLMKARASVCDQIKVMDTRLGAIARESPTAKLLMTAPGVGIITALSVVSAFDDASRFKKSSSAGAYLGLTPRRYESGETSRNGRISKQGDKMVRKHLYEAATTLLTRNLRSSHLKTWGLKLAKVSGFKKARIAVARKLAVILHAMWKTNTSFRWDQSAA

SEQ ID NO: 320342 - protein, 477 aa, unidentified
MSKKTRQQGVRGSRGPVPAKSKKNKQPNRPGQPDRPVFEPNAAGIDIGAREIFVAVPPERDPDPVRKCETFTGDLHQMAEWLVSCGITTAAMESTGVYWIPVYDVLEQHGIKPCLVNPRNMKNVPGKRTDFHECQWIQHLHSLGLLHSAFRPDGEVCAVRSLMRHRNDLVMMASEHIQHMQKALTQMNVQFQHVISDITGLTGLAILDAILAGERDAAVLAKLRDPRITADEETIRKSLEGTWRAEHILALKQRLSLYRSHRDLIDECDKEIEKLVAAFEPRVDPDEKPMPEDRKQKQRRRKKKSGSPDFDMRTEAYKLFGVDLTQIPGLMMLVFMLFSEVGRDMSRWPTAAHFVSWLGLCPDNDISGGKVLWRGARRTKNRAGALFRLAAHSLHRDPSPMGNYLRRMKAKLGPAAATTATAHKIAIVFYTMVKNQVEYDASLWAQRDQKREKRLEARLRKQAAQRGYKLVPVEAAA

SEQ ID NO: 320343 - protein, 361 aa, unidentified
MSQSSWLVAGIVPGLERHPLKKLAVDEGSLLRLLQRWRDQAIRAGCRIERITVAFEAGRDGFWLARWLRAHDIEGYVIHPTSVAVSREHRRAKTDRLDTELLKRAFLGWLRGEADHCNMAAIPTIEEEDGRRPHRERESLVAERTRIVNRMKGCLARLGIRGFKPTLQRAPKLLSTLRTPEGTPLPPNALAEMGRDLARLHFVEGQISEIETARLERLEQAPTEKSHAMVRLLARVIGVGIETADMLVREILSRNLRDRRALARYAGLTGAPDESGSKRREKGLARAGNARVRRGMIQLAWRFLMFQKESALAQWYRSRTVDARQGTRKSLIVAMARKLLIELWRFVTTGETLLGVKMRPA

SEQ ID NO: 320344 - protein, 343 aa, unidentified
MWIIGCDYHPGFEQIAFVNDATGECGCKLLEHGNKEAEQFYRNLAGEQVRVGIESTGGTRWLERLLAELGHELSIGDAARIRAAAAHKQKTDVRDAELLLQLLLEHRFPRIWRPTAEQRDLRQLLVHRHRLVQMRTRVKNQLQAVAMNEGMQRKRRLWSEAGQAEFLSLCLPHWSDLRRSDLLALLKELDARIAPLDRNLKQQAEQQPETRRLMTHPGVGPVVAMAFALTLGDPERFACSKQVASYLGLVPLEYSSGGRQRLGRITKQGSSLLRGLLVEAARAAARSEAGWKRRYVRLALKKNRSIAAVALARRLAVSLWWMWKLGLNYGQMKESHSHAGSPA

SEQ ID NO: 320345 - protein, 343 aa, unidentified
MQTVTTIGLDIAKSMFQVHGVDAAGQVVIRRQLKRRYVLAFFQKLPACLIGIEACASSHHWSRELQALGHTVRLMPAAYVKPYVKRQKNDAADAEAICEAVSRANMRFVETKTPEQQSCLMLHRPRHLLIRQQTAVINAIRAHLAEFGIVGPVGRHGVDDLLAVVADRSNKRVPEVARACIAALGAQLRVLKTQILEFDRMINAWHRSSDTSKRLDDIPGVGPALATALVASVADPRAFRSGRDFSAWIGLVPKQHSSGGKDKLGSISKQGDRYLRSLFTAGALAVIRYAKIHGTKHRPWLAALLARRPTKVAAIALANKIARMAWAMMVKGECYKEPAALAA

SEQ ID NO: 320346 - protein, 408 aa, unidentified
MEVMHVACAGLDVHKDSVVGSIRVQSGSSVTRETRTFSTLTRGLLELSDWLSSHHIAAVAMEATGVYWKPVWHILESGFDLTLANPAHIKNVPGRKSDTKDAEWIAELLAHGLIQASFVPPEPIGELRDLTRTRKQLTREIVSHTQRLQKTLEDANIKLSSVVSDILGQSGRRMLEALIAGETQPEKLAGLAVGRLTSKRDQLTEALRGKVREHHRFLLKLHLDQIKAIEGAVASIEERLAEVLVPFAAALERLKTIPGVSDTLAQVIVAEIGVDTGRFVDENHLVSWAGLCPRLDESAGKRRSTRVRAGNVWLKTGLVQAAWAASRCKTGYLPVRFRRIRARRGAKKAVVANAAFILRAAYCVLRDNVPFKELGEDHLERRDKERSISRLVGQLERLGVKVAIERAA

SEQ ID NO: 320347 - protein, 470 aa, unidentified
MAFVGIDWADMKHDFCIQAAGSDQHEFDTRDHSPEAIAKWAYSLQDRFGGPIAICLELAKGPLVCALQRFEFLVLFPVHPSTLAKYREAFVPSHAKDDPTDAEMALDILLRHPEKLQPLKLQSTAMRTLATLVEERRSLAGDVNRITNRLVSALKQYYPQVLDWFEHRDTLIFCGFLSRWRTLKHVKRARRSTLESFFHLHNVRRAYLVEERIQGIRAATALTEDESVIRPNQMVLQAKVEQLRALLQSIDHFDAEIDAVGKSLPDYDLFAALQGAGHILAPRLLVAFGEDRDRYTNAAQIQSYSGVAPVIERSGNKCWVHWRIACPTFLRQTFVEWVGSTIPRSFWAGAYYQQQRQKGCSHRVVVGALAFKWIRIIYRCWKTRTLYDESVYLKALKLRGSPLLANVSESAKNDLTECLRPRSSYSKLGEIGHSLRVCCNTSHKPFITESFRIAWISGYGNYLARRQAFP

SEQ ID NO: 320348 - protein, 334 aa, unidentified
MENIALIGIDLGKNSFHIHCQDRRGKAVYRKKFTRPKLIEFLATCPATTIAMEACGGSHFMARKLEELGHSPKLISPQFVRPFVKSNKNDFVDAEAICEAASRPSMRFVQPRTESQQAMRALHRVRESLVQDKVKTTNQMHAFLLEFGISVPRGAAVISRLSTLLEDNSLPLYLSQLLLKLQQHYHYLVEQIKDLESQLKRKLDEDEVGQRLLSIPCVGTLTASTISTEIGDGKQYASSRDFAAATGLVPRQYSTGGRTTLLGISKRGNKKIRTLLVQCARVFIQKLEHQSGKLADWVRELLCRKSNFVVTCALANKLARIAWALTARQQTYEA

SEQ ID NO: 320349 - protein, 406 aa, unidentified
MGKFDHRDIDVFVGVDMAKQDHYAQAITIAGVEAFHRPVLNDQAAIDKLLDDAGRHGRVALVIDMPSSAAQLLLTIAHNRQVPVAYVTGLQMRRAAELYAGSAKTDPRDAWVLADFARRHADQLAWIQVSDDLLSKLRILNGRDVDLAEDANRASNRCRDALTSISPALERAIGSRLGHPGVRALLAAHPTPTSLRSAGHDTIRRLIAGRSPRLADKLARDIATALAAQTVTLPGENTWGEIIAGLIADLERIHIQRNELEKQIETVFLEHPLGQVLVTLCGFGPRTGSRTLAEIADPTRFKDGGRLAAYAGLAPVDKRSGKSINNASASRRGNHRLKNAMFLAAFVATQHDPHAKAYYQRKRDEGKNHNAAIICVARRRCDLIHAMLTTATPYNPQRAENLAPAA

SEQ ID NO: 320350 - protein, 355 aa, unidentified
MIIIGVDFHPEFQQTASVNTETGEFQEKRLAHPEEAAEFYRALAITGQSVRVGMEASGHARWLERLLAELQFELWIGDAARIQSKRGRKQKTDRQDAQHILQLMLKDDFPKIWVPSWENRDMRQLLWHRQRMVQTRTRIMNQLQAVALNEGVRCKKRLWRAGGRQQLESFRLAPWASRRRRDLLELLDRLNPTIAELSQAIEQEAAKCPEARRLMTHPGVGALTALAFVLIIGNAERFPCGKQVASYLGLVPLEKSSGNRRRLGHITKQGSSMMRFLLVEAAQVTVRSLPEWRSQYFRLMMRRGRKTAKVAMARRLATHLYWMWREGRDYQQQRSSVRTQDSPDQAMVCSRTPSN

SEQ ID NO: 320351 - protein, 372 aa, unidentified
MLIHYIDIAKRNFVIAVSSLSKTKTETNNPKGIAHTIEYLKKHKVALVVTESTVGLEIPAAKAIRRAGIAVIIANPRQTHQFAQSQSLTKTDAKDAKMPAFFAQMKAQKEDSQTMPYQPPTEAEEVLEALVNRRNQSADMRTAEKNRLHQVHETQVGSVKQLIAHFDRLIDESDKQIDDHTHTHFDGKAQVAEQIKGIGSITTATLMAMLPELGRLSHKRIASLVGIAPHPRKSGEAKFKSRCFGGRSAVRKALYMATVAATRFEPLIRDFHQRPLSEGKPYKVAVTACMRKLLETFAKFLSLTTTEIPTQVFGCFRPKYRLILPKHPLNPPRTPDNQASGLPFRRQRAHLTCWPLSTGSNTSPSGGFAHSL

SEQ ID NO: 320352 - protein, 359 aa, unidentified
MNYTGIDWHKKYWVCYTVDEKGKRLAEKKIENNTPAGFADYFRTLPGPTSVVHEACWNWGKLYDWLEEMEQVEEVVLAHPHKTRLIADAQIKTDRLDAKALATLLRGNLVARVHIPVAASRARKNLLRQRLSWARLRTMIRNRVHALVDRQHNLPLPQCSDLFGVQGMAALRSAQLADPDHHLLQDDLELLDLLKIQIKRLEKQIEADNESSPMTCRLQTIPGMGKILAAVAASEIDQIERFHRAEKLCAYAGLVPTTHASGGKTSHGKLLPWCNKWLRWAFIEAAWIAIGCSPYFGEIYRWHRARGKKANMAIIIVARRMCQSAWSMLQDNRDFSAAKPEPKPFPGRSPTELKVAMAT

SEQ ID NO: 320353 - protein, 448 aa, unidentified
MSKASRLSRGDKRRNDRLSRFRGIVRRDYAVVAIDLATTKQVVAVVDHDSRILARRTFRCAPRQLATAIEWSRTAATAAGFEGIVVACEPTGHRWKTVRDLAAAVGVQMVCVQPIAVARARETEDLTHDKSDDKDALLIARLTTQLHIYLPEAADEQWTRLRHLGVRRAQQLTRRGAAQQQARDLLEGAWPNALDCAGQPLRSVTWLAAMTVIGCTPATLTTLGGREQAVAWLRDQVRAELPSWGGRRVTTRILVAVVDAAFATQTTIGEAGALERARYALADFHHARTACEEVEAAMIEVLTGLGLHQLAGSIPGVSAVSVAAILAETGDLTRFDSARAVVKHAGLCPRENSSGNYRGTTRISGRGRPLLRVAAWRAAFAALTHNEVYATRYRHLTTRQANTLKPNQARVAIAAALLRQLFIVITTATPWNPDIAAGRTRPAERTAA

SEQ ID NO: 320354 - protein, 355 aa, unidentified
MIVIGVDPHKQTHTAAAVDAAVGELLGERTVKARRAGHEQLLAWARGYGEERLWALEDCRHVSVSLERFLLASGERVVRVPPKLMAGVRRSARERGKSDAIDALAVARACLREPSLPAARLEGPEREIRLLLDHREDLVGERTRIQQRLRWHLHELDPELELPAGCLDRHCWLDRVGRRLARGEQTAQVRIAGELVVRCRELSARCRELERELAARVRAQTPALLELPGCGVLTAAKLVGETAGVARFAGDAQLAMHAGAAPLPASSGNSNRHRLNRSGNRQLNCALHRIAVTQGRHYPPARAYLARKQAEGKSRKEALRCLKRHLARTVYRTLTAPTEAKMKPPNQAALTPALT

SEQ ID NO: 320355 - protein, 339 aa, unidentified
MEHYAGIDVSLECSSVCVVDASGGIVREGKVASEPAALIAWFGSLGFGLERIGLEAGPLSQWLFAAMRDAGLTVELLETRHVRDAFKAMPVKSDRNDARGIAQLMRLGWFRPVHCKSLAAQEVRALLTARKLVQSKLHDVEMSLRGILRGFGLKVGRTTPMRFAGRIRELVAGHTTLEVVAEAMLSVHAILRREFSGFERRVRAMARCDVRVRLLMSAPGVGAIVGLTYVSAIDDPARFKSSKGVGAHFGLTPKKHQSGEKDITGRISKIGDASVRAALYEAAHVILTRPVKGAGLKSWAMKLAKRAGMKKAKVALARKLAVILHRMWVNKTAFAAAAA

SEQ ID NO: 320356 - protein, 456 aa, unidentified
MIVARPSVKAVRRSAVLEPDAAGIDIGAQEIYVAVPPDRDQQATRVFTSFTCDLQALADWLHMCRIRTVAMESTGVYWIPLYQILEQRGFEVCLVNAHSLKSVPGRKSDVSDCQWIQYLHSVGLLSASFRPPDAICAVRSLWRHRSSLLQMAAEHTLHMQKALSQMNLQIHHVLSDITGFSGQAILDAVLAGERDPMRLAKLCHILVKTPHETVAKALVGDYRPEHLFTLKQSLEGYRFYKRLIADLDEEIARLMQALPSANEKETKLPPRTKHGVYQRNSNDPRFDLRGELYRIAGVDLTDVPGVSAITAQVILTEIGPDVSRFRNASAFASWLGLCPDKRVSGGKVLSSKTRKIKSRTAIALRIGANSLCRAKGYFGEFFRRMRGRLGTAQAITATAHKIARILYHVLRTKEPYSESVFHQCDEQAQLRAEVRLRKHAARLGFQLLPVPARSGV

SEQ ID NO: 320357 - protein, 393 aa, unidentified
MDKQLQLIVGIDIGKRYHQATVIDETGTMLGGSMRFPNTTAGGELLLKRITSVNPKGLPLLFGLEATGHYWLPLYAYLTEKRYQIVVLNPYQSDAFRKVSMSSTKTDKEDALLIAELLRFGSFPNTKMAQEDMIALRNLTRFRLSLNQQVTDSKRRILTILDQVFPEFESMFSDIFGKTGRSLLKKYPTPEEMETVSLRKLTSLITKLSKGHFKEEKAQEVKMKAKTSFGITLALDSLTLQLKILLETLEFTEKQLKVVDTQVENLLDNTCVLLTLPGVSKTLAAAIISEIGDIKRFKTSAQLVSFAGINPTVRQSGNFLGSKNHMSKKGSPYLRLALWQAAITSSRFNPILKEYYQLKIKEGKSHMTVIGAVARRLTGIIFAMLRDQTAFTV

SEQ ID NO: 320358 - protein, 387 aa, unidentified
MIYVGIDIAKRTHYASVMNSDGEILADPFPFSNDRAGFQLLLSCIGSYSKEQLLIGMESTAHYAENLTCYLFNRDFQVCIINPIQTASLRKSNIRKTKTDSVDTFLIIKALSLHNYRCFSKRDYDSLQLKNLCRFRQKLMKARTKVKIQLVSYVDLIFPELQYFFKSGIHTKSCYALLKTESNPDRIANMHLTRLSNLLKKTSKGHYTKNHAIALKELASQSVGIKDDTLSLQILQSIEQIEMYTQQISKVEASINEIMDHMDSVIKTIPGIGNLNGAMIIGEIGDISRFEKPCQLLAYSGLDPSVYQSGKFTAARTRMSKRGSKLLRYALINAAWQLTLHNETFKAYYDLKVSQGRRHYNALGHVAHKLVRVIHKMMTDNLVFDLD

SEQ ID NO: 320359 - protein, 370 aa, unidentified
MRKDTLYVGLDTDKKHIDVAVAEPLPHGEVRYWGRTANTPASVDRLIKKLGQAGRALVVCYEAGPCGYGLYRQLSGKRGVECQVVAPSMTPRRPGERVKTNRRDALKLARLLRAGELTAVWVPDAAHEAIRDVVRARATAVSVLTRCRQHIASFLLRQGIAYVGKPWTGKHRTWLDSLRFEQAAHRLMFAELLLALDQAQARRDRLTDHIRELVPGWSLSWLVAALQALRGYDLINATTVVAEIGDPRRFASPRKLMGFVGLNISEASSGETVRRGHLTKTGNKRARKALIEAAWTYSRPAALKAKPAAAHLPAPVQQIADKARHRLARRYRHLVARGKLSQVAIAAVARESLGFLWAIAHAAAPPPAAT

SEQ ID NO: 320360 - protein, 394 aa, unidentified
MRFVGIDIASETHVVAVVDETDAVLVRPTKFTEDAPGYDRLFSLLGTPADTLVALEATGHYWKNLFAVLVTRGFAVALLNPLRTRRFADEELARTKTDAIDALGIARFAAQKRPAPTRLPDRATEELRELVRLRDRLVQDFGDHLRQLHRLVDLGFPEFTRYVKSLDSERATAILHDYPTAAAFRNVSARRLAGLRYDGRHKVGDDLARALLDAATRSVGQHHGEAYRLQVRYACEDLDLLRRRLRTLERDIERTLDDHEIGALLTTIEGIGPQTAARLIAELGDPAEFRSAAALASYVGVIPAIRQSGKWTSSRAGLSPLGHAALRAALWMPVLTAVRKNPWLRAYYQRLIARGKLPKVALIAAMRKLLIAVYTVAKTRRPFVSHLAPQEARA

SEQ ID NO: 320361 - protein, 431 aa, unidentified
MSKKVAAIDVGSEKMHVAIAGGEVKVFECFTDSLHQLRDHLQAATVTSVAMEATGVYWLPVYVILEAAGLEVCVVNGAHVKNVPGRKTDLQDCQWLAQLHAQGLLRGGFVPPAQIRKLRQYVRLRQDHVSQAGQHILHMQKSLDLMNLKIHDVLSETVGVSCLRMVRAIVAGERAPATLLALCDQDVIRRKTGLLLRALRGTWDEEHLFGLRQAVEAWDFYQQQIAACDVAIEKVLQELAAQKPEPGPDAGPTLKKRRHNAPTMAGLENLLHRLSGADLSALPCLSAYSQMLILSEIGTDLSPWPTPKHFVSWLGLSPGSRQSGKRRRNQRRFRGTAGKIFCVIARSLGRSKYLALAGFYRRLRSTRGGQVANIACARKIAILFYNALKHGVKYVEQGLEAYEKKYREQSIKRMKKAAARFGLTLVEPKLA

SEQ ID NO: 320362 - protein, 337 aa, unidentified
MEYFAGLDVSMSETHVCVVTRNGAVIHNAKVPSTPADIEAELARVPPCRRVLFETGRMAPMLYHGLSQLGLPVVCVESRQAYQALKSLATHKTDRNDARGLAHLARTGFFKPVHVKSLPAHAVRSLIIARKKLVGQRVTLENQIRGLAVVFGVRLPRALSSTFIRQALQASEGIPGLSAAMRGLIAARAAVLAAVVAIDGDIRRMVKVSDACRRLMSIPGVGQLTALAFTAAVDDPERFRRSRDIGAYLGLVPRRYQSGEVDYTGSISKCGDRRMRTLLYEAANVMLTRYKGPLKLKAWALAIAKRSTMRKARIALARRLAIIMHAILRHGTEFKPA

SEQ ID NO: 320363 - protein, 387 aa, unidentified
MIIIGCDYHPGFQQIAFVDTDTGECSERRLEHREEAEKFYRDLGGQGAAVRLGMEASGHARWFERLLGELRFDLWIGDAAEIRTKRVRKQKTDRQDAELILRLLLEDRFPRIWVPRGENRDLRQLLWHRHRMVQARTRIMNQLQAVALNEGLRCKKRLWRDAGREQLEAFELAPWASRRRRDLLELLDQLTPTIAELTQAIEQEVEKCPEARRLQTHPGVGALTALAFVLIIGRADRFQCGKQIASYLGLVPLEESSGQRRRLGHITKQGNSLLRFLLVEAAQVTVRSDPEWRSKYFHLAMRRGRKIAKVAMARRLAVRMYWMWRKGWDYEQLKKFGSQRGTARNRRWCAVEHRVIDWVSRSPARGVRSSNHDRGCDRRDAWVGLSS

SEQ ID NO: 320364 - protein, 385 aa, unidentified
MRGQTFIPMDYEVFAGLDVDKRSISVTFTNHQGFLKSLRMPYSVEHLLNHVRKHFPEQKVAFAYEAGPTGYGLYDGLVAHEYRCLIASPAMIPKAPGQRVKTNRLDSRGLSENLRGGQLKSIPVPSAVYRELRHLTQLRDTFVSEMVAMKQRIKSLLLVEGIEFPPAPAGSQWSVLVKDHLRKLPCSTTVRFKLDQLLDSLAFNEKQVVKTTKEIRRFCQHEPELVQCIKYLMTLPGIGWIVASQLVARIGHWRELRNIRQLAGFLGLVPTEHSTGDRTERGSITHTGDPRLRSKLIQAAWSAIRQDGELREFFRSVCQTHPRPLASRVAIVAVARKLSVRISVVLMNQRAYEIRKPVHSAPLTQEETGPQGTPRRQAEPGANNS

SEQ ID NO: 320365 - protein, 411 aa, unidentified
MENVFACCAGLDIHQKSVEACVRRLEPTGQLHHQTRHWGTMTRDLLAMADWMAAQGVTHVAMESTGVYWKPIYNILESRFTVLLVNARHLKQVPGRKSDVRDCQWIAQLLQHGLLKGSFVPPRAQRELRDLTRHRAQLVEEKTRTVNRLHKVLEDGNIKLASVATDILGVSGRAMLEALMEGQEDPVKLADFAQRQLRGKIPELEKALEGHLTEHHRFMLRLLWKELAQQEELIAELDRKIEEHTRPFANEIERLDAVPGVDRRVAEVALAEVGSDVKPFPTHSHVASWAGMCPGNEESAGKRQRQRLTPGNRWLKRSLVQAAWAASHTKHTYLASQYRRLAGRRGRKRALVAVGHSMLVIFYHMLKDRTTYKDLGGDFFDRLEPERLTRYYVKRLEDLGHKVTLESSVPA

SEQ ID NO: 320366 - protein, 443 aa, unidentified
MARNQSRQRFELVHPHCAGIDIGSREHWVAVDRDHEQPVRSFSTFTDDLIKLADWLETLKIEVVAMEATGVYWIPLFELLDARGFKVYLVNSRATRQISGRKSDVLDCQWIWQLMSHGLLRGAFRPDDAICSMRALIRQRASKVRNQAQTLNRMQKALSQMNIQLANVISDISGVTGMKILRAIIAGERDPAVLAELTDRRIKASKETIARSLHGNWRLEHLHALGQEVECYDFFEQQIGACDKAITDALSQLPEREEAPQPSRKILRSPHRCAADQAALHQSLWRVMGVDLTAIPTIGVDTALIIAGEIGPDLSRFPTMEHFCSWLGVAPPTRISGGRQLSGKSQKTLNNAAQAFKQAASNARNDKSFIGASHRARLARMDTSCAIKATAHQLARLIYAMLTKGQPYVEQGIEAFEERSKEKQYRALLRKARKLGLDLVKAS

SEQ ID NO: 320367 - protein, 364 aa, unidentified
MESFDCIGCDVHKDYSVFRMFDAQRKVGPPIRIRHENGELERFLKTLPPGSHVGFEACGSWMWMARQVEDAGLVPRLGHPLEIKRRIAGSTRTDETDSAGMLILLANGTFPEVWMAPPMVRDLRGLVRTRLAIRRQESAMKNRVHGVLNQYGLKNSVEEEDDVGIPDWFSRKAQEQLQRAIEQLPPASREATRQQWMAIQDLERRVKSLELAMEARMGKLGWLRLLQTLPGVGKILGATIWVEIGEGKRFPSAQHLARYAGVVPQVQSSGGKTWRGSTRKDCNHYLKWALVEAANTVAARRAKWGEKYPHAVGLYQRVKATTKLSGKAKVAVARHLAEAAWWVLTRKQDYREPTSARVTSSHNG

SEQ ID NO: 320368 - protein, 429 aa, unidentified
MNYTQNEKLLQVGEGNLIVGIDVGSSKHYARAFDWRGIEYSKKAFAFSNDAEGFAGFLEWVSLILEKSGNETVIPGMEPTGHYWFDFAKFLQDNGIKPVLVNPLHVKRSKELDDHLPSKNDRKDPKTIAKLVIEGRYAYPYMPDGIYAEIRNASNLRFQVEAELTRDKNRIQRWFAVYFPEYSEVYGNFDAISSMMILKQAALPSDIIQLGAEKINQIWRDAKLRAVGKKRAQTLVEAAQRSIGYTEGLDTARIEISLLLEDFERLQKRLEQIIELIEELVGKVPYAEKLLQIKGIGMKTVSGFIAEVGEISRFTNAKQLQKLAGLAIVENSSGKYKGKSRISKRGRKRLRYLLFEAALSLTATNPEFREIHRYYTSRKENPLKKIQSLMVLSNKLIRVFYTMLRSGADYDPEKLLSDIRRPEEVPTAA

SEQ ID NO: 320369 - protein, 344 aa, unidentified
MNYMGIDHHKQYSHLTLVDERGQEIKSGRVENLRREVEEFLKGVEGKIAAAIEAGCSSYTMVDLMKGLGVEVKVAHPKELRAIAAAKIKTDKRSAETLAHLLRADLIPEVYQRREENRQAQRVLRQRVFFVRSLTRVKNRIRALLAQQGEEVQSEVSQVRNIFSRAGQRLLRELPLAEPDKSLLQSLLKNYKHLEARIKESDRLVHRLYRQMRPARLIRTVPGFGKFFSVLVATEIADIKRFTKVGSLHCYAGLVPSTYSSGQRSYQGRIIKEGNQWLRWAVVEAVWPAIRADFDLRLYYEKLKKRKKSNVAKVATARRLLSIIYQLLKEDRPYLPYRREGHKR

SEQ ID NO: 320370 - protein, 355 aa, unidentified
MTKYSIGIDISKSDFHASFSTIDEKQYVKVIRSGTFKNNKIGFEAFDKCIKTTCSISGIPVSFTMEATGVYYENCALFLFSKGYNVSVVLPNKSKKYIAALGIKTKNDKVDAKALSRMGAEQALEIWAPMGEFFYHLRSLTRHNQSLKEMRTVINNQVEAAENCMYVDKVSIRSLGKLIKALEIQIEENTEAITAHINANEPVAKKIENITAIKGVGVLTVAVILAETNGFELFKNIAQLVSYSGYDVIENQSGSHTGKTKISKKGNSRIRRALHMPSFCLVTHDVKVFKDLYERTVDKHGIKMKSYVAIQKKLLGIIYTLWKKNEKFDENYQSKITTKEEKVEHSSRISFAEAV

SEQ ID NO: 320371 - protein, 398 aa, unidentified
MIYVGIDWARKHHYVVVLDPNGTRLHQQSVAHTAEALAALAETLSDLEPDPEAVRVAIELHDGSMLVWLAQHGYSVFPLNPKSADRARDRYNASGAKSDKGDAFVLADTLRTDAGFLRQLTPPSERAQELLEWLQIRDGLVRERTAVLQQLRAILDEWCPELSRLCSDLHCQWTRALLTAFPLQQDLAGVDLARVQAACGRKFTTVTKERLEATVSAECLPIPPGRHETLRWRVRHLVARIEQLSMEIKEIERRLQTLADAHPYARLTWSLPVRGIVTRAALLAIMEMANGATWRELAACWGVAPVTKQSGKKKSVRRRRACDHFICQVLIQFAHCTALIEGSWAQEFYRQKRDNGAAHFTVLRQLARQWVKVLCSMWRNGTTYDERLHQNNRNRKAA

SEQ ID NO: 320372 - protein, 338 aa, unidentified
MLHVGLDLHKKYSTVAVMDDDGNIQLEDTLYHDDRPRLIEFFSKLAGKAVVTVEATRDWYWLYELLEELGVTVKLAHARKVRLIAESWLKSDKVDPKSLAQLERTGFLPEAYISPREIRDNREYLRYRLTLVRLRTGLKNKVHALVDKLGIKHPFADLFCPAGRRFLSQLTLRPAYQEELTNYLALIEDLERRIVAATKEIKRQLKPDHRAKLLMTLPAVGHLTAYLLLNEIGDIKRFPTPGKLCAYGGIVPIVRQSADHRWQGHITKEGNRYIRWALTEVACLAPSKDYALGSFYRRLKARRGNLKARVAVARKLLVAVWYVLTYGEPYRTTAIPTI

SEQ ID NO: 320373 - protein, 318 aa, unidentified
MPEPIVIGIDIAKRTFDAAFGVAGTIESFPNDDAGHDALAAKLAGVAVDLIVMEATGGLERDLACALQACGFAVAVINPRQARDFAKAMGYLAKTDRIDARALAELAQVLARHPERDRFISVLPTPEQQVLQALVARRRQLVAMHVAEHQRLSVSHQAARKSIEALIQAIRAQLDEVEAELARHIETHHANLARQLASVRGVGPATVATLIADVPELGKLSRREISALIGVAPFNRDSGQMRGKRTIFGGRGQVRRSLYMAALAAIRFNPVIRTFYDRLVLAGKPKKIALVACMRKLLTILNAMVRSGKSWDDSLHLA

SEQ ID NO: 320374 - protein, 343 aa, unidentified
MNVTTIGIDLAKNLFQLHGVDARGKTVLRKSIRRDQMVEFFAKLPPCLVGMEACPGAHHWARTLQQFGHTTRLMAPQFVKPYVKTNKNDAADAEAICEAVGRPNMRFVPIKTVEQQALLSVHRARAGLIKARTAQANQIRGLMAEFGLVIAQGIRHIRSQVPELLERAGDALPGVFRFLVQSQLAHFRHLDDEIGQLEQQIKAWHRDNEMSRRLEQIPGIGPMTASALIASIGDPKGFASGRQFAAWLGLVPKQHSSGGKPKLLGISKRGDVYLRMLLVHGARAVLSAKKRFDRLTPWMDELLKRKHANVAAVALANKNARIVWALLAHDRDYRADHIARAAA

SEQ ID NO: 320375 - protein, 441 aa, unidentified
MAMRKRELTVMHPNAAGIDIGSASHYVAVTPDQSEEPVKEFGCFTEDIEAMADWLIECGVNVVAMESTGVYWIAPYEILESRGLTVYLVNARHVRHVSGRKSDVLDCQWLQQLMSFGLLSGAFRPAGEICALRAISRQRDTLLSEQARQVQRMQKALTQMNVQLTNVITDIVGKTGQDIIRAIVAGERDPHKLAKLRNYRVHASAETIAKSLEGNWREEHVFCLSQALSLFDTYQALIVAVDAKLEEMIKPMRQHQEALAANKSKGRGKNAPAFDARNALYQWAGVDLTRIGGIDVSTALKVLVEVGTDLSKFENAKRFASWLGLCPGTKISGGKKLSSASKRIPNRVTQALKLAAQGLHRSHCALGAYYRRMAARMGVGKAITATAHKLARLIFAMLTKGGEYVERSQEQYEDQMRKRTVAYLKRKAAVMGFSMQPIEAV

SEQ ID NO: 320376 - protein, 458 aa, unidentified
MSRERSKPIRSGQPEWSLNLDVVHPNAAGIDIGNESHYVAVAPDRDPNPVRQFACFTEDLHRLADWLKSCGVDTVAMQSTGVYWLPVYEILAENGLEVYLVNARHTKNLPGRKTDVQECQWLLQLHTFGLLNNSFRPPEEICVLRAYWRQRGEHVAAAGACIQRMQKVLTEMNIQLANVISDISGLTGMAIIEAILHGERDRYKLADMADPRIHATREEIARSLEGNWRKELLFILQQERNLYQIYQQQIAECDTAMAAHLQTIDGKVEPGSQPPAAKPNKRAGSNAPTSFDVRGELYRISGTDLTQIDGINIMTAQTIIAEVGVDMSRFPTEAHFASFLGLCPDNQITGGKVLRRGTRHVQNRAATALRMAAATLWRSKTYLGAKFRRLRARLGAPKAITAMAHMLARLVYRMLRYGEQYVDKGMSYYEERYREHEIRSMQKRAKELGLQITLSPAV

SEQ ID NO: 320377 - protein, 374 aa, unidentified
MRDHIEAFVAFDTSKLRNAVAIAEAGRTGEIRFLGEIDNDGAATGKLVRKLAAKYERLTFCYEAGPTGYGLYRQIEGLGYDCMVVAPSLIPKKPGARVKTNRRDALSLAKQLRAGELTAVWVPDRRHEAMRDLTRGREAAVEDLRSKRQQVSSFLLRQGLHFTGKKTWTKAHMSWLASQKLEYAEQRIAFEEMLLAIRQAQERIERLEQAVRAAVPDWSLAEVVTGLMAMRGIDLIAATAFLAEIGDLSRFQTPRELMAYLGLVPSEDSTGDTVRRGPITKAGNRRARRILVECSWSYRHPPRVGKKKQEKVAAAPRAVREIAWKAQCRLSARYRALTRKGKLATVAVTALARELAGFIWAINREIAAPGPVAM

SEQ ID NO: 320378 - protein, 341 aa, unidentified
MQITTIGLDIAKNVFQVHGIDATEKVVVRKQLRRGQVMKFFASLPPCLIGMEACATAHYWTRELTKLGHEVRLMPAKDVKAYVKRNNNDAADAEAICEAVRRPTMRFVRAKSAEQQGKLMQHRTRDLLLRQQTQVINALRAHLAELGIVAAQGREGLKELLAIIADQADARLPLDARASLIVLAAQLQALHTMIDSIERRLMLQHRASEESKRVATVPGIGTLGASAITATVTDPSAFRSGRDFAAWIGLVPRQDSTGDKQKLGPISKQGDRYLRRILVVGAHSVLRRAKQNPEKYPWLTQLLARRPFKVVAIALANKMARVAWALLARGGTYRVPARVAA

SEQ ID NO: 320379 - protein, 350 aa, unidentified
MYVGIDFHKRNTYVTRMDEEGNIMKQENLKNDPDALEDFVNSLSKEDQVVLEATGNWYYFYELVEEKALSITLSHPAKTKAIASARIKTDKIDSAMLAHLLRTNLIPASYIPERKIRDVKEILRYRASLVSIRTGLMNRVHSLLSKNGIVCPYSHIFGKKATLWLLSLSLRPYYRKALDGYLHLATTLKEEIIQVEKEIKRLAEEDKRTSLLMSMPGISYYSALLILSEIGEIKRFPSAGCLCSYAGLVPSVYSSGGVTRTGRITKTGSTCLRWILNENAMHAIKGSYRFEALYRRVTYRSGKNAAKTAVARKMLVCIYHMLTRGEPFKDITPKSKGKRTRAGKLGGVIV

SEQ ID NO: 320380 - protein, 447 aa, unidentified
MKQNKPSRKKNPKFPKHLQHLNQYAAGIDVGSRSHFAAVPEGADEQPVREFSTFTDDLERLAKWLISCGVTTVAMESTGIYWIPVFEILERYGLEVRLVNARHVKNVPGRKSDVLDCQWLQQLHTYGLLRGAFRPTDQVCTLRAYVRQRANLVRSASSHIQRMQKALAQMNLQLHNVVTDITGVTGMGIIKAILSGERNPNTLAAMRDKRCKNSKETIARSLQGNYRPEHLFSLQQAVELYEFYLQKIADCDQLILAQLKHFDSSDGSDPDSKPPRSVEEALQRMSGVDLSGINGISTNTALKVIAEIGIDMSRWKTEKHFTSWLGLCPGSKISGGKVLSSATKPVANRAAAALRMAAMTLFNSKSALGAYLRRQKSRLGAPKAITATAHKLARLVYSMLKHGTAFADAGQEQYEERYRSRIVQNLKRRAQEMGYKLVSIQEEPQTV

SEQ ID NO: 320381 - protein, 417 aa, unidentified
MCPLNTGKLKVRFIGLDVHKHYITVGGMNIKQEIVLRPRDVEMERFKIWAEQNLEKTDDVVLEATTNTWEVYDTIAPLVRRVVVAHPAEVKQIANSRVKTDNQDVIRLVRLLIADIVPEVWVPPVEVRELRALISYRWRLVKMSTAIQNRMHSLLHRHNIQAPEGKIDTGENREWWEKLKLSPLETLRLKQEIKTLRLVREHIVEVEAELGKLSTSQRWGDQAVYLMQIPGVGVIVAMTILSAIGDHERFASPKKLVGYAGLGAGVHDSGQMHREKGITKFGRKELRWALVEASWQAIRANSGWRAQYDALCKRKHPNQAIVAIARKLLVTIWYLLNGQEAYDRSSDEELAYKMLTWAWHIEKDALNGMTRQQFAKYGLMRLQRGENLTRILRGGSPRRIASTEEVLALKPELQKPQ

SEQ ID NO: 320382 - protein, 332 aa, unidentified
MVVGLLGSLVRVHRGACPLYAFPMVFVGVDVSARRLDVAIGSEVRQFPNPEGIPELLRQLPPGAVVGLEATGVYGRPLAFALHRSGFRVYVLNPLAVKSYARSLLRRAKTDRADARLIARFLAERHADLEPYEPTEDVLYQVGLLVRFARGLVAQRVAVLNRLHAWEYAWPDGLGLVLRVPEVLASLRREVEAMALSLLKTDPEAWRHFQALQALPGVGPSIALTILAYSGDLRRFRSARAYAAYTGLTPRLYQSGQLPERASISRMGPSALRAAFWMAALSASRVEPYASVVARLVQSGKPKKLAITAVANRLARAAWSVVAKGGLDKWEL

SEQ ID NO: 320383 - protein, 345 aa, unidentified
MKKRIEGVTVYGIDIGKNSFHVVGLDSSGKPVLHSKFRRDRLLEHFANTPAALVGMESCPGSQWLARKLQASGHTVKIIPAQFVKPYVKSNKNDMVDAAAIAEALTRPTMRFVQVRQPEQSARQALHRVRDRYMSQRTGLINQMRGFLLEFGIAVRQGAGVFRMDIPRVLGDEENELPPSMRSLLADLWNDFKLLEVRIEELSKQIQRSVQYSDTARRLMTVPGIGPLAASALEASAGNGHQFTNGRFFAAWLGLVPREYSTGGKTTLLGISKRGNTYLRRLLIHGARSCVQTCDRQRHPLGAWISSLEQRMHRNKVIVALANKIARVAWKILIKPDEIYRWAEA

SEQ ID NO: 320384 - protein, 343 aa, unidentified
MEHFAGLDVSVKETSLCVVDGTGRIVREVKVASEPEALLAVLKGPAYRFKRIGLEAGPLSQWLYSVLAEAELPVVCVETRHMQAVLKAQINKTDRNDARGIAQMMRAGLYRPVHVKTLRSQKLRMLLTHRQLLLSKAIAIENDLRGTLRNFGLKVGMVGTVKFETRIRELVENLPDLAVLVEPLLVVRRVLRQQIGLLHCHLLTIVRDDDVCRRLMTVPGVGPVVALTYRATVDVPARFKNSKAVGASFGLTPSKYQSGEIDRGGGISRCGDEMTRVMLYEAAQVMLTRTNKWSWLKAWAMRIARHRGMKKAIVALARRLAVILHRIWLDGTVFRWTREVVAA

SEQ ID NO: 320385 - protein, 426 aa, unidentified
MKNTQNEKISQIKFSTLVVGIDVAKETHYARAFDFRGIELSKLLRFSNTAEGFQRLEEWMQNICQQHNKTEIIVGFEPTGHYWFNLGDYLKDKGHKLAIVNPFHVKRTKELDDNSPTKNDRKDPKTIAMLVKDGRYREVYIPQDVYQELREVVSERDRLVQRMSSISNQVTRWLDIHFPEFNTIFKDWQRKAALQVLRNFPTPDKIVTAGAVKIEETWKLTMKRTAGLKRAQELVKVAGKSIGRKTGLVAAEASLQNLLNEYDLYSQQYQQLEQLMLELLQQVPNAEKLLDIKGVGLITAATFVGEVGDIRRFQDPRQIQKLAGFNLVENSSGKHKGKTKISRRGRRRLRHGLFMAMITILATNPEFRQLHKKNITRENNPLNKMQSIIALCGKLIRVFYALLRTGTEYSADKMMGDIELGMKAAA

SEQ ID NO: 320386 - protein, 429 aa, unidentified
MNYTQNEKIEQVTDTTLVVGIDIGSQLHYARAFDNRGRELTKKVFSFGNDLEGFNSFNQWAESLKTENNKTNVIIGCEPTGHYWFALAKYVADHQKTLVMVNPFSVKKIKELDDNSPKKTDAKDPKTIAKLVVDGRYSIPYTPEGIYAEIRDLVNSRDRIVKQHNISANRIQRWLAIHFPEYLGLYTRFDASCGLAVLEKAPLPMDVIALGVDGIRKIWHEKKLRGRGVTEDRAKTLVEAAHNSIGLDGGAGTRSELYMLLEEHKLWTSQLESVERVIGETVLKVKHVENLLAIKGVGIITIAGFIAEVGDIRRFKSPKQIQKYAGLELVENSSGKHKGKSKISKRGRRKLRKILYQVMIPLLARNNEFRQIYDYYVCRVKNPLKRRQAMIAVSCKLIRVFYVVLTKGTDYDRFKMMSDIHHENEHTAA

SEQ ID NO: 320387 - protein, 444 aa, unidentified
MTPSSPATESPIVAYVGLDWADQQHVVCWRAADSIQLHTAIVRQQPEPLRAWVAELRQRFPQGLIAMALEQSRGPVIAALMHYDFLRLYPINPKSLARYRETFFSSGAKDDPGDAALLLDLLVKHREQFSPWVPDDALSRQLALRVEHRRQLVDLRTALTHQLSSHLKLYFPQALDWVGELDRPLACDFLERWPTLEAVQQVRPAQLEQFYHDHHCRRVHLIQERIGQIQQARPLTEDPALVEASSRMVLALVAQLRVLISTLEQWQAEISQLFARHPDAFIFASFPAAGPVFAPRLQSAFGSRRERFAAAPDLLQFSGLAPVTRRSGKSLQVHRRWARPKFLHQSFVEFAALSIPHCGWARALYHQLRARGHRHWAAIRVIAYKWVRILFRCWKDRVPYDESKYLESLQRRNPQLWAASQQPPPPRKTAAGRKQLVEKTVPAL

SEQ ID NO: 320388 - protein, 385 aa, unidentified
MPEIDDLSRSIVAFDQDRTLIAVAELSQSSWLVAGLLPGIDRRPLKKLEPDPVALFQLIDRWRREAEKTGLSIDRIVLAFEAGRDGFWLARWLRAQGIEVHVIHSTSVAVSREHRRAKTDRLDTVLLMRVFLGWLRGERDHCRMVAIPTIEEEDAKRPNRERESLVGERTRLINRMKGALTRLGIRGFKPELRRAPEQLAALRTPEGLPLPPNLLEEMRRDMARFALVREQIAAIDKARVDRLQRTPASGSQAMVALLARVIGVGVATADMLVHEILNRRLRDRRAVARYAGLTGSPDESGSRRREKGLAKTGNARVRRGLIQLAWRFLIFQKDAALVQWYQARTAQGARKTKMIVALARKLLIAFWHMVTTGEIPAGFALRPAG

SEQ ID NO: 320389 - protein, 372 aa, unidentified
MKVTYQTCCGVDVHKSFLVATIVKTTGGVEPSYQKKRFSTFNNSILEFKHWLLDNDCLDVCMESTGKYWVPVFNLLEDEINVVIANPKWVKAVKGNKDDTKGSKWIGDLFRLGLVKGSYIPCKKVRILREYTRYRYKLVSYRSSEKNRYQNALTVCNVALDSVVSDIFGKSSSSIIDYLLEQSDTSINHEEIASKLLRRLKSKEDAVQFLCTIPGVKRDSAITVISEIGTDMSQFSSSKRLCCWAGLTPGSNESAGKKKSVRITRAGIYLKPALVQCAHAAVKSDKSPYYKKKYDSLVKRRGKKRAIIAIARMILTAIYQMLSTGEQWNPSDLYKIDMPVALVEKQKAKAIKQAKKLLQREGILPPDEPLAS

SEQ ID NO: 320390 - protein, 345 aa, unidentified
MGNFAGIDLGKRKSQIKVITSERKVVEELKIENDPKAFVRVFKKYKGDIEVACEASSNAFWIADVLAPLVRKVHVGHTSRIRWIAAARIKTDKIDAGILAELLRADLFPEICIPPRRIRELRELVRGLIRMRRNALRCRNQVHGLLCRHGVSYKRSEMNGAALAELVNEAALATPARLSAQSTLRVEEAIQKEAKHLQAAIREEIKAEPELLKVAGLLESIPGVGFFSALLLILELWDISRFRDEAHLASYIGFVPSTHQTGQSMHHGAMTKQGNVLVRWILVQDAWAAVNSNGFFAARYQYYRAKKGGPRAIVPVARALLKTIFQVWTLKKSYSEIYGEKALVG

SEQ ID NO: 320391 - protein, 293 aa, unidentified
MENIALIGIDLGKNSFHIHCQDRRGKAVYRKKFTRPKLIEFLATCPATTIAMEACGGSHFMARKLEELGHSPKLISPQFVRPFVKSNKNDFVDAEAICEAASRPSMRFVQPRTESQQAMRALHRVRESLVQDKVKTTNQMHAFLLEFGISVPRGAAVISRLSTLLEDNSLPLYLSQLLLKLQQHYHYLVEQIKDLESQLKRKLDEDEVGQRLLSIPCVGTLTASTISTEIGDGKQYASSRDFAAATGLVPRQYSTGGRTTLLGISKRGNKKIRTLLVQCARVFTCTGSLATTN

SEQ ID NO: 320392 - protein, 338 aa, unidentified
MKVYAGIDLHSTNNYLGVIDQTDRRLFDDKLPNCPKTILAALKPFKKKLVGIVVESTFNWYWLVDVLNENGYKVHLANPAAIKQYEGLKHSDDQRDSFWLAHMLRLGILPEGYIYPKAQRPLRDLLSRRGLLVRHRTAQILSLQSMISRNRGRELTGNDVKALLPGIMEHIFDQKHLILAGETSLATILFLSEQIRILEKEIRASARPRREFKILQTMPGLGTILALTIMLEVGDIARFPSVGDYSSYCRCVKSERFSNGKKKGSGNRKNGNKYLGWAYVELANFAVRYCPHAKRFYQRKKAKTKAVVATKALSNKLARASYYMMKDNVAYDPEKLFS

SEQ ID NO: 320393 - protein, 451 aa, unidentified
MSPKPEVPAEALGLVHPHAAGLDIGAAEIWAAVPPERDEPSVRAFGTFTPDLQALAAWLAACGGTSVAMESTGIYWIPIFELLEARGLEVYLVNARHIKNVPGRKSDVADCQWIQRLHSYGLLSASFRPEAEMVVLRAYLRQRTMLIEHRAAHIQHMQKALHLMNLQLTQVLSDVTGVSGMAIIRAIVGGERRPAKLAALRNARCQRSEAEIVKALTGSYRPEHLFALKQALTLYDAYSTQLAECDREIESHYAAIKPRFDPDDPDTPLGPDPKTNTHSKNAPDFDVRRQLFQLVGVDLTEVHGLHVSSVQQLLAEIGTDMRKFPTVKHFCSWLGLAPHNDITGGRVVRSRTIKNHNRAGQVLRLAAQSVGRGQSALGAYYRAMKGRIGVAQATVATAHKLARIIYFMLRDRQPYQPISPEEYHQRQHTRQIAALKRKAAKLGFTLQPQAV

SEQ ID NO: 320394 - protein, 338 aa, unidentified
MKTHIGVDLHQRFCYLTAVDARGRVLRQGQVANQPAALQQWLGSVESPRQVVVEASGFWPAFQRAARNHAERVVMVHPQRVKAIASAKLKNDRVDAATLAHLSRCDLLPEAWMADETTQQLRLRVRLRINLGRQRARAKNQLQAVLHQEGFIKPVSDLFGKRGRAWLQSIELSAAGRLVVDTWLREVDRLDGEIATQTRELERGAGGDVRARWLQTVPGIGAYSAMVMLAEIGDAARFASKQALASYAGLVPVVRESAGKRRRGGITHQGSNTLRWIMLQVAQVACRCSPAVRAWYTELRRRKPAQVARVAVARKLLCVAWALLRHGVCFDEQVFARS

SEQ ID NO: 320395 - protein, 340 aa, unidentified
MKKLSVVGIDIAKQVFHLVGMDEHGTILVRKRLYRAQVMAFIAQLPPTLIGMEACGGAHYWARCFREHGHEVKLMAPQFVKPYVKANKNDMRDAEAIAEAVTRPTMRFVPTKDVGQQDLQALHRVRERLMGERTALVNEVHGLMHEYGIVIPKGVAKCRQAVVEKLESEQDKLTPLSQEMFWKLVEEFVALEKQLAYYQEKLEALATTHPECQRLMTIPGIGPLSATALVAAVSDASAFKNGRQFAAWLGLVPRQHSTGGKERLLGISKRGDSYVRKLLIHGARVTLRWVGLKTDRRSQWMRQLLERRGKNRTAVAVANKNARIVWALLTSHQDYQPVQG

SEQ ID NO: 320396 - protein, 417 aa, unidentified
MRVEEKIKRITPNTLICGIDVGKTKCCARFCDYRGMEVYHKVWFDKTENLDIIGCNITAAMYEENKTDVIIAFEPTGHYWLNIDKYFKECGQETVLMPTYTVKQSKEQYDQNPTKSDPKDALLIARLTSEGKYVKPIEREKLYQDIYSGYHIYDDIQKEINKIKNKIHVWNDKYFPEIEKVYKITSESIKPIYERELLPNEIKNMTLEAFTEIMTKNNRYSKKSNIQKLKELCKKSNGINPDKFTKQEIKRLYERYQELLKECEEIEKELIELASQIDYVEKAVEITGIGYISIIGIIAETGNLKNYEHAKQVLKMSGLSLKESSSGQKKGKKHISKRGRAKLRRNLKQIGIVLVGKNSFFLQLHNYYTTQRENKLSKLISINAIIRKFMYILMAIVKSGESFSEEKAIRESCINFS

SEQ ID NO: 320397 - protein, 343 aa, unidentified
MGEVTTIGLDVAKSVFQIHGVDAAGTVVVRKRISRAKVLEFFSILPSCLVGLEACPSGHHWSRELRALGHTVRLMPPSYVKAYLKRSKNDANDAAAICEAVTRPSMRFVPIKSEQQQSGLILHRSRQLLVRQRTMLSNAIRGHLAELGIISAKGRNGTSELFKIIADEKDGRIPAAARFSLDVLARQHAAIAAEIGAIEKRIHAWHRSSEESRRLEQIPGVGPIVATALVSEVGDWKEFSSGRSLAAWIGLVPKQHSTGGKERLGRISKEGNRYLRWLLVTGAMAVIRYARQHGTRRLWLAHIMERRPIKVAAVALANKIARMAWAMMVRGEQFKEPRLLPAA

SEQ ID NO: 320398 - protein, 387 aa, unidentified
MIFVGIDIAKNTHWASAMNSDGEILLEPFSFQNNNEGFQKFISKLSNFDKQNMLIGLESTAHYGENIISYLFSLDYKIGVINPIQTSNLRKSNIRKTKNDKVDTFIIIKSLTLNNYNLVTTRDINNIKLKGLSRSRHNLIVMRSRSKIQLASFIDQLFPELNKFFKGNLHLNVSYQLLKEYSSPKDISSLHLTKLSNILHDNSHGRYNKEDAIRLRELAKNSVGIDNPTLSLQIKQAILQIELYTEQIEEVEKLSKQILDELKSKILTIPGMSYNQATAIHGFIGDINRFNKSCQLLAYAGLDPSVYQSGNFEARSTRMSKRGNSLLRYNLVYAAHNLVLHNKTFKEYYDLKRSQGKSHYCALGHCAHKLVRIIFKMLKSNVDFDLD

SEQ ID NO: 320399 - protein, 353 aa, unidentified
MEYIAFDAHKHYTLASVARPDGQLVREQRIAHERGALQQFLERCEPGSPVAVETVGNWYWIVDEIEAAGCVPRLVHARKAKLMMGEINKTDKLDVRGLNQLQRTGTLPTVWIPPGQLRDQRDLPRTRIVLVRQRTQLKNRIHANLAKYALHDLEVSDLFGARGRALLRQRLELLPPCTAYTTQHLLEQVERLDHQLREFEQRIRTLFTPTPAIQRLLTLPGVGLTLAVLIALEVGDVARFHTAEKLAAYAGTTPRVHASGGKSRFGPSRPDVNRYLKWAFVEAANAICLNRRRAPRRHVTRLYERVARRKGHQKAIGALARHLAEATYWVLTKQEAYREPHTAAVSSTGDKRG

SEQ ID NO: 320400 - protein, 397 aa, unidentified
MPTMTQPVAQPQRQAQRQAQRRAQFESQFESQFEPRPVLGAGRVTGGVDTHKDTHTAAVLDPTGRLLGHRQFPTTPAGYALLLGWLRAHGEVDKVGVEGTGVYGAGLALYLRVAGVELVEVDRPDRKTRRRQGKSDPVDAEAAARAAQAGRASGIPKDHAGAVEALRALRVTRRSAVTARAQAQTQMKSLLVTAPDPLRSQLREMGERQLVAHCATRRPDRRPERGALADPTTATRIALRALARRHQQLSAEIGELDALIAPLVTQINPALCALLGVGPDVAGQLLVTAGDNPARLRSEAAFAMLCGAAPLPASSGRTQRHRLNRGGDRQANCALYRIVLCRLRWDPRTRAYAQRRTAEGMSRKEIIRCLKRYVAREVYTALLNPLPSSVPASTCAA

SEQ ID NO: 320401 - protein, 388 aa, unidentified
MEARLVDTTPTARNDALARCLIAIELSKASWVVGVQTPLSNKTSQYRLAGGDWQSLLKLIERIRRQVSRELGRPVEMISCYEAGYDGFWLHRLLEAHGVRNHVLEPASLLVNRRARRAKTDRIDVERMLRALGRYLRGEPDACSVVRVPSVEQEDARRLHRERHRLIRERVQHVNRIKGLCATQGIYDYEPLRSDRKAQLDGLRTGDGRTLPTRLKAEIIRELQRLELVLKMIAQIEAERDAIVKEAAPQHLNAGKIKALVNLKSIGPEFATTLVGEVFYRSFDNRRQVGGYIGLAPSPYSSGSMDRDQGISKAGNPKARSTAIELAWMWLRYQPDSTLSIWFRQRVGDRKGRVRRIAIVALARKLLVALWRYLETGLVPAGAVFKTR

SEQ ID NO: 320402 - protein, 407 aa, unidentified
MNHVIALDVSKGKSSVVMYNQYRQCEYEGELNHTRVDFERLHNRIEEITKFDGQAPEIVFEATGVYSKSVEAFLKNHGYTYSRMNPLEANLQMAKMRRHKTDVSDAHELAKTHFKMERETTYVQEDYYEQMRALTRYYDEVDEEIILLKSRMHAILHMSFPELEKLITPSSALFLNIVQLYPHPALVLAHSKTVIKNHLKANTKKNLSLTRAEKKAIELIEAAQNSYPAIKPTDVRCDQVKDYAIRIAELKDKKEALVQQMKTLSKERQEYLVLRSIPGVGDSTACRLIGEIGDIRRFKNAKQLNAYAGIDIMRYQSGNTQYRDRINKRGNKHLRKILYFMIQGMLMLKEKPNHFADYYYKLKKQPQRKPHKVAMIACVNKFLKVTFQLLTRGILYDYESALPAQKS

SEQ ID NO: 320403 - protein, 415 aa, unidentified
MEGRSLEEKDAVEAQTRFVGLDVHRRYATVAAVDSKQQVVLTARHIDFEDFDDWVRKHLRRTDLVTLEATSNAWHLYDKLVPLVASVTVANPMQIALIGKTLVKTDPRDALTLARLLAAGILPSVWVPPVEVRELRALGGHRSRLIKQRTQARNRLRAVLFAHNLFPPTGEAFGPANRGWWEGLDLPGSEKLRVRQDLSILDSLEPLIKEVEAELVRQSSLEPWAEQTAFLVQLPGIGVHNAMLLLAAIGDIGRFDAAHKLVGYAGLGARVHSSGEEQYGGRITKQGRRDIRATMVEAAWVAVGGHPYWKELFERLAYRVGKPKAIVAIARKLLVVVWHVLTKHVADRAAVPEKIAGKFLEWSWKLGRVNRAGLTSGAFIRRELHRLELGENITAISRGNRKFPIPLAEHAEAVG

SEQ ID NO: 320404 - protein, 356 aa, unidentified
MSTITLGVDLAKNVFSVCAMDGAGHVVQRQDLKRDAFAQWLAQLPVGSVVAMEACSGAHHWARRCLEHGLQPRIIAAQFVTPFRKSRTIKNDRNDAEAIATAARQGNMRFVPVKTLDQQARLAVHRVREGYKVESLALANRIRGLLAEFGIVVAQSDVALRRVLADLDAHAGLPGEVCNLLRELRAHWARLHEAVDACDARIADHVREDTRCQRLREIIGVGPVTADATVATVADARLFKNGRQLAAWLGLVPTQHSSGGHARLGGISCRGDAYLRTLLIQGARSSLQRAKAVAIDKATPEQRWIRMLDARLPFGKVLVAIANKHARQIWAMLAHDVDYDPHACLAHPMHRQIQPA

SEQ ID NO: 320405 - protein, 369 aa, unidentified
MNSNTQNEKITSITENTLIVGMDIGSMNHFARSFDWRKVECSKKPFPFLNTEDGFAEIHEWIEKQREDNNKKDVIVGMEPTGHYWINLAIFLIGCGYKVVHVNPAHVKKSKEMDDNSPSKNDRKDPKVIAGLVSEGRYCIPYIPDGIYADLREYNFQIRQITQRSTELKNLIARWFSIYFPNFLDVYSSYTAKSALMVLDVAPLPDDIVKLGEDGINKIWRDAKLRGVGPKKASELVEAARHSVGSKRAADAAREEIKRHIRDLKQAMEDLAKLKTVTETVLLKVPYIEKLLAIKGVGFGTALGFVAEVGDISRFHNPKELQKLAGLQIVNNESCKYKGRPHISYRGRKHLRYVMYEAAISVLGHCEEF

SEQ ID NO: 320406 - protein, 391 aa, unidentified
MSMYFVGIDISKYKHDCCIISAADQKVVSKFTFKNDKAGFEELLTVLNSLSNPEDIKIGFESTAHYALNLELFLENAHHSFMEINPVLIKEYKKSTTLRRTKTDSVDCESIARWLMTVEYKPRSKGFYHSYSLKSLTRLRDRLIRQRSFYLVKITNVLDHTFPEFKPFFNERLSKTALYLLENYGSAEKMARMNSASYDKLRCISRGKFSIQQFLRLKELAANTVGVNNSIFDIELNSLLTLYKSLVKEIDTLESEIHKLIEEVHPHYLTIPGIGPISAAVIYAEYGDISNFSNPGQMLAFAGIEPGINDSGTESHDGRMVKHGSSQLRYVLLNACLPLIRFDLTFATYYAKKRAEGKKHRVAITHVAKKLIRVIYALERQDIDFNTQKLR

SEQ ID NO: 320407 - protein, 358 aa, unidentified
MKPQNNHLDFCNQEFYVGIDTHLKNWKVTIRFNGIELKTFSMNPSPRELFNYLNKNYPNGNYHLVYEAGFSGFWPVREFNNLGLHCIVVNPADVPTSNKEKVNKCDPIDSRKLARELENNSLKGIFVPNIFQEELRDLMRLRFRIVQNQTRIKNRIKSFLHTKGIKIPLHFTGNKRWSYNFIIWLEELNLSSSAGNFTLKNMVLQFKVLREQNKLVLQELRQQAKSETILPIIDSLISVPGVGFITAMTLFTEIMDINRFPNQDKTDAFVGLVPSISSSDDNIYTNGISFRHNKFLRPLLIEAAWMAIRTDPALTLKYKELTMRMKPQLAIVRIAKKLLSRIRHVWVNLDKYEVALVA

SEQ ID NO: 320408 - protein, 457 aa, unidentified
MAYSTNAPPSAKQGRLITTPTSQVVINALYPSAIGVDVHHDLLVCAYQHLDIEKAEISTELHEFRCTSPRSFVDFAQWCYERTPNVILMESTGVLWRAPYESLEDVGFESEQLALVNARDIKAMVGRKTDKQDAIRLAEYARLGKFRKSFVPPRDIRDQRLIARDFRKCKSDESRHRNRVQKTFNALGLRLSAIFSNFTGKAATTILDAWCDGVDNLKEIVETKGSRLKAGTDAILDMLCKAIPEKVMSHLRKQREHLTYLQKRTDDVMVTLREAQQPYQESIDLLTTIPGIKETAARLIFAEIGDDLSSFPDAEHFASWIGVCPGNNESAGHAHRSGTPKGNKYLRTVLIECAQAIGLMRKGVLFQRFQAFAIKKGRLRGVMAMAHLLARIIFSILKSRTPYREVSSTTLRDVNVKKVTAAMTTAIRTAGLTLRDGLLVVEKTGEILVDVEDCARA

SEQ ID NO: 320409 - protein, 334 aa, unidentified
MNYTTVGVDIAKNVFQLHWVDTETGEIVSKQLKRAVFLDHFANRGACLIGMEACGGAQHWARRLIDMGHQVKLMPGKFVKAFAIGNKNDSADARAIWMATQMPSKAVAVKTEAQQAILALHRIRQQKVKFRTMQMNSLRGLLTEYGEVIAKSRTALDKAIPSVLAKLVERLPAMLIESLRELWNDLEKLDKQIADIERRLQMWLKEDKACKAIAAIPGVGLLTATAAVATMGDPKSFKSGREFAAWLGLVPAQAGTGGKVKLLGISKRGDTYLRTLLVHGARSVLFLAKEPGPWVESMKQRRPPNVIIVALANKMARMIWAVLGKRELTRTAVN

SEQ ID NO: 320410 - protein, 312 aa, unidentified
MTDKPIIGIDVSRNWLDIAIAGGKGAARVSNTSEAIGVWLDAHADAALVAFEPTGGYERCLRQALESRGIDFERVHPNELIGFRKASGRKAKTDALDARLIAEFARNQLLQRPRRPHAPVNPALQALCARRRQLVDLLQAERCRHQLADDAVRASIDTIIAALEVALGGIDQQIEDRIQADPDLLGRSRLLQSFKGVGPITAMTLIADLPELGSCSSKQIASLVGLAPITRQSGKANYRAHTGHGRPTVRRVLFNVARTGILHNPVLRAFYIRLVEVNHRPGKVALTAVMRKTIVILNAMAATNSPWSHQST

SEQ ID NO: 320411 - protein, 325 aa, unidentified
MMYLGIDLSKAYFDVTLRNEQGEKTTAHFDNTPAGFVGLEKWLKGQGGREVHVCMEATNVYWEPVAHFLHAKGMTVSVVNPARIKGFAMSQLRRNKTDKQDSDVIVDFCQAMHPKAWTPPSAAVSKLRSLVRLRATLVKTLTQHKNRLTDAQDDEVKACWQRLIDTLEAEIAQVESQIEHHIAQHPALQATATLIRSVKGLGKIATWTILAEMPDLAEYEDAHAAAADAGVNPAHHESGDTVRHKPKLSKVGKAAIRGVLYLPAITAIQHNPIVRALAERLAQRGKPKKVIIVAAMRKLLHLAYGVVKNKIPFDPLYPASPLPAT

SEQ ID NO: 320412 - protein, 340 aa, unidentified
MEQVIGIDLAKRVFQLHIASPLGKMMKNTVVSRDKLTAFLAQQPPSKIVMEACGSANYWSRQFKRFGHEVKQISPQYVAPFRMGSKNDKNDAVAIVEADSRPGMRYVPEKTQEQQDIQCLHRVRQRLMKNRTALINQIRGLGLEYGIAIPEGAHKVEQCLPEHLENAENDLTSMSRELFQELLFELKEQQQRLKALDKRFNHLNVQQEDIGRLLTLPGIGPLGASALMVALGDSKDFKNGRHFASYLGRVPREHSSGGKVRLLGITKRGDSYLRGILIHGARSVVYRVQKLPDEQCNGLQRWLKGVIARSGINKAAVALANKNARIAWALVNQQSVYEAR

SEQ ID NO: 320413 - protein, 416 aa, unidentified
MKKRTYKTKKVNQINWGQLKERIAGEAVALAIDVAKVKQYAKLCNENNDVSELFRWKHPEETPAVLEAIKSLSCPVVVIVESTSTYGDAIRYQFSQLGFDIHQASAKRVHDTKEVYDGVPSLHDAKAATIIARFYQDGLTTPWRALSESERRLNALRREFDMHQGQYQRNQGRLEAFLSRHWPEVTYLLDLNSVALEHLLIKYGSVRQIASHAKEAALEMKKSSRSLLNPQKINQVIESAKTTLGVPCIEAERLNFQALAREMSHSRVQGKKAKKALEAEIDSDSELFEMGRLIGRVTTAVLLSFHLDPRNFSCAQAFQKAMGLNLKEKSSGRYVGQLKLTKRGSAKARQYLYFAALRLLQKDPVVKEWYLKKMNPKAKNKTVIALMRKLSKALWHIARGQAFDPTKLLSVPKKAA

SEQ ID NO: 320414 - protein, 375 aa, unidentified
MNNNNTLYVGLDVHKESITVAYAINSEPVELMGKIGTSPTDIQNLCKRLRSKSSQVSIVYEAGTCGYGLYRRLVKSGFDCMVCAPSLIPKKPGERVKTDRRDAIRLVRSLRAGDLSAVYVPGIEDEAFRDLARAWASARDDLRHARQRLKSFLLVHGVHYVGRADWGPAHRRWLSKYSFESPWRQLAFDEHRRTIEDRQAQCERLESALKEAVTEWRLYPVVEALQAMRGIQFITAVGLISELGDLTRFEHPRQLMSWFGITPSEYSSGGSRHQGSITKAGNSYARKLLVEAAWSYRHPARISPAIQKRQENLPRPVIDRAWDAQLRLCKRYRKLQAKGKNVNITIVAVARELAGFIWDMGRIAMSVAQQPQCHK

SEQ ID NO: 320415 - protein, 379 aa, unidentified
MEISSSTLPAVAAERATMFVALELSKSSWLVALHSPVADKVSLHRFVGGDVAGLLALIARKQTQAEARLGRTIRVLSCYEAGYDGFWLHRLLCARGIDNRILDAASILVDRRSRRAKTDRLDAAGLLRSLMALDRGESRVCGVVRVPSVAQEDARRRSRERTRLVVERGQHSNRIKGLLMTLGVRDFEPTRRDWQERLGGLRTADGRELPACLKAEITRECRRLHQVIVMIAEVEAEQAAALDAEESQAARLIRLRGIGLVSATVLADEVFFRDFRNRREVAGYLGLASSPWASGRVQRDQGITKSGNPRARRTAIELAWLWLRHQPGSFLTQWFRQRVGTTRGRMRRIMLVALARKLIVALWRYLSDGLIPDGAELKA

SEQ ID NO: 320416 - protein, 453 aa, unidentified
MDVLHDRCAGLDIGKKDLKACVRTPGLTGRRSRRQEIRTFATTTNALLELREWLLDQQVTLVVMEATGDYWRGVYYLLEDTLNVILVNAAHAKGLPGRKTDVSDSAWLAQLGECGLLKASFVPPEPIRHLRDLTRYRATLTVERTREAQRLEKELEDAGIKISSVATDILGVSGRAMLAALIDGEDDAQVMAEMARGRMRTKIPALVQALTGNFGEHHSFLCRMHLTRIDELSATIEELSARIEAEMRPFAPQIEHLVTIPGVKKTTAEVIIAETGADMTRFRTPANLASWAGVCPGHHESAGRQRSGRRRHGNRWLGGALGTAAMAAGRTRERTYLGARYARLVPRLGKQKTIVAVEHSILTAVWHMLTDNVDYHDLGGDYFTKQDPERAMRRIIRQANARVSFLGPFRGRREAWKMEFGLAWVHAVSSLMRSARGFSLAWSRRVRDRGLLP

SEQ ID NO: 320417 - protein, 341 aa, unidentified
MEQKLSVLGIDIAKQVFHLVGMDAHGTIVVRKRLYRAQVMGFIAQLPPTCIGMEACGGAHYWARRFREHGHEVKLMAPQFVTPYRKANKNDLRDAEAIAEAVTRPTMRFVAIKSVEQQDLQALHRVRERLMKARTALINETRGLLHEYGIIVPKGAATFRQHVLEKLATEAAKLNQHSLALFQQLLEELAALEARVATYDAQLAHVAQTHPVCQRLLTIPGLGELTATALVAAVSDAAQFKNGRQFAAWLGLVPRQQSTGGKPRLLGISKHGDSYLRKLLVHGARSCLRWVGRKGDRRSQWLRSLMERRGWNRAAVALANKNARVSWVLMQTDQSYQEAAV

SEQ ID NO: 320418 - protein, 347 aa, unidentified
MNFYTHQHKHYCGIDLHARAMYVCILDQHGTKLVHKNLPTTPEAFLRILAPYREDLVVGVECIFTWYWLADLCSKEGITFVLGHALYMKAIHGGKAKNDKIDAHKIAVLLRGGMFPQAYVYPSEMRATRDLLRRRCHLVRKRAELLAHIQNTNSQYNLPEIGKKLAYKANREGVEEHFPDPSVRKTIEVDVSLIDHYDQLLGEVELYITRSAKTHDVQTFSRLQSVPGIGQILALVILYEIQDIARFPRVQDFVSYCRLVKCAKESNGKRLGTSGKKIGNVHLRWAFAEAAVLFLRHNQPGKEYFAKLEHKHGKAKALTVLAHKLGRAVYYMLTREQAFDLKRFVSA

SEQ ID NO: 320419 - protein, 428 aa, unidentified
MAVFCGIDWAEGHHDIALIAGDGTLIAKRRIDESVDGVAEFTAMLVAAGDSAEEPIPVAIETPRGLLVAVLRASGRPIYPINPLAVARYRERTSVSGKKSDHVDAMALANILRTDAHLHRMLPDDSELARAIAVLARAYQDAVWRRTKLVQELRARLREYYPGFLAAFAAGSGSGRGLSTTQLASADARAVLAIAPSPADGLSVSKARVETALRRGGRQRRIASLATAVVAALRVPQLRQDPAVEQAMRTETLALRAVLDAICASVDQLAAALVEAFAQHPDYDIITSFPGLADVSGAIVLAELGDDRDRFVDDRALQAFAGSAPVTRASGKSRTVVRRRTKNNRLASIGYSWAFTAAARPSPTREHYLRRRDRGDKHPAALRHLFNRMLGQLHHCLQTGQTYDPTKAFPHTAAEPAANAEPAEQVAA

SEQ ID NO: 320420 - protein, 331 aa, unidentified
MLHIIGIDVSKATLDCAYLRDPDQNKAKRKSCQNKVGCFESLITWAEAFSGLPRQSLAFVIEPTNVYHEQLVQFLHSKGTTVYLVNPGRVRKFAEGIGILSKNDVIDADLLARYGLMAKNLIVFEPAPQEVNDLRSLLNRLDVLEKNLRRELNRLEKAGKSLTFHRLEQQSITRSIKRHEAEIVSFKNAARDCVNASPWLQRGVELLCTVPGVGERTAWLMMVVLSSRQFHCAAEVASFLGLNPIEKRSGKSEYRKPRLSKSGSSHYRQALYFPAMVASRKNPDVQALYERLVDAGKPKMCALGAAMRKLVHICYGVYKNQQPYQPQVSPP

SEQ ID NO: 320421 - protein, 332 aa, unidentified
MLAALDIHKEVFQAAVLDDDTGEWHESRFKASRDDLAAWANQWRGQVTDVTVEATTGWRWVCQELQSLGFRMHLADPAQARALRGRTRQAKTDRLDARWLVLLLAKRMLPEAWIPPAEIQQLRDQTRLRLALSQDRRRWAQRLHALLLHEGWPCQRARLLTDQGRRWIAALELVPAARAQVDRLLHVMDAIASEQEEVEVELRRFAKGDTRCQTLMTIFGIGSLLAAHILAEVGDVARFQRAGQLVRAAGLDPTVVESAETRRRGVLAKQGSPELRWALVEAAQHGRSHNSPDHRLYTLTSKRVGTQRAVLTVARKVARRAYFKLRVLQMAA

SEQ ID NO: 320422 - protein, 392 aa, unidentified
MMISVGIDVSKDKHDCFIFSSEGEVLADVFTIPNTMDGFHSLLQQIWKCSNSQDKIKVGLEATGHYSYNLLGFLLDNGLATYVLNPLRANLYRKSLSLRKTKTDRVDARTIASMLLSDAGLKPYTVTAYHNEELKSLTRYRFDKVKERAKLKSSIARLVCILFPELEKLVPSLHIASVYALLEEFPGAKQVAAAHLTRLKALLETASKGRYKRDMALEIREVARNSIASPLPAKSLELQHTIRLIRELDNEIAEIEEQIQSIMDELHSPITIIPGLGFRMAAMILAEVGDFTRFDSPDKLLAYAGMSPSTYQSGQLKNCYPHMEKRGSRYLRYALYNATKYVCHWDPTFADYLAKKRAEGKHYNIAISHAAKKLVRLIFAMEKSRQPYCSAA

SEQ ID NO: 320423 - protein, 416 aa, unidentified
MKSARNTLPEEPAGGVTAGIDWAHDDHAVSVVGAHGRETSRCTVEHSAAGLRELVSVLARAGAREIAIERPDGPVIDTLLGAGITVVVISPNQVKNLRGRYGSAGNKDDRFDAFVLADTLRTDRARLAPLTPDSPATVSLRRACRARKDLVGHRVAVANQLRAHLHNVLPGAAGLFSRIDSPVSLAFLARFGTQDHADWLTPARLGKWLASIGYSGGTAPAVLHARLTAAPRGITGPDAAAQAGITRALHAVLITLTDQIRALSAQIGDQLATHADSHVFTSLPRSGTVRAARLLAETGDCRARFPTPEALACLAGAAPSTRQSGKTRSVSFRWACDKQLRDAVTDFAGDSRRASPWAADLYNKARSRGHDHPHAVRILARAWLFVIWHCWQDGAAYDPARHRALQTLLNQNQQAA

SEQ ID NO: 320424 - protein, 428 aa, unidentified
MDFTQNERLAQINEQTLIIGVDVAKHKHVARAIDDRGRDLSKRLIFSNSMQGFSDLLEWTAGLAAENGRPKLLIGMEPTGHYWLNLAYYLKTKGEKPVVVNPMKVKRSKELDDDSPTKNDTKDAKVIAQVVRNGRYHEPILPEDVYAELREGIKLYDMIQEDLSSIKAQMHNTLDRYFPEFLTVFKDWTGKAALHFLENGYLPEDIDQKTEEELLREVKKSAKRAIGLKRMRQLKQAASVSVGLTVGLRMARQEFRFLVDQFRALQERLEALETQLEDLVLHVPGSDRMIAMKGIGTMTVAGFFAEVGDLSNYRDPRQIIKLAGLNLKMNQSGLFKGKTTITKRGRRRLRSILYQVARSLSFHNEGFKTLHAYYKNRAKNPLTGKQSFIALSRKLIKIFFVIGTRKCSFSEKRMVRDIPQLPNVQEVA

SEQ ID NO: 320425 - protein, 374 aa, unidentified
MRRRGRVRPGTPPAPGAGVTIGVDTHADLHVAAALDAVGRLLGTCAVPSTPAGFAERAGWAGGWGRVAGFGIEGTGCYGAGLARWLRARGYAVVEVDRPQRQFRRRRGKSDPVDAEAAARAVLAGAASAQPKAGDGPVEALRVVRLARTSAVKARTQAANQLHALVVTAPEPLRARLRALPLAALVDRAAAFRIASGASVPGPLAATRFALRLLARRYRQRTAEIRALEAHLAALAAATAPALLAVRGVGAEVAATLRIAAGDNPERLRSEAAVAHRCGVAPIPASSGKVVRHRLNRGGDRQANRALHVVALVRLRWDARTRAYVARRTAEGRPKLEILRCLKRYVARQLYPLLRASLADQPSAPHLPAAAGAA

SEQ ID NO: 320426 - protein, 410 aa, unidentified
MAAVMIGVDPHKGSHTAVVIDQAEMALDQVTVRACAAQAERLLAWAAAWPERTWAVEGAGGLGHLLARQLVAAGERVLDVQPKLAARVRLLAAGDVNKNDPNDARSVAVAALRSAACPPVRPDDHAAVLKVRAKRHRDLSRARNQVVCRLHAVLCELVPGGVSKQMRAAAAARLLGQIQPAGAVQAARHELAGEFLAGLRRLDAQRRDTRRRLATAVRASGTTVTEVSGVGPAVAAAVLGDVRDISRFPGPDCFAAYNGTAPVEVSSGGRVIYRLSLRGNRRLNHAIHMAAVTQIRYRHTKGRAYYDKKIAEGKTPKEALRALKRQVSDAIYQRMKADARRAAAAAAGPGGHPGNGSVASVAGSHPADRLFGQATPGPEPTLRPRPGRSKATRPGSSRRTRRPAPGHTSA

SEQ ID NO: 320427 - protein, 328 aa, unidentified
MDNSTLPKTSVHLCFGIDVASKTLDLADFPNSMFGTFANDADGITRIVQFLQKQHVERIVVEATGGYEVSLVVALHEAKLPVVVINPRQARDYAHALGILAKTDRIDARVLARFAHDVQPPTRDFPDENARKLDSLIARRRQLLDLRTAELNRRHQARLPEIQRSIDSVVDLLDREIAEIESQLASAIEADETWRMKDQLLQSVQGVGVVTSHAILAELPELGRLNRRQISSLVGVAPFNIDSGRMHKPRAIRGGRAPVRSALYMSALTGIRCNPTLRAFYKRLRQAGKKFKVAMTACMRKLLTILNAILRTQTPWNNKFSEKTLENA

SEQ ID NO: 320428 - protein, 352 aa, unidentified
MQMIGCDLHTRQQTISMLDTATGEVVEKTLTHEGNNVREFYSTLPRPVRVGIEATGSMQWFVNLMEELGIECQVGHPAKIRAAEPRKQKHDRRDADLILTLLAENRFPAIWLPSKELLDLRALSRHRHQWVRMRTRIQNALQAIALANGLRRGPSLWSQAGQRTIASLPLAPHTAHRRSELQAMYVKFEAEIEKLNQRVEEQACERPGARLLMTHPGVGPVTALATDVFLGDPRRFADGKALASYVGIIPREHSSGGRQRFGGLSKQGNPLLRFLWGEAGAHAVRRDPELQRFYRRKLIQKGLGKARVAVARKLGIRMWIMLRDQIDYNEFCRRGQLQQKSGDACAGMPETR

SEQ ID NO: 320429 - protein, 349 aa, unidentified
MAQQTIIGIDLAKHVFQVCMVTPQGTIKTNTTVARGKLLTLMARQPPALIFMEACGGAHDWARRFRAMGHEVRLLAPQYVTPFRRGQKNDPNDALALTEAGQRPNIPTVPIKTIEQQDLQALHRVRERLVKHRTAVVNQVRGLLLEYGIVIPQGMARLRKRLPRVLEEADNGLSFLMRDLLQSLQSELSALDTRITEVTSQLTRLSHELEACQRLQAMEGIGPLSATALVAALGNGHDFQTGRQVAAWLGLVPRQHSSGGTTRLGSITKGGNSYVRRLLIHGARSVISHVRDKPDAKSAWIRQLVTRLGVNKACVAVAHKMARVAWALLHTGEQYRKPAVLSIPDYSSA

SEQ ID NO: 320430 - protein, 333 aa, unidentified
MGRFWVGIDVAKRKLDVALLDEAGKVKSKVLANDPAGFAALMTWLKERGAEAASSHLCLESTGIYSEGCATFFADAGWKVSVVNPSLPKDFGKSELKRNKTDAIDAGLLARYCLKMEPPAWQPPPLEYRKLRSLVDRRQALQDMHQQEANRLESTVETSARTSIAEHLSWLESRIAELNRDIDDHIDGHKQTLGKDAQLLASIPGLGRTTAAKVLGLLGDLRRFDNGKALAAFIGVTPQRRESGDSVRGRSSISKAGHASVRHALFMPTLVATRHNPKIKAFRDRLVAAGKPKKSAVLASMHKLVHIMYAVVRKGVEFNPRFGQLALDVQDGI

SEQ ID NO: 320431 - protein, 363 aa, unidentified
MSTITIGVDLAKSIFSVCEMDAAGHVLGRRDLGREAFALWLAQRPAGTVVAMEACSGAHHWARRCLAYGLQPRLMAAQFVAPFRKNRTAKNDRNDAEAIATAARQGNMRFVPVKDVDQQARLAWHRVREGYKTESLAIGNRLRGLLAEFGVVVAKSDVALHRVLAALDQHAALPGEFKELLRDLSAHWAQLRAAIDACGARIDAHARQDVRCVRIGAIVGVGPITVDAMVASVGNAREFRNGRQLAAWLGVVPTQHSSGGHTRLGTISCRGDAYLRTLLIQGARSSLQRAKAVSVEKSTPEQIWIRQLDGRMPFGKVLVAIANKHARQLWAMLAHDLDYDPHACVKHPMAQRFADQHTLTAMA

SEQ ID NO: 320432 - protein, 432 aa, unidentified
MSNFQDDFVVGIDVSSQFSVVAMLEPSGKMIRKPFRVDHSPTGFNKFLEILKKEEERLQRKPIYFVESTGIFHLPLFFFLRSNDLKGFVLNPLSVHSIKNFDLRKVKNDNKDAEAIAKLAKYQDVKFSLVPEPQILALRMMAREYFALADTLTEIKNRLCTDLYLLFPGFLSIFSNPFGKTALAVLREYPSPKAVQQADREHLTALIAKNARKGLAWASAKVDALLEISNLTNAMPAELSVLDSKITINLEMILQLQNSQLAIEKQLHEMVDAEDFPAAARRYIELLDDMPGVGFITAVTLVAEIGDFSLFKSPKALVAFFGIDPSVNQSGKFTGDRNKISKRGTRFGRRVLFTVAMASVRTNRNGQPINAVLREYYQKKCVNKKKKVALVAVMHKLLHYMFAVLRDGKPYQVRKPEQHQTWRRDKLHLVAA

SEQ ID NO: 320433 - protein, 352 aa, unidentified
MKHVTVEVPASCIGLDLSDEKSSFCMINGQGQIMCEGRVETSDQDLRRVFAQLEASRIVLEASPQCHWIARLLRTLGHEVIVINPRRLQLIHESASKTDRNDARMLARVGRLDVALLQPVHEKSPETLAVRTQMRARTQLIRTRTSLINLVRNAMKTFGCKAPSCSAPAFVRKVAVLVPDILRSALEPVLRVLAPLEAEIERANEALSRRCDERSTPVAVFRELHGVGPVLALAFTMAIEDPRRFKTSRTVGAYFGLTRKRAQSGKSDPQLGISKEGDRSVRSLLVTAATHILKPSAPDSDLKRYGQRIARRGSKRDRGRARIAVARKLAVLMHRLWTTGEVYEPLRTSAVA

SEQ ID NO: 320434 - protein, 426 aa, unidentified
MNRQEAIVAWVGIDWADESHQVCEYEVGTGNKQIYAVEQNAESLQEWINQLRIRHGGGKRIAVVLEQARGGLIYALMSTDFIEIYPVNPQSLAKFRKALYPSGAKSDPVDAELLEEMVRQNPGRFRAWVPGDAQTRSLQLLTEGRRKFVDDMTALTNQLTSALKTYYPQALDWAGELSREQACAFLEKWPTLSDLQKTRAFRIREFYQKYSRPEREALDQRVRQIEKAQPLTQDPAVVMAGVMMVRTLVGQIEPLRAAVEKYDVEIARIFQQHPDRAVFESFPGAGKVLAPRLTAAFGADRDRFEAALEIQEFSGIAPVTERSGKTIWVHRRWACPKFVLQTFHEFADQARKFCAWSKLYYQQQRAHGKEHHAAVRALAYKWIRIMFRCWKDHKPYDDSRYMKSLVQRGSPLAAGWSQQPVRSVEI

SEQ ID NO: 320435 - protein, 525 aa, unidentified
MLSSGYVLAAKADRAVVSSNPFASMVKGCFDSFIGDVTSTIPFRRLSQVINPLQNVSHYLTEGCSMTKKLRLEQAKEIRRSGKSTGFELINANAAGIDIGSEEHWVAVPEGRDEHSVRKFGCFTADLHEMANWLKQCGVKSVAMESTGVYWIPPFQILEQHGIEVKLVNARQARNVPGRKTDVSDCQWLQRLHTYGLLSGSFRPEDQVCVLRSYWRHRDNLVRYASAHIQHMQKAMTEMNIQIHKVLSDITGVTGMRIMRAILSGERNGEVLADMRAPGVKRSEEDIIKALQGDYREEHLFALRQAVELYDFYHDKIRACDDKIERCLKGFETVVGSDKIAPKKGKHKARKNECIADLQTELYRITGVDFTEIDGLDVLSVNTILSEVGLKSEAFPTVKSFTSWLGLCPNNRITGGRIKSSSTKRVSNRAATAFRIAAQSLANSKCALGGFYRRLRARLGSPKAITATAHKLARIFYVLWSTKQRYQDVGVEYYERKYKERLIRNLKKKAHELGYKITLQEVGVS

SEQ ID NO: 320436 - protein, 369 aa, unidentified
MGDRITYVGLDVHKEGIVVAVAEGGERGEVREYGRIANTPAALRRLAGKLGQQGVELRFCYEAGPCGYGIQRQLSVLGHQCIVVAPSLIPKRPGDRVKTDRRDAASLAKLHRAGELTAVWVPDPAHEAMRDLVRARLDAVRALRRARQQLSGFLLRQGCHYGRPAWTKLHRRWVAGLKFEQAVHHIVLEDYIAAVEAAAARRERLTAQIEAMLPDWTLAPVVAALQTMRGMALVNAATLVAELGDLSRFANPRQLMAYLGLVPSEHSSGASVKRGGLTKAGNSAARRLLIEAAWTYRFPARVSRELRLRQEEQPRPIREIAWKAQLRLCARYRKLARSGKPANVVTAAIARELAGFVWAIAQRVPPAVG

SEQ ID NO: 320437 - protein, 388 aa, unidentified
MSKPFDLSKSLTALDQDSTLIVVIEMSQSSWLVAARAPGLARDPLKKLPPDPEQLFKLIDRWREESRRAGRVVRRVCVAFEAGRDGFWLARLLRQHDIEAYVIHPTSIPVKRDHRRAKTDRLDTELLMRAFLGWLRGEADHCSMAAIPTLAEEDAKRPTRERESRVNARSRLVNRMKGALARLGIRGFNPKLRKAAEKLEELRTGAGEPLPPNTLAELRRDMAQLRFVADQIKQIEKAREARLEKAPREGAHPMVLMLASIKGVGLETAEMLVAEVLSRKLRDRRAVARYGGLTGSPDESGSRSREKGLARSGNARVRRGMIQLAWRFLMFQKESALAKWFEARTANGPRGVRKTMIVALARKLLIDLWRFVEDGTMLVGVELFDSRA

SEQ ID NO: 320438 - protein, 425 aa, unidentified
MVKKSKKALVRQALVVGIDIAKKSHYVQILDGFGEPFEKPFPVQNTMDGFQHLEARIKQAKDKLGLTNIVIGCEPTGHYHKPIAHWFMERDYTAVMVGSAMVKRRKEEPDNSPKKSDPKDAALIAQLISEGKYLNMILPRSEYAELRELTIIRRQLRETLTRYLNNLAAVLDEFFPEFTSVFKSKTGKAATWVLRNCPWPEEILRLSLTELAENLSKASKKHCGIERAKELQAAAKRSIGVREGLNSARLRLNLILDGIEETERRLADIEAQMAIELEKTGMKESLPSIPGVGVVIAAGFLGEIGDPRQYDGWRQVHKLAGLNIVSNSSGQHIGKSRISHRGRPGLRCLLYQATLVMVFRNPQFQALYHYFRTRPQNPLCAKAAMVAVSGKLLRVMMHLAKTGNLYDPSRVFGHVRESQIGGIAA

SEQ ID NO: 320439 - protein, 343 aa, unidentified
MKLHVLGIDLGKTIFHLVGLDSTGKVVIRKKCSRRQLLAFTANLEVNLIGMESCSGSHFLGRALREQGHEVRLMPAQYVKPYVQTNKSDFLDAEAIAEAVQRPRMRFVPIKSEEQLDLQALHRVRERWVMRRTAVVNQIRSLLLERGLTLPKGRSHVDRQLPRILEDAELRLSGSFRVLMAQLKLELEQVTARIEEMDRVIQKTAKENEDCQRLTEIPGVGPVTATALIAAVGNASTFQKGRNLAAWMGIVPGEYSTGGKQKLLGISKRGNKYLRTLFIQGARSVVQQRHKQAQGLSHWLEQLLGRTHQNVVIVALANKLVRMAWAVLCKNERYRAPVLAVTN

SEQ ID NO: 320440 - protein, 354 aa, unidentified
MKLYVGLDVGLEETSVCIVDSEGLTVREVKVNTEPEAIRSALEGCADRLDRVGVEASSLGIWLYRELQAAGLPIIVVEARHMRVSLSTMRNKTDRNDARGIAQMMRLGWYRAVHVKNIDMQKMRTLLTNRKLLKRKLVDLENHVRGALRAYGLLVGAVARGTFEARIRELIEHSDPIFVMSVQVMLDVRRALLEGYDRLHRVLLQVIQHDPVCRRLMTVPGVGPVVALSFKVGVDDPHRFTRSRTVGAHFGLTPKRHQSGTSIDFDGHISKQGDIAVREALCEAAASLLLRVRKWSALRAWGLRIARRSSMLCAIAAVARKLACILHRMWVSETDFHVGFGAKITQRLRLKPAQ

SEQ ID NO: 320441 - protein, 403 aa, unidentified
MNSVGIDISKGRSTVAVMRPFGEVVISPFEVHHTDSELSALARRLKSLNGETRVVMEATGNYHAPVAKLLHDAGLYVSVVNAKLVHGYGNNELRRVKTDKKDAVKLANYGLDRWLTLPRYVPEEGARLLLKNCYRQYRQYSKVQTVLKNNLISLLDTVFPNVNRLFSSPIRGDGSEKWVDFVAEFWHCRCVSEKSEKAFANKYQRWCKKHGYNFSVAKAHTIHAEASGHIGVMPKSETTKLLVEQAVAQLRATSVALTALKREMLTLAAQLPEYPVVMGMFGVGPTLGPQLIAEIGDVRRFYSKKALVAYAGLDAPPNDSGDVTGKHKSMSKIGASSLRRTLFLVMSVYLRSAPLDEPVYQFMDRKRAEGKPYHVYMMASANKFLRIYYATVKSYLESLEHTI

SEQ ID NO: 320442 - protein, 428 aa, unidentified
MSRKIHNRLERFLQLKRGIRGSKTHLLVGIDVAKGKHHAFFGTATGKTLLRRLIFDNSREGFERLLLEVRRQKEMYGLKSVVFGLEPTANYHKPLGEYLIRGGQEVVLVGTVAVKHNRRLMDGRWDKHDTKDAANVADLISQGKCLHYEYPEIRLRELRDLLSLKRRLRRQEHGYRVRIRNQLVAKYFPELDSFYSESESTVLGVVRWCLSPREIAGLKVEEFIGRVTGRRVGMKQRRRLEAIWARAKESIGCEVGERVAFEAQVMVEGLRQIREVIKATEDRIEEICVGFKEYPYLLSIPGFGPDISSKVLGALGDPFRFRAGKQVIKMAGYDLSASRSGEKSDRVIPVISKQGKADLRYALYQAAQVASSKNRDFRIYYAKKLQGREREKGIHTKIKVKLAAKLLVIAWTLMKKKERFDPSYLNLE

SEQ ID NO: 320443 - protein, 275 aa, unidentified
MYRTKVGVDLAKEVIQVCTYRNKKVQSNIEMTPEEFLCWLIKHKPATVIFEACSTSNYWKQKAIEAGHDARLISAKLVATVRQNQKTDKNDALAIVQAACLPDVTFIGGKTVEQQQLQSIKRLRELAVKQQGASQKQIVSLLLELNIRISNRKGGIISAIEGVLEDAINGLSVECRAAIHTAKEQLSVLIKSVHLYDDCLKSSVAAHPDCKKLLKLEGVGTTNAINLYLALGCAEIGTFSKGRDASACIGVTPIQYSSGGTVKLGSIGKYTKNSL

SEQ ID NO: 320444 - protein, 346 aa, unidentified
MKKAKSIIKISYGIDISSDDFTASQGIYYSDLDREVSIIKKFKNTMRGFDKLLAHIKKQQGKINPDGIIQTWFVMEASGVYYENLAYYLHDKGHNVHVALPNKVKNYIKTLENKSKTDDLDSLAIAQYGLEKQLSQWVPPSAEMKELKELSRELSSLKDMRTQAKNQNHAKEKAHEIISGSIKRTNELIKYLNKQIKKSEKDIETAVKSNLELKEKLDKITTIKGVGLQTAVMIIAETNAFEGIENRRQLTSYVGLDVKENQSGKKTGRPSISKHGNKYVRKGLYMPALSCKKHDKKFKDLYERVCERHGWKIKKVGIVAVMRKILHIIYALWKNGTEYDPNYKMA

SEQ ID NO: 320445 - protein, 347 aa, unidentified
MKFYTQNHMHYCGIDLHARSMYLCILNHDGKILAHRNTPTSPEHFLKVVAPYREDLVVAVECIFTWYWLADLCQREGIRFVLGHALYMKAIHGGKAKNDKIDSHKIAVLLRGGTLAQAYVYPPELRATRDLLRRRNHLVNKRAELLTHIQNTNSQYNLAPFCKKIDRKSNRVGIVERFDDPSVQRSMALNLALIDTYDQELQSLELYIVRSAKACDANTYYRLRSVPGIGKILALVILYEIHDIERFEKVGNFLSYARLVKCAKESAGKRYGTSGSKIGNVHLRWAFGEAACLFLRNNPEGKRLHEKLVRKHGKAKALSILAQKLGRAVYFMLKRKQAFDMNKFFSC

SEQ ID NO: 320446 - protein, 344 aa, unidentified
MWIIGCDYHPSFQQIAFVDQATGEYENRRLEHKGGETEQFYRSLAGQQVRVGMEATGGTRWFERLLGELGFELWVGDPARVRAAAARKAKTDKQDADLLLRLLLEKRFPRIWVPTVEQRDARQLVLHRHRLVQTRTRAKNQLQAIARNEGLFPKRRVWSQAGQTELMALPLSPWATVRRQDWQELLGELNQRIDPLDRALQQEAKQRPEVQLLMTHPGVGPVVATAFVLTIGEPGRFQTSKQVAAYLGLVPLENSSGKGRQRLGHITKQGNSLLRGLLTEAAHIASRYDLQWRRKFLRLAMKKNRSIATVAVARCLAVRLWWMWKLGLDYGQMQESRSHAEQLA

SEQ ID NO: 320447 - protein, 333 aa, unidentified
MSNPTSTPPTVPTALGIDVCKVRLDLAYADDGPVPAPLGYDDAGLRALLAMLKARPASLVVVESTGGIERRLVDCLLDAGVSVALVEPGRVRHFAKADAQLAKTDQIDARVLASFGQRMAPRLLERRSQSRDELDALVTCRRQLLLVRTEQSNRRRNVTSKPALKAIDAVLATVEKQVAALDKQIRKLIESDDDLGDDDRILRSVPGVGPGLSAVIIASFAELGTVPHAKASALLGVAPFDDSSSDRQRRKHVRGGRLDVRNVFYMAAYACTKFNPVIRAFFERLTANRKPFKVAITACMRKLVGYLNVMLQQRLTWDQLAVAKAAATSATEA

SEQ ID NO: 320448 - protein, 392 aa, unidentified
MVVSVGIDVAKDKHDCFILNSEGEVLADVFTIPNNMDGFNCLLQTIRDCTTPQDIIKVGLEATGHYSYNILGFLLDNGLATYVLNPLRTNLYRKCLSLRKTKTDRVDARTIAAMLLSDIGLKPYTDTAYHNEELKSLTRYRFNKVKERAKLKSSVSRLVCILFPELEKLVPTLHGASIYALLEEFPGAVQAAGAHLTRLKYLLSDASRGRYGRDMAVEIRDAARNSIGSRMPAKSLELQHTIRLIRELDAEIEEIETAIQTIMDEIHSPITTIPGIGYRMGAMILAEVGDFSRFESPDKLLAYAGLSPSTYQSGQLINCYPHMEKRGSRYLRYAIYNAAKYVCLWDPTFAAYLAKKRAEGKHYNVAISHAAKKLVRLIFALEKSRQPYNLAA

SEQ ID NO: 320449 - protein, 340 aa, unidentified
MEKSEQIQPHAWILGIDVSKQSIDVCLIRGSDGQLFESKFHNNLSGFRHLKRWCKEMKCECDSSTLCCMEHTGLYTRLLVHYLLGREVHVWLEGSLQIKRSQGLIRGKSDKIDAQRIARYAHLYQDKARIMQLGILTLEKLKDLQANRKRLMKALQSLRTSVQELKPFDPSIGKVLEQTNKEAIRGLEKSLDKVDEQILTFINDDQELKQKYDLMLTVKGVGKVLAAMLLVYTHGFNRLNDSRKLACYSGVAPFVYQSGTSIRGKTGVSRFANNDLKQVLHMAAISSVQHNSELHQYYQRKVQEGKNKMSVINAVRNKLLHRIVAVVNRGTPYELKLKNS

SEQ ID NO: 320450 - protein, 360 aa, unidentified
MRHLSAKLLSDRISSEWEPSMGEVTTIGLDLAKHVFQVHGVDAEGATVLRKQLRRAQVLAFFSRLPPCLVGLEACATAHYWARELRALGHEVRLMPAQYVKAYVKRNKHDAADAEAICEAVVRPTMRFVPVKTADQQAAVLLHRGRERLVRQRTGLVNALRGHLAEFGVIAPQGLRNVGKLIAIVRDERDARLPDLARQVLQVLAAQIEQLEAAVAAIEKQLMAWHKSNPVSQRLASVPGIGPIIATAIAATVVEPSGFRSGREFAAWLGLVPRQNSTGGKHRLGGISKRGNQYLRRLLINGASANLLRSKATKADPWVIGLRRRRPPLVVAVALANKTARIAWAVMHRHENYQRVAAAA

SEQ ID NO: 320451 - protein, 343 aa, unidentified
MKFVGLDLHKRNIFATVLGGDGKIISRVSIGPNRDDISYFFKKMGDGSDLSVAMEASYNWLYYYRILEEITDNITVAHPLKTRIIGEARIKTDKIDSEALAYMLKAEMLPKIYIPTKISMENKLLLRSRISLVVLRTSIKNKVHAIIDRNRDSYRGLEKKTDIFCRSGMIILRNTEIPNPDYMIAKNYLDLIDELNKKIKEVEDEIDKRVVSDSDIELLKTIPGVGRFISFLLKSEIDSIDRFSSKERFASYAGLTPSVHQSGPRSYTGKITKQGNKFIRWALTEAAQVAIVHSSYFRYHYFKIKAKKGTNPAIVAIARRIAEIAYVILKEKRSYIEKPINYL

SEQ ID NO: 320452 - protein, 386 aa, unidentified
MPQVDDLSRSLATFDQDSTVVAVIEMSLKTWLVAGIVPGVSRAPLKKLAADEEGVVRLLHRWRDEATKAGRCITRLVVAFEAGRDGFWLARWLRTRGIETYVIHAASVAVSREHRRAKTDRLDTEMLKRAFLGWLRGEPNHCQMAAVPTLLEEDARRPNRERDCLVRERTRIVNRMKSALVRLGIRGFNPKLRKAGERLGGLVTPQGEALPPNILAELQRDLARLALLREQIDAIETTRLERLEQAPSTEPHAMVRLIAQVVGVGIETADMLVHEILSRNLRDQKALARYAGLTGSPDESGSRRREKGLARAGNGRVRRGMIQLAWRFLRFQRDSALAKWYQTRTEAARNTRKSMIVALARKLLIALWRFATTGTIPDGVVLRAAV

SEQ ID NO: 320453 - protein, 370 aa, unidentified
MRCYQGQHPFYCGIDLHARTMHVCILDQAGQTVFDKGIPCRPEALLRAIQPYRDHLVIGAECMFAWYWVADLCVEQDIAFVLGHALYMKAIHGGKAKNDRSDAGKIARLLRGGTFPLAYAYPKGMRETRDLMRRRTYLVRKRAELLTHLQILNAQYNLAPFPKKLACAANRTEMNVAERFADPSVQKSAAINLALIDRLDELIGDLELYLVRTAKVDDIQTFYRLRSIPGVGKVLALILLYETHDIGRFDTAGQFLSYARLVRCAHESGGKKLGTGGKKIGNAHLRWAFAEAACLFLRSSERAKKWKQKQAAQRGEGKALAILAARLGRAVYHMLRKGEAFDEDRFWSGARRTRTGSSSLSRKEARDAGH

SEQ ID NO: 320454 - protein, 425 aa, unidentified
MSRIPKEDLRPTTARRKGAALQYIGIDIAKHAHVAAARLEDGTPHGRAFGFANDEGGFESLLGRFRELGADQGNCLVVMESTGHYWMALWSFLDDRGFDVAVVNPVQTDAFRRADTVRKTKTDLVDAFLIAEYARFKRLGPSRVSPEAADGLKQLTRYRAHLVKERTALKNRSTAVADRIFPELERLFSDRHSATSRAILRDYGTPAKVAATDIRTLTKTVAKASRGRLGRAKAEEVKAAAKSSVGSAYAADALAFELSHALELVDHLDSEIARLDEKIGELLDAETGELLESIPGVGPVNSAVIAAEIGDPDRFDDPKKLVAYAGIDASKHQSGKFDGDGQHMSKRGSSYLRCALMTAADKARIHDPYFGDYYDSLRARGKHHYVAVSAVARKLCGVILAVLRERRPYEPRPSVQSQRERLGED

SEQ ID NO: 320455 - protein, 325 aa, unidentified
MSRMQGKVTTEDAMAPVYCGIDVCKERLDVYLHPLGEPFSVANDSGGWRRLLRRLAGHRVAMVVMEPTSKYHRAAHRHLGSVGIAVALIAPHRARLFAGACGQLAKTDRIDARILALAGERLDPKVASPPTAEEEALEELAGARAAAVAERTATSNRLRTTTCAFLRRELGNRLRGLERHLERIEARIVTTIATEAHLARQAAIIRSIPGMGPVNVLAILTGLREIGRINGKEAAALAGLAPFANDSGPRHGQRRIRGGRPALRKALYMAAVAASRCNPELKAFYQRLRAKGKSAKAALIAVARKLIVLANTLVSENRTWTSARP

SEQ ID NO: 320456 - protein, 335 aa, unidentified
MQIYGIDLAKEKFDVSFFDLTSKKVSNHPSHKVVKNNFKSIGRFLETLPSDAVLVAEHTGVYGDTLLKCCMDSNVKIAFVGGYVIHRYRATPDRAKTDVLDCALLRDFGERYPDKLKYKTFPEEALYELRQLARHREMLVEQRKQLITADRSEDCRPIRSLAVKRSMDRIKEMLDTEIAETEKEMLKVINGHVSIRHNYELVKSVDGVGLITAVELLVKTENFTKITTARQYAAYAGTAPYEKSSGKMDKGAHISKIGNRRSKTLLYICAESARLHNKEIKLYYERRTLIDKKPRHYVLNAIANKLLRIIFTLVEKGEYYDANFIRQDPRVVKYN

SEQ ID NO: 320457 - protein, 343 aa, unidentified
MDHFAGLDVSVKETSACIVDDTGRIVLEVKVASEPEALLAVLTNPACHFKRIGLEAGPLSQWLFSALAEAGLPVICVETRHMRAVLKAQINKTDRNDARGIAQMMRVGLYRPVHVKTLRSQKQRMLLTHRKLMQSKAIAIENDLRATLRNFGLKVGVVGTVKFEARIKQLVENLPDLVVLVEPLLIIRRVLREQIGILHRRLLAIVRDDDVCRRLMTVPGVGPVVALTYRATVDVPSRFRNSKAVGAVFGLTPSKHQSGESNRTGGISRCGDEMMRMMLYEAAHIMLVRSAKWSWLKAWAMKIARHRGLKKAIVALARRLAVIMHRIWVDGTEFRWTREVAAA

SEQ ID NO: 320458 - protein, 443 aa, unidentified
MARKNQKRFEIVHPDCSGIDVGGSEHWVAVDPEKCDDPVRQFSTFTDDLIALADWLGSMDVKVVAMEATGVYWIPLFEVLDARGFEVYLVNSRATRQTSGRKSDVLDCQWIRQLMTYGLLSGAFRPADQICSLRSLVRQRTNKVRDQAKTINRMQKALTQMNIQLANVISDITGVTGLKILRAIVQGERDPEKLAAFRDGRIKADRATIARSLHGNWRAEHLHALDQELACHDFLEKQIGECDQAIAQALARLPVLEEKVEAPGKSLRSPHRTSDEQSVLHRALNKIMGVDLTAIPTIGIDTALVLASELGPDLSRFPSAQHFCSWLGLAPPTRISGGKPLPGKAPKIINRAAQALKQAATSARQDKSFIGASHRARLTRMDTSCAIKATAHQLARLIYAMLTKGQPYVEKGLEAFEEKSRDRQLRALERKARKLGMQLVKAA

SEQ ID NO: 320459 - protein, 422 aa, unidentified
MLEETNDREEIIGRVAALDIGKAELVCCVRVPSSEAPGKRLQEVKTYSTMTRSLLVLADRLRELGVTRVVMEATSDYWRSPFYLLEVHGFAVWLVNARDVKHLPGRPKTDRLDAVWLCKLAERQMLRPSFVPPPPIRRLRDLTRYRADLVAARTAEKQRVEKLLEDAQIKLSVVASDIFGVSGRAMLAALLAGERDPKVLAELARGRLRAKRSHLVEAFTGRFSDHHGFLMATMLSRIDQASADIAAVEAHIEAEIAPFQAAADQLDEITGVGRTAAQVLIAELGVDMGRFPTAGHLVSWARYAPGVKESAGKQKGKATTGHGNPYLARVLGEAAVAAGRTNTFLGERYRRIARRRGAKKAIVAVGRSILIIIWHLLADPTARFHDLGPGFYDTRTNADRKKRNHVRQLEALGYKVTLQPAA

SEQ ID NO: 320460 - protein, 410 aa, unidentified
MLFVGDDWAEAHHDIEIEDESGRVLARRRVPEGLAGITTLHELVAEHLDPTGELDQVLIGIETDRGPWVQALLAAGYGVFAINPLQVARYRERHSPSGAKSDPGDAHLLAEIIRLDRAHHRRIAGDTQIAEHVKIAARAHQTMIWSRMRQVNTLRSLLREYYPAALAAFGTDLAGRDALAVLTAAPSPDLGRRLSQARIETLLRRAGRQRNLSTTAAKIRAALRSEQLTARPGVIGAYTASASALLAVLSAMVEQTEVLAGQVEQGFGQHPDAEIYRSQPGLGDILSARVLAEFGDDPGRYVDAKARKNYSGMSPITKASGTKRVVLARFARNRRLGDALFLQAFAALNNSPGARAFYDRQRARGATHYQALRTLANRLVGILHGCLRHQTLYDEHLAWHSEPDKLSPAA

SEQ ID NO: 320461 - protein, 420 aa, unidentified
MNREVRAWIGIDWADEKHDVSLYEVATGRQERLEVKQSPEALAEWIGQLRTRYGNAGQVAVVLEQGRGALLNVLMGCEFLVLYVINPKSLSCYREAFYGSGAKSDPVDAELMREMVRQNPERFRAWHPDDVLTRSLRLMTEGRRDLVNQTTAVTNQLTALLKGYYPQALRWIGALDTHWACDFLDQWPTLQALQSSSRRQILRFYEKHPRHHLDLEQQIQQFHQTLPLTGDEAVLEYSTLMVQALIPQLRALLDSIDEFDRKIAEVFRKHPDRPIFESFPGAGAALAPRLTAAFGADRDRYAAASEMQQFSGIAPVTEKSGKQHWVHWRMACPKFIRQTFHEFADHSRRWSAWAKAYYQLQIERGKKHNAAIRALAYKWIRILFRCWKQRVPYNEQVYLASLLKHQSALLLKSAPAVKKL

SEQ ID NO: 320462 - protein, 313 aa, unidentified
MTKLTIGVDVSKDHLDIHVLPAGDVMTVKNRKASFAGLVRRFRKLGPEIIVLEPTGPYHRAFEQAMHDAGLPICKVNPLYARRFAQAAGILAKTDRVDAAMLARMGFALDLEPQQPQRETVASLREMAMFRRGLMKESTATLNRQKVLTDALLKRLCAAQLRQIERQVKQLDAEIRRAVAADHQLKRYKEILTSIPGISDVTALTVLVEMPEIGTLSSSQVASLAGLAPMTRESGKWKGKSFIQGGRAVLRHAMYMPALVAARHNPDMRVLYERLVASGKPAKVAITAVMRKLIILANTLIKADRKWLAGPAV

SEQ ID NO: 320463 - protein, 351 aa, unidentified
MPSKKDVAVIRAIGIDTGKNTLHMIGLDEKGAIVLREKVSRNRIAARLVNVPPCLIGIEAGMATHYMSRELVALGHQVKQVPPAYARPFRQGHKNDFRDAHAVAEAVQRPSTRCVPIKTDDQMDLQALHRVRSRLIGDRTAVINQIRGFLLEHGIPVRQGPRFLRQQLPQILATRTDVLSPRMLRIIGDIVDDWEYLDERIERVADEIEALARVDVSCSQLMTVPGIGPIIASATVAAIGNGTAFAKGRDFAAWLGLVPKQMSTGDRTILGRITKRGNRYLRMLFVQGARAILLHPASWAKHSFGPWLTAAARRLHRNVLVIALANKLARIALTVLVQGRNYETRIESAAA

SEQ ID NO: 320464 - protein, 347 aa, unidentified
MNFYTRQHKHYCGIDLPAKAMYVCILDQHGTKLVHKNLPTTPEAFLRIIAPYREDVVVGVECLFTWYWLADLCAKAGIAFVLGHALYLKALHGGKAKNDKIAAQKIAVLLRGGMLPQAYVYPAAMRATRDLLRRRCHLGQKRAELLAHIQHTTSQYNLPEIGKKLAYKANREGVEAHFPDPSVRKTIAVEVSLIDHYDKVLGEVELDITRTAKAHDMQTFSRLQSVPGIGKILALVILYEIQDIARFPRGQDFVSYGRLMKCAKESGGKRLGTSGTKSGTVHLRWAFAEAAVLFLRQNQLGKEYFTKLEPKHGKAKALTVLAHKLARAVYSMLTREQAFDLNRFVPA

SEQ ID NO: 320465 - protein, 309 aa, unidentified
MDTIVVGIDVSKDRLDVSVHPAGTASSYSRDAGGIELLIEELRPVCAQLVAVEATGGFETVVAASLAAAGLPVVVVNPARVRAFAASLGQRAKTDRIDARVIAQFAAATRPPVRSLPDAATQALADLVTRRRQIVQMIVAEAQREKRASARAKKSIQRLLKSLRAELSEIDGEIDESVRGSAIWRDKEDLLASVPGVGSGTARTMLAELPELGTLNRREIAALAGLAPFTRQSGKWRGKSFIGGGRSSVRTALFMAAMTAMRCNPALRAFHHRLRAAGKPKMVALIAAARKLLTVLNAILRDNRKWQNA

SEQ ID NO: 320466 - protein, 402 aa, unidentified
MATGQLWAGVDVGKEHHWVCVVDDKGAAVLSRKLANDEQSIRELIAEVDALRQDVSWTVDLTTVYASLLLTVLADAGTQVRYLAGRAVWQASVTYRGGEAKTDAKDARVIADQSRMRGADLPVLHPDDDLITELRMLTAHRADLVADRTRTINRLRQQLIAVCPALERAAQLTQDRGWVVLLSRYQRPKAIRQSGVSRLTKTLGDAGVRNAATIAAAAVTAAKSQTVRLPGEDVAAGLVADLAGEVVALDDRIKSTDADIEDRFRRHPLAEVITSLPGMGFRLGAEFLAAVGDPALIGSADQLAAWAGLAPVSKDSGKRTGRLHTPKRYSRRLRRVMYMSALTAVRCDPHSKAYYQRKRDEGKRPIPATICLARRRTNVLYALIRDNRTWQPDSPPITKSAA

SEQ ID NO: 320467 - protein, 366 aa, unidentified
MGSNISNQKKANKSNSSVKSSYEGKTVYVGIDVHKKTYSVVTIVDNIVVKKWRGEANPEHLAQQLLRYYSGAEIQTAYEAGFSGFVLHRVLKKAGINNIVVNPASIEIAANSRVKTDKRDAHKLATMLASGRLTGIRIPPVEQEQRRLLTRTRQQLVEERTAIKCKIWMKFHQMGLVDPQETREISHKLMAELIKLSPSTEFTLVMEALWQVWKTIDAQIKKIESELKKQGTVDPNEKVYRSTPGIGPIAARILSNELGNLNQFNNERQLFSYTGLTPSEFSSGEKIRRGHITRQGNVRVRHILTEAAWRAIRKDISLKNFFERLYPRTGKKKAIVAVARKLIGRIRAAFRFGTTYKMVSVSEENS

SEQ ID NO: 320468 - protein, 358 aa, unidentified
MNTSTISSYVIGGVDTHKDIHVAAIVNDSNQVLSSEYFPATRHGYKEMLKWMSSFGKISRVGIECSGTYGLGLLRYMQSSGIEVLEVTAPDKVDRRKRGKDDTIDAENAAHAAYSKLRTVTPKTRDGMVESLRILKGCRKTAMAARTVALQMIRTSIVSSPDEIRDTLRHMTRMTLIRTLASSRPDLTAYKNISSAYRIVFKSLARRYLELHDEIADLDKMISSIVDMLAPELIEQKAVGYESAAQLLITLGDNPERLNSESSFAALCGVSPIPASSGKTNRHRLNRGGDRAANSALHIIAIGRLRTEQRSKDYIKKRTADGLSKMEAIRCLKRYIAREIYYLLKNRNALINSIQITT

SEQ ID NO: 320469 - protein, 339 aa, unidentified
MRKEEFECVGVDVSKSTLDVALFRGEVDWKEGHVKVSNNESGYKELKKWLRLKNAGKKRLRICMESTGLYTHDFRSWLEKENIVYYVVDPKLMHHFAPPQSIKGIRQTKNDKADAFRIAIYCSLFHESMTPSKLPSAAYFKLKRLLAERRQYVKQSVLYRQQLSDISLYDSVNSRTRKKNEVASLKKNIRQTDAEMKDIIDTDPAIKRNYELLISIVGVGIVVAVTAIVLTENFTAFTNPRKYASYIAIAPFPHESGTSVRGATRVSKQGFRQAKADLSISVLSAMSHDPELKEYFLRKKAEGKHAGTILNAIKFKIVLRMFAVVKRGTPYVNTKGYKG

SEQ ID NO: 320470 - protein, 353 aa, unidentified
MKEHNSNERVVKVVGIDLAKRSFHVYGVDERGQRVISKTFTRTRLSEFMANLPACTVAMEACGSAHYWARQFREDGHEVRLIAPQFVKPFVKSNKNDAIDAEAICEAAQRPNMRFVAIKSVEQQDIQAIHRMRSLMVERRTAQVNQIRGLLLEYGIDIPQGRVAVSPRLSEILEDPENGLSERLRTELRGLADELRHLDERVAHYDAQIETLAASHPQAQALMTIPGLGAKGATALIAAVGEDPRLFKNGRGLAAWLGLVPRQHSTGGRDRLLGISKRGDVYLRQLLIHGARAVLRWVERKDDPTSCWAKGLTGRRHPNVAAVALANKIARIAYAVMTTGQLYDAAKGALAPV

SEQ ID NO: 320471 - protein, 367 aa, unidentified
MKNHSSIEQSVSSSDLSACTTLAVDLAKQVFQVAGEDVLGQVLYEQRIKSREAFYDFLRQLPPHVVVLMETGPGAQAWARQLQDQGNPVRILPAGLVATHRSGPKNDRNDALAILRAGRDEKICAVPVKSVAALAMQALHRARQGYVRRRTAVSNQMRGLLLEHGVALAQGDVAISQKIPRVLEDATQPVPGLLRELIDELLAEWRHLGERISVLTGRLEVAANADMTAKRLMTVRGIGPITATALVAKETKPERFPNARKFAAYFGMVPDQHSSGETVRLGGMTKRGDAYLRSLMIQGAHAVLQQLRPDSQQPDDRRLLHWMSRLGRKEAAIRLANRNLRIVWVLLQNDQTYRRHAGDGQPATMGH

SEQ ID NO: 320472 - protein, 371 aa, unidentified
MNNIKFIGLDVHKQSISVAVADGGRSGSVEYLGEIDNDPVAIGKLCARLQRPGKTLSFCYEAGPCGYGVLRQIKGLGHQCDVVAPSLIPRKPGDRVKTDRRDATMLARLHRAGELTAVWAPDADHEAMRDLIRLRGVVRQVVTRARQHLQGFLLRHGRTHGQGTAWRMAYRRWLSTLAFEHPAQQIAFQDYVDAVTDAERRLKGVEEQILKLIPAWSLCPVVDALQAVRGIALVTAVILVAEVGDFTRFANPRQLMAYFGLVPGERSSGETTRRGGITKTGNSYARKALVEGAWAYRMKPRVGRHKVDRIEALPKPVRDIAWKAQIRLCARYRQLSARGKTANVVIVAIAREMVGFVWSIACMVQSAPKAA

SEQ ID NO: 320473 - protein, 430 aa, unidentified
MKSNTQNAKIEAITEKTLVLGIDVGSETHYARAFDYRGIEYSKKPFKFSNTEAGFATFKEWILDLKERHEKDKVVPGMEPTGHYWFNLGKFLQDNEMKPVLVNPHHVKKTKELDDNNPTKNDRKDPKVIAGLVREGRYMIPYLPDGVYADLRTASNIRFQLQAELTRIQNRISRWFNIYFPEYKTVYGKPDAKSGILILKAAPLPEDILTLGIDGVNQIWRDAKLRAVGKARAKTLIEAAEHSVGSKEGAVSARMEIRMLLEDYESRNTRLQEVMVLIEELVRKIPMAEKLLEIKGVGIRTVSGFLAEVGDISRFNNPKELQKLAGLALVENSSGKHKGETTISRRGRKRLRYLLFEVAMSLVSKNQEFRELHNYYTTRRLNPLKKMQSLMAIAAKLIRVFYAMLTKGVDYDPKKMVSDIKRPAVYLQAA

SEQ ID NO: 320474 - protein, 400 aa, unidentified
MDKDRIVAGLDVHKDTIYLCVMDNTEAVIFAKVYGTLTPDLELMCSEMVSHGVTEAAMESTSTYWVPVWNALCESMSLKLVNPYFIKQLPGRKSDVKDAQWIAECLLKNLIRGSFVPDKRVQDMRKYNRRIFDLNEALTYNSNKQDAALQRCGFRLSNYVSRVNGKSYQKCVRAIITGITDPEELVKLIHGKTLRKYGRNIIKDAVTGDFHQADICLLKQYAELIGVIERQIEECRNALIAMCQEHFPKQFKRLQSIPGVKERAASAIIAETGADMKPFEKATNLVGWCGLKPRNDISNNKVKSNRTTHGNRFLRQILIEISWVASRTRNCFFSNFSYVQCTQRHKNKMKIQVAIARKLLVAVWHMLTKDEDFIDVYLKRLEKQEEWQNDIQALESLLVG

SEQ ID NO: 320475 - protein, 403 aa, unidentified
MFYLGIDVSKKSCRYLLLNPEGQKVKSFSLDNTLETFQNLRKRLEDLSIPKEDLLIGLEASGGFWENLYSFLKENGFHVVLLNPYHTSKFREALAKKAKTDDIDALVIAQLLRTGEYVQSQVAEELIQSLRELTKLRYELMTERKNYKRQVFSLLSIIFPELEKTALKNPFSIASMAILQKFPTAKDLAQAKAKQIEKIVRSIQGNNFNIEEIGKLIQTAQTSIYSGRAKEARATSLRILLRHVETLSSSIEELEAQMKQILSPQEPQDSFPGENLLTIPGVGDKTLAAVLSYLGADGSSFSSSTKAVGYVGYFPKIYQSGQTQRDNTICKRGPKLLRWALYIAAVASLKHNSEMRTLYHRKLSQGKTEKQALICVGKKLFQIMMAMLKSGEPYSPAKVFVSC

SEQ ID NO: 320476 - protein, 309 aa, unidentified
MKQSVVYIGIDVAKAHLDVAWAGTFRRLPNERSGHAVLVRWIKQSATPVQLICEASGGYEQGLLESLEKSEVKVTLVQAVRVRQYARAAGILAKTDQMDAKVLAAFGSAMQPPPTPPLCAEQKRLRQYEAQRRHLSRVLVADQNRLAQLSCAELRTLSRGLISKIKKQIETIDTRIGDLIAQDQTLREKAQKLTAIRGVGVRTAALLLAQMPELGQLNRRQAAALAGLAPFNHDSGSIRGKRAIFGGRRALRSGLYMAALSAARFNPILSRFYRRLRTKGKPHKLALTAVMRKLLLALNQTLKPIPSLA

SEQ ID NO: 320477 - protein, 315 aa, unidentified
MATTQDACFVGIDVSKPMLDVAWTTEPGVTWQTSNDASGWSALVSRLVPVAPVLIVLEATGGYESGAASALALADLPVAIVNPRQVRDFARAMGILAKTDALDAQVLTTFAARIQPPARPITNELQADLRALVARRQQLIEMLLAERNRLELARPAVRGSIRTHVRWLEARLRDVDRDTRQRIEQSPIWRGHARLLQTVPGVGPATSARLISDLPELGRLTAREIAKLVGVAPLNDDSGSRSGPRRIWGGRAGVRHTLYMATVSAISCNPHIGAFYQRLRAQGKPGKVALIAAMHKLLIILNAIMKTRQPWMLTP

SEQ ID NO: 320478 - protein, 343 aa, unidentified
MEYYVGLDVSLAETSICVVAGDGKIVCEGTVISQPTAIAEFIEAKAKAALRIGLETGPTATWLWHELHALGLAVICIDARHAKAALSMQINKSDRNDAYGLARIMQAGWYKEVQVKRLGCHEVRAVLNSRALLVKIKRDLGNQIRGLLKNLGLIIGKAKGSVFSCRVEELVAENPHLQQAVRPLLAVREKVGLEIADLDRKLLALARDDVESRRLMTVPGVGPMTALAFRAAIDEPARFKRSRSVGAYFGLTPRRYASGEMDWSGRISKCGDSLVRTYLFEAAGVLLTRVPQWCALKAWGLRLVKRIGFKKAKVAVARKLAVILHRMWRDETDFQWSTKEATA

SEQ ID NO: 320479 - protein, 339 aa, unidentified
MKEISVIGIDLAKSVFHVYGVDSGGRCCLRKQLRRGQMKQFGANLKRCLIGMEACGGAHYWAREFQKLGHEVKLMSPQFVRPYVKSNKNDFLDAEAICEAVTRPNMRFVPHKQTEHQDIQCVHRIRQRLIRNQTALCNEIRGLLHEYGVVLPQSISQLRKQLPLIVEDAEQPLSEISRQLFSELLEEVRSLQERIKLYDQKIQGIFSQHEVCKRISKVEGIGPITATAMLGAVGDARAFKNGRQFAAWLGLVPRQVSTGGKTTLRGISKRGDRYLRTLLIHGTRSVLRRVEHKTDPRSRWIQKKLETRGFNKTCVALANKNARILWSLLVTGEKYKQAA

SEQ ID NO: 320480 - protein, 364 aa, unidentified
MYIYVQSRIKRREKTVKGFPLNKTIIMEVLRQNVGIDIAKDSFVATFTVLLKGQVIKYKRTKKFENNLKGIEEFLIWCEQFQKIGIPINFTMEATGIYYESLAYFLFEKGKVVHVLLPNKAKKFAESLNIKSKTDKIDSKILGQMGVERVLEKWVLSSKIYRRLRTLSRERQQLVKERARVKNQLHAEKHTGDPIKTTIRRMSNHIKYLDKQINSIENELETIVSKDDYISEKVKKITTVPGLAFKTVVAVIAETQGFVNMSSIRQLNSYAGYDISIKESGKWKGKARISKKGNSHIRQVMYMPSLSTIQHSATYKSFYERLNEKKQNGLISGTAVQRKLLGLIYTLWKNDTEYIENYEIKKAS

SEQ ID NO: 320481 - protein, 334 aa, unidentified
MALNTLAIDIGKHSFHLFGIDDDGVIVSRKVSRLKLVATVDRLDPKIIAMEACGSAHHWGRMFQEAGRMVRLISPYFVRPFVRGSKNDATDAQAIFEAAGRPTMRFVPVKSLECQDLQSLHRIRDRLVHNRTSLINHTRGLLAEYGIVLPQGAKRFTLQVRQAVVETELSDLARELFEELLDQLGDLDRRIAHIDKHLIAICRDKAACRRLVGIPGIGPVVATALLAAVDDGRQFGSGRDLAAWIGLVPRQYTTGGKPRLGGIGRRANHYLRRQIVHGARAVMSQAGRRSDPRAEWMKAVAARRGFNRAVIAVANKMARAAWAILVRGEDYAAA

SEQ ID NO: 320482 - protein, 410 aa, unidentified
MDVVFDRVAGLDVGKKIVVVCVRTPGPGGKRVSETRTFRTMTRSLGLMADWLAECGVQLAAMESTATYWKPVFYCLEEQVETWLLNAAHMKAVPGRKSDVRDAEWIAQLLEHGLVRPSFVPPPPIRRLRNLTRYRVQLQGDRTRDAGRLEKLLEDASIKLSAVASNIVGASSRAMLGALVAGERDGAVMADLARSKLRRKIPELAEALTGRFDDHHALLVGQLLARIAATEQALVDLDAHLADLMIPWAHELELLQTIPGVGVHVAQAFIAETGGDMSRFPSPAHLAAWVGVAPAMHESAGRRQPAGTRHGNKFLTAMLVEAAQSASRTKDTYLAAQFARLTSRRGHNRAAVAVAHSILVSAYWMLVRDEPYRDLGPGWLDQHARTEAHTRHLIAQLEHLGHTVVLDPVA

SEQ ID NO: 320483 - protein, 338 aa, unidentified
MKEYKLISIDLAKKVFQICAFSGFNKIAFNQRIHRGKVLAKLRNIPSTTIVMEACYSSNYWGREIQKLGHTVKLIPPFKVKPFLIGNKNDANDAVAIAEASLRPRSRFVSVKTLAQQDTQTLLRVREQLQKIRIMTSNQIHGFLSEYGVFCAKGHKSLMTTLAEALAPESNLLSPIAIEAIRMQSDYYSELKAKEDEITKRLIMLCEGNPIYRYLKTIPGIGPIVAATLISSVGDPRYFRNAREFSAWIGLTPLQHASGETSRMGKISKRGDQHLRKMLIHGARSIVNWVKHKEDKLSLWIKSLEKRMCPNKVTIAVANKLARIAWAVMTYQVEYHAK

SEQ ID NO: 320484 - protein, 343 aa, unidentified
MQTITTIGLDIAKSVFQVHGVDAAGQVVVRRQLKRRYVLAFFQKLPPCLIGIEACASSHYWSRELRALGHTVRLMPPAYVKPYVKRQKNDATDAEAICEAVTRANMRFVPTKTPEQQSCLMLHRTRHLFIRQQTAVINAIRAHLAEFGIVAPVGRKGVTELLHVVADPSDKRVPEVARACLAALGTQLLGLKEQIVEFDRLIMAWYRSNETSKRLHYIPGVGPLLATALAASVADPQTFRSGRNFSAWIGLVPKQHSSGGKDRLGSISKQGDRYLRSLFVAGALSVIRYAKIHGTKHRPWLTALLARRPTKVAAIALANKLARMAWAMMARGERYRNPVALAA

SEQ ID NO: 320485 - protein, 355 aa, unidentified
MVVLGVDPHKKTHTVVAADQSGRKISTITIAATVTGHLKLLRWAARYPRRRWAAEDGRHVAGRLLRDLLAAGESVTCVPTKLMAQARAGARTRGKSDPIDALAVARAALREPDLPAAHLDQEALELRVLVDHREHLVGERTRHINRLRWHLVDLAPDLEPPAKTMTRTNRLTQLITDLAQLPAGIRRDLAIEIAERVLTDTARINQLERDITRLVTPIAPTLLSIVGISGLSAAKLLGEIAGIERFATSAKLANHAGTACIPVWSGNTERHRLNRGANRQLNCAVHRVAITQVRHHPDAAALFARRRAAGDTKAGAYRVVKRHLIDVIYRAMTTDAERRGAPQPHPATQTLTPAA

SEQ ID NO: 320486 - protein, 428 aa, unidentified
MWGTVSHYVAVRPDRDPEPVRRFECFTADLYRLAEWLESCGVKTIAMQSTGVYWIPLYEILEQRGLEVYLVNARHTKNLPGRKSDVQESQWLLKLHTYGLLNNSFQPPAEIRILRTYWRQRAEHVSGAATCIQRMQKALTQMNLQLANVISDLSGMTGQAIVRAIVAGERNPQKLAELTHPRIEASREEVAKSLQGNWQSELLFVLRQEVEMYDTYQRRIAECDQQLQKHLATFADTVVPRSPGTEAKKKKAKPTKNAPRFDLGSELQRITGVDLTRIDGIDLMVAQTLLSEVGMDMSRWKTEAHFSSWLGLCPDNRISGDKLLGKGTRRVVNRASTALRLAARNLIRSRSYLGAQYRRLRTKLGAPKAIPAMAHRLARLVYRMLKYGQQYVDKGSEYYENRYRQQQIHLIQKKAAKLGLQITVAAQS

SEQ ID NO: 320487 - protein, 400 aa, unidentified
MGQPLWAGVDAGKSDHYCVVIDADGKRLLSRRVANDEAALLDLINAITALADGGELTWAIDLNAGGAALLIALLIGAEQRLLYISGRTVHHASGGYRGEGKTDAKDAAVIADQARMRRDLQPLRAGDDIAVELRILTSRRTDLVADRTRAINRLRAQLLEYFPALERAFDYSASKAALILLTGYQTPDGLRRAGAARLAAWLRKRKARNADAVAAAAIEAAKSQHTVVPGQQLAAAMVARLAEEVMTLDTEIGDTDAMIEERFRRHRHAEIILSMPGFGVILGAEFLAATGGDIAAFGNTDRLAAVAGLAPVPRDSGRISGNLKRPRRYNRRLLRACYLASHIAIRTDTASRIYYDRKRAQGKRHTQAVLALARRRLNVMWAMLRDHKPYQPTAPNAAAA

SEQ ID NO: 320488 - protein, 421 aa, unidentified
MEEYAALIAIDWADRQHAISLYDASTGKREQAIVKHTPSVLQEWALSLQQRFGGRRLAVCLEQARGPLIYALVQYDFLVLYPINPTTLAKFRAAFSLALGKDDPTDADYLLDLLQHHRAHLKAWYPEDPQIRKLRLLVEQRRRLVNDQTRFSNRLTDTLKGYFPQILDWFSELSTLLVCDLLQRWPTLADLQRVRPTTLLKFLRAHRSVNQATNQRRLAELKTALPLTNDPAVLSVAPLQVKVLVAQLRTTIAAIAEYERQITALCQTLEDYQLFASFPGAGLLHSARLTAAFGSDRSRWPRVDELLCYSGVAPVLERSGKQHWTRWRYFCPKFLRQTFVEYAGESIKHSFWARAYYQRQRHKGNEHHAAVRALAFKWIRILWKCWHTRTPYNEVTYLNSLRKKGSSLLAFAASIPPCQST

SEQ ID NO: 320489 - protein, 318 aa, unidentified
MNTEEVWVGADICKANIDVYILPSAESLQYANTTEGIDAFIKYLKPLSPKRVVFEATGGLERLFALSLHAHDIPMAMVNPRKIRAFALALGKAKTDALDAQVIAEFAKSIRPAPQHLPSQAAQILRDLVTRRRQLVGIKVAEQNRLSRSPESIKTDIDEHIKQLSERILKLSEQIQKLAKQQTDRQRKREILLSVPGMEPVTCAMCLAELPELGLLTDKQIARLVGVAPINRDSGQHKGKRMIQGGRAQVRCGLYMATLVATQHNPVIKAFYQRLLERGKLPKVALTACIRKLVVILNAMVRHNQRWQTTPMPDAKTS

SEQ ID NO: 320490 - protein, 418 aa, unidentified
MIEDESACGTRRYVALDIHKHYSVIAAVDREGRVVLHAVRVEHADLEGWLKKKLQSGDHVVFESTTNAWHVYDLLAPLVERVVVANPIKVKQIASARVKTDVRDTLILARLLAANLVPDVWVPPAHVREMRQLLSQRRQLVETHTQIVNRMHSVAHRHHLKHERGKRFNEKNTVWQKDKGLSKTEQFQLELEMENRAYTEKQIGRISKEVAKMSHRKPWAEGMTYLMQLPGFGVITAMTVLAAIGEIERFGSAKHLASYSGLVGGVEQSGTHLVEKGITKEGRKELRWAMVEVAQRAVKSDPRWTGKFQELHKRMHRNQAIVAVARQLLELVWYVLTRRQPYRYFSQERIAYKYLTWAWQMDEAARDGLSRQQFARYYLMRLGIGHDLTRIALNPKYPRKLASEAELLALQPELKYIE

SEQ ID NO: 320491 - protein, 316 aa, unidentified
MTSVAVYVGIDVASAELVVAVRPTAEGWSVPNDDAGVAAVVRRLRPLAPAVIVLEATGGYERAVVAALAAAGLPVVVANPRQVRDFARATGQLAKTDQVDAAVLALFAERVHPEPRALADAATQALDAVLTRRRQLLDMLTAERNRLAQAAPPVRRDVQAHIHWLERRLADFDRDLDALIQHSPVWRAKDNLLQSVPGVGPVVSRTLLGALPELGTLTHKQIAALAGVAPMARDSGLWRGRRRITGGRAAVRATLYMAALVATRHNPTIRGFYQRLLTAGKPKKVALTACMHKLLTILNAMVRANAVWRHELAQTV

SEQ ID NO: 320492 - protein, 323 aa, unidentified
MDEDTKYFGIDISKDVFDVMDEKSLHHQFKNNASGFKKFCKLLDKTSHCVMEATGYYHYKLAYHLLENEIKVSVENPLSVKRYIQMKLSKIKTDKSDAKMICSYAKSVELRLWKGESKDQQACLQLSRSLSVFTKQSTMMKNKIHGEEVLGVPSKDVLRSLKRLLKNIQKEIKTLEDKLHELVKKEHQELLTLMESIPGIGRKTGVMLLVLTDGFNRFQTAAELCSYAGITPVIRQSGSSVKGKPRISKIGNQKLRNLLFLCSFNACKYNKACKALFDRIVAKGKSKKLALIAVCNKLLKQAFAVAKARIPYDENYRSTLAVN

SEQ ID NO: 320493 - protein, 387 aa, unidentified
MTTDHPAAEVQTAARPNNSKLFVSLELSRSAWLVTASAPGSDKFSKYTVAGGDRRALVDLLDRLRRTAERRVEMSVEVVAIQEAGLDGFWIHRLLANNGVESHVVDAASIAVDRRHRRVKTDAIDGETLLRTLMAWARGERRVCSMVRPPSPAEEDRRRLTRERGTLLKERIQHTNRIKGLLSGQGITDYDPLGKNRHTRLDALKTGDGRTLPDRLKMEIRREIDRLDLVNAQIATVERERDALVKTTVDVDAQNAAAVLSRLKGIGAEFSSLIWLEALFRSFANRRQIAAYAGLAPSPWQSGSTDRDQGISKSGNRRLRHTMIELAWFWLRHQPDSALSVWFRARVGQARGRLRRIAIVALARKLLVALWRYATQGVVPEGAVFKA

SEQ ID NO: 320494 - protein, 419 aa, unidentified
MDRVFEVAAGIDIHRDTVVVSVRRQFRERAEDVETRTFETFHDGLVAMTVWLEQQNVEVVGLESTGVYWQPVVQAIQKRMPKVVVWLVNPMHVKKVAGRKSDVSDSQWLSKLVMYGLVSPSFVPSLHLQELRKLTRYRTKLTADRTRVKNRIIKEVERSGLKLATVCSDVLGKTGRTLLEAMLAGTVLDDATILKMTYGSLRERVQDLSRALKDPITPCTAIILRQMLRRLDDVNKDIADLESEIRKLLQPMADDVARLDQIPGIDEIAAAAIIAETGTDMSVFPSAKHLASWGGLSPGSEESAGKAKQAPTRKGNKYLRTILVQAAMSAKKTKGSFWQHKGRRLARLGPKKAAVALARSLASVVFHILRDCCDYRDPATIPPPPAVARARIVALADQIRRLGFDVTLTPRADPGAAVS

SEQ ID NO: 320495 - protein, 330 aa, unidentified
MYLGIDTHTRYSQVAVVDGDGNLHDEIRLPNDRLGELAEQYAGGEAAIEASGHYRPVYEMLDEHLDVTLVNPSKNRLIAEATVKTDRIDAKRLAHMLRADMLAESYVPSDEIRTLRDLVRTRKSLVEERTAEKNRVRAVLKRTDNAYDSELFGPTGREFLAELSLSDADRTIVEAHLSVVDEYDEQVERLEEKIEQKVLESPAAQRLLSIPGVGQSSAALVVAEVGEIERFDRHEELVSYAGLDPMVHQSGDTEVHGSISKEGSAPLRWALVQCAHVSVRYDEYLGNFYTRLKQRKNHQIAIVATARKLLVSIFYMLKRREPYDPPEVSA

SEQ ID NO: 320496 - protein, 412 aa, unidentified
MRRVIGIDIHRTFGEVVIWEEGRLRSFGRVDMTRTALEGLGGKLHPTDEVVIEASGNSMAVSRVLSPFVHRVVIANPLQVKAIAHAHVKTDKIDAGTLASLFAAGYLPEIWTPDAETERKRRLTARRYQVVRHRTRIKNEVHSILHAHLVPKCPHCELFNRPGREWLKRQVLPDDEREAIDRHLRELDRLGEDLAILDREIAEGALDDGAVKRLLTITGVNLTVATGVLAAIGDIRRFESPGKLVSYFGLNPRVRQSGLGAAHHGPISKVGRSHARAMLVEAAWAVAKAPGPLHAFFVRIRARRGHQVAAVAVARKLAVLCWHVLTKDQDYLWARPALVANKTPAMELQAGRPQKKGNRRGPAYAYNIKALRDREQQLAQQAELNYARFVDRWRTRPPKGEARERLNPARNE

SEQ ID NO: 320497 - protein, 412 aa, unidentified
MEVVFERCCGLDVHKATVVVCLWMRDQCGKIHKEIKTFGTMTADLLVLHDWLRSKEVTHVAMESTGVFWKPIYNLLEDSFTVLLVNAAHIKRVPGRKTDVTDCEWIADLLAHGLLKGSFIPPKPIRELRDLTRYRKSLSDERVREVNRLHKLLQSANIKLSSVASDVMGMSGRKMLEALLGGNTDPEVLADLARGKLRKKLPELRKALQGCFSAHHRLILEHILGHVDFLDEAMERISEEVAVHTAPFDEQIQFMDTIPGVDRKASEGTIAEIGLDMEQFPTHRHLASWTGLCPGNNESAGKRKKGRMRKGNLWFRRYVIEMALAASRTKGTYLNALYHRLVRRKGHKKAIGAVAHAILVIIYHVLKHRVPYRELGADYFDKLNATYIKRHHLKRLESLGFKVTLEPLEVAA

SEQ ID NO: 320498 - protein, 366 aa, unidentified
MLYLGIDQHGKQLTISVRDEDGSVLDRRQVSTRPERVREFFDDLRRRSQDAGGYMAILEVCGFNDWLIELLREMQCLEIVLIHPGRRSKRKTDRRDAHALGDLLWLNRLRLRNGQQPRGLRRVRIPDPQEQQDRQATGLRLRAGQQRTRAVNAVKHLLLKRNLLWNCPTKTFDTILARRWLTELPLGDLDRRELDQLLVRWKLLDEQIASLEEWIQRRALEHPACRLLRTCPGVAAYSGLTLASRIGPIERFPHPRSLANYWGLTPGCRNSGETTDRLGSITKEGSKVARFMLGQLVLHVLKKDEHLRLWYRRVRARRGSKIARVAVMRRLTTIFWHMLKHQEAYQPGGPRRQLSTRRVDARETRA

SEQ ID NO: 320499 - protein, 341 aa, unidentified
METTRHIGVDLHRNCFTACIRRENGRNYVTEWKLEQLPKFVAKLRPSDEVAVEVTGNTRLFHDAVAPHVKRVVAVNASQFKVITHSVKKTDPNDARNLALYLAKDLLPEVRMKDKTRAQIASLTQTRDTMVKLRTALKNKINNIFSAHGINLSKESLASEKGLKAVLETRFDALVDLELKILVDQIRSLNKSIAELEETIRRESQKLEGHKNLTSIKGIGGLSAGILLSIIGDIRDFADEGKLAAYFGIVPRIHHSNETEHSGRITKRGTKLGRTTLVQCALIAQRFSPYLKQYYERKKSRGTGKAIIALARKFLGIIYRTLKNQWVFEDFPNFVLAEETA

SEQ ID NO: 320500 - protein, 468 aa, unidentified
MTVDKKLWRNREERKEWARRLQSEDPGLEVVHPHAAGIDVGNSAHYVAVRPERDPQPVRRFECFTADLRRLADWLRSCGVKTVAMQSTGVYWIPLYEILEERGFEVYLVNARHTRNLPGRKSDVQESQWLLKLHTYGLLNNSFQPPAEIRALRTYWRQRGEHVAGAATCIQRIQKALTQMNLQLANVISDISGLTGQAIVRAIVAGERDPRKLAQFRDPRIQASEEEIAKSLEGNWRPELLFVLQQELEMYDTYQRRIAECDLQLQKHLASLANNVPPRPPEVEPDGKKRKRAKPAKNAPRFDLSCELQRITGVDLTRIDGIDVMIAQTLLSEVGVDMSRWKTEAHFASWLGLCPDNRVSGDKVLRRGTRHVVNRAANALRQAANALIRSRSYLGAQYRRLRTKLGAPKAITAMAHRLARLVYRMLKYGQRYVDKGTEYYEQRYRNQQIQLLRKNATKLGFHITEARA

SEQ ID NO: 320501 - protein, 339 aa, unidentified
MELYSGIDLHASNHVVGLVDEKGKRVLKKKLINDPELTLKLLEPYRPELAGIVVESTYNWYWLVDTLMDHDYRVHLANPSAIQQYSGLKYLNDDHDAFWLANLLRIGTLKEGYIYPKEERALRDLLRKRWHLVKLRTSLIISLKNILARNFGIRMSTSRIKEQSLDSILPCLPQTDNVALSIRTSKASIDFLTVQIEEVESTVLKQAKDNPSFDKLQGLPGVGKILALTIQLETGCISRFPNVGHYVSYCRKVESRWVSNERIKGRGNTKNGNKYLAWAFSEAAEHARRSNTASRKFYDRKLSQTNKAVAHNALAHKLARAAYFIMRDNVPFEEEKLFA

SEQ ID NO: 320502 - protein, 334 aa, unidentified
MENIALIGIDLGKNSFHIHCQDRRGKAVYRKKFTRPKLIEFLATCPATTIAMEACGGSHFMARKLEELGHSPKLISPQFVRPFVKSNKNDFVDAEAICEAASRPSMRFVQPRTESQQAMRALHRVRESLVQDKVKTTNQMHAFLLEFGISVPRGAAVISRLSTILEDNSLPLYLSQLLLKLQQHYHYLVEQIKDLESQLKRKLDEDEVGQRLLSIPCVGILTASTISTEIGDGKQYASSRDFAAATGLVPRQYSTGGRTTLLGISKRGNKKIRTLLVQCARVFIQKLEHQSGKLADWVRDLLCRKSNFVVTCALANKLARIAWALTARQQTYVA

SEQ ID NO: 320503 - protein, 338 aa, unidentified
MGTYAGIDLHSSNSYIGIIDEQDRRQFGKRLPNSLTQILVALEPFKKNLEAVVVESTYNWYWLVDGLQEEGYKVHLANPSAIKQYEGLKHTDDKWDSFWLAHMKRLNILPEGYIYPKEERPVRDILRRRLLFVQQRTAQILSLQSAISRNLSLRMSGNAIKKLKEEDTEDLFDSPFLVLTAKSNIAVIQFLTKRITAIENAIKPHAKLREEFQLLKTIPGIGNILALTIMLEVGDIGRFTKVGNYSSYCRCVKSEKISNKKKKGENNRKNGNKYLSWAYVEAANFAIRFSPEAQKFYQRKMAKTDKIVATKALGNKLARASYYIMRDRVAYDSSKLFG

SEQ ID NO: 320504 - protein, 355 aa, unidentified
MKSCFENKDLYVGIDVHKKRWVVTVRTYDLELKTFSMDAGAEELERFFVDNYTGALLHIVYECCFSGFWIYDYFHQRGFNIIVTPTNRIYRDGSIVKTDKIDSRKLAFQHSRGLLKEVKVPAVKIREYKYIFRIYDKEKMREGQILRQIRCILEQKNHTLKWEKWNKLFIEKLKEVKFQDNIFNTKFTQLINEYEYVKAQIKDSEKRIKEIAEEKELSDKIRRLEKIKGIGVISAVRLVVYLFDREDRFISGEKLVHYLGLTPGEKSSGEDVIRQRTGLIGNRQLRSIIVQLAWVAVRKDGNLLDKFERVYKRNGSKQKAIVAVARKLMMKVFAVIQKEEEYEINIPACPSGRAA

SEQ ID NO: 320505 - protein, 500 aa, unidentified
MCLEDRPVLEPNAAGIDVGAREMFVAVPPRRDENPVRVFATFTEDLEHLTDWLEQCGVTTVALECTGVYWIPLFEILEQRGIRPCLVNARHMKNVPGRRTDWHECQWLQFLHSVGLLRAAFRPGQDICAVRTVLRHRNELVSAASQHVQHMHKALTQMNLQIHHVISDITGVTGFAIVDAILAGQRDATELAKLRDPHIKADLETIRKSLEGNWRPEHLFTLRQSRDLFRIYQQQIVNCDLEIEKMLRQFESRTDPAEKPLPPDRKQNRAGSKRRKKNGHPHPEFDLRTETYKLFGVDVTQIPGIEENALPLFSEVGRDMSRWPTAAHFVSWLALCPDNDISGGKLLWRGARRVRNRAGHLLRLAASSLHHSPTPLGYYLRRMKAKLGPKAAIMATAHKIAVIFYTMVKNQVEYDETLWAARDAQRERRLEAKLKRQAKQLGYELVRTQGCITNRFRLREFVGSRSMLRFHTHRVARSGCPLPDPTERSVQICCTTLFGS

SEQ ID NO: 320506 - protein, 340 aa, unidentified
MREITTIGLDLAKNIFQVHGVDEAGAVVVRKQLRRAQVLGFFAAMSRCVIGMEACATAHYWARELKALGHDVRLMPPSYVKAYVKRNKNDAADAEAICEAVRRPAMRFVPVKTADQQAVLTMHRARDLLVRQRTMLVNALRGHLAEFGIVGAQGLHKVEGLMTIIRNGSEKRVPEVARRVLSIIANQLDDVEAKIAALEAQVLAWHKSNPTSRRLATIPGIGPMIATAIAATVPDPSVFRNGREFAAWLGLVPRQNSTGGKARLGGISKRGDSYLRRLLVNGAHAALFWSKAAKTDPWLISLRARKHRLVATVALANKTARIAWAVMSKGEKYRPVATAA

SEQ ID NO: 320507 - protein, 357 aa, unidentified
MYVGVDVHKRVCRAAIVNAEGTVVDEVSFRNSKTGIDELVTRLDAATDRVVVAVESTATLWIQIYDRLEERGIRVVLSNPYKTRLIAEARIKTDTVDARTLAQRLRADMLPLCYVPTKTQREARQFIRHRITLGGMRTAVKNRIHTLLDKHGLRCPYKTLFSKRGVEWLRSVELGVTDDTVLQSDLAVLAVLDEQIASMDAKIATVAVTDERVLLLMTMPGLGYFAAYLLVVEVCNINRFRSDRRLVRWAGLAPGVHQSGDKTYGGRITKQGNKLVRWVLVEAARNACRYDARFRAFYARYSRRHGGQKAVVAVAHEMLRIVWFMLSRGEPYRGGRTGLSERTRKRWERIADRGLRA

SEQ ID NO: 320508 - protein, 435 aa, unidentified
MEQPTRFIGMDVHKDTIVVAVTAAGEVGKAMPYGTFPNTAATVEKLVRRLRQAGSGPLKFCYEAGPCGYGIHRALTKMNEDCMVAAPSMIPRKSGDRQKTDKRDAASLAVLHRGGLLTAVWVPDAAHEAMRDLIRARLAAVRAVRAARQQLSAFLLRHERIYPAGRTAWTKAHRGWLAEQSFAQPAQQIVLEESIETVRLGEQRRDRVDGYLRAQIPTWSLFPLVQNLSALRGLDTIASAGLAAAIGDPSRFVSAPDFMAYLGLVPSEHSTGPKRRIGAITKAGDVHARSLLIEAAHSYRFPARVARHKLTAVDAVPDAVREIAWKAQTRLCRRYRHMMAKGKLKQVVVTAIARELAGFVWSIACITTDPPTKNSAVTTPSEKICPTGSTTCSSVPRRQPIKETARRAERPGQIRTASADGKRPDRMIAHHHSSG

SEQ ID NO: 320509 - protein, 349 aa, unidentified
METIRPKTYRYFVGTDVSKYKLDFAVRQGKLLVFHREIPNEAGAIAAFIAGLKSLPGFRVGNAVFCMEFTGIYCHPLLAGLKRVKANIVCVGSEHIRQSIGKVRGKNDKIDAMRIAEYAYTQRDSLRMFVPKRTVLARLGVLSALRARLIGLQTALRIPLKEQRDFFKKGMSREETRLCARSAAALKLDIREVEERIAGTIRSDERLARLMAVMTSVTAVGPVTALAILLATNEFRNIRDPRKFACYAGVAPFKHESGQVSARGRVSHFANKKMKSLLHTCALTARRAVPELKAYFERKTAGEGKNKMLVLNNIRYKLILRVFACVRQDRYYEADHVGVTPGRNPGQCV

SEQ ID NO: 320510 - protein, 421 aa, unidentified
MGKLIERCAGIDIGKRFLVCCVMTGAAHEEPRSEMRRFDTTVPGLKRLRNWLNEERVTDVVMESTGSYWIPVFNLLEGHVTVVLANPEEVKNRKGHKTDRKDAEHLADLLRHNHVRSSYIPAEPVRQLRDLTRRRVQLTQDATRERNRVQKLLEQVNVKIGSVLTDVFGVSGLHMLLALLDGRAAPEEIAGLARGSAKRKTPQLIEAIEGNRMSDHVRFLIRGCLRHLACLEEEVEELDAEILRRMQLSTFQKAFTLLQTIPGVGQLSAATILAETGPDLDSFPTIEKMASWAGLCPGNRESAGLQKGPQTTHGNPYLCTALVQCAWAATRKRDSVFRSRFQRLAPRRGEKRAIVAVAHHMLIILYCMLKRGVPFLGAEHAPKQRRRERRAHHHLRCLRGLGFAVEIRPRSESTPPATISR

SEQ ID NO: 320511 - protein, 331 aa, unidentified
MKYVGLDVHKEFCQASVLNEDGDEVLNVRVPANVDSLNEFLDGFQEASFVLESTNVWEWYYQTIESRGFDVKLAHPLQVKAISNARVKTDKVDARTLAELLRADMIPESYVPPKDIRDLREALRTRASLVQDATSIKNRIHAKTLRRGIIRPEELGGSFSRSHREWLRSLGIATIDHLLNTLEAVEYEVKEINRQLRSEYEARYDARLISEIPGIGWYGALTILAEIGDVHRFPDAQHLAAYAGLVPSVHQSANSCFYGHISKQGSKYMRWILVEAVHIHVRTASDSAITKFFNRKLKKSKRNVATIAAARKMAVAIFHMLDKQEHFRITG

SEQ ID NO: 320512 - protein, 326 aa, unidentified
MEHELHYIGIDTAKEKLDVDVLRPDGRHRTKKFANTTKGHDELVSWLKGHKIDHAHICIEATGTYMEPVAECLYDAGYIVSVINPALGKAFAQSEGLRNKTDTVDARMLAEFCRQKRPAALEAPHPLERALRALVVRHQALTDMHTQELNRTETAREVQRPSIDAHLLWLEAELKRLEKQIKDLTDDDPDMKHRRKLLESIPGIGEKTSAVLLAYIGLKDRFAHARQFAAFAGLTPRRYESGSSVRGASRMSKAGHVSLRRALYMPAMVATSKTEWGRAFRDRLAANGKKGKVILGAMMRKLAQVAYGVLKSGVPFDASRHNPVAA

SEQ ID NO: 320513 - protein, 432 aa, unidentified
MIWASGAAGESVTFEERARKGPSMYRPLSPVAALVHRLKGLPVTTSTNSAEITGGVDTHLDTHVAAALDALGVELGSKAFPASPAGYRSLLAWLRSFGRVVTVGVEGTGAYGVALTRYLANEGVAVVEVDRANRQQRRKVGKSDPLDALAAARAVQSGAATGEAKGRDGAVEAIRVLRVARRSASGDRVRAINQLRAVVATGPAPLRELLRSLPRPRLIAVCASARPGGHLDPTTATKHALRELARRIQRLDEELARLDALLEPLVAATAPELVALHALGPETAGALLVAAGDNNGRVRSERAFAQLCGVAPLPASSGRTVRHRLNRGGDRQANAALWRIVLIRMGSDERTKAYVARRTTEGLSKPEIMRCLKRYVAREVFAALPASVERRERRRLAKEALVAEQVDVGGPLDPGDEEATEVALGVEIAVAV

SEQ ID NO: 320514 - protein, 368 aa, unidentified
MEEIRAFVGLDVHKATISVAVADNWRSGEVRHVGTIENSPLAIGKLARKLARQHGAIEFVYEAGCCGYNVQRQLAEMGMSCRVCAPSLTPRKPGERIKNDRRDSIALARLHRAGELTYVWVPDELHEALRDLVRARHAACQDVRRDRIRIQAFLLRYDLRFEGKPWSTRHRKWIWNRQFAHPAQQIAFQAHLNALDHDEARKRELEEQIRELLAESPWAKQMRALQALKGVGPIVAATVIAEVGDFSRFAHPRQLAAYFGLAPGEHSSGSTVRPRGITKAGSSLARAVLCEAAWNYRTTPKVGQWMNERCPPVPQDIKALAWKAQLRLHKTYRRLTARGKRSVVATAAVARELLGFIWSIGQRVPLGA

SEQ ID NO: 320515 - protein, 391 aa, unidentified
MYYIGIDIAKRNHEVSIIDADGKILSKSISIANSQKGLDTFNNYLSSFNVTSENSIIGMESTGHYWLNLYSSLVNLNFNVFVINPIQTDAFRKMYIRKTKNDSKDSYIIAQIMRFGEFSSSSISDENIFAIRQLSRYRSSLVDECSNWKRKVITILDQVFPEYSDLFSDTFGVTSKEVLSKYPLPENMLEVSTKELTSLLNKASKGRFGIGKAQEIKEYATKSFGISFAKETFSFQIKQIINQISFIESQLKELEKEITNILKSLNSEITTITGIGDILGASILGEIGDISRFEKASQLVAFAGLDVAINQSGEFTGTEMKITKRGSPYLRRSIWIAATIACFKDPALSVYYKKLIDRGKKHLTAVGAVARKMCNIIFSVLKNKKPYTPNI

SEQ ID NO: 320516 - protein, 452 aa, unidentified
MAKKSKRRCDTLPVLHPDAAGIDVGASELYVAVSADRDPQPVRSFPTFTRDLHALADWLEQCGIHSVAMESTSVYWIPIYQILEARGLEVYLVNAQHVKNVPGRKTDVSDCQWLQYLHSVGLLRASFRPPGFICAIRSLWRHRSSLIQMAAEHVLHMQKALDQMNLQIHRVLNDITGVSGLKILDAILAGERDPLTLARLCHGGVKNSEDTIAKSLEGDYRPEHLFALRQSLAAYHYYQKLVLEVDQEIKLQLGELQTAPTAERTTPARTKASAYQRRRYEPKTFDLRGELYRIFGVDLTNVPGISAITAQTILCEIGTDVSRFRNASAFASWLGLCPEKKVSGGKVLFTKSRRVRSRVATALRMGAQSLHHAKDYLGEFFRRITRKLGRPQAITATAHKLARIVYHLLSTKEAYTESVFHKSEEETLRRAQYRLRRQAAQLGFQVIPAENG

SEQ ID NO: 320517 - protein, 456 aa, unidentified
MGHARARKIPAQLVEDEDYQLRHERVAGIDVAKAKADVCTRLPPPRQGGRRASRVEEVPATAREILALAGRLLADGVELVVMEATSDYWRIWYYLLENCGLTVQLVNPAHARQLAGRPKTDRLDAQWIARLAEMGLLRPSFVPPPEIRALRDLTRTRLQLVRDRTREWQRLEKLLEGALVKLSSAVSRLARAKTARDILEALAGGQRDPKTLAALAAGQVKGGRAAVEQALDGMLLGDHHPMLIQVHLDHVTFLDRSIAAVEDQIDAALAAIPAAWGISADGVPSPDPGPEAAALTAVERLAEIPGVSPGLAMAIIAETGLDMTRFPTAAHLVSWAGLAPVARQSGPRNRKPKKGQGDAYLKGYCTQAANGAARTSSFLGERVRRLSRRLGGNRAKCAVARSILTIIWHLLANPETRFTDLGPDWHERKTDRDRKIRAHLRQLQALGLDVTITPAA

SEQ ID NO: 320518 - protein, 341 aa, unidentified
MKNKSFIGIDISKNVIDVSIFCEETPIKDFSHDVFNNSRKGFGEMCTWLKKNHVVLSNSLFGMEFTGSYSMELEKFLNTRNYQFCMLSTHVVKHYPMGPKDKSDKIDSAKIADFLYRYNGTECVKPYNMPDKTMQRLKALMNERKFLVEQRTCFMNRRQLCITKEDAQLYDGYIKKFSRDIENIELEEQKLLATDDSLLSTYKNLLTIPGIGFVNAINVIVITRNFTAFETARQYASYVGVAPHFRTSGTSVKWRPRPSARCDGQAKADLSMAATVVVQYDAELQTFYNRKLGGKQDSDTKRKALNAVKFKLVLRMFAIGKQNRKWEPLDSKSSNEKLAIS

SEQ ID NO: 320519 - protein, 365 aa, unidentified
MTSVASAAERIYLGMDVSRDKIAVAVLRPGEDVPAVELISSDGEMVRRLIGKLADRSVLAACYEAGPGGYELYRLLASMGVACDVVAPALVPKGAADRVKTDRRDCVRLALSHRAGMLTAIRVPSEQEEAVRDLVRTRADLVDDRRRTMQRVGALLQRHGRIWRAPRWTYEHRAWLDRQSFAEPALQAALRTYLAALDARDAELAVLEAQLRGCWASVDPLASMVRQLGYRGIAELTGLTLAAEVADFRRFPSAPAFMGFTGLTPSEYSSGARTRRGAITKAGPQLIRSTLIEAAWAYRHRPAIGATLRRRQAGCPEQTLARSWKAQQRLHATYTKLTRRGKIPSVAVTAVARELAGFVWAEMTS

SEQ ID NO: 320520 - protein, 348 aa, unidentified
MNALHYIGFDVHKKAVSFCIKTAAGEIVEEGSVPAQRAGLRQWAAARRQPWRGALEATLFSGWIYDTLKPYSDELEMAHPAQMKAISAGKKKSDTIDARTIADLVRCNLLPACYVAPPRIRELRRLLRYRSLVVSEAVRMKNKMAGLLMETGALYVKEKLHRKKYFANLLKELEEVPESVIDLLRLSRGALEMFESTQKRLVRELLADSELAQRVERLMTIPAVGEITALTWALEVGDPQRFHSSSDAMSYCGLTAALRSSAGKQQRGPISKQRNRWLQTTLIEAAKLAPRWNPQLAALHARELERGHRNRATLAVARKLVAYLLAVDKSRQPFQVRAPSEVPTQKAA

SEQ ID NO: 320521 - protein, 347 aa, unidentified
MIRFAGLDISLDETHVCIVDADGKTLKEVRVLTEPEAIADVLHRYGETLKRVGFEASALSPWLSNELLKLGFPAIIVEARHMAGALSAMRNKTDRNDARGLAQMMRTGWFRKVHVKSDESHRIRVLLANRRLLKRKFLDIENAIRGTLKVFGIRLGHATRGCFEVTLRDRLEDEDPILREMTESMLTARRTLLAEFNKCHKLLIDIAGRDEVCRRFMTVPGVGPVTALSFKCCIDDPARFKQSKTVGAHLGLTPKRYQSGIVDFNSRISKCGEPETRALLVEAANSMLTRVRAWSVLKAWGTRLSRRLGHKRAVVAVARKLAVILHRIWRDGTEFVASREGLQALPG

SEQ ID NO: 320522 - protein, 332 aa, unidentified
MSVYVGIDVHRKRSQVAVADQAGEVLANRNVPNGVQPILGVIGGLPAGTPAAFEAAFGWGWLVELLEDYGFDPHLVHPLQCKAIASARLKNDKVDAAILAQLLRADLLPEAWIAPPPVRQLRAMLRHRAQLVRLRTLLRNRIHAVLADHGHGRPQGCWSGPGREWLASLELPAVSREVIDDGLALIDALQLPIDRLDWQVRQRARSEPAVKALTQLPGVGVFTALVLLAEIGDITRFGSARKLAAWAGLTPTVRGSDRTVRHGHISKQGSVWVRWVLCEAAQTAKRHPDFAATYQAIARRRGSKIATTAIARKLLTRAYHLLTDAASGGAPS

SEQ ID NO: 320523 - protein, 313 aa, unidentified
MTQQSCYIGIDVAKDSLDVATIPADESASIPYTEAEVTALIKRFKKLDATLIVVEATGGYEMELVAALAANALPVTVVNPRQVRDFARATGKLAKTDRIDAQVLAQFAEAVQPEVRQLKDDQARKLDALILRRRQLIDMLVAEKNRLRRPDKSVRKDIQAHINWLKKRLKDTDGQVDDFIKSSPLWCVTDELIQSIPGVGRVLSFTLLARLPELGRLDRRQIAMLVGVAPLNRDSGRYRGRRCIWGGRKDVRNVLHMTTLAAVQYNPVLADYYERLCKAGKPKKVALTATMRKLLVIINTMVKNHTEWQPATT

SEQ ID NO: 320524 - protein, 346 aa, unidentified
MEHYAGIDVSLELSSVCVVDAQGKIVKEAKVASEPEAVVAFFEALGFAVKRIGLEAGPLSHWLHAGLKEAGFETVLLETRHVKAALSAMTVKTDRKDARGLAQLLRMGWFQPVHAKSMASQEVRALLVGRKQLLGRLIDVELSIRGILRGFGLKVGSVTRKGFEARIRELVTGQATLERIAEAMLSARAALKAEYEKLHKAVLAIVREDPVCRRLMTLPSVGPLVAITYKSAMDDPSRIAKSKAAGALFGLTPKKYQSGEKDVTGGITRTGDEMVRTALYEAANVLLSRITRFSKLKRWGMDVAKRRGSKRAKVALARKIAVILHRIWIDGTTYRWAEAKPIAAQA

SEQ ID NO: 320525 - protein, 335 aa, unidentified
MEEHIGEIEISNNLKGFQRLVAYVEKCQAKKKLKHLTPLYGLEDVTHYGRNLAVYLLDREHPVKEVNSALSYMERMSYPSVKKNDMWDARCVCAVLMRRYELLPDADPKDYYWIMKQLVHRRNALVKAKSALLQQFHEQIQYDYPSYKKFFFEVECKTSIAFFEQYPSSQTLEGTSVEELAEFLRIPSHNACSTKRAEKILELVEGDAVKAHNYQFGRDFIIQSMMRNIRFILDELGRINKLQKKLVKEVNYHLETLPGVNTVTACALIAQIGDISRFKSADKLANYAGVAPLCFSSGGKGKNVQNKTQGNRELYSVLYLLAMQQIHVNYERTGT

SEQ ID NO: 320526 - protein, 358 aa, unidentified
MITIGVDAHKAVHAAVALDDAGREIDRWRGPNSASGWAALAAWAAAHAASAADAGCQWGIEGAGNYGRGLAQHLVTAGETVYDINPRWTATEREHARQRGKNDRLDARAVALVVRREAATLPPLQAEDETAVLDLLVTERAGALAEATRLRNQLHALLLQLDPRYKDHLPALDTDAGVAALVTYQGPGRTPLQQTQAASVRRLAQRLRLATEQAADLQRQITARAEAGFSPLTRLKGINLLTAGALAGILGPGRRFTSEAQLAAYAGVAPLEASSAGRVRHRLNRGGNRQLNAILYRIALTQLRCWPPAQAYVARRLSAGKTKREAIHALKRYLVRAIWRLWQECVSHQAPSSFVQAA

SEQ ID NO: 320527 - protein, 358 aa, unidentified
MLYTGIDLHRRLIVMCTVNENGAIVARSKIKTEPDALTTYFRQWTDPHHAVVECTSNWYWLCDILRSLGVTVMLAHAKYLKAIAYAKVKTDAVDAHTLAQLLRMGFVPEAHQLPSEYRALRDLLRQRMVMEHQRTNLMVRMTSMLAKFNITKLPCVASQPRFADFLTTCAIPEEYRITLLLYHQQCLQVAQHKKHLEHYFKGELRPTPTLQLLVSIPGIGDITGAIITMETGEISRFANDKHYASYCRLAPGAKDSGGKHKHRSGSKDGNQYLKYAFTEAALKAMRFYPEIRQFAAHLERRSNPSIARTVVAKELSKIAYYVLSRQEEFKTFKGIKIRKTRDWPRTCKPVRITGVHSL

SEQ ID NO: 320528 - protein, 426 aa, unidentified
MPQNIAGIDVHKKLLVVIIADPAKPDVVLQSRRFGTGSAELQHLSAWLCQYGVEKAVMESTAQYWKPVWMELEPHMRLFLAQAHSNKAPKGRKSDLADAKRLVRRFAAGELMLSFIPEPEQRAWRVVTRGRLQLIRERVQLQNQIESLLEEGRVKLSSVITDLLGASGRRILRAMAKGETRPETLAALGDKSLKCGFSALVDALTGSMGDIHRQLLSQHLDRIELVDGQIEELNKLAAARMQQYQDAVTRLIEIPGIGAEAAQEILAEIGPEAAAFPSAQQLASWMGVCPGSNESAAENHSGRSAKGNRFLRRVLCQAAQAAARTNGSHLQSVFKRLVVRLGYVKAVWAIAHRICKILWNVLHKGARFREFSEARNPKAIQRAINHHLKALRQARLFDSLCSQACCRGRGVIFDGGAVGLQSEPRA

SEQ ID NO: 320529 - protein, 332 aa, unidentified
MENFYFIGVDVSKKKLDFCVMFEGKVLHEEETANHQGAIMSLLYQLEEDYGISNSQMLVCAEHTGQYTFPLACACKAVECKLWLETPAEIKYSSGVQRGKNDKVDAKRIAIYANRFQDKVQYYECPTEDIERLKQLESERTLYVTDLAKYKGQMKDQKDYMPKALYERKVKRLQALMDDLEEAIQAITDEMDEVIASCPVLFRQRELLMSIDGVGRVVATNMIITTEAFTRFDDSRKFNCYAGVAPFSYSSGSSQHSKAKVSHRADKVMKRLLHLAAVAVTHRAGGELKKYCERKVAEGKNKMSVINALRAKIVARMFAVIKRNEKYKPILS

SEQ ID NO: 320530 - protein, 343 aa, unidentified
MQRVTTIGLDIAKSVFQVHGVDAIGNVVIRRQLKRRYVLAFFQKLPPCLVGIEACASSHHWSRELQARGHTVRLMPPAYVKPYVKRQKNDAADAEAICEAVTRPNMRFVATKTPEQQSCLMLHRTRHLFIRQQTAVINAIRAHLAEFGVVAPVGRRGVDELLDVVADSSDERVPEVARACVSALGAQLRMLKAQILEFDRQIMAWHRSNETTKRLDEIPGVGPALATALVASVADPKAFRSGRNFSAWIGLVPKQHSSGGKDRLGSISKQGDRYLRSLFTAGALAVIRYAKIHGTRHRPWLAALLARRPSKVAAIALANKIARMAWAMMVKGERYKEPAALAA

SEQ ID NO: 320531 - protein, 485 aa, unidentified
MRVGHAPAGYEYCTQTYDVCRFGFESAGALEFVNEYSGQAVAPAAILISQNSGKHVPGENLTPRRCGMKLLADSEFTAFIGIDWADTKHDICIQPAGSTEREFDRIAHQPEQIEQWAHDMYCRFGGPIAVMLELSKGPIVSALQKHDFFVLFPVNPLTLAKYREAFKPSRAKDDPTDAELAIDLVLRHRDRFKPLQPQSTQMRILTHLVEKRRRLIDDRRRFANRLISALKAYYPQAVELFSHKETFVFCAFITRWPTLQQVKRARRSTLERFFREHRVRRPHLIEARIQAIRTATVLTDDLAVIRPGTLEVLALAKQLETTLQLIRQFDQAIDELVPQLPDYALFASLPGAGPILIPRLLTAFGEDRDRFSSAADVQQYCGIAPVTERSGKKSWVHWRWQCSTFVRQTFVEWAAKTVHRSFWAGAYYRQQRNKGATHQMAVRALAFKWIRILYRCWKSRTPYNETLYLQALQRRGSKLIPGEIA

SEQ ID NO: 320532 - protein, 448 aa, unidentified
MSKSKTKKEKVKRISQLVVINPRAAGIDVSDKEMMVAYPINSEQIEVRVFGSFTSNLHSIAKTLKTNGITTVAMESTGVYWVALFLLLQEYGFEVYLVNAKHVKNVTGRKDDESDAEWIQKLHSCGLLRASFQPDNMTRTLRSIVRHRKNLVHTSSNYINRMQKALELMNIKLHTIISDIDGKTGLDIIEAILAGERNPEVLADLRDKRIKASREDIIKSLEGYWTTEHLFELRQCYQLYCIHRQMIEECEMEIEKQLIEQIASKNYGVIPQMPKSIRKVSSKNKMPFDLTTYLKKILQVDVTEVFGISEISALTIMSEVGTDMEKWKNEHHFTSWLGLAPNTKISGGKVISSRIMKKKQHAGQAFRMAANSLYHSKSPLGDYYRRIKSKAGAGKATVATARKLAIIYYKMVSNKEAFNQKAMEDYQQKYKEKKINQLKKKIALLEAA

SEQ ID NO: 320533 - protein, 350 aa, unidentified
MIIIGCDYHPGFQQIAFVDTETGDCGEQRLEHCEGARKFYRELATQGKTVRVGMEASGHARWFEGLLAELKIELWMGDAAVIRAKRGRKPKTDRQDALHMLNLLLTGDFPKIWVPSWENRDLRQLLWHRHRMVQARTRIMNQLQAVALNEGLRCKKKLWREQGREQLEAFRLAPWASRRRKDLLELLDRLNPTIAELTQAVEHAAEKCPEALRLMTHPGVGALTALAFVLIIGKAERFQCGKQVGCYLGLVPLEDSSGERRRLGHITKQGNSLLRFLLVEAAQVACRTIPQWRSKYIHLTMRRGKKIAKVAMARKLAVRLFWMMRQGWNYQQVMKFGSHVEQPGNRHGVQ

SEQ ID NO: 320534 - protein, 347 aa, unidentified
MIHINSGLNSTILKGDFIFMRVILHNCCGLDVHKDNIVACILKTVNISDNERKDEIDKDIRVFNTFPSGLNELKSWLESQDCQHVVMESTGVYWHPVYDTLEDAFDENIEILVVNARHLKNVRGKKTDIKDAEWLADMLRHGLVRGSFIPPQDVRKLRQQTRYRKTIVNDISTQKNRIEKTLQTAGFKLSTFLSDVFGVSGRNLINVLIKKGHLTAHDVETEAKRIAADKRANIAKAINGKLDAVQRNFLGMQIDHLNSLQSHLYSIEMSINELSAPYDEAIKRVDTIPGIGLTAATAIIAEVSTDMSKFPSAEHFCSWAGVTPGANISAGKKKTQESCTEIPTLKD

SEQ ID NO: 320535 - protein, 342 aa, unidentified
MKTNHIGIDLHKRTQTWVALSEDGQSKLFTRTFPVTPEGVRAGVCLAQSIGSEKLVVAIEPVCGWMWVVALLREAGFEVHISNPRKVKAIADSLQKTDENDAHTLALLSRTGLMYESIEVSPEMQKLRSLVRERSFFIRTRASMKCRFEGVVTRSGRHLIPGSLTTQKGTERIIASGEQEWKRSLESIADMSTYIKELDAEVARHAKAPVPTLLMSIPGVGPVTAVSIWAEVGDFSRFSSADKLCAFAGLVPTERSSGGVQRLGHITRAGSTILRYILVEAAMRIRDTGKSTVLCAFYKTVKEKRGAMRARVALARKMLSVSWYLVKHGERYAQRFPNQSKV

SEQ ID NO: 320536 - protein, 511 aa, unidentified
MITIPVITERCAGIDVGKRGLAAAVAVGPADKEAEIKTRWFATTMPALHDLRQWLLEEGCTTVAMESTGSWWISIKNELEDDLRITLVCARKHHPKKGDKTDFRDAVDLALHHRHGLLTGSFLPERGIVELRDLTRRRKKLLGNLSSEKNRIQKVLDTAGVKMGNVVSDVFGVSGQEILRALMDNAPLSAGQLADMARKRLRKRIPELTEALRDHHMSDHHRWLIGQSVDHAEFLDQQVEALEKKIELQLAPYRRQYELLQTIPGIKEHTAASILAEIGADMSQFATADKLCKWSRICPGNNRSAGKSRSSHIQRGNKFLLAALVEASWGAIRKQGSAFQRKYRRWLKKGEQKAIIAVCHGLLRVIWSVLRNDRPYVEPDAEVLENLERQKQIRHHACRLREMGADEQTIRTLIDKLLATPPPPKPATKNVSEEASGVHPARCSPLQQPQTLGESAVKRPIARGVLGFRIRTAPKKKYSVEKDRPDRPTGATASVTASHPRKGGRAQKTKT

SEQ ID NO: 320537 - protein, 350 aa, unidentified
MKIIGCDYHPGFQQIAFMDTETGELQERRLQHPEEAEKFYRELAAQGVQVRVGMEASGHARWFERLLAELQFELWIGDAAVIRTKRVRKQKTDRQDAQLILQLMVEGRFPQIWVASGENRDLRQLLWHRHRMVQARTRIMNQLQAVALNEGLRCKKRLWREAGRAQLEAFPLARWASRRRRDLLELLDRLSPTIAELTQTIEQEAEKNPEARRLRTHPGVGSLTALAFVLIIGKAERFQCGKQIASYLGLVPSEESSGDRRRLGHISKQGNTLLRFLLVEAAQVTVRSLPEWRSKYFHLAMRRGRKIAKVAMARKLAIQLYWMMRKEWDYEQVKRFGPHAGQPEHRRGVQ

SEQ ID NO: 320538 - protein, 481 aa, unidentified
MAARKKNTKKDAASGSPAAASQPGDGGAEVAEERAGVVAYAAAVDVAKGSGMVCTRVPGSRPDRKRQTVWQVKAAYKPVVALMDHLRCQGIQRLVLESTSDYWRIWYYLAEAAGLQVWLASARDVKHLPGRGKSDREDCVWLCKLNERGMLRRSFVPPEGIRDLRSLTRTRSKLAQDQVRHQNRVEKILEDALLKISVVISDLFGQSGRRFLDALVAGERSPAALAALGHPRLKATQQELAGALTGRFRDIHAFEIATHLRLIDTINDEITRLDARIEQQLASIPGVAPACTSCGLIGGGHAPGCASQGTPVLSLVARLDEITGVGPRNAQVLIAELGTDMSVFPTPGHAAAWARLTPRTLQSGASSRPGRAGKGNPYLRGALGQCVMAAARTDTRLGEQYRRIARRRGKQKAMVAVSRVICEISCILISDPAARFTDLGAGYYSTLNPRRQTRSRIRELERLNPGMKVTLTPIEPATTAA

SEQ ID NO: 320539 - protein, 341 aa, unidentified
MKNLFIGVDFSKEKVDVAIIFADGLAETASRVFNEFKTTVSGYKQLIKWVEQNSSGIEPSLWLFCGENTGDYSKGLCNFLYGKGYDMWLENAKSIKDASGLRRLKSDRADASMIAEYAMRNYDKAIMYEPLSESLAQLRELFLYRQMVVRHRCSFQVRRGEKRLTMEKSPIKTMISQSGRHIVSELNKEIEKIDKRIAELIKSDEELIEVYTIVTSVPGIGTQNAVCMMVYTDNFRRFNYDSRKIACYYGIAPFGKDSGTSVHSDPRVHYMANRQIKAMLTQAALAAVNFNPVIARYYMRLVERGKKKQVVLNNVKNKLIHLITAMVRNRQLFSPEYKISA

SEQ ID NO: 320540 - protein, 367 aa, unidentified
MKKVSTAATKQSRNISQQQLTIGLDLGDRNSWYCVLDETGQIQLEQRVRTTAKGLQEVFGAMPRSRIALEIGTHSPWVSRLLSGLGHEVIVANARKVRLIGESRKKDDRLDAQTLARLARIDPELLYPVKHRSVQAQADLMTIRARAGLVRARTALVNTARGLAKSYGERLRGCNVRDMDPEKAEGLSPELQRALEPLLATIEELSERIVEYNDRIEALAQTSYPQVELLKQIKGVGTLIALTFLLTLEDPHRFRKSRDVGGYLGLQPGRRNSGQSEPQLHISKEGDPYLRTLLVQGAQHILGPFGIDCDLRRWGLKLAERGGRNGKKRAIVATARKLAVLLHHLWVSGEAYEPLHNSRRVTVAAAA

SEQ ID NO: 320541 - protein, 345 aa, unidentified
MEIHAIGIDLGKTLFHLVGVDACGTVVVRKRCSRSQLLAYTANVRVQRIGMEACSGSHFLGRALREQGHDVRLMPAQYVKPYVKTNKSDYIDAEAIAEAVQRPNMRFVPIKTEEQLDLQTVHRVRERWVMRRTAVVNQIRGLLLERGLTLPKGRSYVNQALPGILADATLRLSDSFRVLLAQLGLEMDQLTARIEQMDAVIHQTATENEACRRLTSIPGVGPVTATALVAAIGNGSGFRRGRDLAAWMGMVPREYSTGGKQKLLGISKRGNVYLRRLFVQGARTVMQHRSKQAAGLRCWLDQLMARTHQNVAIVALANKLVRMAWAVLCKNETYRAPVLVASTGT

SEQ ID NO: 320542 - protein, 400 aa, unidentified
MNEFKPEASRIDTVAARLELPGQECYAAYVGLDVHKETIAVAVAEPGRQEPRSEGEIANRPKSIEKLVRRLSDRFGGGLLQFVYEAGPCGYGLYHQLASTGHICEVVAPSRIPKAAAERIKTDRRDALKLARLARSGDLTPVWVPGPEQEAMRDLTRARGDMKVQERKARQQLSAFVLRHGHAWPAGKKRWTQARYTWLESLKFTHDWQQVVLQEYVDAVKAATQRVADLRAQMERALAQWSLAPVVEALVALRGVDTLAAMVLLAELGDISRFDSPRQLMAFLGLVPSEHSSGGKRRQGGITLTGNGHARRMLVESAWSYRFPARQTKHLKRKAAPASEAAKGVAWQAQKRLCGRYRDLIQAGKNSKLVCVAIARELAGFIWAIVREEMPKVRNAANGV

SEQ ID NO: 320543 - protein, 314 aa, unidentified
MCWVGIDVSKDYLDVCVLEETGELKHERVENNETGFDKLSTDLKARDAHVVVEATGIYHERMQQHLQAHDMCVSVMNPRQILGYAKSLNRRNKTDAVDAALLAQFAKEREPEPSPRLKNDDAKAILREIGALNKDMTRIKNRLSAADSGLSHQAVKASLQRCLTRLKEEKVALEKALEEALEAQKADLKLLESIPGIGKLSACYLLAEIGDPRRFQSAAKLVAWAGLNPKRHESGTSRAYTAISRMGSATLRGVLYMPALTAIRFNPRIRVFYDRLVAKGKPKMVAVVAAMAKLLRIVYGVLFSNQSFKPTLGG

SEQ ID NO: 320544 - protein, 356 aa, unidentified
MHKTSRGAVFVGIDVSARELVVALQDGDQLEPVRTFANTASGHQQLRRYLGGDQQPVRVCVEASGNYSLDLCLALHAADGIELSVINPRLARRFAESLGTRSKTDPVDARVLCLYAQRMPPAPWQPPSTASLHLRSVTRAVEALTCMLTQEKARQHAAEASTALPRVVANELKRHQRYLEQRIQRLRREAVRIISTDADLARRFRLLQTTPGVAETSALQLLGELAALPSTLDARQWVAHSGLDPRHHRSGTSVEWTPRLSKVGNRRLRRALYMPALVAVRHDPHLRIFYLRLCANGKAPLQALAAVMRKLLHAFHAMLRLDQPYDGARLCPDVALANSPMSTKREGFPTPLLREK

SEQ ID NO: 320545 - protein, 391 aa, unidentified
MIYVGIDVAKDKHDCFITNSDGEVLFKAFTITNNLDGFNDLYQKIETVMKDITKVKVGLEATGHYSYNLLGYLIDKGLPTYVINPLHTNLYRKSLSLRQTKTDKVDARTIASMLMSDVNLKSYSDTSYHNEELKSLTRYRFDKVKQRAKLKSSVSRLVCILFPELEKLVPTLHIASVYALLSEFPSAKHVATAHLTRLTNLLSESSKGRYGKDTAITFRDAARASIGSNMPAKSLELKHTIKLIQELDSEIDEIENEIKIIMDEINSPILSIPGINYRMGAMIIAEIGDFNRFDSPDKILAYAGFSPSTYQSGQLDGAYAHMEKRGSRYLRYALYNAAKYVCHWDPTFTAYLAKKRAEGKHYNVAISHAVKKLIRVIYHLEKTNQQYIKAS

SEQ ID NO: 320546 - protein, 411 aa, unidentified
MLFVGDDWAEDHHDVEIQDESGRKLAVRRLSEGAAGISQLHELIGEHLGETDDPGQVVVGIETDRGLWVQALLAAGYRVYGLNPKQVARFKERYVTSGAKSDAADAHALADMVRTERHQLRAMAGDSAQAEAIKVIARAHQTLIWERTRHLLRLRVALREFFPAALHAYAPLGLAGADTLELLIKAPDPVRAARLTGGQITAALKRARRHHAVAKAEQVKTALRTAHLAQPEALSAAYGATVQAIAAVLVTLNEQIGRPEVQVDTHFHQHPDVEIYLSQPGIGEVNGPRILAEFGDDPDRYTSAKARKNYAGSSPITRASGRSRIVLARYVRNDRLADALHSQALSALTGSSGARAYYDKQRTRGAGHNCALRQLSNRLVGILHGCLKTGSQYDEARAWPQHAGHVEPVAA

SEQ ID NO: 320547 - protein, 408 aa, unidentified
MDLTPMHKRVIALDVHQAKITACAVVEHDDGRVEVTKRDFGAFKRDRRALAQWSLEIKPEVVVMESTGVYWKSPFAALEAVGIIAWVVNARHVKAVPGRKTGMADAQWLATLARAGLLRASFIPPVEFRQLRLVARQRQKLVGICSAEKNRLHKVLVDAGIRINVLVADIHGQSARAMVKALIAGQPMHEVLDRRGRLRASREELCEALSTEQFSTVHRFVAEEIVQHIEQIEQRIARMDQYLLDGLRAWQPQLNLLQTIPGIDIQGAAMLLVEIGADMAVFGSAERLASWVGICPGNNESAGKRKSGRIRRGNAWVRRLLCEFAQAAARTRCALKAKFDSLAIRKGHKKSVVALAHKMLRTIYAMLASGTYYQDRSVDYEALSVARNAPRWIKMLRKHGFMADSAAA

SEQ ID NO: 320548 - protein, 343 aa, unidentified
MTEVTTIGLDLAKSVFQVHGIDGSGKAVVRRQLRRRQVLPFFKKLSACLIGMEACATSHYWARELAALGHEVRMMPARYVKPYVKRNKNDAADAEAICEAVTRPTMRFVPIKGPEQQAVLMEHRTRALFVRQRTALINALRAHLAEYGIVAGVGRNGLEKLLEVIEDDGDERVPSAARDCLLALRAQLVMVKQQILDADRRILAWHRASEVSRRLAEIPGVGPLIATALVASIPDPHAFRAGRDVSAWIGLVPREDSTGGKPRPGHISKAGNRYLRRLLVVGALSVIRRAKQTDCKRRPWLAALLERRPTKLAAIALANKIARIAWAMMAHGTCYQEPQSQTT

SEQ ID NO: 320549 - protein, 341 aa, unidentified
MRYIGVDLHTNSFTVCYLEQEKPEYIKTFRLQDLDNFIKDLQETDEVAFEATGNSCFFYDEVSPYVKRAVIIAPGQFEIVRRSVNKTDKHDARAIAFFLSKDMLPEAKCKSKQCQQLASLLKTRDQLVKSRVSLINKMHGLFNYHGIKIKKEVLTTKVGFERSIQKHNWELLEKVEIEVINSNLEVIRESLKKLEKEIIAFAKQLPGFNGLISIKGIGAISAAVFVATIGDINNFSNPEKLTAYFGVVPRVSQSNQQCTIGRITKRGPKIGRTSLVQCTWIAIRYSPYLRSFYEHVKKKRGAAKAIIATARKFLTTIFYTLKNNWVFKDFTKFEFFTGQQS

SEQ ID NO: 320550 - protein, 342 aa, unidentified
MEQYVALDVSLKEISVCIVDSNGDVVFEGKTAAEPATLVELIRSKAPQVKRVGLETGATSPWLFHALASEGLPVVCMDARHAHAVLSIRPTKSDRSDARGLADMLRMGWYREVHAKSVTSHERRTILGARHQLVTMRSELDAQIRGILKTFGLILGTGNKDTLIQRAEKLAAGHPVMSGLVAKLAEVRRHVTSQIAAIDRDIRHLVHTEPTLKRLMSVPGVGPITALAFLSAVDDPRRFKHARDVGPYLGLTPTRYQSGETDRQGRISKCGDTFTRTCLYEAAHVLLTRVQRFSPLKAWGMRLAKRIGGRKARIAVARKIAVILHCIWTDGTEFWWTREKAA

SEQ ID NO: 320551 - protein, 467 aa, unidentified
MEKAKESSKLKRGGVPMALTAIRPMVAGIDIGSRENWVCGPARSDGKPNVRVFGTTTADLKVLVDWLAEQGTESVAMESTSVYWIPLLELLEACGIEAVLVNAHQLHNVPGRKTDYHDCQWIQLLHSCGLLRASFRPGPAVVAMRAIHRQLANLVEERTRCVQWMQKALDQMNVQVHRAVTDLTGTTGMAIVRAIVAGERDPIKLSALRHHRCHKSVEDIARYLTGTWREEHLFNLASALQLFDAVEKLIATHESRLLEAMAALQPDDRRDAPAPPHPNPLKEKAIKGHGDQPMRTALWRFAGLDLLRIDGIGTGAAKIVLTEVGPDLSAFPSENHFVSWLRLCPRRPISGGKPLRKRRNSMGANRIAGALRMAACSLQRTKTALGAAYRRIARFKGADVAIFAIARKLAQLVYRMMRYGQDYLDLGEAAYDRQFEARRLAALKQTAKSMGFQLTKEPVQQPQPSAG

SEQ ID NO: 320552 - protein, 351 aa, unidentified
MMLIGVDYHPSFQTIAFFVEETGECGEQELNHSDGQAEKFYRDLKQRGICVRVGMEATGYARWFERLLAELGFELWIGDPAEIKAKRVKKQKFDREDARLLLRLLRENNFPQIWVPGPENRDLRQLLWHRHRLVQMRTRIMNQLHALAMNEGYRWKKKLFSEPGRAQLEKLALAPWASRRRRELLELLDRMNPTIEELTAAVEREARKRPEAMRLMTHPGVGPLTALAYVLIIGTPTRFQCGKQIGTYVGMIPCEESSAHKQRLGHISKQGNSLLRFLLVEAAQAAARIHPDWRRRYLHLAMRRHKSIAKVAMGRRLAVRLYWMWRNGCEYSQSLEFGSYVGQLGTGHGVK

SEQ ID NO: 320553 - protein, 391 aa, unidentified
MYVVGIDCSKYKHDCFIATETGEVIRDTFTFDNSGPGFALFFSILETLKCPKNQIKVGFESTSHYMVPLMKHLSVKGYEFILLNPVIVSRFRRSTTLRRIKTDKIDAKTIAQVLASSDYESYHMQVYHFPELKSLTRLRDRLVKQRSYYLVMLTNVLDEVFPEFKEFFDDSLKSKTVFYLLDTYKIPSRMANMNSNSFDNLRKISKGKFSYAKFVKIKELAKNTIGSSSEADELEISSLLNIYKTINDEVCRVESKIEEIMTILDSPTVSIPGVGLMSAASIIAEFGDLSRFANADKMLAYAGLDVGRSQSGTADYKGKMVKHGSSYLRQALMNVVETMMIHAPVFYDFYHKKRGEGKPHRVALSHLARKLVRLIYKLETSHTRFDLTNSK

SEQ ID NO: 320554 - protein, 407 aa, unidentified
MFCGIDWASERHAVCVLDDAGKTITAFQIAHSADGFDQLVIRLCRLGDPAGLPVAIERPDGRLVDRLLEAGHPVVPVQSNAIKAWRDAEVLSGAKSDPGDAAVIAEYLRLRHHRLRPLQPFSPQTRALRAVVRTRDDLIAARVAASNQLSSCLEAFWPGAKAVFADVESPIALDFLTRYPTPESAQRLGERRMTAFCVKHGYSGRRPAAELLARLRAAPAGLTGTVEVDARRDAVLALVGVLRALNQSIKDLDRSVVAHLGEHPDAEIFTSLPRSGRISAAQVLAEWGDCRQAYDGPDAVAALSGIVPVTKASGKHRVVSFRWACNKRFRQAICTLADNSRHASPWAAKVYADAIARGCDHPHAIRVLARAWVRVIWRCWIDQVPYDPAKHSATRKLTEMAASAGQG

SEQ ID NO: 320555 - protein, 316 aa, unidentified
MTNALYLGIDVAKDSFDVASDPAGLKLSLPNDPKGRQKLLDTLQTHAVALIVLEATGGYERDLVADLLHAGFKVVVANPRQVRDFARGIGQLAKTDGIDADVLAHFGQVVQPQPRPQPSGQMEVLAELVMRRGQLTKLQTQESNRLPHARHATVRKSLQKILRTLDQQILDLDKLIRQNIESDDGLRRKDEIVQSVKGIGPGTSAMMLGRLPELGSLNRQEIAALVGVAPWDIQSGKWAGKSRIWGGRQEVRNMLYMATLTATRFNPVIRDFYQRLTSKGKLFKVAITACMRKLLVILNTLVRNDCLWSPAPAKNH

SEQ ID NO: 320556 - protein, 411 aa, unidentified
MRVVVERCAFLDVHRDTVMACARTPDGGCGRREEVIEFGTTTSQLLQLADWLVQRQVTLVGMEATGVYWKPVHWILEEAVGEVWVINARHMRNVPGRKTDVADAQWGAQLLEHGLVRPSFIPPRPTREQRDLTRYRKSVIEERGRETQRLHKVLEDAGVKLSSVASKVLTKSGREMIDALVAGQRDPAVLAEMAKGRMRSKIPELRDALAGRFNEHHALLCRAMLARIDQSDATIDELTAQIVKLQDPHEAAVKLLVGIPGVSYRTAQVILAEIGTDMSRFPTAGHLASWAGMCPGNNESAGKHRSGRTRHGDKWLRIALVEAGQAAGRSKNTYLGAHYHRIRGQRGPGRAAVAVGHTILVICWHLLSTGEIYTDLGGDYFDRRRNSPAHQRRLVAQLEAMGLRVTLEPAA

SEQ ID NO: 320557 - protein, 428 aa, unidentified
MDELNRNRLEEFRQLRREVRHSEKYLIVGIDIAKDQHHAFFGTATGKTVLRRLVFSNDYEGFRKLLDQAEALRVRHGLTKVVYGVEPTANYHKPLGEYLIHLGRTVVLVSGVTVKQNRESLDGRWDKHDVKDSANVADLISQGKCLYYEYPPAGIRGLRGLLSLKKRLKKQEHGTRVRIRNHLIAQYFPEMDRDYERLGAEGLSIMKWCFPPSHMTELDVGPFIQRVTPRRIRMEKRQRLEGVWEKAGETIGCDGVPGVEHEARVMVGGLKQIREMIKETEDKIEEICEEFPEYPCLLTIPGFGPDVSSKVLGAIGDPDRFENGKQVLKLAGLDLSADRSGKGSDKAIPQISKRGKADLRYALYQAALIASTRDHGFVRYFTDKLRGREREKGIQTKMWVKLSAKMLLIAWTLMKKKEVFDPAYLSAE

SEQ ID NO: 320558 - protein, 416 aa, unidentified
MKLFIGLDVSSQKLDTCFLTDSKEILFEDSLSNDLIGASEIKQRILKYQETCGFSRIVIGMESTSVYSFHPSMFFYLDDDLKQLPVEVTVENPYRIKQYSRMFDQDKTDKIDARIIADYLRVDLHTLSPIKEEIYVGLQRLTRSRYQLVTQMVEAKQHFLENLTYKCNTLSKELANEDNKTSVFGTTIMNLLTEDITLDEFSEMPLEEAAELLQKLGKGRFKNPEQLVKSIKKAVRSSYRLGKVTKNSIDLVLGIIANEIKFLKKQIKEIEKAITALLETIPEAQCLLSVPGLGPVYTAGLIAEIGQIERFDDQSKLAKYAGLTWTKNQSGNSQSENTPLNRSGNRYFRYYLIEATNRVRITLPEFKEYYQKKKNEVPKHKHKRALVLTGRKFVCLIDVLLRNGQLYQPTKVVIEK

SEQ ID NO: 320559 - protein, 360 aa, unidentified
MPVQSNKLNFKGQNIYIGIDVHLKSWNVCVYVGGLKIKPFSQTPSAAVLKSHLETNYPGGTYYSAYESGFCGFSVHYELLRHGINNIVFNAADISDTSKERMRKTDSTDSSKIARNLSKGELSAIHVPSEQEISDREVLRTRMTHVKMCVQTKMRIKSLLYVKGIRYPDTFEKPGTHWSRNFVSWIENEASSLPYEGGRSLLIQIENLRFIHNQILKATRELRKIMTQPRYQDSYKLLMSIPGIGFLTAATFLLEAGDISRFASNDHLASFVGFVPDTRSTGEKDIAIGVTSRSNHRLRTMFIESAWSAIRQDPALTLAYTKLVSRMEPNKAIIRIGRKLLNRVACVLRTRKPYVKAVVQ

SEQ ID NO: 320560 - protein, 347 aa, unidentified
MLGIDAHKRTHTVVAVDHHGRQLGTKTTNATTTVDHLAIIRWADQIGDERCWAVEDCRHLSRRLERDMLAAGERIVRVPPKLMAHSRDAARTYGKSDPIDALAVARAALREPDLPTAHLDDTARELRLLVDHREDLVAERTRHINRLRWHLHEIDPAWEPDLRAFTTFKHLDIAARRLAGLDSVIARIAANLVARIRQLTIDINELRADLEARTEAAAPRLRQVHGIGPLASAKLIGEVAGVQRFRSASAFARHNGTAPTPVWSGNTDRHRLSRAGNRQLNAAIHRVALTQARSHPEAIAFLQRRAERGATRKEAIRSLKRRLSDVIYRAMLADAAFHQERPTGQAA

SEQ ID NO: 320561 - protein, 432 aa, unidentified
MKHNQSSKQNQRISRISETTLVIGTDIAKHNHVARAFNYRGIELGTRCLFQNDENGLLNLLAWAESIQQEHGLTDVLLGVEPTGHYWFPLFHFLKRRGVEVVLVNPHHVKKSKELDDNSPTKNDIKDAKVVAKLVIDGRYTQPQLPEGVYADLRVLMNQRDRLCGDLNRVKGRIHNWLDRFFPEYRQVFKDWEGKASLITLTHLPLPQDVVAAGETTVVAIWKKNGVKRAVGPKRAELLYRKARKSIGLTEGATAAKHELAMYLEQYAMLCRQIEELMEHVAALVEQIPGACHMMSIPCIGLVTVAGFLAEVGDLSGYDHSQQIVRHAGLSLRENSSGLHKGETTISKRGRCRLRALLYRAALTMVAKNPEFRALHLYFTTRRDNPLKKKQSMIAISSKLIRVMFELGRKQKDYDASKVLGPHREAQLQTAA

SEQ ID NO: 320562 - protein, 423 aa, unidentified
MMKLKYSICCGLDVHKNVIVATIVINNKDGISEYLQKSFSTINSDIQRFHNWLIENNCYHVCMESTGKYWIPIFNYLENDIDVCLTHPKYVKAIKGKKTDKKDSKWIADLYKFDLVRCSFIPPKDFRQLREIARYRFKLVCMKSSEKNRIQNCMTVSNVGIASVLSDPFGKTATEIMSYLLEHTADSIDEKAVRKLIKKGAKAKSDEIIEAIKGYHIETDQAKKLELACGHLEYLDDMITQTEVELYVRIKPYYEFVEFVSTMPGMTELSSTIVLAETGVDMNIFDDAKHLCSWCGLSPANNESAGKKKSVRIAKAGDYLKPMMVQCALAAIKSKKQPYFAIKYGRIKKRRGHKKAIIAIARMMMVCIYHMVSERNPFTPTDYEELMDPQNHVERVILNENNVFAYLESLGYDSSKLVKRNDN

SEQ ID NO: 320563 - protein, 313 aa, unidentified
MAQMVPNVGIDVSKERPDVAVLPAGPQFNVSNDTAGWRELCRRLKPLEVRAIGIEPSGGYERGVIGALLEAGLSVRSVNAWKLRQFAKAAGLLAKNDRLDAQVIALFVATLPCREVRRDPMREHLAELVGARRQMVDLRQVLENHLEQMSDRGLGQMRQRQIRQLNADIVRLDRRIAEAVAAVPAFAARYNLLCSMRGVGPVLAATLLAWLPELGSITRRQVGALVGVVPYDFDSGKMKGLRCIFGGRANVRHVLFMAAQAGTIHNPVLHAFKQHLLAKGKEAKVAVVAIMRKLLTILNAMVRDGQPWRAVEA

SEQ ID NO: 320564 - protein, 353 aa, unidentified
MRRPKEKLIAGIDLHSNNVMIGVINQDGKRVAHRKLGCDLSEVVGFLKPLKPQLQSMAVESTFNWYWLVDGLRAQGYSIDLANPAKIAQYSGMKHVDDKDDAFHLADLQRLNILPKAHVYDPELRPVRDLLRRRTNLVQQRTALLLSFKSLYTRTTGQTLALNDVKKLEPKEASQLYEHPANQLIAQVQTEHIGALDKSISRIEKAVLGSTREIPMYEKLLTLPGVGRILAMTITMEVGDIQRFRSDGDFASYCRMVDARHLSNGKCKADNNQKCGNKYLAWVFVEAANFSRRYDEQCRRWYDRKAAKTSKIIATKALGCKLAKAAWHIMAGQCDYDEKRMFPELANKPMKAS

SEQ ID NO: 320565 - protein, 416 aa, unidentified
MGGWCEGLKKTIKGGGIMKHFIGIDISKHNFHFCVLNKDGKIVSSGSYPACCEGFTKFLNLLKSLTEPVVVMESSGRYHIPLYSFLVSKDIETYVINPKVVHRFFKFISANNPSKNDKKDAKVIALFALTNPHMLNSSTSANTRKLAHLIQKLKCELSSTKTQIKYALSVLFPEAERYFNIYCHSFLHVLLKYPSAKRIRNAKLKDISKIIKDCSIRGRKPSFQPQHLIELAKDSIGVDDPYFAEELIFYIEKLLFLEPRIQRLEKMLVDEIDKQQHEQIKLISSIKGISEKLAALFLAEVKDIKNFSNHKKLIKYAGTDPVIKESGKYKLRMSISKQGSPFLRNILFQMATGVVKWNFCFREYFLRKKEQFGSYKKAMVALMNKLIRVIYAICTKGRPFRAELVKPMCPAEVIHD

SEQ ID NO: 320566 - protein, 372 aa, unidentified
MKQNIIHIGLDVDDTQYHGSALNKSTGEVLDFKCRPNLKGLLGQLDKLHKYFPGSTFKLCYEASYIGYTLQRDLAEKGYHCDVVAPTSIPSPRGKQVKTDRIDAAQLVQFYANKLLTLVAIPELEQEQDRDLIRSRQKLLEQQTELRKHIQALLRRNGRHYKVETQNKSHWTLRHYCWLERTIETSSGSLKVNLELLVRQLKGINSILTEYAQQIEALAKTPRYESLVQALTCYKGIKNLFALTMITEIGDVKRFPHPRQLVSWIGMDIREYSSGGKHNRFGITKHGNRYLRTAFIEANQRGYRTARITKDLKARRKSTDPEFISIADRCLRRLNKKGNRLLVAGKHPNKVKVACAREMVGFVWESLHKAAA

SEQ ID NO: 320567 - protein, 351 aa, unidentified
MPIVADQYEFVIGVDTHAATHSLSVVTAATGAVVDQSMFPTNPSGLERAVTWISRRVGEHATLVVIEGVGSYGAGLAERVLGSGLAVVEPAAMPAAHRRGIGKTDSLDAVRIARSVLAVDISRLRWPRAEGPRAALRVLVVAREQMAAERTRAVNALTALLRITDLGIDARKALTRKQIDAISTWRSRSEDVTMHTCRQEAVRLAKRIRALDAELIDNRKALDSAVGSVAPELPELPGVGSVVAASVLIAWSHPGRVRSEAAFAALAGTCPIPASSGNTMRHRLNRGGDRRLNRALTTIVLVRMRTHPDTRAYVARRRREGRTTKEIMRCLKRYIPRQLFRTLTAAYPAPA

SEQ ID NO: 320568 - protein, 340 aa, unidentified
MAMFAGLDVGFKRTAVCVIDDAGVVMWRGMVDTHPDMIAVALQRWRKELAKVGLESGSLSPWLARELTGRGLPVVCMDARRAADAVKARRVKSDKADALALAEMLRTGFYSAVHVKSEESHRLKALLGARDQLVRTKRSLGNQVRGLLRPFGIRLPSRQGTKRFDAAAHAAVRHDPVLSASVTALLEALAAVEGQIARLDERLKELARRSEVCWRLMSVPGVGPIVALAFMAAIEDVGRFRRMRDIGVYLGLTPKRYQSGEINVVLGISRQGDTMARHYLYEAANVLLTTVRRGSPLKSWGLKLLKRRGSKRARVAVARKLAALMGRIWKNGTHFDAAPA

SEQ ID NO: 320569 - protein, 529 aa, unidentified
MEFQLRSAQFPNSGPGVEKETSVVILDMAACMMRPPYTYGGLKDMKNKSIFTRQNQTLINLFRDAKHPDKVLCVPIDYAKQTHMALFCDGSERQLKKPFPVKNNPEGIAFLLDAVEKIRRKHHIKRGHVFFGGEDCGTFSDNFIYALRKAGFVVIGVNAADAAKQRENLQASTDKLDLLGIAKMLLGKRGSIAGGQIGKERALRSLTRHRDSQVRMRTATGNRIHKIVDQLFPGFLDEKRSAIPPFSEASLYLMEDRFSPVQIAKRQDKALLRQLKVHGLQHAETALGKLKAYSRQVLGHPPELVGMLQTSLAGEINLYRCLGSNIDLIGRETAQQLAQTPGAMLTTIRGTGITLAAGVAAETGPPDTQPSTRRLTSYAGIVPRVKQTGGPEKGAKTGTVSRRCNHLLKNHVVQCGNHLGQHGPADLKEDHRRRGANGQHADFGMARRYLRMAMRLMRNGESYVPPELRTGATLEELRTYYLDLWPRLLDKWVKAGAVHTAFDPANPLGQWRERIEAIYEIELPLPKKK

SEQ ID NO: 320570 - protein, 411 aa, unidentified
MVKENFIYVGIDLHKETHTAVMIDCYNQKLGEITFPNRPADFPKLVAKVKKCNTDGKTIVFGLENAYGYGRALAVWLIDKGYLVKDVNTAISHRQAKHRGAMYRKSDSDDAKAIALATLNMLDKLPDACPNDAYWSLGQLVHRRDNIMKQRTRLVNQLHEQLCIAYPSYKQFFNDISRPTALYFWEHYPSRKYLKGKSVEDLRAELVPVSHNKCSTKTCEKILDAVASDKVKNNAYQDARDMVTLSIVSDLQHYDKQLAEVDKMLEQMYKMLGCTLTTIPGVNVITAVKILSEIGDIERFANANKLAQFAGIAPLHLSFSGKGKDVATKQGNRRLQATIYFLAIQMVQVSSKGTPRNPVVRAYYEKRKAEGKTSQQALICISRRLISIIYGMLKHGTEYRMPVVENAGEKL

SEQ ID NO: 320571 - protein, 409 aa, unidentified
MQEATQHDAVDVFVGVDVDVDVDVDVGKGRHHAVALDRNGKRLYNKALPNDEVKLRALIAELKTHRRLLFVVDQPSTIGALPVAVARAEGVLVAYLPGLAMRRIADLHAGEAKTDARDAAIIAEAARSMPHTLRSLRLADEQLAELTMLRGFDDDLAAQVTQTSNRIRGLLTQIHPALERVLGPRLDHPAVLDLLERYPSPSALAAANEKTLANRLTKLAPRLGKNWAAEIVQALNEQAVIVPGTQAAAIVMPRLAQQLAALRKQRDEIAAEVERLVLAHPFWPVLTSMPGVGVRTAARRLTEAAPKAFATAAHLAAYAGLAPVTRRSGSSIRGEHPSRRGNKVLKRALFLSAFAALRDPVSRAYYSRKIQQGKRHNQALIALARRRCDVLFAMLRDGTIYPPKSAPNA

SEQ ID NO: 320572 - protein, 425 aa, unidentified
MNQDNQSFAAFIGLDKSDKKINVTLQRCSTARSERSIIQGSAEALHAWVAALCARFPHQPVAICVEQPAAGLIHALMGYDFVVLFPINPVTLARYREAFTPSRAKDDPTDADLLCELVAQHREQLKVWQPDDICTRKLRHLTQARRSSVNMRTRLSNQLKALLKGYFPQALELCGEDLTTPLACAFLQKWSSLQQLKKARPETIRRFYYAQNARRGDVIEKRLTLIAQAVALTNDPALIESSIVTAQALTLGLRAAHTAIARFDREIARTFTQHPDASLFAALPGSGTVYSARLLAAFGSRRERFESAEALLNFSGIAPVVKRSGQATKIHRRYARPIFLHQSFIEYANESIRHSLWARAFYQMHKAAQQSHWVIIRALAYKWIRILFRCWQERTPYDELRYLKSLQKHGSPLLQYLAQPNTQTV

SEQ ID NO: 320573 - protein, 350 aa, unidentified
MNEITTIGLDIGKRVLQVHGADAAGNTVIQRKLRREEVLPFFAKLSPVLVGTEACGTTHYWGRELRAVGHDVRLIPPSYVKPYVVRQKNDAADAAAICEAVTRPSVRTTPIKSIEQQAARVVHRAHELLSRQRVTLINAIRGHMAELGVLVPAGTQNLGRLLERISNPETALPLSVRKVLNVLADQLVALSKQINVMEAQMRKRCREDADAARLITIPGVGVITASAVLAGVPDIHAFRSGRGFAAWLGLVPRQNSSGGKDRLGRITKMGDPGIRKLLVVGAISTIRWAKTREGLRRILARQDACTQTRQTRGRCTGKRNGTHHLGGVDTWRGLSSGLTRRAPDRKEGRS

SEQ ID NO: 320574 - protein, 387 aa, unidentified
MEVHVMLRKNIVQTLDAATSWKVFGLDLAKHDLAVVAIPADGSEVQYVKRYSYADFLEFTAQIPSATMVFEPGNGANHFALRLQAQGHTPKMVSGASVKSWITLHMSGQKTDLNDAYALARLSEDPDLKTVRIKSVDQNRLQSLQAMRKQLVEQRTKTIVSIKGIFQCWGILFKKDSRSLKKFKEAANNNKELLGEEVVEAMILQIDRIADLDKDIKHVEELLKKVTMQDPRAQPMLDIPCVGLQTVSRLCAIMGDIKDFETPRSFVAFIGLVPKNMISGNKTTTPSGYEQVGQGKVNRRGDKMARSLIIQCASSMYMNFHKDNFPECALKDWIQKQKDAHKPYGKIMVSLAAKLLRIIYAVLKHGEAFGYEKAGISRSALAALLRD

SEQ ID NO: 320575 - protein, 364 aa, unidentified
MTIIHWIGIDDHADKWTVCRLSGREDRPADEFELVPNEQGYRKLIAYAKGLEGGVQIVYEAGPCGYELHRRLKKAGLDCQVAAPSLTPCRPGDRVKTNRRDAQKLARYARSAGLTFICVPDSGRESLRDLVRGRQAVRKDVVSARHQITKLILRYGHRYREGQAWTTRFGAWLRKVRLEGYSQFVLDEMVTTLEARLKLLARFDEEIERASQLPAFEPYVTALRVLRGIDTLSAMVLLSELGDLRRFPTAPQLMAAIGLVPAEASTGDQTNRLSITKAGNAHVRHILIEAAWQYQRSVRCGRRIKTRRKDQLPALVDIAEKCDRRLNRKFHRMTSRGKRSTVAAVAVARELAGFIWALGQVVHP

SEQ ID NO: 320576 - protein, 421 aa, unidentified
MNFTNPRAEKSRSQSKNNQETQFRISYTATGQELIYGYVPVGIDLAGRKFQVCFYNEDNELVNTTLDIYELRLFIAGSQQKLLISMEGCTGSSYWANYAIAHGHKAVVLDARAIKNRKAQKDDFNDAFFIREALFTHYQTCRIRTQEEIDLKLFYAQREQYIKSLNAVCSNVRQRLIAAGAYEHVVTGADSALAAIKCYKNQINNKAEVGFSSLTLRALDSFVEDINYLTKKIDHINQNIIDVKARESQVAKLLMTIPGIGPQLAVLLSLDIADIERFKTARALQAYFGLFTAHSGSGGKIEMGKMARNGDPVVKRMLYQAVLTLLHCGNKIQIAPRSEYIQRMYSRNTVAFKRGVISLCAKLIRVVFGVLHHGTAYDPQIDSSLGNKKTRVHAYSNRCLNKVSADALIQEQYCYTEAALD

SEQ ID NO: 320577 - protein, 384 aa, unidentified
MGDVITYVGLDVHKASISVALLVPGASKPVQWDVPNVASEVKKLVRKLRRDGGGEVVCAYEAGPCGYGLQRQLQRQGLSCQVVAPSLIPRKPGERIKTDRRDARKLAELLRVGMLTEVRPPSEVEEALRDLCRCRDDARTDLMRARHRLGKMLLRRDLRYPGRAWTQQHRRWLWDLTFEHEAERVVLADYLLAIDQIETRLTELEAQLLALAEQEPYRERVGHLRCFRGIDTLSAMILLAELHGFERFAQPRKLMSYLGLVPGESSSGASVHRLGITKTGNRHLRRLLIEAAHHYRHRPGVGVKLRLRRAGQPAAVIALADRAQQRLHRRYSRMVVGRGQPVSKAVVACARELAGFVWAVLSGTVLRPTEPQVATATAGNRSSR

SEQ ID NO: 320578 - protein, 403 aa, unidentified
METVFAGLDWASQVHAVCVIDATGRVCKQWEVTHDADGLRALLHQLHALHVARIAIERPSGLLVDALLEGGLQVVPIHPNAVKASRPRYRSHGGKSDASDAYLLADLLRTDGHRFKPLAAQSDAIRALRALVSGRDDLVAARVQLANQLRSLLQSYWAGAAEVFADVDSPIALAFILRYPTPEAASHLGAKRMAAFCAQHAYSGRRSAEDLLQRLHHAPSVTLGELEMDAKGELACSLARTLSTLVDQIRLLSGRIEHHIAASDDGRILMSFPRAGRICAAQILAELGSVRERFDSDEHLAAEAGVAPVTYASGKHRAVAFRWACNHRLRYALTTLADNSRHASAWAAAVYTKARGRGCNHPHAIRILARAWLRVIWRAWMDRKPYDPAIHGSLQNLLKTAGG

SEQ ID NO: 320579 - protein, 388 aa, unidentified
MTEYSGLTAGLDIGDKMSEICLLDEQGEVIERKRIASTAQSLTKYFSQFDAIRIALESGFHSPWMSRLLEDLGHQAVVANSRRVALIAKNGKKSDKVDAELLARLARSDLVLLSPIQHRSEEHQKEIAVVRARDALVRSRTLMVNHVRGVVKSSGQRLPSTSTSRFHKLEDQLPDALRPALSPLMSSIKEVNERIAELDKEIESLCAKYSACEIFRSIPGVGPVTALFFLLCIEDPHRFKRNRNVGAYLGMTPRKHQSGDDDPELRITRMGNTYLRRLLVNAAHYVLGPFGPDSELRRFGLKLAARGRKRAKKKASVAVARKLAVLMNALWKTGELFEAFPSKQRGSCNSLEQGIDSSAGARDGRDISKGVASAHPAPDRQAIALVER

SEQ ID NO: 320580 - protein, 315 aa, unidentified
MSEPDLFVGIDVSKDQVDVAVGSADPVRSFPNDESGRVNLVKLLRTRNASLIVMEATGGFELPVAAALASAHLPVAIVNPRQVREFARATGELAKTDRIDARILALFAERIRPQARALPDEDTRLLDALLTRRRQLIDMITAESNRLGFAPKALHPGLQKHIRWLQRELEGVDRDLDESIQHSPLWRARDDLLQSVPSVGPVTSRTMIGAVPELGTLNRRAITKLIGLAPFAHDSGKFRGKRRIRGGRADVRKVLYMSALVATRHNPVIRAFYQRLLAAGKPKKVAITACMRKLLLIMNAIVRSGSPWTNTGALT

SEQ ID NO: 320581 - protein, 393 aa, unidentified
MICVGIDVAKDKHDCFILSSEGEVLADVFTIQNNAEGFDTLLQTIRRCARPEDKIKVGLEATGHYSYNILGFLLDCGLPTYVINPLHTNLYRKSLSLRKTKTDRVDARTIAAMLMSDVDLKSYTDTAYHNEELKSLTRYRFDKVRERAKLKQSVSRLVTILFPELERLVPTLHMASVYALLSEFPGAKQIAATHLTHLKAVLSDASKGRYGRDMATTLRDAARCSVGSVMPAKSLELRHTIRLIRELDAEIEDIEAAIQSIMDEMQSPITTIPGIGVRMGAMILAEIGDFSRFDSPDKILAYAGMSPSTYQSGQLSLSGTYSHMEKRGSRYLRYALYNATKYVCLWDPTFAAYLSKKRAEGKHYNVALSHAAKKLLRLIYALEKSGLPYSSAI

SEQ ID NO: 320582 - protein, 355 aa, unidentified
MTSTKYIGMDVHKESISIAVMNDAGKIVMECVIETKASMILQFIDGLRGDVHVTFEEGTSAAWLYDLLKPHVTKLVVCDPRKNASMREGHQSDKIDARRLAELLRLNHLHPVYHGEHGLRSLKELVRSYLTITKDLGRVMSRVKAIYRSWAIPCTGKQVYALRHRAEWLGKIGEPGVRRRAEFYYQQLDALRTVRQQVRRELLAESQKHQAWKRLCQIPSIGPIRAAVLLGILQTPHRFRAKRQLWTYSGVGIETSSSADHHVVKGQLERKKQQVEIRGLNRNYNHDLKNLFKGAAIVAASKPGPFAEFYAELLAKGMRPEMARLTLARKIATIVLIVWKRGVRFDAQYLKPQTA

SEQ ID NO: 320583 - protein, 401 aa, unidentified
MNAVGIDVSKGKSMVCVMRPFGEVVLEPFEVLHTAQNLNDLAGKLKALDGETRVVMEATGNYHKPVAFVLHDAGLFVSVVNPVLIHDYDNNSLRRVKTDRKDAVKIANYTLDKWTRLRQYLPEDDTRLALKNCYRQYQQAVAVRTMLKNNLISSLDLTFPDANKLFSSPAKSNGCEKWVDFIGDFWHSECVSSLSSDAFAKKYLKWCQKHGYNFTRSKSDTIYACAVNAASLPKSPTSKLLIQQQVAQLKAVSQSVAAFQQEMLRLSQQLPEFDTVMEMYGVGPSLGPQLMAEIGDVRRFSSKKLLIAFAGIEPQPNDSGKIVGNDSGISKVGSAVLRRTLFLIMTVILKTQAQDEPVFQFMNKKRSEGKPYKVYMMASANKFLRIYYARVKAVMDSKHSK

SEQ ID NO: 320584 - protein, 352 aa, unidentified
MKVTTIGLDLAKNVFQVHGADAQGHGLLRKQLRRSQMAQFFAHQPPCLVAMEACAGAHYWGRKLQTLGHQVRLIAPQYVKPYVKSQKNDAADAAAICEAATRGHMRFVALKSVDQQSVLALHTVRSGLVKHRTALSNQIRALLAEFGVVVPKGLSQLKAQLPLVLADQGSELSALVRKLVHLLQDQLAQLQEAVAQLERQIRQWASQDEGAKRLQQIPGIGPISASALVASVADARQFKDGRQMSAWMGLVPRQHSSGGKSVLLGITKRGDKYLRTLLIHGARAVLKAYQRNPAKMPAHLAQLLQRKHPNVVCVALASRNARVAWAMLSRGQDYQHRRKDALELPALPAALA

SEQ ID NO: 320585 - protein, 354 aa, unidentified
MLIIGCDFHTRYQQIAMAREGTAGLLLERRLDHESGEAHAFYRSLQSSHEPVRVGIEATGPIHWFERLLAELGHELWIGDSAKIRASEVRKQKTDERDARLILDLLLAKRFPKIWVPTPAERDLRQLLWHRHKLVRLRTMLGNQLHFLAMTPGLCRKQKLFTKKGRAELVGLGLAPWARRRREELLKLLDQLDPPIAELDRAVMEEAQRRDDAVLLMTHPGIGPVTSLAFVLTIGTVTRFCCSRKLVSYLGLNPTEESSGGRRRLGGISKQGNTMVRWLLIETVHHAVRQDPELKQDYQRLKFRRGHAVAKVAIARKLAVRMYWMLRSGAAYAQLVRRQGSPGATLVDASSSLG

SEQ ID NO: 320586 - protein, 346 aa, unidentified
MGKPIINLSSVTTVGLDLAKHVFQVHGVDASGCVVVANAIRRNKLLEFFASLPPCLVGLEASGSAHHWARELMALGHEARMMPPAYVKPYIRRQKNDASDAAAICEAVTRPSMRFVAVRSLENQAALMRHKAREMLVSQRTQLLNGLRGHLTEVGVIAAQGPRHARELAELIEACDEAIPFEVCEALALLVVQLRNLDDAIARLDRTIAKLALKDETARRLMSIPGFGPITASAMAATVQDTSSFAGPREFAAFLGLTPKQNSSGGKPKLGRISKMGNRNLRKLLVVGAHAVLFHRKPHTDPLRMWAKKLIEKKPFKLVAVALANKMARIAFAILRGTTVYREIPA

SEQ ID NO: 320587 - protein, 482 aa, unidentified
MKKRTIYTNQSQELLRLFEQVGNSAKVMCVPIDYAKKDHVVMFCNGYGDIVRKPFSVKNSAEGLKYLIDQVTRSCRHRRIRKEHVFFGGEDANSYAENFANALRSKGWLVAHVNAHDAKKQRQNLQASTDRLDLMGIATMLLNRRANCSPAQTGIYRNLRTLVRHRKKLVVMKTEVRNRVHAVVDRLFPGFLSEKKTSITPFSNSSLYLMENSFSAQQIRRRKHSTLVNILKRYGTAAPEGAAAKLRTYAAQVLTTQNQYAATLQLSLAHHIKLYRCLLDNTEQLEKEIALPLAQSQGAFLTSIKGIGIVLAAGVTAEIGSPFEQRPLNNLTSYSGIIPRVKQSGGPNAQAHTGRVSKRSNHLLKDSVVQSAFHIGHFGPKELSLDYKRRKAAGQHADFGMGRRFLRMAMSLMKTSQIYLPPPLRNEQLRAQERAGYYLAVWPQLRDKWNKVDALKVAFAKHNPLGQWRHIVQELYGIKLKL

SEQ ID NO: 320588 - protein, 475 aa, unidentified
MKPKKIQSPSSQTIRPSANMPVLHPHAAGIDVGSVEHFVCVPRDAVPEGESAVRSFGGFSGELDKLVEWLRSCGVETVAMESTGVFWIPLAQKLEDAGMEVVLVNARHLRQVPGRKTDVKDCQWLQQLHSYGLLQGSFRPGQDICCVRSLMRHRQNLTQSCGREVLHMQKALQQMNVHLHHVVSDLDGETGLRILDAILAGERDAGKLVQLRDAQCRKSTPEEMVAALQGDWRAEHLFVLRQALETYRHLLEQMRVCDLEVQEALTKVILPDEDEAAEPAPPNPPASEKPRKKKRFHRRKTGTGLRQDLSGELARICGVDLTQVTGLNVLGVLIIISEIGLDMRRWRDSKAFSSWLGLCPGNKISGGKVLSSRTAHVVNRVAILLRTVAPAVGRSDTWLGSFHRRMRARLGPAGANTATAHKLATLIYHLLKFKEEYIDVDRLLYEEKIRGKRLVRLRKQAEELGFQLVQKNQAP

SEQ ID NO: 320589 - protein, 336 aa, unidentified
MWYVGVDVHSRMFAICILDQNGKKIKTRVIRGSLKEMVAVLRRLLKGRRCQIVYEASSAYGWLYDRFTHIAEKVLVAHPGHLRLIFRSKRKSDRVDAEKLAKLLYLDQVPLVHVPIPAVRSWRGMIEHRKRTVDKRTRAKNALRALLRTHAIDAPKSLWSIKGRAWLAQVPFAQAADAVRRDMLLEDVEHFTRQIRRVEKALDVIGKRHPGVMLLRTIPGIGPRTAAAVMAYIDQPRRFRRNKSIGTYFGLVPCEDSSVKQRFGHITRQGPPTVRRLLVEATWQAIRRDATIRAYYDRIRRGEKERKKIALVATAHHLARVMLSMLTTGEPWREAS

SEQ ID NO: 320590 - protein, 391 aa, unidentified
MRFVGIDVGAERHYLAIVDETGAVLQKPYAVSEEAAGYRQLRELLGQPEDCLVAMEATGHYWRNVFTFLVAEGFSIALLNPLRARRFAEEDLARTKTDAIDALGIARFAAQKRPVSTASPEPAVEHLRELVRMRERTVLQLGDRVRHLHQAIDLTFPEFTRYVRGLDTELATAILSRYPTATALRRVSPKKLAMVCFDGRRRIGATLALAIIAAAKISVGQHHDDPYKLQIRYACEDIVTLRQRARDLEREIEQKLDAHEVGKLLTTIQGIGPLTAACIIGETGDPARFRSAAALASYVGVVPRLHQSGKRKFSGRVGIPLGNARLRRALWMPVLVAIRINPWLGAYYRRLRAAGKRPKVAMIAAMHKLLTAIYSVAKNRRPFVARLSVDL

SEQ ID NO: 320591 - protein, 331 aa, unidentified
MKFEEVIGIDVSKLTLDACIHSQQIFTQVPNTKKGYSKLLTWATKSTGCSMDHVLFCFEHTGMYSYALACYMSEKQMNYIMVPGLEIKRSLGIQRGKNDRVDAIRIAQYAYRRREEVTTCQLPEKAINKIRQLLSLREKLVKQRAGYEATLKDLSDFIESSESKVLVGVQRNMIKALAREIDKVEKEIDSVLEASPDIMNNYRLITSITGVGRQTALYLIIVTNNFLSFDDHRKLASYAGVAPFANTSGTSIKGRTKVSPLANRKLKSLLSACAISAIRHDPEMKIYFNRRTDIGKHKMNSINAVRNKLLARVFAVIRRGTPYVPLCQYAA

SEQ ID NO: 320592 - protein, 351 aa, unidentified
MMIIGTDYHPSFQVIAFLIEETGEYGERELNHSDGEAERFYRDLHARGIHVRVGMEATGFSRWFERLLAELGMELWIGDPAEIKAKRVKKQKYDREDARLLLRLMRENNFPQIWVPSPENRDLRQLLWHRHRLVQMRTRIMNQLQALAMNEGKRWKKKLWSAQGRTELEKLPLAPWASRRRRELLELLDRLDPSIEELSKAVDREARKRPEVLRLMTHPGVGALTALAFVLIIGTTERFQRGKQIGTYVGMIPSEDSSAGKQRLGHISKQGNSLLRFLLVEAAQAAARINPHWRRRSMHLAIRRHKSIAKVAMGRRMAVRLYWMWRNGCEYSSSLEFGSYVGQLETGHGVQ

SEQ ID NO: 320593 - protein, 419 aa, unidentified
MSFKIIKNNCCGLDVHKTWIYACIGITDSHSRTEYKQARFSSFSKGLQELCDWLAKYNCTDVCMESTGKYWIPVFNILEKNNVWVTLSHPKYTKPQKGNKTDRKDAKWICDLYMCGMVKPSFIPPADIRELRDLVRYRYKLTCMITGEKNRAQNCLTVSNLKLDDVFSDVFGKSSRSITEQILQHPGETFDVTPFIHGKCKTPIEEIQAAVDGAISTEQAVKLRQCLNHIDELEIHKAEIEQEIFRLSDKYEEALTLIRTVPGFDKNPLTAIQVLSEIGGDMSVFPTAKNLVSWAGCCPRNDQSNRKIKSTRISRAGSYFKPVLVQVANALIKSKKHPEFTTRYRRIKARRGHKKAIIAICRMILTAIWHILTDLKPYTPEGFLESRPVSESKILTTSQALNLLKQRGYVITDDEVSAV

SEQ ID NO: 320594 - protein, 378 aa, unidentified
MAKGTTWVGMDAHKKSVQVAVLRPGAREPEEFEVANREGDLRRFARKLVREAQGGEVRCCYEAGPCGFALRRQLEAAAPVVCEVIAPSLIPIRPGSRVKTDRRDARKLARLYRAGELTAIHVLSESEEAVRDLTRCREDAKEDLRRARHRLEKMLLRRGRIYTDGRMWTQRHLLWLRSVRWEDAADQVVFADYMRAIELLADRIAALDAQIQTCAGEPLYSEPVGWLRCFYGIDTVTALTILAELGDVRRFQKPTDLMGFVGIVPSERTSGDSQRRGALTKTGNAHIRRVLVEAAWHYRHRPTIGPTLRRRRAGQPGWAITIADRAHARLHKRFWALLARGKPQNKVVVAVARELVGFLWCVLHEGAARSTENRKKAA

SEQ ID NO: 320595 - protein, 343 aa, unidentified
MTKISTIGLDLAKNVFQLHGVDASGAVALKKQLRRGALEKFFAQLPPCLVGMEACGSAHHWARVIGRYGHEVRLMPPAYVKPYVKRNKNDGRDAEGICEAVGRPTMRFVPVKSVEQQATLAVHGTRALLVRQRTMAANALRAALSELGIVAAQGYEGLRELMAKLEEPSEEIPEVMRGALLVLAKHWQALDADERVLERQIARAARCDQDARRLMEVPSVGPIIASTVLAKVPDAKVFRSGRDFAAWIGLTGKDHGTGGKHRPGRISKQGDRMLRAMLICGASAYLRHQKARGVSDPWLRELLARRPYKVVMVALAAKTARIIWAMLAKGEAYRDRASASAAA

SEQ ID NO: 320596 - protein, 345 aa, unidentified
MKITTVGIDLAKNLFQVHAVDERGNAVLRKQLRRRQVAVFFGNLPPCVIGMEACASAHHWGRALQRFGHTVRLMAPQFVKPYVKTNKNDVADAEAICEAVGRANMRFVPIKSIEQQAILSVHRVRQGFVKARTAQANQIRGLLGEFGLVIPQGIINVAKRVPEILEDASNELPVPFRHLIDRLTEHLKELDRQVKEFEKEIIVWHRSSDLSRKLEKIPGIGPLAASALVASIADARSFKNGRQVSAWLGLVPRQCSSGGKATLLGMSKRGDAYLRTLLIHGARSAILAAQHKVDNTNGWLANLLNRRHPNIAAVALANKNVRTVWALLAHGREFKADYVPVRMAA

SEQ ID NO: 320597 - protein, 391 aa, unidentified
MERPMAQQLDDLSRSLTPLEQDSTIISVIEMSQASWLVAGIVPGIERHPLKKLEPSEVELLRLLMRWRAEATQKGRTITRIAVAFEAGRDGFWLARWLRARGIEAYVIHPTSVAVSREHRRAKTDRLDTGLLKRVFIGWLRGEPDHCHMAAIPTLAEEDAKRPNREREGLVRERTRLVNRMKGCLVRFGVRTFKPTLRNAPDRLAMLRTPEGVPLPPNTLLELRRDMARLRFVMDQIKEVEAARAQGLEQAPQDKPHVMVHLLARVIGIGLETADMLVHEALARTLRDRRAVARYAGLTGSPDESGSRRREKGLAKAGNARVRRGMIQLAWRFLLHQKESALARWYRARTADARGGTRKTLIVALARKLLIALWRMVTTGEVPAGVVLRAA

SEQ ID NO: 320598 - protein, 346 aa, unidentified
MTIVGCDFHPSWQQVAVLDVETGEINERKLVNGNGEAERFYRALPVPSLVGMEACGNSQWLSELLQQIGHEVWIGDAAQIRASYVRKQKTDRRDAAHILKLLIENRFPRLWAPSAEQRDLRQLLVHRHKLVSIRTRVKGGLQHLALNRGLQKKSKLWTAAGQKTLRELPLDTWAACRRQDLLGLLMNLNQLIDKLDVAVERAAKEDPQARLLMTQPGVGPITSLAFVLTLGDVSRFKRGKQVASYLGLIPREHSSGGKQRLGAITKQGNSFMRTLLVESAQTVTRLDKGFRKQYLHHCHRMPKGVAKVAAARKLAVRLFWMLRTNTRYPEIVRIESSSALALVGES

SEQ ID NO: 320599 - protein, 373 aa, unidentified
MPKYSTAFGMDVHLRSTTVCALDADTGEAVARRFPGNPWGEIAGWMGGFPGPSLAAYESGYPGFAPQRELAGLGVECVVAAVSKIPRSAADSASKNDRNDAARMAKAILAHDISPVWVPSPEVEGIRDLAGAYDGATARLATAKQRLLAFLAKRGFAYGGTTPAGNPRKYWTYDFLRWLDKVRPEDDGGVRTLAALRSEVEAAAEARADLLSEYRAAVDASPIAAEVAALQSIKGCAFALAAAFSAEVGDFTRFRSGRQVTAYFGLAPSQRSSGDSVRLGGISGAGNALVRKLAVEGSWCYAAARHQPKLMPRDTGVPLEIRMHGRKGSERLLRRREEMLARGMPQAKANAATAAELVRWLWALGMMCREGAE

SEQ ID NO: 320600 - protein, 353 aa, unidentified
MNSLTDLREVVDVVIGVDTHVHTHSAAVVDAATGGVLDEITVDATAQGYAELVEFANNHATLRAWAIEGTGGHGAGLSRHLLESSEIVIELDRPKRVARRNGAKSDPLDAIRAAREAMARPRLGTPRTGGERQALSVLLAARRSAINASTEAQQQVFSLVIAAPEPIRVRFRGQKLAAMLNTAANLRVHASWDTETTSTVVALRTLARRAHAMLKEARELQKQIVAIIRSWRPDLLEEFGVGPIVAATVLCAWSHPGRIHSEAAFAMLAGVAPIPANSGQVTTRYRLNRYGDRQLNNALHTVVQSRIQYQQATRDYVARRTAEGKTGREIKRCLARYVARDLYRLLESEATAA

SEQ ID NO: 320601 - protein, 423 aa, unidentified
MDILYERVAGLDVHKDTVVSCVRVATGGQTQRECRTFATTTEGLTALAAWLEESRCTHVAMEATGVYWMPVWKILGQGDFELIVANAAHIKNVPGRKTDMNDAMWIADLQACGLIKASFVPPEEMQELRSLTRTRKQLVREQTRHAQRIQKTLAEANIRLDSVLSDIMGASGRRIIEAMIAGVRQPRKLAELASKQIKASPKELYDALHGRLTDHHRFLLELHLRQWDGLDTAIRNIDREIDERIARMDVQIGAGRAPFRNLIDLLNTVPGVSTVSAQTILSEIGHDMNRFPTAGHLVAWAGLCPGHNESAGKRKSSRLRKGAPWLKTMLVQCAWAAKRKKDSYYRAQFFRLQSKRGPQKAICAVAASLLTAIYHILKHGTDHHDLGAAHFDRRPTELKTKRLVAQLAKLGFTVQLQPIVQAA

SEQ ID NO: 320602 - protein, 342 aa, unidentified
MEISTIGIDLSKTTFHLIGLDARGEIVLRKKLSRKQLLLFTATRKPLLIGMEACGGAHYLARALTEQGHDARLMPAQYVKPYVKTNKNDYLDAEAIAEAVQRPTMRFVPIKTDEQLDLQALHRVRDRWVARRTAVMNQIRGFLLERGIAIRKGPSYLLTQLQIIFTEADSSFFGRLLHLIRELKHEWDELERKIEEASAELARIAKQDDGCHRLMEVPGFGPIVSTALVAAIGNGISFRKGRDLAAWLGLVPRQHSTGGKTRLLGISKLGNEYLRRMMLHGARSVVMQMERKPSALGEWLTSLSARRHRNVTVVALANKMARIAWAILSKGTRYCAPAPMAA

SEQ ID NO: 320603 - protein, 312 aa, unidentified
MTTIICGVDVSGATLDARIRRDGPHLRVERSCQGIAELAAFCRRHQASLVVMEASGGYEKLAFALLWQAGLACAIVNPRAVRRFAQAMGYLEKTDRIDAGVIAHYGAAMELEPQTPDTPAQARLEALALRLRQLTAMRAAQDNQRRLVEDATALVSIEQTVAFLSGQIRTLEEAIDACLGEDPLWTRLASAFRAIKGVADRTVATVLALMPEIGTLSNKAVAKLAGLAPMANDGGARSGRRPVRGGRAPLRALLVFIVGGVARHNQDFRAAHERLTRAGKPKLVIRVALARKLLVRLNAKAKEQRRLCQQTA

SEQ ID NO: 320604 - protein, 417 aa, unidentified
MFKILLSNCCGLDVHKTWIFACIGITDKNNRTVYHEARFPAFSKGLRELSEWLRKYNCVDVCMESAGKYWIPVFNILEKSCRVTLAHPKYTKPQKGNKTDRKDAKWICDLFMCGMIRPSFIPPACIRQLRDLVRYRSKLGNMITGEKNRAQNCLTVSNLKLDDVFSDVFGKSARSITEYILAHPGETFDVSPFVDRRCKTPLPEIQSAVDGAVSHEQAVKLRQCLDHIDELESHRAQIESEIRRIVSPFATALDLIHTVPGFDKNPMTAITVTAEIGVDMSVFPSAKNLVSWAGCCPRNDQSGGKIKSSRISKAGSCLKPLLVQVANAVINSKDHPEFGVRYRRIKARRGHKKAIIAICRMLLTAIWNVLAKGVPYSPDGFSVLQPSFVSKPLSKSQGLALLRQMGYLIKDDSPVPA

SEQ ID NO: 320605 - protein, 619 aa, unidentified
MGRRAQEIELTEAQKQILEHLSASRSQPYSRVQRAKVILEAATGEQNKRIGAHLGMHARHVQKWRVRWAEQAERLGVIVTVAELEAAIQGVLSDRPRPGCPPAFSAEQMCRIVELACRSPEDLEYPVNYWTPKELARAAVQQGIVAIASPFLAKPFGTSQSPKGAKHGRRVIAFGAPAVPIANVALIATFPARLVRTQPGVRTSLADDSTPGRNALWVAYDRATARPSATHKALVLCLSPESLSGKSPRTPTRRLAFETVPEILAPEAHPFSERSNSIFGPARPAACIHKVDCAGIMNEIIPTCLGIDVAKAKLDCALLNGGKYRHKTVANTLEGYAVLVQWLAKQGVDQTHLCMEATGIYWENAAQALAEVGHLVSVVNPALVKAHAQSNGIRTKTDAVDARVLADFCRQKQPPAWLPPPASHRTLRALVMRHQALVEIQTQEKNRLESSREEVRDSLDAHLVWLAEELKRVEQAIAKTLADDPDLRTQRDLLDSIPGLGERSIATWLAFCAEPARFTNARQVAAFAGLNPKHHESGSSVRGKPRLSKIGHAFLRRALYMPALVTLYKTDWGKRFRERLVANGKPAKVIIGAMMRKLVHVAFGVLKSGKPFDPALHRT

SEQ ID NO: 320606 - protein, 410 aa, unidentified
MAVAVGIDVAKELHWAEWKVAETGQVLGSRGVENTPQDIAAFIDQIELATAEHGPATVGVDVLGGIAGLVVAMLAASDVEVVHTPGLLVNRTRQGTVGGERKSDPKDARVIADLVRHRRDLRPVKMPSEADAALRLLVARRKDIVADQTRRLTRMRDLLTAHHPGLERVVDVTGKAGLHLLARYVTPPEIRAAGPARIRRYMATAGHLRTSVIDDLVDAAVAAAKAQHVAISGQSVAADIVRDLAREALEVRSRLTDLDRRIEQAVADHPDGALVRSLPGMGATLTAELLAEIGGIGRFANGDQLASAAGLAPVLRQSGKMRYTQRPRAGNKALKRVFYQSAFCAIQRDPASRAFYDRKRAEGKRHHQALIALARRRVNVLYALLRTRTPYTAPVIQSGPEGLYGDRCIS

SEQ ID NO: 320607 - protein, 407 aa, unidentified
MTAVMIGVDPHKGSHTAVVIGPAEEPLGELRVRASAGQVEKLVAWAADWPERTWAVEGAAGLGRLLAQQLVAAGERVLDVQPKLACRVRLLQAGDTNKNDPNDALSVAVAARRSKTARPVMAEDYPAVLKVWSKRHRDLARLRNQVACRLHAVLCDLVPGGHPKEISAAQAARILEQSSPSGAVDRARAELAAQFPGDMRRLDAQLRGTRKKLAAAVRASGTTLTEVFGVGPVIAGTITGDIADVSRFPGRDHFAAYNGTAPVEVSSGDRKIHRLPLRGNRRINHAIHMAAITQIRHRHSDGRAYYDKKVTEGKTHKEALRSLKRRISDAIFACLLADARRAGQRPARTAREGNQGTTLTPARPAHTPNAGSSDKPLPDLGTTTRPGTRAATPSPSKPASKKTRPAT

SEQ ID NO: 320608 - protein, 409 aa, unidentified
MEQLIERCAGLDVHKDTVVVCVRLTEEGGKTVQEIQTFGTTTPDLLALRDWLESIDVTHVAMESTGVYWKPVYYLLEDVFTVLLVNAAHIKNVPGRKTDVTDCAWIAQLLAHGLLRGSFVPEKPIRDLRDLTRHRKILIQERSREANRLHKALQDSGIKLSSVATNILGVSGRAMIDALVEGTADPTALSELAKGKLKKKLPALQKALTGRFRSHHAFLVSRILAHLDYLEDEIEAFSQKIEEEIHPFDEAVALLDTIPRVNRRTAEVLIAEIGPDMTRFPSARHLASWAGLCPGNNESAGKHKSGKTRKGDRWLRITLTESALAAVRDKDSALSAQYRRIMRHRGHKKAIVAVAHSILCISYHILSDRRPYSELGAVYLEKREKDHAVRRYVKQLERLGHKVTLEPVA

SEQ ID NO: 320609 - protein, 383 aa, unidentified
MNDLIRIGVDTSKSVFQLHGVNAAEQPVLRKKLRRRQVIEFFQKLPATRVGIEACGASHHWGRELSALGHEVVLLPPQRVKPYVERNKNDAADAEAICEAMSRPRMSFVPVKTAEQQAALMLVGVRDQLVGRRTQLSNAIRGYAAEFGLVAAKGTDKLEPLLIRIAGDENFPPLAKDLFATLGNEYVRLKPELRKIEARLMAWHRGNELSRRLAEIPSVGPIGATLSVMKVGNPHAFRSGRDFSAWLGMTPKDHSTAGKVRLGAITKAGDEALRSVLVAGATSVIQQVRKGRGRPSPWLVALVKRKPPKLAAVALANKTARIIWKLMVSGERYNPQRAPQRFVPPTDSLAPGTRRQGQAACGGDLRSALTAPALRAPSAPPSA

SEQ ID NO: 320610 - protein, 349 aa, unidentified
MMANQFKHSTKVGPNVSYIVNYVNELRRLYGQDAEVLCGYEAGCLGFTLYHQLQAHGIPCIVMAPTTVMKEGSKRVKTDKKDAAQLAKALAFRSYRPVHIPTVEDEQVKEYIRMRTDHKVALKKIKQQILAFCLRHDFRYTEGSSNWTQKHVRWLRSLNPDGLYAEILTEYLLTYEKLVDQIERYDARIEQLGQSDSYQEKVSRLSCFIGIKTLTALSIVTEIGDFNRFATAQHFASYLGLTPSENSSGDKERRGAITKAGNSHVRRLLIEAAQSLAKGTIGYKSKELKRRQSGNRVEVIAYADKANERLRRRYRTLVLGKNKKQNVAKTAIARELSGFIWGMMTGRIA

SEQ ID NO: 320611 - protein, 391 aa, unidentified
MSMYFVGIDISKYKHDCCIISAADQQIISKFTITNDKHGFEHLLTTLHSLSSPKDIKIGFESTAHYALNLELFLENAHHSFMEINPFLIKEYKKSTTLRRTKTDSVDCESIARWLMTVEYKPHSKGFYHAYSLKSLTRLRDRLIRQRSFYLVKITNVLDHTFPEFKPFFNERLSKTAIYLLENYGSAEKMAHMNSASYDKLRCVSRGKFSIQQFLRLKELAASTVGVNNSIFDIELNSLLTLYSSLCKEIKTLETEITRLIDEVHPHYMSIPGIGPISAASIYAEYGDISNFSNPGQMLAFAGIEPGINDSGTESHGGRMVKHGSSQLRYVLLNACLPLIRSDITFASYYAKKRAEGKKHRVAITHVAKKLIRVIYALEKKDIDFNTQKLR

SEQ ID NO: 320612 - protein, 439 aa, unidentified
MGIDVVEDCDFAAFVGIDWAEQKHVLALQDVQSGRIQAGEIEHTPEAVDAWAMELSQRYQEPPIAVALEQVRGSLVFMLTKYKHLVIFPIHPATLASYRKSFRPSGAKGDPHDAGLLLDLLTRHRERFRRINPDTAQTRTLRFLVEERRKLVNERIRFSQRLISQLKLYFPQALNWFCDIGSQIAEEFLERWPTLEAVQRAKAKTLERFFADHNSRNPEKIKARLEDIRCAITATHDSAVITASSCAALALVRILHQLRDAISSYDLQIEKLAQAHPDFIIFDSFPGAGAAMAPRLIAAFGTCRDRYRTAHEIQCYSGIAPVVESSGRQHWVHYRWSCPKFLRQTFHEWALHSMASSAWAKDYYHQQRANGKSHHSAVRALAFKWIRILFRCWRDRTPYDPALYENARQSRSREPKAGSPVNIEWKTRSGFSKLSRASS

SEQ ID NO: 320613 - protein, 355 aa, unidentified
MIVIGVDSHKRTHTVVAVDQVGRRLGERTVKATSDGHLELVRWSAQWSRVTFALEDCRHLTRRLEQDLLTAGQPVVRVPTRLMAATRRGARQPGKSDPIDAEAVAVAALRHPDLPVAALDGPTREVKLLVDYRRDLVRQRTRVANRLRWHLHELDPALQIPSRGLRRYRVIDDLTAQLAGVDGMVARLARLLLARCRELTAEINALEAELRPLVHRLAPRLLAVPGCGVLGAAMILGETAGVGRFRSKDAYARFTGTAPIPVWSGDRRGKVRLNRGGNRTVNCALHMIAVTQARGVGPGQAYVDKLMGRGKTRTEAVRLLRRRLSDVVFSALRADEQARSTGAQPQCSPATARAA

SEQ ID NO: 320614 - protein, 366 aa, unidentified
MKKISTVQVFRNEMFKEQKLTIGVDLGDRWSFYCVLDEAGKILLEQKLATTPEAMKQTFGKIPRSLIAMETGTHSPWVSRLLAELGHKLIVAHAQKVELITKSNRKDDRHDARTLARLARIDPELLGPVRHRSAKAQIHLTVIRARAELVNARTALVNAVRGLVKSYGQRLPKCGTQQVNRELAAELNAELREVLEPLLKEIESLNERVKEYDERMEKIAKEVYPQVSLLKQVKGVGTQIALTYVLTIEDPHRFLKSREVGCFLGLKPGRGNSGESEPQKGISKEGDRYLRTMMVRGAHYILGPFGEDSDLRRWGLKLAERGGKNAKKRAVVAVARKLAVLLHRLWVSGEVYEPLRNSQKAMRAVA

SEQ ID NO: 320615 - protein, 346 aa, unidentified
MVTLGADAHKRSHSVVAVDEAGRQLGAHTVAATSSGHLDVLRWAQRWPERRWAVEDCRHVTRGLEKDLLGVGEVVVRVPPHMAAEGRRSMRERGKSDAIDALAVARAALREANLPEAHLEEHSREVRLLLDHREDLVGERTRMQNRLQWLLHELEPGFQVASGALSRRPAIKRVEALLNGRSGLVAELARELTTRTMQLNLRVDELERQLATMMPMLAPSLLALPGCGVLTAAKLVGETADACRFRSRAAFAMHNGTAPIPASSGNQQRHRLNRGGNRQINAALHRIAVSQVRRPGRSHDYFLRRLAGGNTKREAYRALRRRLSDEVFRLMLIDQRQARSAKSAAA

SEQ ID NO: 320616 - protein, 458 aa, unidentified
MQQPVEVQVDEHEQIMPRVAAVDVAKASGMVCLRTPHETVPGRRVTKVWPVQATTAALVELGDHLRCERVQRVVLESTSDYWRPFYYLLEAAGLTVWLVNAAQTKNVPGRPKTDKIDAVWLAKLAERSMVTPSLVPTEPMRQVRDLARARFDLVEDRTRVKQRIEKLLEDALIKISSVLTDVLGVSGRAMIAALIAGQRNPKVLAELAKGRARRNRTALERALHGRFTEHHARLARLLLGQLDELTVRIEEVTGLLDTAIRALPTSTSTTPTATTGAGGATNAESSTALPAPAGYDGAIARLCAVPGGGPDSVRAVLGEIGLDMSVFGTAGRLCSWARVAPHTRQSGRHNARARTGKGNPYLKSALAQIATGAAKTDTFLGQRYRRLIKRMPKAKALVALQRSILVIFFHLLADPTAEFTDLGSDFYAKRIDRARRTTHLLRQLHALGYEVRLAELSA

SEQ ID NO: 320617 - protein, 342 aa, unidentified
MKSTTIAIDLAKSVFEIGISERVGHVGKRQRLSRSELAPFMANQPAATVVMEACSSAHYWGRQFESFGHEVKLLPPLKVRPYVQGSKTDRSDVKGMLEAWRNSDMHPVPIKTESQQQLTALHRIRAGWVTERTKRINAARGILREFGIVFGQGASALAGHVQEIIEDGDAPLAMPLRQLLRELVVEIGQLEDRIQLVEKQLEALAKQTAVVKLLRTIPGIGLLTATALVGFVGDIQRFRSGRHFAAYLGLTPREHSSGLRRRLGRISKNGDVYLRTLLIHGARAVLIAARRQAQADRLRSWALERWGDLGHNKAAVALANKTARIVWAVWKTGTAFKSEAVS

SEQ ID NO: 320618 - protein, 310 aa, unidentified
MKQTIVYIGIDASQNSLGCGWQNRFHRFDNDKAGRVTLVRWIKQKQSGPVQVICEASGGYEQDLLDALAEADLAVSLVQATRVRQDARAAGILAKTDKVDARVLARFGAAMRPEPTSPRSAAQKLLRELESQRRHLSDLLVAEQNRLEQLHDEKLRGLARALMGTIKKQIARIDARITTLIMQDQELCQKAQKLTSVKGVGERTAALLLAQMPELGTLNRREAAALAGLAPFNRDSGTMRGKRTIFAGRRAVRRGLYMAALVASRRNPILSNFYRRLRTKDKPHKVALTAVMRKLLLALNQALTPTQSFA

SEQ ID NO: 320619 - protein, 402 aa, unidentified
MNAVGIDVSKGKSMVAIMRPFGEIVSAPFEIKHTASDINSLVELINSVEGESRIVMEHTGRYYEVLAHQLSEANLFVSAINPKLIKDFDNDSLRKVKSDKADAVKIARYALDKWQNLKQYSVMDELRNQLKTMNRQFSFYMKHKTAMKNNLIGILDQTYPGVNTYFDSPARSDGSQKWVDFASTYWHVDCVRKMSLNAFIDHYQNWCKRKKYNFSQSKAEEIYGKAKELVPVLPKDAITKLIIKQAVDQLNSASTTVESLRTLMNETASKLPEYPVVMAIKGVGTSLGPQLIAEIGDVSRFTHKSAITAFAGVDPGVNESGSYEQKSVPTSKRGSSDLRKTLFQVMDVLIKTHPQDDPVYQFLDKKRAQGKPYYVYMTAGANKFLRIYYGRVKEYLSSLPES

SEQ ID NO: 320620 - protein, 435 aa, unidentified
MTPTNRLQVGIDFGQKKADFCLLFPDGQPLESHISFANSLSGYSLAKQLLLDALDGYDFDGVDVSGEATGYFWLPFFLQLAADPDLAPHNLDLFLLNPRWVKWFKKCFAEDHKSDQRDPFYIAERTRTRRPSATWSPPDCLPLRFYTRLRFHLVQNLAREKCYFSAFLFLKASSYRRLKPFSDVFGATSRLVLTQYPSLDQLAELPVEDLALHLQHLSGNHLPDAFDNARKLRQVAQESFSLNHTLAVPVQRILDLTLDHIRFIEAQIEQVNGWIATELESYPVISQLATIPGIGPVFSSGIGAEIGGVQRFLQGQKWDRKRKRYRPRNLRDAEDAVAKIAGLWWPRANSGDFEAEDRRMAKSGNRYLRYYVIQGSDRMRRHIPEYAAFYARKHKEASKHHHKRALVLTARKSVGLIVGLLHRNEPYRSKEDRRT

SEQ ID NO: 320621 - protein, 349 aa, unidentified
MTIVEDRPVITGGVDTHADLHVAAALDPIGGLLAVQEFPATAAGYASLLGWLGGFGDIALVGVEGTGSYGAGLARHLAAAGIRVVEVDRADRQDRHRAGKSDPLDAVSAARAAQSGRASGAPKGRDGAVEAIRALMVAKRSARAERTQAINQARALIVTGPDELRARFAGHRPAQLVEAIASLRPRPGDVPGYATRVALRELGRRAQFLDAQLDRLDELIGPLVTARAPGLLALHGVGPDTAALLLIAAGDHPERLRSESSWAHLCGAAPIPASSGKVSRHRLNRGGDRQANHALWRIVITRLGSRPGHPATRAYVERRTKEGLSKKEIIRCLKRYVAREVYHQLRAGA

SEQ ID NO: 320622 - protein, 417 aa, unidentified
MEPKLIVAGIDVHKKMLAVVVVDEDHPQQAREQRKFATNGSDLKHLAAWLDSHGVSLVVMESTALYWRPVWLALEGQYALHLAQAQSNAAPRGRKSDYVDALRLARRFLAAELRLSFVPDAEQRTWRCVSRNKHQKRQRRVQIQNQIEALLEECQIKLSSVITDLLGLTGYRILQALARGETDPAKLVELAAVNLKASKEQLAEAVSVPMQSQYRSVLALQLEELDLLDKHIGELSRQLGKALQSHQEAVLRLCEIPGVREDAAWQMMAELGPAATTFETAEQMASWIGVCPGREESAGKSNRNRSPKGNRTMRRVLNQVAWSAVRTKDSFFRELYHRLIPRLGVHKAIWAIAHRIAKVVWKVLHERVHYIERGPLALDPVAMKRRVTKLARQMRRLGYTIEVKPVAVATAGIELAV

SEQ ID NO: 320623 - protein, 337 aa, unidentified
MLFCGIDLHSNNSFLVISDENDNVLYSKRHPNNLEEICAVLGPYKTNLLGVVVESTFNWYWLVDGLQEAGYCVHLANTTAIKQYDGLKHRGDESDARYLAHLLRLGLLPEGHIMPKAMRAVRDLARKRMQLVQQRTVQILSMETIFDQQCGKHLSSNDIKKLKSEDLDNMGWGHVESLCIKANLAVMQTLQKQIDGIEKELAQHCRNHPGYALLKSVAGIGDVLATVILLETGSIDRFADVGNYASYCRCVGSVHVSNGKKKGEGNTKNGNRYLAWAYVEAANFAIRYCDAAKKFYQRKKAKRNGIVAIKAVAHKLARACFHMLKTGEGFSVERCFT

SEQ ID NO: 320624 - protein, 428 aa, unidentified
MRVDYAFYAGVDWGSQTQQVCVLDPRGAIVREDVVPHREAGLRQLLTWLRELCHGDLSRVAIGIEMPRGALVEALVEAGAHVYHLNPKQLDRFRDRHSVAGAKDDRRDAFVLGDSLRTDRVCFRRVRIDDPSIIELREASRLESQLLQQHRRLANRLYGQLHRVFPQLLELSPGADEPWLWDLLTQTAWPEVVRQWTKAQATKLLRAHRIRRFDAERLLDVLRQPALPVAGGTIAAVTKHVGMLVEQLQLVQRQRRECIAWIERLLAQLSLPEDDEGQPRQHRDAEILLSMPGAGKLVAATVLGEASQAVADRDYQLLRTLSGVAPVTRSSGKSRRVTMRRSCNPRLRYALYHWLFNSLQHDAPTRARYDELRGRGQTHPHALRTLADRHLRILVAMLRDGTLWSPPGAAPPLAASSLTAPLADKEAA

SEQ ID NO: 320625 - protein, 344 aa, unidentified
MDHYAGIDVSLESSSVCVVNASGKIVREAKVASEPEALIGWCASLGLELARIGLEAGPLSQWLYAAMKEAGFAVELLETRHVSDAFKAMPVKTDRNDARKIAQLMRLGWFRPVHCKSIAAQEIRAMLTARKLVQSKLLDLENSLRGILRGFGLKVGKTTRTNFAGRIEELVELHPNLQTIGQALLRVRAALLAELRNLERRVRAISRLHEKARLLMSTPAVGTIISLTFACAIDDPSRFTSSKQVGPYLGLTPKKYQSGETDYTGRISKHGDASAREALYEAAHLILTKPIKGCSELKSWATRIARRAGANKAKVALARKLAVIMLRMLKDNAPFNPAAKAATV

SEQ ID NO: 320626 - protein, 454 aa, unidentified
MSNKVIFNLDELFISVGIDVGADFSWMSIALPNQQFVGKPYKILHNSIDSLTTAVSKIKEAEELYSLESRIFLESTGIYHYPLFCYLRDKGFNCSVINPIITKNSTNINIRKVHNDRFDSKKAALVGLKPDLKVSLMPSDLALNCRNLCREYYDLMDNRSAYVNKLQGELRMAFPQYLGIFSKVTINTSLTLLETYTSPSAFLKTDKQEIIDIIKSTAHFGLTYAQNKYNAIIQAATDANQFGYIIDSNIKRIRLYISFIRKYDEEINNILESLHELVDANEDADFIKQIHLIETFKGAAFLSAVSIMGEIGDFSAFSKPKQLFAYFGLDPAVKQSGKFEGTKVQMSKRGSAIARRVIHTLTLQSISISHNGEAKNPVLREYYLKKCDSKPKLVAMGAVSHKVCNMMQQMGYRRCNLAVCDCLGCRMDRTCDWNCNLKATKLRPQPALQLTDTA

SEQ ID NO: 320627 - protein, 345 aa, unidentified
MEFFAGIDLGKRKSQIKVLNSDRKVTEELKIDNDPREFLRIFKKYKGKIDVACEASSNAFWVWDTLSPIVRRFSIGHTSKIRWIAEARIKTDKIDAGILAELLRADLFPAIAIPPKRIRELRELIRGIIRLRRQALRYRNQVHGLLGRHGVPYKRSEVQDTKLGELVRGVDLPRPARLAADALLRLEAATRDEIRQLQVELQKELKGEDEINKQIALLESIPGVGFFSAALLVLELWDVTRFSDAKHLASYIGFVPGTHQTGETLWHGSMTRQGNVLVRWILVQDTWIAIHNHWFFGRMYDRYKKRKGNTRAVVPVARALLKTIHRVWTEQKSYEEIYKEKTLVG

SEQ ID NO: 320628 - protein, 360 aa, unidentified
MEVGQEMAVSRIVGGVDTHKDLHVAAVVDEFGRVLAGQSFATTRHGYKQMLTWMRSFGSLQRIGIEATGTYGAGLLRYMQSAGVEVLEVTAPDRHDRRQRGKNDDLDAQNAAHAAFAGKRTATPKSRDGMIEALRVLTACRKTAVAARRVALQMIQNTIVCAPDELRETLRKLSRMQLIRTLAAWRPDLADYRNVVSAYRITLKSLGRRYLELHNEIAALDTMIVSIVDELAPALVSRNSIGHGSAAQLLLTAGDNPQRLLSEASFAALCGVSPVPASSGKITRHRLNRGGDQAANSALHIIAIGRLRTELRTKAYVAKRIAEGHSKLEAIRCPKRYIAREVFSLITQPRREMNQTLLAT

SEQ ID NO: 320629 - protein, 386 aa, unidentified
MKRNDLSRSLVAFDQASTMVSVVELSFRTWLVAGLVPGLSRQPLKKLGADAQALLTLLGRWQSQATKAGSTIKRIVVAFEAGRDGFWLARWLRARGIEAYVIHPTSIPVSREHRRAKTDRLDAGLLMRSLLGWLRGESKHCSMAAIPTIAEEDARRPHREHHTLVKEQTRVVNRIKSTLIRFGIRNFNIKPRKADDCLEALRGPENEPLPPNTVAELGRDMARLHLIREQIKAMEKARLERLKRAPRTGTHPMVLILAQIIGIGVDTADMLVHELLSRKLRDQRAVARYGGLTGAPDESGTKRREKGLARAGNARVRYGMVQLAWRWLIFQKNSDLAQWYQARTKGAKPSLRKTMIVALARKLLIALWRYVTTGEVPAGMVLRPAP

SEQ ID NO: 320630 - protein, 380 aa, unidentified
MNTGKMRTSDDIKAVEGVVFLVAMEMSLKTWRLAMAPSGSGKERQVQVPAGHYAELGEAVAKAKERFGMDKSSRVVLCYEAGREGFHPYRVLSEMGHTAWIIDSSSIEVNRRARRAKNDAVDASKILTLMQRDYRGEQPLKRVRVPTVEQEDYRQGTREREVLIKERARLRVRIQSLLFSQGIRDLPKSVLGIERWLTTQGQRVPTHLRARIERDVVRLKLTDRQLKDLTKEQHMHCTTKAADVATDPIAQQLTQLKGIGAIGACILSSELFGWRHFNNRREVGACVGLTPTPYDSGESSREQGISKAGNKRIRRVIVEVAWKWLDYQPDSALSRWFMERFGQGKRNRRIGIVALARKLLVALWHYLKQGVIPNGAQLKV

SEQ ID NO: 320631 - protein, 402 aa, unidentified
MGRCIGLDVHRDFAQVAIWEDGTVRDGGRVGATPQELAAFAETLGPDDAVALEATMNTAAIAALLAKRAGRVVVSNPFKTRVIAEAKVKTDKVDARVLAELLAVDYLPTVWLADEATKVLRRQVARRAQLVRQRTRLKNQVQAVLARNLVPRCPAADLFGHKGRRWLAVQDLPVDEQRAVAALLRQLDFHGEELRLLDAELAQVALERADVRRLMTIPGVDAVVAVSIVAAVGDFARFASPDKLVAYFGLNPRVRQSGGQPASHGRITKAGRAHARGMLVEAAWVATKCPGPLRAFYQRVKARRGAQIAVVAAARKLAVLCWNLIHRGEDYAYARPSLIEKKQRALELKAGHPSRRGQKGRAAAYSLTEVRRRERELVEQAETAYQHMVAGWQPQRPPARTG

SEQ ID NO: 320632 - protein, 508 aa, unidentified
MRSRGPARNPVTGVCHSRRIPLSECSVRAHPSAVVTVGVRVGRDGRCADMRMIIGIDVACRAAHQASCADESGAFLFTGHRFSTDAHELERLWSRLPKGADDVVVVLEPTRNAWVPLAAWFRHHGARVVLVPPERSADLRAYYSKHAKTDRLDSRVLARLPLLHPEGLHAEEGLGPGGALKRAVKLRCSLVTRRSSNMKRIDALLEIMGPAWTRVLGSDLGRASLEFLARYAEPLAVKRLGRARLARFLRTQSHGKWGEHHAEMLMEAADATLELWGGGGLDFAAVAADVALEARLALDLTREIKDLSARIAGMYEAADPSGIVLSAPGVAATLAAQILGRLGEVHRFDSLAGVRSFSGLVPKQRLSGTGGSTGGPTKAGDSCLRDALFLAADHARRQDPQLAARYRRLMVREGKHHTSALCSVGAVLLTRIAACLRDSVPYVMRDVDGVVITPEEGKAICAQRYTVPEEVRAARRTVSRNKIIKGRDEATVSGVAKRSKVAPVPASG

SEQ ID NO: 320633 - protein, 317 aa, unidentified
MSMTEHFIGIDVSKTQWDLAIHMTGKPWQVAYDTAGVKQVVKYLRTLAPTLIVLEATGGLETCVVSALAAAQLPVAVVNPRQVRAFAHATGTLAKTDRLDAHVLAHFAAAVQPTPRPLPDAATQQLSAVLTRRKQLVDMMTAESNRLGAQPNPAVRKRGRAHLAWLTKEGGRTEKELTQLIQQSPLWRVQDDLLQSAQGVGTVLSQTLLADVPELGHLTHKKMAALIGVAPFNRESGGYRGNRRIWGGRARVRAVLYMGTLVATRHNPVMKAFYERLLAAGKEKKVALMACMRKLLTILNAMIREQVKWQDRRSITH

SEQ ID NO: 320634 - protein, 376 aa, unidentified
MEHNSEAFIGIDTSKLKNAVAIAEGGRDGEVRYLGEIDTTDGATRKLVAKLAAKYRKVTFCYEAGPTGYGLYRLIKSLGHECSVVAPSLIPKKPGDHVKTNRRDAVGLARNLRAGELNEVWVPDTRHEAMRDLSRAREAAVDDLKSKRQQILSLLLRLGLHYSGKKTWGKSHRNWLASLKLGQREQRIVLEELFGAERQAQERVDRLVDAIIEAVPEWSLAKIVTALMAVRGIDLVAAVTIMAELGDLSRFASPRELMGFLGLVPSESSTGDSVKRGGITKAGNRRARRILVEASWSYRYPPRIGRDKLAKVAAAPEPVRAIAWKAQTRLSSRFRELSKRGKRPTIVATAVARELCGFIWAIHRAVTGPGGQQLVF

SEQ ID NO: 320635 - protein, 345 aa, unidentified
MNMHTIGIDLGKTSFHVVGMNERGEVVARKHFSRGQLLRFTANVHVELIGMEACGGAHFLGRLLREQGHEVRLIPAQYVKPYVKTNKSDYIDAEAIAEAVTRPTMRFVPIKTDDQLDLQSLHRVRERWVMRRTAVINQIRGLLLERGITLRKGRCYVDAALPGILEDAEAKLSGALRLLLSQLKIELDQLGMRIHEADEVIKRTAQQHDACRRLVAIPGIGPVTATAVIAAIGNGAAFHKGREFAAWIGLVPREHSTGGKQKLLGISKRGNSYLRRLFVQGARAVLQQRTKQSSGLGTWLAQLTLRTHHNVAAVALANKLARIAWAVLAKNEPYRPSVLADVAAV

SEQ ID NO: 320636 - protein, 370 aa, unidentified
MSESTTIRYVGLDVHKDSIAIAVASSDGKPPVSLGSVPGDIPALIKRLLRLGPAASLRCCYEAGPTGLGLVRRLKEAGIACQVIAPSLVPVRPGVRIKTDRRDAVKLAQYLRSGDLTPIHVLDPATEAIRDLERARDDAKRAERAARHRLSKFLLRHGRWFEGRSTWGPAHLAWLAKQQFDNSAHQDVMDDYREAVELATARVGRLTVRLAERVATWEKAPLVTALQALRGVDLVSAATLVAEVEDFRRFSSATELMSFVGLVPSEHSSGGSRRRGRITRTGNSHVRRILVESAWHYRRQPRMSKAIRARNDKVSAAVRAIAWKAQQRLHKRLFRLTGNGKPATRAVTAVARELAGFVWAIAREEVLLAG

SEQ ID NO: 320637 - protein, 344 aa, unidentified
MKYFAGLDVSLDETAICVVDEDGIVVTEGKAASEPDDLVRWLVATGLTITRVGLEAGPLSPWLHAELRAAGLPAICIETRRMRGATAAMAVKTDRNDARAIAHAMRVGWFTVVHVKTAESQECRLLLNNRRTLLEKRVAIDNEIRGTLKAFGLKIGAVTVAAFEVRVLELLAKRSRLLAMVRPMLAARAALREQCDVLHRMVLNAVQSSAVCRRLLSVPGVGPIVALTYATGVDDPARFIHSRDIGPHFGLTPRKYASGEIDRNGSITKAGDGAVREVLVQAALTLLTRVQRWSALKAWGMAIVKRRGLRRAIVAVARKLAIILHRMWTDSTMFNWKRETAALA

SEQ ID NO: 320638 - protein, 424 aa, unidentified
MLGVGIDWAETFHVVALGRPGEGVVQVLRVEHSKPALEALLEQLQALEPDSGEVRVVLETRHGLLVERLLEAGFVVVPVNPDLIARRRGPAKKKDDVEDARIACLLALDRFQPLRPLIPHGELAAELRLLGRDDERACQDERRLLNRLRADLLAVFPAAVQIAGPDMGAPTFLRMLQRWPTATALAGTSRQELVVFARAAHSGYPERFADRVGQALSREHFTARQTLAQAKVDTIQLTVAQLLLIGAQRRTWERRMGQLLLGAPRRRGGAMPSQEKRDRGQAVPGGEIYLSFPGLGDRLAARIAGEIGDHPEQFQTPNSLQCYAGQAPVTRRSGKRELLITRRLACNRHLADAVHKWAFASLRRSAWAKDYYDSQRDRGKDHHAALRALGNRWLEILWHCLQRQVPYDEAVHVANRTRALRPAA

SEQ ID NO: 320639 - protein, 407 aa, unidentified
MEVVYRCCCGIDVHKKVIVACLVNGGEQELREFGTTTSEIKTLANWLTESGCEMIAMESTGVFWKPLYNLFELMDLDAMIVNAAHMKALPGRKTDVKDAEWIADLLRHGLLKASYIPNREQRELREITRYRKSLTEERCREVNRLQKILEGANIKLDSVVKDITGKSARKLLQRIIDDDIPDSDEVSKLVHGRMRPKLEQIVASIEGITTPLQRKLLAQIIDHIDDLNRRIGELDKLVQEYMAEYEAAIEAIDEIPGIARRSAEVILAEIGLDMGRFPSAAHLCSWAGVCPGNYQSAGRRKHGKTTKGNKALKTILTQCAKSAKTVKSSYFFAQYQRISARRGKNRATLAVAHSMLIAIYHILKNKTAFHDLGSDYYDSFNRDRKINSYLKRLKTLGWEPDAIPSSA

SEQ ID NO: 320640 - protein, 323 aa, unidentified
MNKYIKYFGIDISHLVFDVTDSDGNYYQFKNSLIGFKKFMKLLDFNSHCVMEATGYYHYQLAYYLQENSVVLSVENPLSVKRFIQMKLSKIKTDKSDSKLICEYAKQVDLKLWQGNSKHQLECLQMTRLLSVYTKQSTMLKNKLHGEAVLGQPSKLVVTSLKRSLRQLKKEIDTIEETLLLLVNEVHKDVLTRLKSIPGIGKKTSLMLVVLTDGFDRFKSGSELCSYAGLTPIIRQSGSSVNGRARISKIGNQKLRNLLFMCSFNACKYNKACKAIYDRIVAKGKRKKLALIAVCNKLLKQAFAIAKSGLIYDDTYRSTLVKN

SEQ ID NO: 320641 - protein, 398 aa, unidentified
MTESSDYESVQVFIGVDVGKDTHHAVAINRSGKRLFDKALPNDENKLRSLISDLKQHGQILLVVDQPATIGALPVAVARAEGVLVGYLPGLAMRRIADLHAGEAKTDARDAAIIAEAARTLPHALRTLKLADEQIAELSMLCGFDDDLAAQTTQASNRLRGLLTQIHPALERVLGPRLEHPAVLDLLQRYPSPEKLASLGEKKLAAQLCKLAPRLGKRLAADIAQALAEQTVVVPGTNAAAVVLPRLALQLITLRKQRDEVALEVEQRVLAHPLYPVLTSMPGVGVRTAARLLTEVACRAFASAAHLAAYAGLAPVTRRSGSSIRGEHPSRRGNKALKRALFLSAFAALRDPLSRAYYTRKMSQGKRHNQALIALARRRCDVLFAMMRDGTFYTPQGS

SEQ ID NO: 320642 - protein, 343 aa, unidentified
MDHFAGLDVSVKETSACMVDDTGRIVREVKVASEPEALLAVLTNPACHFKRIGLEAGPLSQWLFSALAEAGLPVICVETRHMRAVLKAQINKTDRNDARGIAQMMRVGLYRPVHVKTLRSQKQRMLLTHRKLMQSKAIAIENDLRATLRNFGLKVGVVGTVKFEARIKELVENLPDLVVLVEPLLIIRRVLREQIGILHRRLLAIVRDDDVCRRLMTVPGVGPVVALTYRATVDMPSRFRNSKAVGAVFGLTPSKHQSGESNRTGGISRCGDEMMRMMLYEAAHIMLVRSARWSWLKAWAMKIARHRGLKKAIVALARRLAVIMHRIWVDGTEFRWTREVAAA

SEQ ID NO: 320643 - protein, 345 aa, unidentified
MTPLTNRPPYQLFVGIDIAATTFTAVWTTDGPPRERARPFAQTPAGFAALQDQLRATGVAPAHILIVVEATGSYWVALAVCLHQAGYVVSVVNPAQAHNYAKSLPRRAKTDVLDAPVLAQFAAERKPAPWTPPPAVYHELRQRLVARDALLEMRQQARNQRHALLQWPIVIESVKTHLDGVIMELDQRVAALDAEVAQVLVDGAWAESATLLLSITGIGLVTTAWLLVGTLNFAGCASVASAAAYVGLVPLAHESGSSVRGRAQIGHGGHKRLRTALYLATLTAARFNPIIKAHYERLRAAGKPMKVARCAAARKLLHLAWAVVTKRQPFDPAYRERLVEERLAA

SEQ ID NO: 320644 - protein, 465 aa, unidentified
MTPHKDAFPDPRPPAPPLPQPSVLSEALQVCHPHAAGIDIGAAEHWVAVPPGCDPQPVRRFGTFTADLDALADWLIDCGVTTVAMESTGVYWLPLFELLEARGVQVLLIDPRQAKRAPGRPKTDRLDCKWLQRLHAYGLLAGAFRPEDQVCVLRSYLRHRQMLLTSAAHHIQHMQKALQQMNLKLTQVVSDITGVTGMAIIKAIVAGERNPQRLAQLRNPHCHHDTDDIAKALQGNWRAEHLFALRQAVELYEVYHQQIAQCDQQIKQHLETFADKSAGQPLPPKARRHKKTNEPRFDARAPHYRLAGVDLTTIEGIEENTALIILSEIGTDMTRWPSVKHFCSWLGLCPQHQISGGKVLSRRVRPGAHRVTVALRLAARSLHHSQSAFGAFFRRMKARLGTPKAITATAHKLARLVYGLLKHGTAYVQQGIEAYETHYRERTVKAMVRQAKTLGYALVPLAVQG

SEQ ID NO: 320645 - protein, 423 aa, unidentified
MDPNVKETPFAEQFDLFVGFDWARQEHVLVGVDAGGKKVLELCIPDTWEGWGDLRRRLAERVGSDLGRVAVAVETCNGPAVERLMELGCRVYPLNPKAAQRYRERKAPMGAKSDRLDAWSFADALRTDGHGWRSLVPDDPLTQELRLLCRDEVQLIQQRTALVHQLTAALREYYPAALEAFEDWTSEGAWAFVEAFATPAKLVQSGKRRWEKFLHAHKLYRPETYPRRLEIFARADRFAGPPAVTRAKSRLALALAAQLRVLQRELEGYRAAIEELFGKHPDGDLFGSLPGAGAKLAPRLLSEVGDNRERFGDAEAVQCYAGSAPVTIQSGKKRWVRFRSGCNKHLRAAAHLWADLSRHKSTWAEVYYRRKREQGMSHACALRCLAQRWLKILWKMWQTRTAYDEALHTRNQTRHGSWVLALT

SEQ ID NO: 320646 - protein, 432 aa, unidentified
MIAAVIERCAGIDVGKKFIAVCVMTGPADGEARSETRIFGTTVAELKQARSWITEEQCTHVMLESTGSYWKPIFNILEGHVKVTLANPQEVKARKGHKTDQKDAWWLAHLLRHGMVTPSFIPPRPQRELRDLTRRRRKLIQTASAEKNRISKVLEDANIKLGNVLSDVFGVSGQLMLEALLQGKTPDATELADFARGSAKKKIPALVAALEEHQMREHHRQMIRFSVEHMRFIEEQLVDLDQLIRAKIEEAGYTKQWELLRTLPAVRDNAAVLLAEMGPDPAQFPDERHLGSWSGLCPGNNRSAGRNKSSHTNTGNRWLRAALTESAWAVSMMKTGHLRDKFWRIAAKGPPQRSRPIAVVAIAHDLLKLAYFVMQRGTPYEERRGQPMTEEQKQRLIRHHIRRLGKLGVPVRSSRPSAVTTRSKCKTSSSNS

SEQ ID NO: 320647 - protein, 345 aa, unidentified
MTMVRSVVGGVDTHADWHVAAAVDGNGGLLGIESFPVDEAGFEELLGWLVGFGPVSLVGVEGTGSWGVGLARFLARAEVEVVEVDRPNRQTRRKVGKSDPTDAVAAARAALSGAAAVIPKTRNGPVEQMRVLLVARRSARRQRIQTLNQLRHLVFTAPEEIRARFKDRYKTGLVTEAAAMRPRKGSDPVTYTTNLVIRNLARRIQGLNAEMASIDDMLTELVAETAPSLLALYGAGTDTAASLLVTAGDNPDRLGSERSWAHLCGVAPLPAGSGKTSGRYRLNRGGDRNANAALYRIVLTRMSSDEETRRYVARRRSEGLSTAEIMRCLKRYVARQVFKQLPRAA

SEQ ID NO: 320648 - protein, 329 aa, unidentified
MEIKEIVGIDMSKKTFDGYIHLKGIHEAFENTVAGFRKFKKWLQKHLGKDLSAVRVVLEFTGHYTYQLEEYMHREGMFFSKASGLAIKRSLGLVRGKDDKIDAKRIAEYGSEKRAKLKVFPRQDNTLFVLKNLISLRDKLVREKAGYVVRLKEMQACLDISAGDILLKVQQTMIDVIAKQVEKLNNEIQGLLNQDEAIGRNYGLLTSIKGIGPVLATYVIAYTNNFTRFDNARQFACYVGIAPFPYKSGTSIRGKTKVSPLANRKIKSILYLCASTAIQHNDELKAFYERRIKAGKNEMSTLNVIRNKIVSRMFAVIREQQPYSTTFPV

SEQ ID NO: 320649 - protein, 337 aa, unidentified
MKYCGIDLHSNNSVVVVSDEEDRMVLQKRLPNDLGQIRAALEPHREDVAGVVIESTYNWYWLVDGLMAAGYRVHLAHPSAIKKYEGLKYSGDFADARYLGHLLRLGLLAEGYIYPRAERGARDLARKRMQLVRYRTAQILSIENILARQTGARMSGDAVKRLTPERVAALGFTPDVALALEANRAVSQTLGQQIETLEKRLKERVSLRGEFKLLKTTPGIGEILATTIMLEMGTPKRFAKVGNFSSYCRCVGSLRESNDKKKGEGNAKNGNKYLAWAFVEAANFARRYCPQAKAFYERKKRKANGVLATKALAHKLARACYHMLREHKPFDVSRCFG

SEQ ID NO: 320650 - protein, 421 aa, unidentified
MLKIHRFNCAGLDVHKNLIVATIGITDKKTRVTEYIQKDFSSLNYDLYNLKNWLIEHKCFDVCMESTGKYWIPVFNVLETEAKMNIVLVHPKYVKAIKGKKTDKKDSKWICDLFKHDLLKSSFIPPKDIRELRDLSRYRFKLICMRTSERNRYQNSMTVSNITLASVVSDPFGKTAKAIMNEVLSTEAIDEAKITKLIHGSCRNKDKIIESLKNSKIEPDQRFKMTEIQSHMNELDKHIEAVEVEIIKRASRYFDDFIHITEIDGIQLISAILIISEIGVDMTQFETDKQLCSWAGVSPANNESAGKKKSVRISKAGQYLKPVLVQCALAAIRKKNSYFGQKYTRIKKRRGHKKAIIAIARMMLVSIYHMILTGEKFNPSDYESFKDPKPQREKNNYTVETALDFLKSQGFDVSSIQEIPK

SEQ ID NO: 320651 - protein, 408 aa, unidentified
MNTLYVGIDVSSKSNVVYLMLPNGDKHSNFSVANSHEGSTQLVKRILSALTSYSLDTVLIGLEATNVYGDNLVYFLREDATLAPFNRKIHVLNPKQVKKFHDTYNDLPKNDYVDSFVIADCLRFGRINKEVYLGDYRYKALQNLTRARYFAVQSLTKEKQRFINVLFKKYSTMTQEKVFCDTFSTTALAVYDEFDSAEALANMDLHELTNFIIKKGKNRFTDPDAVAKAIQKAARSSYRLPKTINDSVNQVLSISITSMKALESQIKEFDKAIKAQMELLPNVLISIPGIGPVYSAGIMAEIGDINRFNNQAALAKYAGLAWKQHQSGGFEAEVTRLIPSGNRFLKYYLCEAAFSLVRCDKEYSDFYHLKYKEVNRYQHKRALALTARKFVRLVFRLLKDNRLYCPAK

SEQ ID NO: 320652 - protein, 426 aa, unidentified
MQKAEKKALVYGNVLIVGVDVAKKNHYARIYNSMGIDVVKPFYFHNSREGFCRLLGKISEAKEKEKAERIIIGMEPTGHYWKPLAYFLKEAGYTVVIVNPYHVKNSKEMEDNSQDKNDRKDAGLIAQLVKEGKFLHCILPEGIYAELRTLYITRQQEHKKLNAALCQLKAIVDEYFPELMEVFKSLLGKAAQWVLRNCPFPKDILSLKLEELEEGLKQASNSRVGIKRALALRQAAEKSIGVKEGLEGAKVKLQACLEEIEFYQGQIRKTEEAMGRYLEETGLANYLLSIPGVGVVTAAGFLGEIGDPAKYQHWRQIRKLAGYNLTAQKSGKKQKAKTTISKRGRPGLRNLLYQVSLILVAKNKEFKALYHYFLKRPENPLTRKQALVAVALKLVRVMFTLITQKKEYDASKVLGKYREEQLKKVA

SEQ ID NO: 320653 - protein, 344 aa, unidentified
MKTTMIGLDLAKNVFQVHGIDASGVVTIRRTLRRAQMERFFAGLAPCVVGMEACGGAHYWARVLQGLGHEVRMMPANYVKAYVKRNKTDGRDAEAICEAMSRPTMRFVAVKSEAAQATLALHRTRALLVRQRTMAANGLRAGLAEFGIVAAPGNNGLHQLMQVLSEAECLLPAPARAALSLLALQWETADSAVGELERQIGRMAREDAAARRLMEIPGVGPIGASAVIAKVADIGTFRSGRDFAAWIGLTPRQKGTGGKQRSGAISKQGDRMLRQLLIMGATSRLARARAGGKADPWLSALLARRPFKVAAVALAAKMARIIWVLLKTGERYRAQARQPVPAAA

SEQ ID NO: 320654 - protein, 404 aa, unidentified
MISVGIDIAKRKSTVCALKDGKKILWKPFNIYHQRSDVESLIAKIKALDEEVKIIMEATGIYHKPLLISLKDAGLFVSVVNPLKMKRFCQALSFRNVKTDNSDSLSIAEYGLINWFELKEAFEDNDKFKELKELNRAYQHYQEIRIKEINYLGKEIEKRHPGLKKLIAHSNNDYKKDKLLDFVERWPNSQKIRKRSEIQFIKEYENWARKKGYHPDSSKARLIYENTQKSIPTISSSNSILDANVLESIKIMRTINKALNNILSQMQKIATGLEEYEVLKDFTGIGDKLALQIASEFGDLSKFKNKKSLISYVGIDSPAYQSGEFKGTRRKISKRGNAILRKVLFLAMMCMKRSKKINDPIYVYVLKKESEGKAKKVANIAGINKLLRIYYARVMEVKEYKKIS

SEQ ID NO: 320655 - protein, 345 aa, unidentified
MEFFAGIDLGKRRSQIKVLNQDRKVVEELKIDNDPKEFFRIFKKYKGKIDVACEASSNAFWIWDTLSPIVRRFSIGHTSKIRWIAEARIKTDKIDAGILAELLRADLFPAIAIPPKRIRELRELIRGVIRLRRQALRYRNQVHGLLGRHGIPYKRSEVQDTKLGELVRGVELPRPARLAADALLRLEAATREEIRQLQVELQKELKREDEINKQISLLESIPGVGFFSAALLVMELWDVNRFSDAKHLASYIGFVPGTHQTGETLWHGSMTRQGNVLVRWILVQDTWIAIHNHWFFGRMYDRYKKRKGNTRAVVPVARALLKTIHRVWTEQKSYDEIYKEKTLVG

SEQ ID NO: 320656 - protein, 339 aa, unidentified
MRHIGVDLHTNSFTACYLQEGKPEHIQTFRLKDLDNFTKDLQETDEVAIEATGNSCFFYDAVSPYVKCIVIIAPGQFEVVRRSVNKTDKHDARAIAFFLSKDMLPEARCKNKQCQQLASLLQTRDQLVKSRVSLINKVHGLFNYHGIKIKKEVLTTKVGFERATQKHNWDPLEKVEIEVISYHLEAIRESLKKLEKEIIAFAKQLPGFSNLISIKGIGPISAAVFIVTIGDINDFRRPEKLTAYFGVVPRVSQSNQQCTIGRITKRGSKIARTSLVQCTWIAVRYSPYLKSFYEHIKKKRGSAKAITATARKFLITILYTLKNNWVFKDFTKFEISTGQ

SEQ ID NO: 320657 - protein, 427 aa, unidentified
MNENQNNRIDEFRQFKKRIRGSTEELVIGLDIAKRKHHAFFGNGNGQTVLKGLIVENSAEGFRHLLSQVGFYMQRDDFRRVVFGLEPTSVYHKPLAEHLIEQGYLVVYATNEAIKKNRSLMDGRWDKNDTKDSANVADLVAQGKCQYYDLPELRLRELRNLLLLRKRLKKQLHGCRVRIRNNLVAQYFPELDRFWKNAAAENLSIVRWFLDPGSIRQLACEQFISKVTRHNGGLRQQRRLRQIWEVAGQSIGCRSGPGMQLEAEIVVEALHGLQEQVSRVEQAIEQLAAGFPEYDYLKSIPGFGPYVSAVTLAAIGNADRFENRSQLLRLAGFDLSANRSGEKSRTAVPVISKKGKANLRYALYQAALVASSRTSHFRAYYNRLLEGRQREKGIRTKMLVKIAAKMLVIAWTLMKRKESFNPVHIQT

SEQ ID NO: 320658 - protein, 403 aa, unidentified
MNNVAGIDVSKGKSMVSVLRPFGEVVAKPFSVGHTGSELKELADYLKSLDGETRVVMEHTGRYYEPVARFLHEEGVFVSAVNPKLIKDYGNNTLRKVKTDKADARKIARYGLDNWAELRQHTPMDTIRMHLKTLNRQQSLYTKTKTMMKNNLIALLDQTYPGVNALFDSPVREDGSQKWVDFATAFWHVDCVRNMSLTAFAERYRKWCKRHGYNFSQSKAVEVHTGAQDLIAMLPKDALTKTMVRQAIDALNAVSASLERLKAEMRTLAAQLPEYPVVMAMHGAGDSLGPQLMAELGDVTRFTHRNAITAFAGVDPGADQSGTHEAKSTRVSKSGPPELRRALFLVMDCLLKTQPQDDPVYRFMDKKRAEGKPYLVYMTAGANKFLRIYYGRVKEYLASLEGN

SEQ ID NO: 320659 - protein, 390 aa, unidentified
MLIGMDVHKHSVFVTEMEEEGNVKDQYEMSNDDESWESFLSRYSVYGNEIALEISTTGKFIAGKLRNMGFSVHIADPVKLDLIFNTTKKNDREDSYKLAKLLRLGELPEVHLPSKESDDLRSITRYRKSIGEEITMLKNRIHALLSSYGISIEATDIFGKKGTAEIDKVSKILSESDRFILSSILDRIASLFHQERSVEDQISRMVLNNRNVARIMTIPGINVYSAAVLISEIDDISRFATKEKLASYAGLVPRQDQSGNRDIKGHITKHGPSMLRFILVNAAHIVIKYSKRLRSKYLSLVRRLGKNRSIVAIARILLEMIYTMLKNGEDFVDEIDSLTERKMISMQIRAKNPSPVRKLEELMKSIKKNKDTMKFINEKMIRGAPKELFS

SEQ ID NO: 320660 - protein, 412 aa, unidentified
MDATYYVAGIDVHKTMLAVVVANVSERELRFECRRFGTTVSELQNLSAWLRAHTVQEVVMESTAQYWKPVWLALEGQFQLWLAQARSNRGPRGRKTDFRDAKRCVSRLLSDDLRLSYVPDAEQRCWRTLTRTKYQLRRDRVRLQSQLESLLEECQIKLSSVVSDLLGASGQRILRAIAAGETDPAQLGALGDKRLHATDAQLKDALSGQPQPAHQALLTLYLQRLDVIEAQMAELERMIADALKAHEAAIVRLSELPGLGVDSAQQIIAEIGPRAEAFPSAGQLASWVGVCPGREESNGESNSNRSAKGNRTMRRLLNQLAHAAVRKRDCYLQIVFKRLSVRLGYAKAVWAVAHRLCGLIWKVLHEGVRYVERGPAVSALTLRRRKQRLVAQLKKLGYSVQLTPITASETTL

SEQ ID NO: 320661 - protein, 390 aa, unidentified
MSKLIIGIDIGKQNHQATIINESSQILGGSIKFPNTTAGAQLLLDRVTAVNTAKLPLVFGLEATGHYWLSLYSYLVEQGFQVVVINPYQSDAWRKVYLSSTKTDAEDAFLIAEIIRFGNFSPTKLAKEEMITLRNLSRFRLTLNQQISDSKRRIITILDQVFPEFESSFSDVFGKTGRTLLKKYPTPEDVDQISINKLTKIVTTLSKGHFKKDKALEIKLKAKTSFGVKLALDSLTFQLELLLKSLELTEKQLIQVDEEINPLIANDCVLLSLPGINKTLAASILSEIGDIKRFKTSSQLVSFAGINPTVRQSGNFLGTKNHMSKKGSAYLRLALWQSSITSVRFNPILKQYYNQKIAEGKNHMTVIGAVSRKLAGIIFAMLRDNKQFKA

SEQ ID NO: 320662 - protein, 344 aa, unidentified
MDHFAGLDVSVKETSICIVDDAGKIVREVKVASEPEALLAVLKNPAYHFKRIGLEAGPLSQWLFSALAEAGLPVICVETRHMQAVLKAQINKTDRNDARGIAQMMRAGLYRPVHVKTIRSQKLRMLLTHRKLLQSKAIAIENDLRGTLRNFGLKVGMVGKVKFEARISELVENLPDLAALVEPMLIVRRTLREQIVILHRRLLAIVRDDEVCRRLMTTPGVGPVVALTYRATVDVPARFRKSKAVGAVFGLTCAKYQSGEVDRNGRISRCGDEMMRVMLYEAAQSMLRSKKWSWLKAWAMQIARRRGMKKAIVALARRLAVIMHRIWVDGTEFRWTREQATAAA

SEQ ID NO: 320663 - protein, 483 aa, unidentified
MKPKPQEKNKRATNHPTQHHWHEMNRKQRRETMRKIQSEDLNLEVIHPDAAGIDIGNEFHYAAVPPSRDNQPVRRFGCTTAELKAMATWLQQCGIGTVAMQSTGVYWVAVYDILEQAGLEVYLVNARDTKNLPGRKSDVQESQWLMKLHTYGLLRNSFRPSQEIRVMRTYWRQRNDLVQSAGRHILRMQKALTQMNIQLANVLSDVSGATGQAIIKAILAGEHDPYKLAAFRDPRVQASEEQIAQSLEGNWQPDLLFLLKQEQDGYQFCQKQMAECDRQLAQYLQQREDRSQGAPLPEEKRKGRLKKKRANKPRFDLREGLFRMTGTDLTRIDGIDVMTATTVISEAGYDMSKWKTENHFVSWLRLCPDNRISGNKVIGKGRLPTNNPVSIALKMAASTLRLSKTYLGAQFRRFRTRLGAPIAIKAMAAKLARLVYRMLRYGMKYVDQGAAFYELKHRQLQVQQLKWKAAKLGYKVTPIPVAA

SEQ ID NO: 320664 - protein, 323 aa, unidentified
MVPVLGIDIAKATCALALERPDGKVQHKSVPNTPDGRARLVAWLAQHAGGPVHACLEATGPYGDAVALALVDAGHTVSIVNPAAVAAYARSELRRAKTDRTDADVIRRFCAAQQPRPWVPPAPEVRTLQALARRVVAVEAMRQQEANRLAAYQPHDAVRQSIAAVLADLTAEVARLRQLIHDHIDQHPGLRTQRDLLTSIPGIGDTTATTLLAELFAPRPGLSVRQLVASAGLAPRVCHSGTSVHHRGRLSPLGSRRLRKALYFPALAALRHNPVVQALAHRLTAAGKPKMVIVAAAMRKLLHLAFGVLKSSQPFNPAIALNH

SEQ ID NO: 320665 - protein, 415 aa, unidentified
MEVLYPRCAGLDVHKDTVVACVRVVADGAVRSEVRTFDTMTPGLLALADWLAEQGCTHVAMEATGVYWKPVWHMLSDGDLILILANAAHVKNVPGRKTDVADATWLADLLAHGLIRPSFVPEADTQAMRALLRTRKQLVREQAAHIQRLQKTLEDANLKLASVLTNIMGLTGRAILEALIGGQDDVDHLLTLIDRRVKAPPEKLRAALQGRINDRHRFLLRLHLRQIDALADAVADIDQEVDRDLAPFRDAVRQLRTIHGVSDLSAQVIVSEIGTDMSRFPTAGHLVSWAGLCPRNDESAGKRRSNRLRKGAPWLKTTLVQCAWAGARTKGSYLQAQFRRLSHRRGPKKAICAVAASILTAAYHMLKDGTFYRDLGANHFQTASPDAQAKKLAAQIAKLGFTCTVTPNPDGLVSV

SEQ ID NO: 320666 - protein, 323 aa, unidentified
MGVPTVSTDSTTVIVGIDISKDDVDFFVLNWKGCPSGRRPRRATDLAILATELATFQPRLVVLEATGGLDTPVWAALEAAGLRVAVVNPKRVRDFARSLGLLAKTDSLDARMLARFGELLGPAPTRLPDRVAREGRELVRHLDALVGTRAQHRTRRRQLAGELALASVERVIASLSEEIALLEQQIKEALRQQPGPCQRAAQLRTAPGVGPKTSWALLAELPELGQLSGRQVAALAGLAPMARDSGRFRGRRRIVGGRARVRKALYMAARSAVRCDPHLAAFRARLLAAGKPKQVALIAVARKLLVALNSMIRDRRPWIPLPA

SEQ ID NO: 320667 - protein, 371 aa, unidentified
MKKNSSCSQSPKRGKKAQRGRMTIGIDLGDKTSRYCVLNEQGEVLAESGVATTKQALGRVFGARKPCRVALEVGTHSPWVSRLLERLGHEVIVANAREVRSISHSSRKDDRRDARMLARLARADPQLLRPIRHRGEQAQGHLLRIRVRATLVEVRAKLVNTARGLTKAWGERLPACDTDTMGVRRLEGLPAPLRAALEPLLREVESLTEKIKACDVELEQIARKEYPETELLRQVSGVGALIALTFVLTLEDANRFARSREVGCYVGLRPRRKDSGERRPQLGITKEGDRYLRKMLVQGAHYILGWRGPDTDLRRWGLKLAERGGPNAKKKAIVGVARKLAVLLHRLWVTGEVYEPLRNNTAGPRRKALAA

SEQ ID NO: 320668 - protein, 342 aa, unidentified
MLIIGCDYHPSVQQIAFVDTETGDYGEHRLEHSDGEAEKFYRDLKLSGASVRVGLEATGHTRWFERLLAKLGYELWIGDAAQITAMRVRKQKTDRQDAQFLLKLLMEDRFPRVWVPSLENRDLRQLLWHRHRLVQMRTRIMNQLQSVAMNEGIQRRGGLRSEQGRKRLEQLPLAPWAAKRRQDLFGLLDQLNGSVEELSAAIQQEAEKRPEVRLLMTHPGVGPITALAFVLIVGYPERFRCGKQIGSYVGLIPQEASSGVHRRLGHISKQGSSLLRFLLVEAAQAAARFNPEWRSMFLHLAMRRERRIAKVAMARKLAVNLYWMWRKQRSFQPSVEVGSYAG

SEQ ID NO: 320669 - protein, 369 aa, unidentified
MNECITYIGLDVHNETIAVALAEGTTRGEVCKHGQISNTPAALTRLSVKLSRSGSVLRFCYEAGPCGYGIQRQLAAAGHDCVVVAPSLIPRKPGDRIKTDRRDAINLAGLHRAGALTAVWVPDPAHEAVRDLVRARLAAVRSLRQARQQLSGFLLRHGRHYSRPAWTLIHRRWLAGLRFEQPAHHIVLEDCIATIEAATARRDRLTAQIETMLADWALAPVVHALQSLRGMALVSAATVIAELGDITRFANPRQLMAYLGLVPSEHSSGGTRRQGGVTKAGNSTARRMLIEAAWSYRFPARISREQLLRQEALPKPIRDTAWKAQLRLCGRYRKLTRAGKPATIVTTAIARELAGFVWAIACQLPRPTN

SEQ ID NO: 320670 - protein, 360 aa, unidentified
MSVTMTYVGLDVHARSIHAAAIDVVSGELRRARFGGGSEEVIGWLAALPQPLRGCYEAGPTGFALYRAASAVGLHVDVIAPSKTPRAPGDRIKSDRKDAELLARLLLAGQLKIVTVPSPSVEAARHLCRAREQVRSDLMRCRHRVSKLLLLHGRVYAERSTWTQRHRQWLARQQFDEPATELAYLDTLAAVDGLVGRKAALDERLSRLALEGDWWPTVARLRCFRGIDTLTALALCLEIGDFARFESPRKLSSWLGLVPALDQSGESRRQGAITKTGSSYARRLLVEASWHYLREPRIGATVANRQQGQPAHVLQIAWRAQHRLHRLHSRLRAHGKPPNVATVAVARELACFLWAAAVAE

SEQ ID NO: 320671 - protein, 417 aa, unidentified
MQIIPWEERKYFGALDWACDHHDLVVVNGKGVIVCEVRFAHTAEGWQQLRDKLAAFTPLAIAVETNQGLAVEQLLAARYTVFPVNPQSAKRYRERKAPTGVKDDRRDAWSLADALRVDGHGWKPLCADDPLVAELRLLTRDETALIEQRTGLINQLQSALRDYYPAALEAFADWSCPGAWSFVASFPTPAALVKAGRRRWVKFLHVHHFWREATAQRRLEIFARAERLQGQPSSVAAKSLLALSLVRILQTLEVQLRAYRTAIDELFARHPDHDLFGSLPGAGKKLAPRLLAEIGDQRSRFARAEGLQAYAGTAPITFQSGQIEKHLVRRACARPLRCTVHLWANLSRRKCPWAQAYYQAHRDKGQSHACALRCLGQRWLKILWRMWQDGTRYDESLHTRNQRQHGSWVLARQATTT

SEQ ID NO: 320672 - protein, 338 aa, unidentified
MNIVFLGIDLAKNVFQLCGLNQAGKPVYTKRTGRKELLQTLANIPACLIGIEASTGAFYWQREFEKLGHKVKVISPQYVKPFVRGQKNDGNDAQAIAVALMQPTMQFVPPKSPEQQDIQALHRARQRIVNHRTATVCQIRGLLLDRGIPIGSAVSRARRAIPLILEDAENGLSSRMRRTIAELYDLFNDLGCRIHFFDKEIETVFRQSEACQRIAKVKGIGPKTATAVVAAIGKGTEFKNGRHFAAWPGLVPRQHSSGDRQVLMNMTKKGDKHLRTLFIHGARAVVRVATNNNDGHMNQRVNQLKERRGFNKTTVAVANKNARIIWSMLRNETEYQVV

SEQ ID NO: 320673 - protein, 356 aa, unidentified
MNNTLNEKSIVVGVDVHKYNHTAVAMNAWGEEKGSMEFSNKTLDTYETWLERLGMKEDIIVGLEDVNSYGVHLVEKLRAGGFRIRYVPAILTERERKQSTKRHKSDSVDAKRVGKVLLTKYEDTLPAKESIAEKRELDIAKSLDLLIMERRDLVRQKTITKNQLHALLHQHYTESYRDVCPRSFTKKAIRWFLNDLEENSSILATSITRRLKRLLFVEDQIYTISKEIGVIGATSKEVEALVGIHGCGMVTACAIMAEVVTIKRFKNKHHFAMYAGVAPTEHSSGRKHKLHTNPFGNRRLNKALHTIALSQIAIKGNPAGKEYWQRKVKEGKTKLWALRCLKRQISKRVFQTLKYC

SEQ ID NO: 320674 - protein, 387 aa, unidentified
MLGVDVGKAELYGTWRDPVTEEVRWHGGVPNTEVGIRQLLRRAPESAVVVEPTGRYGEVLIRAAQAEGRTVYLAPTRKARAFLWAVQSRAKTDRVDSAGLALYGLRGRLRPYTLPSDEVDELQQLLAARRGLSQSRSALGQQEKALPRAAATLGPAIAALTQQIAAIDHQLQKLSVTPKPATATKPTATKPTATKLKAATPRGSTAKIAPAVAAVAAAPASTPDAAELVVPAAPPPSPVLAAARTLRTVPGVGPVVAAALAARLVEKQFTHPDQFVAYLGLDIKVHQSGQRKGQFGLSKHGDAELRRLLYIAALAAAQCKHDRTFATRYAREKAKGLANTAALNAVARKLAKVAWSLVTHRSTYNPARVDQQPPKPEKQPLPLDMQP

SEQ ID NO: 320675 - protein, 366 aa, unidentified
MDTIYIGVDFHARQQTVCYLKTETGELVTCELKHQDKQVVRAFYTHFRGQVIVGLEASGYSPWFERMLEELGCEVWLGHATEIRRRARWRQKNDRRDAELILELMLHNEFPRLHRPAVQSREVLRMLRYRQKLIKMRTMSKNSLQAIALQAGLAKRSRLFTKDGQQQLSAAEMSPVMHWQREHWLQLMAPLNQQLLETMVWFKEQSKGDVSITRLRTHPGIGLLTSLCIVHTLQPVSRFRNTRKVAAYAGFDPVERSSAERKCFLGISKAGSRLLRYLLVEAAQTAVRKDEDLKRFYQRLAERRGRPKAKVAAARKLLIRAYIMLRDEIDYAEFRHRAVAARLARRGQGPSNVPEVLIGQPASPEQ

SEQ ID NO: 320676 - protein, 316 aa, unidentified
MTDQAIEVFVGIDISKQSLDVHIAPPGQSLKVAYDEAGVAQLVQRVEAAQPTLVVMEATGGYEARLASELAAKGLPIAVINPRQARDYAKATGQLAKTDRVDAIVLCGFARAIRPEVRPRKDPDTQELDALVSRRRQLVEMRVQERLRMTATVSKKIRKGINDHILWIEQCIAEVDSELKGRLRRSDMWRPKVQLLESIPGVGAVTTTTLLAKCPELGTLNRRQIAKLVGLAPLANDSGQRHGRRHVWGGRAEIRSVLYMATVTAIRCNPTIRTFAQRLQQLHKPPKVVIVACMRKLLTIMNVMIKTGTAWNPTAA

SEQ ID NO: 320677 - protein, 469 aa, unidentified
MQQNFYLGIDVSKGYADFIILDENKKLVEDNFQLDDTFEGHNQLYKVISGFLAKHPDSKIFAAVESTGGYENNWLKFLSKTQSTINLSVARVNPFGVSYNSKASLNRIITDKQSAKNVAEYIISHPEKVKYNDEDYYSSVRRQWTFIKMLTKQKVQLLNQLESLLYIANPEVLSYCSNKVNLWTLRMLKQYPTAKQLSKARVSTLSKIPYITESLAKQLIDNAKNSVASSVDDTTAEIIRALVEQILQLRNLIKLQNRQLESSCNIAEVELLKSFKGIGTYSAVGLMIEILSVERFSSVKKLASFFGVHPVFKQSGDGLSGFKMSKRGRKEPRQILFNVARFAVVHNPYIKEIYAMHLQKGMPKMAALGAVMYKILRIVYGMLKNNKPFDPEIDRANRTKHNRVNNQNKPDYSRRYQPMDIKAPISRRQIKKRKEQEKSQIFKPLNAESTKEIFTGSDSHSFPIAYKEI

SEQ ID NO: 320678 - protein, 339 aa, unidentified
MTIKSKNIVQESKPPFAGIDVGAEELILLIRKNGTSCKTQKFANAPADRARLVKKLANLPGIIVCLEATGVYHFDLSVALHDAGVALMVVNPKSSHNFAKVLMKNSKTDAVDAETLAQYAERMDFVAWTRPSDEKIALRSFARRIDALTRQKAAAKNNLHALSQSQETPKSVLRDVKLAISQLERRINRLSGDALALIVEHPELERVFELLVGVKGIAQTSAIALMGELLLLPKGLSHREWVKFAGLDPRAFDSGKSVHKKTRISKAGNRHIRSALYMPALSAKQHDPHVKAYFQHLVDNGKLPLQALCAVMRKLLHAIHGMLKHDKPFDNTRFYAIPA

SEQ ID NO: 320679 - protein, 318 aa, unidentified
MMASPVVGMDVAKDRLDVAVRPSGETWSEPNDEAGISALVVRLRPLSPALIVCEATGGFERAAIAALAAAGLPVVVANPRQVRDFARATGQLAKTDQLDAGILALFAERVRPTPRPLADAAAQLLDAVLTRRRQLLEMLVAEKNRLGFAPKPLHRGIQAHIRWLERQLDDVTKELAGLIEASPVWRVKDDLLQSVPGVGPIVSSTLLGELPELGTLSHKQIAALVGVAPLARDSGTLRGKRLVWGGRASVRTALFMAAMCGRRWNPQLKVFYERLKAAGKPTKVALIACARKLLTILNAMVRQNTYWRGSSLKLQYSC

SEQ ID NO: 320680 - protein, 387 aa, unidentified
MQRPHDDSKVCRAVFVQDSTLVVVIEMSLTGWLVAGMIPGVSREPLKKIDPKPEELLQLLFRWRDEAIKAGKEITRIAVAYETGRDSFWLARWLRSRGIDAHVIHATSVAISREHRRAKTDRIDTAMLRRGFLGWLRGEPGHCSMAIVPTVAEEDAKRPHRERESLVQERTSTVNRMKSILIQFGVRNFNPVLRKASEKLDAVRTPEGIPLPPNAAAALQRHMERFRVIKEQIKAIERTRLQRLQRDPTDKMNAMVFLLVRIIGLGVETAEQLVHEILSRNLRDRKAVARYAGLTGAPDESGSKRREKGLSRSGNGRVRVILIQLSWRLLKLQPGSELVLWYKKRTADAKGSRKPMIVAFARKLIIALWRYVNTGLLPEGFELKAAA

SEQ ID NO: 320681 - protein, 320 aa, unidentified
MESDVLVTIGVDTHADFHVGVALDQRGGLLGELTLANDEGGYRRLLRWARGFGELAGVGAESTGSYGAGLSQFLRSEGVRVLEVNRVSRQHRRRHGKHDAGDAEAAARAVLSGEATGEPKAADGHVEMLRALKIARRSAVKAKTQAANQLYALVSTAPERLKADLRKLAAPRLAQKALGWDPTPAATLSVVAGDNPESLKSEAAFANLCGAAPIPASSGKVVRHRLNPHGNREANRALHVVALNRLRRDPRTPGIRRQAHRRGQEQARDHPLFEAFHSPGGLPSAARLPGSRVEATEPNLFCLTLLRIGDSTLLTQIVAS

SEQ ID NO: 320682 - protein, 343 aa, unidentified
MKLSRVGVDLAKNVYQLHGVDRYGKTVWKRRLRRGQWLQVLTDNVEPGCEIGMEACTGAHHWARVLQARGYTVRLIAPQFVKPYVKSNKNDANDAEAICEAMSRPHMRFVSVKTVEQQDIQATHRVREELKAHRNAKANQIRGLVAEYGLVTARTLLALRRAIPEWLEDAENGLTDSFRALLHGLWQDLLKLEDRLKELDKEIERLARSNEVAKRLQQLRGVGPLVATALVATVGDGQQYSKGRQMASALGLTPRQNSSGDKYRLFGISKRGDVYLRTQMIHGARAVVSQARHRDDPLSRWVTGIAKRRHPNVAAVALANKTARMAWAMLRNDTNYDPGLATS

SEQ ID NO: 320683 - protein, 343 aa, unidentified
MQDVATVGLDIAKQIFQAHGADASGETLFNTKIKRENVLEFFSKLKPCLIGMESCATSYYWARQLLEFGHDVRLIHTSYVKPFVKRGKTDANDAEAINVALTQKTMRFVPVKTLNQQAAITIFRTRSLFVSQRTQLVNALRGHLAEAGLIAAKGIQNYSKLVNLMETAADTVLPTVMKQALTDICDQIHRLNDLVTKLDKEIERRVRHDENACRLLTIPGVGPKTAMCVIATIPDIHRFPSGRHFSSWLGLTPRTHSSGGRSVLRRITKMGNSELRTMLYIGGTVIMMRDNKTPIGRWAARLRARRPYKVAVIAVANRIARIIWALLTNGGVYDPTYGREASA

SEQ ID NO: 320684 - protein, 330 aa, unidentified
MKITNVLGIDVSKNTLDCYLHVGQKQLDPVTNNIKGFKAISRWLKKSCKSELTELMVVMEYTGMYTYGIEHYLHQEGIQYVKRPALDIKRSLGMVRGKSDKADAKFISRYGWMRKEELVPMKPVDPTLLQIQQLMTYRDKLVGDKASLECRINELHGYMQSKLHYRIKESTDYVMAVMESEIKDIEKTIKEIVKANEAIHTNYELTSSVVGIGFATAIHFIIATENFTRFSDARKLICYCGVAPFKHESGTSIRRRTRVSHLANKKLKTLLTMGAICAVRFDPVLKAKYEQKLKEGKPKMSVYNIIRAKLIERIFTVVKRRSKYEIRLVA

SEQ ID NO: 320685 - protein, 356 aa, unidentified
MQTQVTKKIDFKGKDLYIGLDVHKKSWSVTILVEGMEHKTFTQPPDPLALYTYLQKMFPGGTYHSAYEAGFCGYGIHRELNDLGIKNIVINAADIPSSQKDQLQKRDPVDSRKIARALEKGLLRAIHIFDRDMEELRSLNRTRFYLMRDLRRSKNRIKSFLQYYSIPIPPEYDNNQWTLNFIDWLKQIQMKTLSGQDAFSNLISSYEYHRQQMLTLSRQIRVRIREYDNELYSLLKTISGIGPLTSSALITELGDINRFPHINHLSSFVGLVPRVKQSGETSYNGGMTFRCNEYLRTLLIESSWQAIRQDPALMQYYHQHIVNNKGQKVIVKVARKLLNRIRYVMKNRQPYVTGIA

SEQ ID NO: 320686 - protein, 356 aa, unidentified
MSREVKYIGMDVHKEAIVIAVRTTRGHVVMESIVETKASSILQFIHGLQGELHVTWEEGTWAAWLYDLLKPHVHQVLVCNPRRNALLKEGSKNDKVDAGKLADLLRTGMLRPVYHGEHGLRTLRELARTYQTLSQDLNRVMNRLKALYRGWGIACGGTQVYAPRYREEWLGKIEHAGVRRRAELLYQQLDGLQALRRTLRSELLTESRKHKATKLLRQIPCIGPIRAARLIALMQTPHRFRSKRQLWTYSGLGIETHDSAQYRFVRGELQRAKKPQQIRGLNRNHNHEMKDIFKGAANRASCGVGPLRDFYVALLAKGMKPEMARLTLARKIAAIALTLWKKEERFDAEQLKTQAA

SEQ ID NO: 320687 - protein, 491 aa, unidentified
MHNQSTIYSQQNPQLQQLFEQAGNSRKILCAPLDYAKAHHTTLFCNALGDILKKPFSVPNCAEGAQRLLEEVKKTAHHSGISLKHVFFGGEDLPSYAQNFVQRLHQEGYLVLRVNAWEAKRKRENYQASSDQLDLLGIAKALLDRRGQPAATSDSIHQNLREITRARRRFVHEQSGLKNRIHTYVDRLFPGFLGTSSPVGAFSKVSLQLMEKDFSAAQIASKKPSALTKRLQQYGQADAQETVRQLQTLAASALHCSLEQRLIWQHSLYCHVQLFNKVEELILTEAKEGAAWLAQSPGAFLTSIRGIGVVLAAGLTAELGHPWRGLSSLCSYCGIVPSSKQTGGPDQPAQTGHVRRRCNRIAKDWLVQSANKIGLLGPEELQQQYQQLKDNGQHADFVMAKRYLRIGKDLMHRQALYLPKALFQKESSAAERAAYYLKLWPTLLNKWRPLASPEIVFSAKNPLGQWRQMVQEAYNISLPLSAQPPQSDANQ

SEQ ID NO: 320688 - protein, 316 aa, unidentified
MTDLSTSFSYFLGCDVGKKDIVVFDGRDGKTSTIPNSPKALRALAAGLDQNGLVVCEATGGYETALLDAMLEAGIAAHRADARKVKAFIRSFGTRGKTDEIDARALAQYGLERAPKLVLWQKPGQSRQCLQSLVLTRADLVKDRVAHKNRLAAPGAGPVKVMLRALIKCLDQQIAAIEAKARALIAAHPELARDAASLRGIAGVGPTIATALLALMPELGTMNRREAAALAGFAPHPNQSGARDGYRKTRGGRPEVKTTLFMAALSAARGDGTLAQFYQRLVAGGKKKKVALVAVMRKIIVIANARLRENHQMQLS

SEQ ID NO: 320689 - protein, 333 aa, unidentified
MGFEPEPSKEGSWMMAQNGLVVAGIDVAKGKVDACIRALSQRRTFESTAEGRRQLISWLRKHKVTKVVMEASGGYEREWAKALRNARIEVRIVDPKRVRHFAQSAGRLAKNDAIDADTIAWFAETFGEAPGQAYDAEREKLLQIVNARRGLLETETMLANQGEHSVPDVVRKMQARLLKKIALEVAKLDAAIAAMIKATPHFARLAEIIESVPGLGEGASAGLIAGMPELGQVSNKVAAALLGVAPYDDDSGKRRGERQIKGGRRRIRNLFYMPCMGAATRHNPVLKAFYDRLIAKGKLKKVAIVACMRKLIVILNIMIARGEKWDAKRYALS

SEQ ID NO: 320690 - protein, 355 aa, unidentified
MLYLGIDQHARQITISLRDEAGDVLQARQVSTQPEKVKAFFEQLTREGLHDGASFVAVLEVCGFNDWLIRMLRDYRCHKVILIQPEDRKKCKTDRRDAAALSELLWVNRDRLLQGKPVRGLRQVDIASSSDQENRRLTTLRKEAGQARTRLVNQVRHLLRRHNLQWEMPTKRLPTQAALAWLKQVALPEIDRLEMDHLLADLERAQQRLKDLEGVIARRCGVSREAALIASMPGVGHFTATALACRVGRVERFPRAHSLANYWGLTPGCRNSGETTQRLGSITKAGSGMARWLLAQVTHKVLRKDARLREWFKRIKRRRGATIARVAVMRKLATIIWHMLSKRKTYAECRALAVG

SEQ ID NO: 320691 - protein, 348 aa, unidentified
MLADQLDYVVGVDPHRDSHALAVVQVLTGAVVFETTVAASSQGYVQALEVVDEHASGRRVFAVEGTGSFGAGLTRFLSGRGERVLEVSRLRRERCSGGKTDALDAVRAARSVLGQERPATPRAGGERQALQALVAAREGAVNAKCAGLAQLRDLLVTTPEPLRSELRPLTQAPLLRRLAATRPEGRRDPELRGSMLALRSVARRVLQLQAEQRELGRQIEALTRKLAPQLLDQPGVGPHAAAQLVLSWSHHGRIRSEAAFARLAGAAPIPASSGQTVRHRLDRSGDRKLNRALHLILVTRKRTHPPTRTYIERRIQEGKTRREANRCLKRYLARHLYRLLENQDPLMA

SEQ ID NO: 320692 - protein, 398 aa, unidentified
MTESSDYESVQVFIGVDVGKDTHHAVAINRSGKRLFDKALPNDENKLRSLISDLKQHGQILLVVDQPATIGALPVAVARSEGVLVGYLPGLAMRRIADLHAGEAKTDARDAAIIAEAARTLPHALRTLKLADEQIAELSMLCGFDDDLAAQTTQASNRIRGLLTQIHPALERVLGPRLDHPAVLDLLQRYPSPEKLASLSEKKLAAQLCKLAPRLGKRLAADIAQALAEQTVVVPGTNAAAVVLPRLALQLITLRKQRDEVALAVEQRVLAHPLYPVLTSMPGAGVRTAARLLTEVACRAFASAAHLAAYAGLAPVTRRSGSSIRGEHPSRRGNKALKRALFLSAFAALRDPLSRAYYTRKMSQGKRHNQALIALARRRCDVLFAMMRDGTFYTPQAS

SEQ ID NO: 320693 - protein, 343 aa, unidentified
MQVTTVGLDLAEHWFQVHGVDADGQVAVRRRLRRSEVVAFFGLLPPCLIGLEACATAHHWARELIALGHTVKLMPPAYVKAYVKRNKNDSADAEAICEAVSRPSMRFVPVKDVQQQSLLMLHRARSLLVRQRTMLANSLRAHMAEFGIIAPQGLRHVEGLIKYLAHEQERLPELARAILRMIVDQLHDTMGRVRQIELRLTKWHRQNRISQLLATVPGVGIMGATAIAATVADPCLFRSGREFAAWLGMTPRQNSTGGKERLGRTSKRGDKYIRGLLIAGAVAVLRHARNRTMKNATWLGSLLARKPAKLAAVALANKTARIVWAVLARGEGYRAKMAIGRTA

SEQ ID NO: 320694 - protein, 359 aa, unidentified
MFNSSTLFAGLDLGDRHSHVAILDQDGTLIEEARLPTTEAAFRRKFTSSPTCRIAMEVGAHSRWVSQLLHELGHEVLVANARKLRAIYNNPRKDDRADAETLARLARLDPALLSPIHHRSPQAQADLTVLRSRDALVRSRSLLINHARGMAKAAGARLPSCSSHGFAAKAAPAIPHALHPALLPILETIAALNHQIRDYDRLIEALCRDRYPEALILAQVSGVGPLTALAFILTLEDPTRFRKSREVGPALGLVPKRDQSGDRDPQLRTTKTGNAYLRRLLVNCAQYILGPFGPDCDLRRWGLRLAEHGGKAAKKKAVVAVARKLAILLHRLWVTGEVYLPSIPPGILTDYPASLSLAV

SEQ ID NO: 320695 - protein, 344 aa, unidentified
MGQIIRIGMDTSKYIFQLHGVDASEQVVLRKRLSRKAMLEFFAKLPPTVVVIEACGAAHYLARELRKLGHTAKLIAPQLAKPYVPRNKNDGRDAEGLCEAASRPRMRYVPVKTAEQQAALMLLGIREQLVVRRTQLSNTIRGHAAEFGLIQAKGLDKLAALLAAIERDERVPLLARELFAMLARQYDQVQAELKAIEAKLVAWHRADAISRRLAQIPGVGPITAAALVMKAPDPHAFRSGRLFAAWLGLTPKDHSTAGKTRLGKITRAGDETLRSLLVVGATSVVKQAQRGRGSHWLIALLRRTSPKHAAVALANKTARIAWKLMTTGESYDAARIETAMASAA

SEQ ID NO: 320696 - protein, 498 aa, unidentified
MRLWRTTWHENEVQKQYRWAGQPVIQATLDGDCLEVGTYSVTTQIPRRRLTRAGKGITFCRTRKREGRIAVSVTDLRRSNRLHYGGVMQTLVERGCGLDVHQATVVACLLIVLQNGKVQKQIRTFGTTTRELLSLREWLLSERCTHVAMESTGVYWKPIFAILEGAFEIVVANAQHVKKVPGRKTDVKDAEWIADLLCHGLLRSSFVPPKPIRELRDLTRYRRKLVESQTAERNRLLKLLETANIKLASVATDVFGVSGRLMLEALVEAKATPQEMAELAKGRLRQKIDELEPALEGKLEEHHRFLLRLQLQRLEAAEKDLAVLEQRIQERLKPYEAQLTLLDEIPGVDWTLAAVIIAEMGVDMSVFQSVSQAASWAGVCPGNNESAGKRKSSRIPKGNVYLKTALVEAASAAAKAKGTYLRDKFYRLKARRGYKRAAVAVAHKILVAIYHMLSHQVCYDELGDLYLDKLNKHHLTRNLVHRLERLGYNVTLEEKKAA

SEQ ID NO: 320697 - protein, 354 aa, unidentified
MTRTTKYVAFDVHQATTVTSVREASGRVLARSILETHGPSIVEFLCGMRGAIHVAFEEGTQAQWLHDLIAPLVHRVVVCDQRGQPRAGNKGDQSDADRLSELLRRGGLRAVYHGSAHHADLKELTRAYRSLVEDGTRVMLRLKALFRARAIRTPGTAVYQPRHRAQWLAQLLDHGARFRAEALYTELDVLRALRPKAKAAMLAEARQDPAWPVLRAIPFLGPVRVALLLATMQTPWRFRSKRNLWAYAGLAVVTRSSADYTLVAGQPVRRRRAPLTRGLNRNHNRVLKDVFKGAATAATARPGPLQDFYHAVIARGVREELARVTLTRKLAALTLRLWKKGERYDPTQLTIQAR

SEQ ID NO: 320698 - protein, 388 aa, unidentified
MPKPVDLSKSLAALDQDSTLIVVIEMSQSSWLVAARAPGLARDPLKKLPPDPEQLFKLIDRWREESRRAGRVVRRVCVAFEAGRDGFWLARLLAQHEIEVHVIHPTSIPVKRDHRRAKTDRLDTELLMRAFLGWLRGEADHCSMAAIPTLAEEDAKRPTRERESRVNARSRLVNRMKGALARLGIRGFNPKLRKAAEKLEELRTGAGEPLPPNTLAELRRDMAQLRFVADQIKQIEKAREARLEKAPREGAHPMVLMLASIKGVGLETAEMLVAEVLSRKLRDRRAVARYGGLTGSPDESGSRSREKGLARSGNARVRRGMIQLAWRFLMFQKESALAKWFEARTANGPRGGRKTMIVALARKLLIDLWRFVEDGTVLVGVELFDSRA

SEQ ID NO: 320699 - protein, 317 aa, unidentified
MTRIICGVDVASKKLDARIGREGPFATFANDAEGVGALAEFCRRHGASLVVMEATGGYEKLAFAQLWGLGLQAGVVNPRNVRDFAKAVGRLEKTDKIDAGVIAWFAEVKDIRPAPPANPAQQRLSALVVRLGQLTTLRTAQNQQRRGVKDAVILATISRVLAVVARQIRALEAEIVKQIDADPLWKTLDATFRTIKGVGDRTVARIMAQVPEIGRIAGKAVSKLIGVAPLARDSGDAKGKRPIRGGRADVRALLFVVGGLVAKHEPEFTAFRDRLLAAGKPKMVVRIALAHKLLVRLNAKARDARAEHARRQEAPAA

SEQ ID NO: 320700 - protein, 343 aa, unidentified
MQSISTIGLDIAKSVFQVHGVDAAGQVVVRRQLRRRHVLAFFQKLRPCLVGIEACASSHHWSRELQALGHTVRLMPPAYVKPYVKRQKNDSTDAEAICEAVTRPNMRFVPTKTVEQQGCLMLHRARHLFIRQQTAVINSIRAYLAEFGIVAPVGRRDVEQLLEVVADTADRRLPEVARACLAALSTQLRALKAQILEFDRRIIAWHRSSATSKRLDAIPGVGPALATALVASIADPNAFRSGRDFSAWVGLVPKQNSSAGKDKLGSISKQGDRYLRSLFTAGALAVIRYAKIHGTDHRPWLTRLLARRPTKVAAIALANKLARMAWAMMARNECYNEPAALAA

SEQ ID NO: 320701 - protein, 347 aa, unidentified
MSFIGVDLHTNSITVCRREEDGSEAFATYTLSPEDLGAFCLTLDADDHIAFEATGNSAWFRDQVRPCVGRVVVVNPAQFKVIRSSVKKTDRNDAAALALFLAKDMLPETRGKTQAEAELASLVHTRDLLVKQRTRLINKLHALFNRRGIKLKRESLGSKRALEAVDLGACSTCEAIELAVLRDQALGLTAALTRLDRDIEAIVRDFAGYEQLTSIKGVGPRSAAVLLPAIGDVSDFASADKLAAYFGIVPRVRQSNETETHGRITKRGNALARTTLVQCTLIALRYSPYLKSFYARIRERRGHGKAIIATARKLLAIIYDTLKHGWVFNDFTTFSRSAPALAAGQSS

SEQ ID NO: 320702 - protein, 409 aa, unidentified
MDIMYERCCGLDVHKQTVVACVLVPGSGRQPAKEIRTFGTMTADILELGDWLEAKGVTHMALESTGVYWHPVWNLLEGKLELLLVNAQHIKQVPGRKTDVRDCEWIANLLRHGLLRASFVPERAQRELRELTRYRTSLIRERAAEINRIQKTLEGANIKLGDVASDILGVSARRMLEALIGGTTDPAVLADLAKDKLRRKIPQLERALKGQFGAHQRFLLAQQFAHLDGMDELIESLGVEIAERVRPVEHVVERVDAIPGFGRRTAEIVIAEIGTDLSRFPSFKHLASWVGLCPGNNESAGKRMSGKTRRGDVWLRSALIEAAHAASRSKDTYLAAHYHRIAARRGKKKAIVALAHTLLTIIYYLLTRDCDYADLGPDYLNERDREQTEHRLIRRLQGFGYTVTRETAA

SEQ ID NO: 320703 - protein, 452 aa, unidentified
MKALPVLDPKAAAIDVGSEKLHVSIAGDTPQVFGTFTSEVERLRDWFGQQGVHTVAMEATGVYWLYLYEVLEAAGLEMMVVNGRHVQNVPGRKTDMADCQWLATLHAHGLLRGGFVPAADIRQLQDYQRLRSDHITGGAAQIQKMQQALERMNIKFHDVISDLVGVSGLRVVRAILKGERRPGELLKLCDEQIQKKKSDRVKESLRGCWKKEHLFALRQALELWETYQQKIADCDREMETLLGEMAGGQPPSAGPGTSLPARGSLMGPVELAPAKGTGKNAPAIARLQELVARLCSGRDATQIPGLSVYLVLQLISEVGTDMTRWDSEKHFASWLGLAGGHKQSGKRKGSIKAHRNRAGRLFCLAARALAQTVDKALGGFYRRLRGRVGGLAANVALARKLALLFYRLLRYGMDYVEKGLQAYEAKVVETEARLLRKLAKKQGFILMPASAN

SEQ ID NO: 320704 - protein, 358 aa, unidentified
MRIIGVDLHARQQTIAMLDPETGELVEKTLKHEGETVREFYSALPHPVLVGIEATGSMYWFLELLEELGIERQVGHPTEIRAAEPRKQKHDRRDAALLLKLQVENRFPSIWMPSAELRDLRALLRHRHQWVRMRTRVQNTLQAIALSHGLRRGQSLWSQAGQQAIASLPLAPHAAHRRTELQALYCKLGKQIDELGERVMEQALQRPGAKLLMTHPGVGPVTALATDVFLGDPARFDDGKAVVSYVGMIPSEYSSGGRQRLGGLSKQGNPLLRFLWCEAGIHAVRRDPELKRFYRRKLQQKGLGKTRVAVARKLGIRLWIMLRDQIDYQEFCRRGQMRQKSGGARAGMPEGVHSPARS

SEQ ID NO: 320705 - protein, 461 aa, unidentified
MPKQDSKRKAQRGKRSQDWEALPPLHQNAAGIDVGNAEHYVAVPAGRDAEPVQKFGSFTADLHRLARWLKVCGIQTVAMQATGVYWVGLYQILEDHGLEVNVVNAHHTKTLPGRKTDVLECQWLQKLHTFGLLNNSFQPAEEIWVLRTYMRQREKLVAGASTCIQHIQKALTEMNIQLANVISDISGMTGMAILRAIVSGERNPQALARLKGERIQASREEIAQSLEGTWRPELLFVLEQSLALYDLYQQKIADCTLRIETHLKSMESKTTTEQPPPRGRHERSHRKQMPWLDLGAQLYRIAGVDLTQIDGIQVQTAQTVISEVGVDMSRWRTEKQFTSWLGLCPDNRISGGKVLKRGTRHVVNRAATALRMAAWSLFRSQSALGANFRRLRRKLGAPKAVTAMAHKLARLVYRMLKFGQAYVDKGMEHYEAKYRQNQIKWLAKSASALNLQLTPLAGVVD

SEQ ID NO: 320706 - protein, 390 aa, unidentified
MLDSSGNSISKFSVPNNQPGAKTLVSKIVSAMTSNRFDSLVIGLEATSVYGEPLVLFLKQDADISPFRPRIHVLNPKQVNAFKKAFLDLPKTDDVDAWIIAENLRFGRINQEVYMDDRILALRKLTRARYYTARNLTREKNYFLNTLFLKFSSLAQEKIFADRFGATSLAIVEEFLSVDEIAYMPIEELSAFVNEKGKGKFGTPEDIAKLIQKAARSSYRLPKTVNDSVSQILAISLVSIRTLKDQLKLFDKAIEEQMKVIPNTLTSVKGIGPVYAAGIIAEIGDIHRFKNQAALAKFAGICWSKYQSGKYTADNTHLISSGNRYLRYYLMEAANKVRMHDPEFKRFYELKYRETPKTPHKRALALTARKLVRLVYALLHDNRLYIPPKE

SEQ ID NO: 320707 - protein, 336 aa, unidentified
MSQYIWVGLDVHIDSITAAILEEDSNDAEVFKMSGDLMKVRRLFRRLSEKAPVRACYEASCAGYVLHRVLKRDGFHCDIIAPSLIPRKLGEHRKTDRLGAVMLVKLYRSGHLTPIHVPAEDHEAVRQLIRLRYSYQEQCKSTKCRICSILLAHGLIYRDGKSLWTKKHKQWLTELRHKLEGPLQTALTAELEHLEYLEMHRNALDRDIDMFSQQPPYNKYVDALCCLRGVKTLTAMTLLCEIDDIHRFRSPRALMAYFGLVPSEHSSGSRERKGPITKAGNGYARRILVEAAWNNRHNAGADLILNRRRQGQPPEIVAIALAQVRHEAGWKSGKSL

SEQ ID NO: 320708 - protein, 422 aa, unidentified
MSCLPALAGVCPTQREVRRDITILADSTLIVAGADTHADTIHVAAISMTGATIGDREFPTTAAGYTAAIRFLTSLGQVEFVGVEGTASYGAGFTRALTTAGIEVAEVTRAVKSTRRLKGKSDPLDAYSAARTALAGDGLAAPKDDATAGLRALHIARRSAVKHRTAVINQLKAMLVSAPDAVREKYRGLTTLKLVEAIARCRPDAQAEPWAQSVLVAAKLLAQRVQFLEIQAEALEAQIDTLVTAANPGLRAAYGVGADTAAQLLITAGANAHRLHSEAAFAALCGAAPVPASSGKTNRHRLSRGGDRAANNALFRIALVRMSHHQPTKSYVQRQQALGHTRMEILRKLKRAIAREIFKLLTRQIAVPDYADLRPARQAKNITVTAAANHFGLWPTVISRIERGLQRDDAFADTYRNWLQAA

SEQ ID NO: 320709 - protein, 405 aa, unidentified
MVVSDRFAGVDWASEEHAVCVVDERGRILEGRRYRHNESGIRALCAKLGRLRVALVALERPDGLLIERLLDAGLAVIAVHPNQVKANRPRYSVAGGKSDSFDSFVLAELARTDRHRFRVLEPDSDQTKALRAMTRARDSLVRTRIGLANQLRDQLATFWPGASKVFCSVDTQIALAFLRRYPTPADARGLGEQRLQAFLKRHGYPGRKPARELLTRLRDGAEGRASELETQARRQIVLALVSALEPIVARISELTIEIRHALEAHADGPTFRSLFIAQDSWLCAATMLSEIGDCRERYPTYRALAADAGQCPVAVESGKSKHAQFRWACDHRLRDAFDKLADSSRRHNPWAADIYDRARARGASHPHAARILGRAWCQVIWRLWQDHDTYNPAKHTARQRLTAAA

SEQ ID NO: 320710 - protein, 354 aa, unidentified
MNNVKYIGLDAHLSTISVAVLDEQGKSVMASVLPTHSAAILDFIHGLRGTLYVTFQEGTQSAWLYDLLVRKVHKVVVCNPRKNALLKAGNKSDAVDARKLAELLRAGLLSPVYHGETSTVTVKHLGRSYESLTQDSTRVMSRLKALYRGQAIPSAGQRPYGRRREEWLGKLGGAGLQSRAQRLYQQLDVLQALRREARQELMQECRKHAAAGLLRSIPFLGPIRAGLLIGRVQTPHRFRTKRQFWAYCGLALETRSSADYRFVNGQLERTRKAAWIRGLNLNHNHDLKNLFKSATTTASARPGPFGSFYQGLLAKGMLPAMARLTLARKMAAITLSVWKKGERFDAQLLKAPAA

SEQ ID NO: 320711 - protein, 411 aa, unidentified
MDTLVERCGGLDVHKAQVTATVRIDERGGQREQHTQTFATTTRGLLALVDWLASWRVTRVGMEATGVYWKPVYYQLEDAFETWLLNAQHLRNVPGRKTDVADSVWIAQLVAHGLVRPSFVPPAPIRELRDLTRYRKSITEERTRAVQRLDKVLQDAGIKLTSVASETLGVSARLMLEALIAGTHDPDVLAELARGRLRAKLPALREALEGHFRTAHHGLMIAQVLAHVDFLDESVATLSARVEQVIAPFSQQVQLLCTIPGVGQRTAEAIIAEIGVDMTRFPTAAHLASWAGMCPGNNESAGKRKTGRTRKGDPWLRKALTEAAKAAARSNDTYLSAQYHRLRGRKGPAKATGAVRHSILVAAWHILHKQVPYTELGGDYFDRRRDPERETRALVRKLQRLGHTVTLADAA

SEQ ID NO: 320712 - protein, 428 aa, unidentified
MSGRGTVEQESEFVAWVGIDWADQKHVWCLQAANSARRENGELEHKPEVVEAWVSELCQRFGHGPIAVAVEQVKGALVYMLHKYECLHLYPVPSTMTAKMREALYPSGAKDDPRDADLLLDLLLQHRDKLRRLTPDNEATRRVQNLVEERRKLVEEKTAQLNRLIGYLKVYFPQMLGWFAKLDTRLVCDLLERWPSLEELQAVPPGEVKKFFRHRRGRHGELTEWRMQEIGQAMPAIRDRAVIEAKRTVVLVIAQLLRTLLEGIATLDRKIAEAAEVHPDYFIFQSLPGAGAALAPRLLAALGSQRDRYASAEEVQKYSGIAPVTERSGKKKWVHFRWACPKFLRQSFHEWAGHSIAQSVWARAYYQQQRQRGKDHHAVVRALAFKWIRIVFRCWQDGVAYDESRYLAALAKRGSHLISTCAAAAVSM

SEQ ID NO: 320713 - protein, 360 aa, unidentified
MRYSTIVGIDTHSKKNAVCAIVPATGEMREAVLSEDPGQLLSWISGQGFPEPVGCVYESGPTGFGLARALEAGGVACTVAATSKLSYRVDRQKNDRADAKWLARQMLAGGVRAVRVPTPEEESLCHLSRLRGEVAADLRKAKQRVSSFLLLTGTEYTLTKKKWSKTFRKWAASCEFDQPADTFAFRCKMSAVLRLEERLAEVEAEILRIVASSPKLSERMSRLTCIHGVGKVSAFSLVCEVHDFDRFNNGASFASYLGLVPSENSSGKKVSRGAIAKQGNSHLRRILVEAASCYSKPFKAVRSEDAAVPEAVRAKAEKCAARLRKRRAALKKRGVSANKAKVAVARELAEWIYHIAVMPA

SEQ ID NO: 320714 - protein, 451 aa, unidentified
MGRKKKLKLEIVNPNAAGIDVGSRSHFVSIGQNLDEVKEFGVYAEDLKALSYWLLENNIDTVAIESTGDYWQNLHAQLLEDGIEVVLVNGKFTKNIKGKKTDVLDCMWIQKMHALGLLSGSFLPDEVTMQLRTYCRQRLNMLRSSSQASAKMQKYLKFLNFRLDVVVSDVCGLTGLKIITAICAGNLDPKELAKLRHYNCRKSEEEIEKALHGNNRKEYLFGLSQEFESYKFFKKKIEECEEKIKEFLETYFLSQEFPIDEMPSKKPYKRVNKNAPKNIDLNVASYQYFGGVDLMAIEGVSHATLLTLMSEIGPDGIKKFATAKQFASWLRLAPNNKISGGKTLSNRTPRGSGRLKIALRNAANAIGNLREGQLAKFFKRIAYKKGRQIAITATARKLAIIIWKMVTNKEEYKPTESHMFLDEKRKLGIVKRMKKKIAKLGITNEDLGLAT

SEQ ID NO: 320715 - protein, 404 aa, unidentified
MKERIPHGWAGIDVGKGHHWLCLIDEGGTALWSTKVVNDEAAILDAIDGVLARADEVVWGIDVTGTMSGLLLALLAAHGQLVRYVPGRTVNQMAVAYRGEAKTDARDAYVIAETLRHRGDLATVEVAPAVVTELRLLVTHRSDLVGDRVRMVNRLRDVLSGYFPALERSFDYAHSRGALTLLTGYQTPQAIRRTGESRLRGWLVKRKVRSAEQIAAAAVVAAKTQYTDVAGQDVAASIVADLATQLLAIGSRITDLDARITTTFRSHPQAEIIESLPGMGPILGAELIAAAGDLNGYANAGRLASAAGLVPVPKDSGRRTGNLHRPQRYSRKLRRVFYLSASAAMMREGPNRDYYLKKREQGHRHVQALIALARRRVDVLWALLRDNRLFEPAPPKSEPMPQTA

SEQ ID NO: 320716 - protein, 323 aa, unidentified
MIKNIKYFGIDISYLVFDVTDSNGNYYQFKNNASGFKKFTKLLDNNSHCVMEATGYYHYQLAYHLLEFGIKVSVENPLSVKRFIQMKLSKIKTDKSDSKLICEYAQKVDLKLWKGNTKDEMECLQITRALSVYTKQSTMLKNKLHGEAVLGAPSKAVVRSLKRSLTQLKKEMKALENKLLVLVKRAHQDLLTRLKTIPGIGPKTSIMLVVLTGGFDRFTSAAELCSYAGLTPVIRQSGSSVKGRPRISKIGNQKLRNLLFMCSFNACKYNKACRDLYERIVAKGKSKKLALIELCNKLLKQAFAIAKSGLIYDKEYKSTLVRN

SEQ ID NO: 320717 - protein, 457 aa, unidentified
MSKRKKKVQSQSFNLQSLPKQLQHINLNAAGIDIGSEHHMVAVPEGRAEVAVREFSTFTADLNALADWLQQCGVTTVAMESTGVYWIPLFELLERRSFEVKLVDARHVKNVTGRKSDILDCQWIQQLHTYGLLAGAFRPADEICVLRSYLRQREMLTQTASMHIQHMQKALQQMNLLLHNVVSDITGVTGMKIIKELLAGERDPRVLASNRNKQCHNDRATIAKSLVGNYREEHLFALRQAVDLYEIYQTKIGDCDEAIVKQLSAQPDVKDEPPPPGQKLTPARDRQRGGVNVRDLLFKKSGVDLFAIPGLGADTLLVLTSEVGFDLSPWKTVKHFSSWLSLCPGTKISGGKVLSRKVKRNPNRAAQAFRMAAATLARSQSALGAFYRRVKSRTGGKQAITATAHKIARIYYALLTQGTTYVEMGQKAYEQKYQERRLKHLTTQAKSLGFQLVPSTT

SEQ ID NO: 320718 - protein, 351 aa, unidentified
MGKVYIGIDLAAKYCWGATRDRQGELRSVERFKTSEENLIAYVKNQEGEATVLLEECDMAGWAQRILIPHVEVVAVCEPRANLYIHRDAVKTDKIDAKKLAEIAWMGNWRPVYHTADESIYHLHLAVKAYDRLVRRTTGLKNQIKAKLRGEGIITEGARVFGKRGRQEALALVPSPALREIIASDYELLDFLLKEQAKAKGRFVRLGKEIPIVRAFQEIPGVGPVGAAKFCAYVKCPHRFSDQRKLWRYSRLGITACETGGKSIRRQHLDRAGNGCLKDVSRKAFQAAMRTRGDNLVKRAYARALANTGSEVHARLTVQRKILAIMWAMWRCGTPYDDNHDLNTRGLKARL

SEQ ID NO: 320719 - protein, 342 aa, unidentified
MQWTVAIGIDTHKHAHVAVALDRLGAQLDVFEGPATSAGYLALYRWAQELGEPAFALEGAGSYGAGLARFLQAAGCSVNECERPRRAERRRGKNDLIDALIAARRLLAGERLGSPRGLSGPREDLRLLLLERRGAIRARTATLNQLQAVVVTAPERLRSRLGDRTSEQLARAVARLRPGEGEQAVVRGVLRRLGRRVLSLDAELAELDRELEAIVSALVPELIAECGVGPVCAAQLVVSSGDPARMASEASFAALAGTSPVDASSGQQQRHRLNRGGDRQLNRALHVIALTRVRYHGETAAYYQRLVASGKTTREARRCVKRMLARYFHRKLCSMPALALTT

SEQ ID NO: 320720 - protein, 343 aa, unidentified
MKTIATIGLDIAKSVFQVHGIDAEGKVAVRKQLKRARVLPFFQKLAPCIVGIEACASSHYWSRELQALGHTVKLMPPAYVKPYVKRQKNDAADAEAICEAVQRPNMRFVPTKTAEQQSCLMLHRARHLFIRQQTAVINSIRAYLAELGIVAPVGRKGVEELLCAVAEPKDERIPDITRECIEALGALLFKLKAQILEFDRRINAWHRSNETSRRLDEIPGVGPALATALVATVADPKAFRSGRDFSAWIGLVPKQNSSGGKERLGNITKQGERYLRSLFCAGALSVIRIAKIRGTKHRPWLAKLLSTKPTKVAAIALANKLARMAWALMAKGTNYKEPIAMAR

SEQ ID NO: 320721 - protein, 462 aa, unidentified
MARRTAKRRAPSARKAAGSLPITNPNAAAIDVHSDNHVVCVPADRATPNVRTFGANSCDLLQIAAWLKQCRITTVAIESTGIYWIPLFELLEAQGFEVCLIEPGQASRCGARPKSDVLDAQWLQRLHSHGLLIGSFRPPDVVIALRAYLRQRLMLVSLASMHIQHMQKALEQMNVKLTEVVSSIVGLTGTLIITAILDGERDPARLAALRDERCKNDEAVIAQALEGTWRDEHRFELRQAYELYQTYQTKVTQCDTQIEQALAKLPDRSAGAKLPPKVKKCNRKPNTLRFEATKPVFRALGVDLTAIEGIEAHTALVILSEIGVDVSKFPTAKHFASWLGLCPNHQDSNGKRKSRRVRKGKNRVAIALRLAARSLQRSQSALGAYFRRMNSRLGFKGATTATAHKLARYVYAMLKHGEAYVSQSLQDYEAATQERIERTLRKKASALGYDLVPRQPISPAVS

SEQ ID NO: 320722 - protein, 384 aa, unidentified
MTEQSAAATTFDHNSTLVLALELSGKGWQVGAVLPGVARRPRRSVAPRDVAGLLAQIERWKAEAQRAGRTVLRTVLAYEAGRDGFWIARCLLAHGIEVQIMHPASIPVERRGRRAKTDRIDLDMLLRTLLAWLRGEPRVCSMVRIPSETEEDMRRPERERERLVSERIALENRIENLLCLHGIAGFKPRLKKAAERLDGLRSFAGAPLPPMLLEELNRLMTRHRLLSEQLREIEAAREQAALAAEPDCAVQQIQMLARLVGLGLATASGLTREVFCRSFADRRAIAGFVGLTGTPFNSGGSEREQGISKAGNPRVRRILLQLAWRWLRFQPDSALSCWFVERTGGAKGRIRKIMVVALARKLLVALWRYVETGEVPAGARLAAA

SEQ ID NO: 320723 - protein, 345 aa, unidentified
MAEVSTIGLDIAKTVFHAHGADARGQMVFSRRLTRAKLLEFFAAQPRCVVALEACGGAHHWAREITSLGHEVKLIPPAYVKPFVKRNKNDAVDAEAICEAAQRPSMRYAAIKTEAQQAAGMVFRTRDLLVRQRTQLINAIRGHLTEFGWVAPKGPSHVSVLASLLEEGEEIGASLPEAARAMFLVMTGQLEHLNEQVALLDKEIARRAREDEAARRLMTIPGIGPITATALLALAPPAEGFARGRDFAAWLGLTPRQHSSGGKERLGSISRMGERTLRRLLIIGSSAVVLQASKRGAPRGSWLEQMLARKPRMLVTVALANKTARIIWAVLMKGEDYRAPVAAAA

SEQ ID NO: 320724 - protein, 367 aa, unidentified
MLADQADHVFGVDTHRDSHSAALLAAQTAVVEGQITVSADEQGYRQLLAFARECAPGRRAWAIEGTGSYGAGLAAFLAGEGERVIEVDRPRRPGRRGRSKSDELDAIRAAREALARKHLAQPRLRGDREALRVLLATRESALRSRHQALSLLKGLIVSAPGSVREGLRHLPTKAQLSRCAGLRVSTAHDVERRATVIALRSSARRVLALDGEALELQREIELIIARVAPALIQERGVGPITGAQIFNAYSHPGRFRSEAAFAALAGVSPIPASSGQTVRHRLNRGGDRQLNRALHTVVMCRMREDPRTLAYTARRQAEGRSSREIKRCLKRYTARHLYRTLQATTPNPATTLSRTGSGGGRVSRFSR

SEQ ID NO: 320725 - protein, 419 aa, unidentified
MESEKIDYAAWIGLDWGSQKHALCLKAADSEAVEHYTLEQKPEILHSWFMNLIGRFGGRNLAIAIEQTRGAVIHFLLGLACVHIFTIHPKSLKNYRDAIHPSGAKDDPTDAELLLQFLMLHQDRLKAWTPDAPNVRLLLRLVEFRRKMVGKRIRLTNELTQLLKEYFPAALDCAGDLERVMACDFLLKWPTLEKLQKSHPETIRKFYQEHGSRHHNVIEDRLKRIRSALPLTTDAPVIEPSVLLVQSIAPQLHSAIDAIAQFDQRIKEVFERHPDAPIFSSFPGAGSILAPRLLAAIGSDRNRFGSSLEVAAYSGIAPVTERSGKSKWVHRRFACPQFVKQSFHEFSAHSILYCNWARCYYDQKRREGKSHHSALRALAYRWIRIIYRCWKDRIPYDEGKYVKALEQRKPEWMQSFGGS

SEQ ID NO: 320726 - protein, 358 aa, unidentified
MQIIGCDLHARQQTVAMLDTDSGELVEKTLEHDGEELRKFYSELSRPVVVGIEATGAMQWFLEWMEELGIECRVGDPAKIRAAEPRKQKNDRRDAQLLLKLLSENRFPTIWMPSTEQRDLRTLLRHRHQWVRMRARLQHTLQSMALNHGLRRGHSLWNQAGQQALRALPLAPHASERRKALMTLYPSLQESIDKLDREVSQQAQNHPQARRLMTHPGVGPITALATEVFLGDPLRFTDGKAVASYIGMIPREHSSGGRQRLGAMSKQGNTLLRYLWCEAAMHAVGRDPELKRFYRRKLVQKGLGKARVSAARKLGIRLWIMMRDQIDYQEFCRRGKARQESGSVYAGMSDITNGPAEA

SEQ ID NO: 320727 - protein, 326 aa, unidentified
MAIVTIGIDLAKNVFAVHGVGSTGKAELIRPEVRRSKLLELVASQPPCLIGMETCSGAHHWAREFEKHGHTVRLMAPKFVAPYRMSGKRGKNDANDAAAICEAATRPNMRFVPIKSIEQQAELFVHRARQGFIEERTALINRIRGLLSELGIVLPLKAAAMRREIHKVLEDLPGWCNTVIGDLFSHLSRLDERTAEYDKHLGQIAQKDERARQLMKLTGVGPMTASAIVASVGNGHDFKNSRQFSAWLGLTPGQLSSGGKSRLGSITKAGDKYIRTLLVMGARSLLMKAANHTDPVSRWALKLKERRGFGRASMCVSHRSCHTDQS

SEQ ID NO: 320728 - protein, 311 aa, unidentified
MESITVVGIDVSKDRLDVAVRPSGEAFAVERNGAGLEQLTIRLRELAPQVIALEATGGFETIAAAALAAARLPVVVVNPAQIRAFAKAIGQRAKTDPIDAAAIAHFAEATKPVPRPLPDDATRLLSDLVARRRQIIEMIGAERQREQRVTVPRLRRSITRLIKALEKELASLNTDIDDAVRGSPAWREKENLLSSVPGVGPVISSTLIAELPELGQLGRREIAALAGLAPFTRQSGKWRGKSFIGGGRVAVRTVLFMGAIVAKRHNPVLKAFFDRLIAAGKPKMVALIAVARKLLTILNAIIRDDRPWQTA

SEQ ID NO: 320729 - protein, 313 aa, unidentified
MDALIVGIDVAKDKLDVAVRPSGERFVVSRDEAGLAELRDRLGKLQVALVGLEATGGYETVVAASLSAAGLPVVVVNPAQVRAFAKALGKRAKTDPIDAAVIAHFVEATKPDVRPLPDEATRQLSDLVTRRSQILAMIVAEQQRKSHRPNKRMLASIERLLAALQKELSDLDGQIRETIKASPVWREKDKLLESVPGVGPAISGRLLAEMPELGSLGRRQVASLGGLAPWTRQSGQWKGKSFIGGGRAGVRSALFMGAMVAARHNPPLKAFYQRLIAAGKEKMVALVAVARKLLTILNAILRDGEPWREQPHA

SEQ ID NO: 320730 - protein, 351 aa, unidentified
MPRTTTVHAVTAIGIDMGKNTLHMIGLDSRGAIVLREKVSRGRITSRLANLPACLIGIEAGMATHYVARELAALGHEVKQVPPAYAKPFRQGQKNDFRDAHAVAEAVQRPTTRFVPAKTNDQLDLQALHRVRSRLVSERTAVINQIRGFLLERGIIIRQGLRFLRQALPDILAKRTDVLSPRMVRIVADLASDWRQLDERIEPVTDEIETLAKSDDSCRRVMTVPGIGPIISSAMVAAIGSGAAFARGRDFSAWIGLVPKQMSTGDRTILGRITKRGNGYLRMLFMQAARVTLLRPGSWPKHSFGVWLARAAQRLHPNVLAAALANKLARIAWTVLAQERSYEARVTKPAA

SEQ ID NO: 320731 - protein, 330 aa, unidentified
MNYFYVGLDISKDTFDASFWDQSKQLPTSISPFKNDLDGIDKLVEAIKSLENNLPIWVCFENTGAYHLLVEQQLHLLNIKYSVVPALEIKRSLGITRGKNDKIDANRISQYAATSAHKLKSTKPKDHKLHIISSLLSSRNLLVRNNTSYKNHLKSLTITAQCISLQSSIDRLELLINTLSKEIKAIEKEIKDQIYSCEDLKKTYKQITSIPGIGPLTASTTLVHTDNFQLFHNHKKFSSFCGVAPFEYSSGTSIKGKTRTSSLRNKELKKLFFTAALSAIKYDRQIATYYARKINQGKHKLSVRNAVASKLIARMFAVAKRDQPYVKLAF

SEQ ID NO: 320732 - protein, 434 aa, unidentified
MTLINFVAANQKYYTFNLLSVFIMVLWSVQYLLQHLLVQTQLSDQLLQPLIFILQLPQTPQFRHARPGKFFLPVNGMDYLLPLRLTVRNVLTRRITMNIVFLGIDLAKNVFQLCGLNQAGKPVYTKRTGRKELLQTLANIPACLIGIEASTGAFYWQREFEKLGHKVKVISPQYVKPFVRGQKNDGNDAQAIAVALMQPTMQFVPPKSPEQQDIQALHRARQRIVNHRTATVCQIRGLLLDRGIPIGSAVSRARRAIPLILEDTENGLSSRMRRTIAELYDLFNDLGRRIHFFDKEIETVFRQSEACQHIAKVKGIGPKTATAVVAAIGKGTEFKNGRHFAAWLGLVPRQHSSGDRQVLMNMTKKGDKHLRTLFIHGARAVVRVATNNNDGHMNQWVNQLKERRGFNKTTVAVANKNARIIWSMLRNETEYQVV

SEQ ID NO: 320733 - protein, 419 aa, unidentified
MDVLFERCAGLDVHKDTVVACVRTPDGDGGRAQEVRTFGTMTIELLALRDWLVAHQVSLVGMESTGIYWRPVFYVLEDAMECWLLNAQHMHNLPGRKTDVADAAWIAQLVEHGMVRPSFVPPPEVRELRTLTRYRKTQIEERSRQAQRLDKVLQDAGIKLSSVATDILGVSGREMLAGLIAGTRDSAVLADLARGRLRAKIPALTQALIGRFGPTHAVVVGEILAHLDYLEEAIARVSARIEEVIAPFALERDLLTTIPGIDVRLAEGIIGEIGVDMTRFVTAERLASWAGMCPGQHESAGKSRSGRSRRGDSWLQRHLTVAAMAASRSKNTYPAAQYGRLVKRRGKRRARKAVGHSLLVATFHVLAAHQPYQDLGADYFIRRHDPARRARRSLNDLRTLGWSVLETSNGVVCTPPEAA

SEQ ID NO: 320734 - protein, 318 aa, unidentified
MTAAEPTAPPITIGIDISKATLDVHFAPANKNLRLPNTPRGHAQLIRAVNGRAVAACVFEATGRYGRDLHRALHDAGLPAIQVNPRQAAFFLKSHNPSHKTDRSDAQALAAMATALPLRVTPPPTAEQEVLRELTSVRMSLVRDRAALREQLKAAVTDIAKNALESVVKTVDAEIAALERKIRESVESNPRFKAMAALIQTVPGIGEHCAHALLAFLPELGSLTGKQIAALVGVAPRARDSGSFKGKRSIHGGRAELRTALYMAALTAMRCNPAIRDWIEKNGKAAKPHKVIRIAVVRKLAVIINAMVKNNTPWHYRP

SEQ ID NO: 320735 - protein, 418 aa, unidentified
MKSASTTVNTALPDEPPNGVTGGLDWSRDDHAVSVINDRGRELVRHTAEHTADGLRQLVAVLVGAGCREVAIERPDGPVVDALLGAGLTVVVINPNKVKNLRARYGSAGNKDDRFDAFVLADTLRTDRARLRPLIPDTPPTLALRRAVRARRDLVIHRVGLANQLRDHLKRVFPGAVGLFADIDSAISLAFLTRFTTQQQADWLTPARLGSWLSKQGYSGKIDAAVLHARLLAAPRGPVGVDGQAHAAITRGFVTVLLVLLEQIKALTAEIETQLAAHADAHIFTSLPRAGKIRAARMLAEIGDCRAKFPTRESLTCLAGVTPSTRQSGKSHVVAFRWACDKQLRDAVCDFAGDTRRANPWAADLYNRARSRGHDHPHAVRILARAWIRVIWRCWLDGVPYDPAKHGAAAALNEPKAA

SEQ ID NO: 320736 - protein, 344 aa, unidentified
MKHYAGLDVSVKETSVCIIDEAGKTTREVKVASEPEAILAILMNEALTIERVGLEAGPLSQWLYSGLAETGLPVICVETRHMKAALSAQLNKSDRNDARGIAHMMRVGLYRPVHVKTLASQKRRMLLTSRQLLQAKALDIENDLRGTLGNFGLKVGMVGVAKFEARIRDLVVDHPDLAAITEPLLIARRVLREQLGVLHRRLLAVVRQDEVCRRLMTVPGVGPVVALTFRATVDVAARFKNSKAVGAVFGLMPRRHQSGEIDRMGSISKSGDAMVRTVLFGAAQVMLTRTIRWSWLKAWGMKIARHRGMKRAIVAVARRMAVIMHRMWADGSEFGWTNPSTPAA

SEQ ID NO: 320737 - protein, 664 aa, unidentified
MSRSCQNRRRAAARTATNQDAGCAVHTAAMPTEGPVPSTTDPRTSRSSAAPGDTPAATPVAIGIGIDTSRYGHHAIFLDADLQSAAPELKFVESAQGYQQLQSRLAALRHKHGPVHFHFRLDVAGSYADNLLAFLHGLPEPRTISCGDPQRNKNYRAAIFGHKKSDATEANATARYALTEKPKPMPVVAPAVQQLCQIASRLESQARHCTRVVNQLHNLLGRTFPELALLVKDLSAGWVLTLLDRYPTAAKLAAARSSSLEKIPYLPHEHIARLREQARTSIAALTGPVTEELVRELVGQLQDAHVRHKALEKLLVSAYRQLPEPNHLDSIIGFGEVTAAILTAKMVTTGRFVEPAKLTGYFGIYPVEASSGIDRDGQSRLPLRMVMSRRGNDLVRRYLWMAALSAAQHNPAVRPLYQRVRAKHPDQPGIAIGHAMRKLLHLALAVWQTGKPFDPEHYPWDQAAHLPGSQQPATAEPVAPSPTHEHTGPHAQAAGHKNPVTTPVRSVVTAACVPTSVTEAASAGNDSTRSVASEHPEATACDMPMSQDAQAEATALAWIDFAHLKTQLPLQRVLEHLNLLTDLRGRSSQRKGPCPVHAPSGKSRTFSVNLDKNLFQCFDPHCGSKGDVIDLWAALHKLSLRDAAADLLQTFNLEPASRTEKRHG

SEQ ID NO: 320738 - protein, 348 aa, unidentified
MSEAPDIVVAVDPHKASWSAVVADARHRVLGEIRVAASRDGYRELRRFARPWPEARWAIEGVRGLGQPLARRLVKDEIEVSDVPAKLAARVRQLATGHGRKTDRVDAYSVAVAALTGTRRAHEWDDDAESLRLLSEHRDDLVRRRTQVVNRLHALLTHLVDGGAPRSLTADIAARLLRKVRRPTGAAATRRQLALALIGEVRHLDHQVTAADTSLTAAVKESQTLLVELHGVGPVLAARIIGRCGAITRFKTSDHFASYCGTAPLEVSSGDVVRHRLSRAGDRQLNHALHIIALSQIRHGTQGRAYYDLICAGGEGHREAMRCLKRRLADVVYRTLTADYTAATLTTP

SEQ ID NO: 320739 - protein, 402 aa, unidentified
MNCVGIDVSKGKSMIAVMRPFGEVVVSPFEVLHTDSELSKLAGLLKSLDGETRVVMESTGNYHAPVAWLLHDAGLYVSVVNAMLVHDYGNNSLRRAKTDKKDAVKLANYGLDHWLTLPRYIPEEDTRLMLKICYRQYQQYSKVQTMLKNNLISLLDTTFPDANRLFTSPPRADGSEKWVDFVATFWHCECVCGRSEKAFTTQYQKWCRKHGYNFSEDKALDIYASACRHFGVIPKTDTAKLLVEQAISQLQTTSSALAALKQEMQSLAASLPEYPVVMGMFGVGPTLGPQLLAEIGDVRRFHSKKALVAFAGIDAPPYQSGQIDVRSRSISKRGSASLRRTLFLVMSVILQCAPIDEPVYQFMDKKRSEGKPYRVYMMASANKFLRIYYASVKAYLESLEHD

SEQ ID NO: 320740 - protein, 330 aa, unidentified
MKKWNYTIGIDVSKNTLDIHCAEINQHIQIKNGTEGFRVFLKWCNTHKIILNQSFMIMEYTGGYEYKLIQFCESKQIQYSRIPGLEIKRSMGITRGKTDQVDAGRIAQYGEEKHKQLTPDRPLNKGIIKLKELLGFRKRIVRELGGYKASLKERKAMYPDLKKDLICKTLESKIKENEKVVAKFDKELMDEIHKDEAMKTNYELIRSIKGIGMVNALMTIAYTENFVGFTNPRSYAVYVGVVPFDYSSGTSIKGRKRVSSIANKELKQELSQAARSAIQWDPELKSYATRKMANKSYGVVLNNVKFKLILRIFAVVKRQEMYVDNYKNAA

SEQ ID NO: 320741 - protein, 337 aa, unidentified
MVEGTEGSHHKEGSTKMAKRITICAGIDTGKRKLDVALDGSQERLEVENTTEGHKSLVEWLRRHKVKRVGIEASGGYEQPIVAELRRKRFVVVVFQPAQVRAYAKYRGQRAKNDRIDAALIAACTAEAKEIHPAPDPRLSPFAEHLTMIDQIGEDVARVKNRLESCRDERIRQAWMEEISRLARRRRTELEALTAAIRKHPDLARRLELILSVRGAGLPTAVAVLVRMPEIGQINRAQAAALAGLAPYDDDSGEQIGVRHIEGGRERLRHAVYAAALPASFRWNPQLIALYQRLIAAGKGHKRALVACARKLLIFINTVVARGTPWQDSLPAVASMV

SEQ ID NO: 320742 - protein, 352 aa, unidentified
MIVLGADMHKSSHTLAAVAAATGEMLDEKTAAVGARGFDGFLRWARALGSERVWALEDCRHVSGSFERFLIARGERVVRVPTRLMANTRRSSRERGKSDRIDALAVARAALAEGIATLPTAELAGPELDIRLLVDHRERLVRTRVGLNNTLQWHLHDLWPELVLPGSSLFYGKWGPRIARRLARAEQTMRVRIARDELRRLRELTQAINALETEIAALVAQVAPQLLSEPGFGPLTAAKLVGEVAGAGRFSSDAKLARAAGLAPIPVSSGRTNRHRLDRGGNRQINAAIHRVAVTRARCHPETIEFLARKTNEGKTHREAVRCLKRHLARRIWQLLRAPHPVSETPPHPSTS

SEQ ID NO: 320743 - protein, 347 aa, unidentified
MAKNQLQSNTATLIGVGIDVAKDTLMFCKKYDSGDKTIFEIKNKNIEIRKIANEIKAEKFLGKIIVESTGRHHLVSALEMSKKNLDIRVINPLLANKYIKSSIRKIKTDKRDAEVLAEIAIKEERLPNKFDGDKNALKIKKKASLIATLDKQIQKMTAAMNEFKKTGEEIGLNLSITEKRIFKTIKLLKEQKKESEKEVETMAIKSEYKKEIAKRYKSIPGVSDYLASLSTVFFKEEEHSKHSKQWVAFAGLDVSVRESGGWRGKGKITKRGNGYLRKRLFQAAWGAMMHNENFKEYYDHLRKKGRSYVASLTIIARKIVTIMFTLSKNKCCYDDSIKLFKLADETK

SEQ ID NO: 320744 - protein, 332 aa, unidentified
MGIRLAATTPTACDDAVIRILIAIELSKKSWIVGANTPLKAKTSQFRLAAGDWKALLELIEQLRRQVGRKLGRPVHEIEAISCYEAGYDGFWLHHLLEAHGVHNHVLDPASLLVNRRAKSAKTDGIDVERMQRALSRYLRGEPDACSVVRVPSVEEEDAKRLHRERKRLIGERVQHVNRIKGLCALHGIYDYRPLQADRKAQLEGLRTSDGRLLPPRLKAEIRRELQRLELVLQMIADVEAERDAIIKETAPQHPNADKIKALAELSSIGPEFAARLVGEVFYRSFANRRQLASFAGIAPSPWSSGSVARDQGISKAGSCLVRTTMIELAWL

SEQ ID NO: 320745 - protein, 396 aa, unidentified
MESAVYLGVDIGKRSHYAVAVDATGKRIYQTGVANDERALGKLVEWAKDHVATLVVDQPGGAAAVLLKLCWQSDVRIGYLHGLAMARAREFYAGESKSDPKDAFVLADVARAHPTRVVWLEPSSDALAHLELLCGYDADLCADANRMTNRLRALLVSHWPALERAFGARLDSRGVLAVVQQYPSGPAIKEAGVEQLTAALKAQRVRRAEAFAEQLHQAAMAQTVTITGSRTAACIISELAVQLAAVLVRRDALEKEIEVGFFALPEAAILRSLPGIGPRLGACIAIEIGSIARFRTPGHLAAYAGLGPTPWKSGTSINANLASRFGNHRLKNALFLAAFASLRHAPSRSYYDRKRAQGKRHNQAVLCLARRRVDVLHAMLSQGVLYRAPAPVAAAA

SEQ ID NO: 320746 - protein, 345 aa, unidentified
MEHYVGLDVSLKLTEICIVDQTGKIEREGMVAYNPEAIAEFIKSHAPHVARVGLETGATATWLWTELNKMGLPIICIDARHAKAALKMQINKSDRNDAVGIARIMQCGWYKEVRVKDLDSHAIKALLVSRALLVKIKRDLENQIRGLLKNLGLVIGRAKMNVFAVRAAELTEDRPELAGAVEPLLKAREAIERQIADLDRKVLRLARNDAQVRRFMTTPGVGAITALCFLATIDDPTRFKRSRSVGAYVGLTTRRYASGEVDWTGRISKCGDKLLRSYLYEAANVLLTRVAKWSALKAWGIRLAKRSGLRKAKVAVARKLAVILHRMWIEGTEFKWSKEVANQPA

SEQ ID NO: 320747 - protein, 310 aa, unidentified
MEITVGIDVSKARLDVHVHPLGESFAVANDEAGVEALAGQLGQLEGLVSIGLEASGRYERLALANLAAAGLPVIVLNPAQVRNYAAALGQKAKTDPIDARVIALFLAAVQPEPRPLPDAQTAELEALMTRRRQLVGMLVAERARRAAARPGRVRTSLARVVTTLEQELRDLDHDIDTTVRGTPVWRDKEDLLASVPGIGKTIARTLLAELPELGRLNPKQIAALAGLAPFTRQSGKWRGKSFISGGRAAVRAALFMGALVASRFNPTLKAFRDRLVAAGKPKLVAIIATARKLLTILNAIIRDRKPWKPA

SEQ ID NO: 320748 - protein, 323 aa, unidentified
MSSPSPVINIGIDISKEKLDVAVHESDTHWTSKHEFTEFPQLIKQLRSLTPTRIILEASGGLEHLLVSYLATAGLPVIVINPRQVRDFARATGQLAKTDRLDAFVLARLGATLQPAVRQLKSAETQELEALVNRRAQLVEMLTAERLRLQQAQQQRRQAIITDLKAHISWLKKRLEQCETDLSQLLRSSPIWRATDQRLQSVPGVGPITSLVLIAELPELGHFPNKQLVALCGLAPHARDSGKWHGKRTTRGGRARVRTALYMATLVATKHNLVIKTFYYRLLRAGKEKKVALTACMRKLLVILNAMFRNQTSWQPPRLVQEA

SEQ ID NO: 320749 - protein, 371 aa, unidentified
MSENKGITYVGLDVHKASINVAMILPGSKQVDEQWQLANETRSRARMVRKLKRIGGDQVHICYEAGPCGYALQRELRDTGLVCVVIAPSLIPAKPGERVKTDPRDARKLVELFRAGLLTEVHPPTPEEEAVRDLTRAREDASKDLLSARHRLSKMLLRHGYRYGQGCNWTQRHRAWIKSIRFEFREQQEVFDNYLLAVEQIEERLKHLGQRLEALAEDERYAERVGWLCCLRGVDIVTAMTILAELHDISRFQNPRELMSYLGLTPSEHSSGGRTRRGSITKAGNAHVRRVLVEAAWNYRHRPAVSAHLAQRRRGQPVEIIAIADRAQQRLHKRYYRMKEAHRKHHNVVTVAVARELTGFIWNILQHEKAA

SEQ ID NO: 320750 - protein, 351 aa, unidentified
MSLNYTGIDVHKVSSQVCTLTGDGELIERRIRTDRQSLEKMFGGCPSARILIEASTESEWVARCLEEMGHEVIVADPNFAPMYATRSKKVKTDRRDARTLCEACRLGAYRPAHRTSDKQRRVRALLAVRDALVRTHAKYMSLIGALARREGCRIPTGYPEGFVTRVAKLELPGSLALEVTPLLLVMQTLNEQIKEPDRKLARMVKEDAVVNRLCSVPGVGPVTAVTYVATLDEVSRFGDAKQVRAYLGLVPKEDSSGEKRHRGKITKAGNSRARWVLVEAAWVLLRTKKPETEALRKWARGIAQRRGKRIAAVALARRLGGILYALWRDGTRFDPEVVAGTSKIVSQPQAA

SEQ ID NO: 320751 - protein, 347 aa, unidentified
MKVLIGVDPHKTSLAVAAVDEATGELLERAGFPQDRAGLRSLERWAKRFSERSWAMENAGGLGRHLAGRLVAAGESVVDVPPKLSARVRVLSTGNARKNDGLDALATALAASRNERLAQVDAEATSEVLRLLSERREDLVAERTRALNRLHALLRVLVPGGVAGKLSADRAARILRGLRPRGGASARLRRRLASEVLRDVRTLDRKIADLDGRIEAEVQASGTTLTEIFGVGAILAARIIGTVGNVARFPTKSHFASYAATAPVEASSGEVVRHRLSLVGNRKLNYALHMVATSQARSETRGGEYYRKKVAEGKSRKEALRCLKRRVSDAVFRSLMADSLAPSSSAA

SEQ ID NO: 320752 - protein, 324 aa, unidentified
MYAALDLHEKSIQCVLKDDQGKIVRESKLGKDEDRILGFLDGTQARVVMESGYNHQHIYDVLKKEGYDVTVAHPLLVKAIAYARLKNDKVDARMLADLLRADMIPEAYVPDRDVREVRDLVRRRRYMVRLRTMMKNKVHAEIATRWIKHEGELFTEEGKSFLRSLSIDAINDYLDTIEFLSRKIRELDEKVKQKAEPDKYARLLVTIPGVGWYAALLISSEIADIGRFPDYEHLCSYARLSPGVRQSGETQHTTRGVGDSMLNWIMVQCTRVHVHRCESSAITKFYEQVSARRGEKIAIVAAARKLMRAVYIMLKEEQAFRLDG

SEQ ID NO: 320753 - protein, 350 aa, unidentified
MMIIGCDYHPGFQQIAFIDTETGECGEHRLPHREETEKFYRDLAAQGMKVRVGMEASGHAHWFERLLAELNFELWIGDAAVIRTKRVRKQKTDRQDAQLILQLLMEDRFPRIWVANWENRDLRQLLWHRHRMVQARTRIMNQLQAVALNEGLRCKKRLWREAGREQLESFSLAPWASRRRRDLLEVLDRLTPTITELSQAIEQEAEKCPTAQRLRTHPGVGSLTALAFVLIIGSAERFQCGKQIASYLGLVPSEDSSGERRRLGHISKQGNALLRFLLVEAAQVTVRSLPEWRNKYFHLAMRRGRKIAKVAMARKLAIQLFWMMRKGWDYEQVRKFGPHAGQPENRRGVQ

SEQ ID NO: 320754 - protein, 338 aa, unidentified
MKTHVGVDLHQRFCYLTAVDASGKTRKQGQVVNEGEALRAWLRQLPGPRQVVVEASGFWPAFARAVGAESERLVMVHPQRVKAIASAKLKNDRVDSETLAHLSRCDLLPTAWMADEATQQLRLRVRLRITLGRQRARAKNQLQAVLHQEGFKKPVTDVFGKRGRAWLAGLELSAAGRVVVDTWLREVDHLDVELAAQTRELERLARADARARFLETVPGIGPYAAMVILAEVGDVERFQHKRALASYAGLTPVVRESAGKRKRGGITHQGSNTLRWIMLQVAQVAGRCSPGARSYYAGLRQRKPAQVARIALARKLLTVVWALLHHGVCFDEELFTRS

SEQ ID NO: 320755 - protein, 458 aa, unidentified
MSYRIAGIDVHKKILAVVVSDVEVENEYQFERRMFGSSPDQLRSLATWLLEQEVEEVVMESTAQYWKPVWEALERYWKPIREKREGAGRRSGTLHLAQAQSNRGRRGRKRDFPDAERLVKRLVAQELTLSFVPNTEQRLWRTVTRRKYQLTRDRVRLQNQLESLLEEAHIKLSSLVSDLLGASARRMLKALAEGETNPAALAALADQNLRATPEQLCDALGACTDLKPVYRRLLKMALEQLQFLEQQIDQLDQELASLLHPHQDAVKRLAEVPGLGVDSAQQIIAEVGSTAATFPSEKQLSSWVGACPGDDESAGVNYSHRSPKGNRQMRRILNQSANAAVKAKGTIFEIVYRRTVPRLGHQQTIGAIAHRQCRLIWLILHQGVRYEERGPAVTKQSKQRRTAKMIRQLRSLGYRIEPPNAQHPSPAQGAVIFDPARLLRPLQHAGLSRRSPSVPSLA

SEQ ID NO: 320756 - protein, 413 aa, unidentified
MDVLHSRCCGLDVHKSSISACILLREAGRVQKHQRRFGAMTQEPQELAEWLRQFGVTQVAMESSGVYWKPVWNILEGQFTVVLANAQHIKNVPGRKTDQKDAEWIAQLLQYGLLRASYVPCEIIRDLRDLTRMRASLSQEASRISSRIQKVLEDANVKLASVATNVLGKSGRAMLEDIITGEDNPEHLASHALGHLRVKIPQLRLALEGKIRPHHRFLLRRLVDQIQFVEQEIALLDERLDDIGRQRPDFAQAVDRWDSIPGIDRVAAWALLAEIGDNMGQFPTADHLASWTALCPGNHESAGKRLRGTTRQGSPWLCRMACQCAWAAARTKNTYLSSQFRRLAARRGKKRAIIAVAHTIIVIGYHLQKNQRNYEDLGGNYFDRIHSDGLKRYLVKRLQQLGHKVTLEPMEAA

SEQ ID NO: 320757 - protein, 347 aa, unidentified
MRFYTRQHKYYCGVDLHARSIYVCILNQEGAVLLHKNLRAKPDAFLAVIAPFREDLVVAVECMFTWYWIADLCAREGLTFVLGHALYMKAIHGGKAKNDRIDSHKIAHLLRGGNVPFSYVYPEAMRATRDLLRRRNFLMRKRAELLAHIQNTNSQYNLPDIDGALRYPANREDLSERFTDDSVKKSIETDLGLIDVYDKHLKEVELYLTRHARVDNPNSYHILKTVPGVGQILGLVLLYEIHDIARFPSAQDFVSYCRLIRCSKESAGKKLGTGGRKIGNAHLKWAFSEATCLFLRGNGAAQKYLARLESKHGKGKALGILSRKLGTAVYYMLKRQEAFDMNKFFEK

SEQ ID NO: 320758 - protein, 466 aa, unidentified
MKQFYLGIDVSKGYADFMIINPKKQPVVQGFQLDDTFDGHRSLYNILSRFLAEHPNSTLFAGMESTGGYENNWYNSLIEFQGSLNIQTARLNPFAVMHNSKADLKKNTTDKISAQNIAEYLVAHPEKVVYQQHDRLASLRKQWGFIKMLTKQCTQFLNQLNGLIYSANPELLSYCQNGVPGWVLKVVVKYPSAANLKRAHAKTLTKIPYVSIHKAQQLIASANRSVASATDSTTEQLIVATARQILHLKKTIGEQINRMLRECSIPEVELLKTFPGISDLSAVGLIIEIQTIKRFAEAKKLASFFGVHPVYKISGDGVGGFKMSKQGRTAPRQILYMIALSAIQCNPLIREIYQKHQKQGKHNMAAMGICMHKILRIIYGMLKHNKPFNPHIDIANKRRSVRIKNDKSVDNTNRRFQDYDQKAPVSRRQKKKRLERERSHSVCDTNFGITAPVPLANIIANILPQW

SEQ ID NO: 320759 - protein, 351 aa, unidentified
MKKTTIATIPSTTIGLDLSDRTFQFCELNAAGEIVDEGQLWLNRATVLGYLSTKSPGARVALETGGHSTWVREVIEQVGHEAVVANARELEAVTGRSHRSDHHDARQLARLARVDTALLNPVELRRTVEQADLFVIRARAALVEARTMLINFARGITKTMGHRLPSSTSHCFAERVRAAVPEALHPALLPLLTVLKQMEAQIEDYDDKIEKLAAEQYPETRWLQQVPGVGTLTSLTFVLTLGQPERFAHSRDVGAFLGLVPQRRQSGGQDPHLPISKCGDRYLRRLLVQCAHVLMNRYGPDCSLRQWALQHAQNSRTMKKRTVVAVARKLAVLLHRLWRRQEAFQPFPKVA

SEQ ID NO: 320760 - protein, 340 aa, unidentified
MLHIGIDMHKHFSEVAVLDDAGKLIARCRLDHSQRSAMRAFFANYRDKAIATVEATRNWYWLYELLEAQSVKTKLAHPLKVRIIADAKLKNDKVDAWVLAHLERLDFLPEAYIPPREVRDNREALRYRISLVRARAVFKNRVHAILDKLGITYHFTDLFGVAGLEFLKTVELRPIYRQALNGYLMILEFLEQRIKAATKGLRVTLKPDPRVKRLMTIPGVGELTAYLLLCEIGDIGRFKVDKKLCSYAGITPIIRESADHRWAGRITKQGNRYLRWAMVEAAQMAPKQDPALAAFFMRIADRRGRKKARVAVARKLLIAIWHVLAEEQDYRINCLSMYHG

SEQ ID NO: 320761 - protein, 324 aa, unidentified
MFYLGIDVAKAKIDCCLILENSANKKKTKTFSNTPKGFEQLQIWLNQHAATSTQTIILMEATSIYHELLAKYLFDEGYQVSITNPARARYFAQSMSKLNKTDKVDSEVLARFAMTANIHFWQPLPKHIQLLNALLDRRAVLCEDLQREKNRLEKAESTFTMEPVLQSLHKSIEQLNKHIQSIDQQIDDHIDQNPDLKNDKELLSSIPAIADRTSLLMLSFLRSHTFERAIQAAAFVGLVPTQKQSGSSIHGRSHLSKAGSSKIRAGLYMAAIVATRHNPHIKGMNERLLANGKTKMMAIGAAMRKLVHLCYGVLKHQQPYQADY

SEQ ID NO: 320762 - protein, 332 aa, unidentified
MSVYVGIDVHRKRSQVAVIDEGGKVLVNRNVPNGVKPVLSVIGGLPAGTPAAYEAAFGWGWLLETLEDYGFEPHMVHPLQCKAIASARLKNDKVDAATLAQLLRADLLPEAWIAPPQVRQLRAMLRHRAQLVRLRTLLRNRIHAILADHGHGRPAGCWSGPGRRWLASLELPAVSREVIDDGLALMDALQQPIDRLDQEVRQRAKADPRVKVLTQLPGVGPFTALVLLAEIGDISRFGSARKLASWAGLTPTVRGSDRTVRHGHISKQGPAWARWVLCEAAQTAKRHPDFAPGYEALARRRGKKIATTAVARKLLTRAYHLLTDASAAGEPR

SEQ ID NO: 320763 - protein, 342 aa, unidentified
MIDGESGELRSRRLSGTTSEVVELCCSLRGPTRAAYEAGPTGYGLARALHTAGVGCVVAAPGKIERPAADKVKTDQRDAERVLRLLMIDALRPVRVPSGEEEALRDVVRAREAIRGDLMRARQRLSKLLLRHDVRYEDTASAWTVSHRGWLTEIDLGERGAQVTLLGYLGAIDAIVIRRDALEKTIAELIPGSPWEQTVARLRCLRGVDTLSAVGLCAEVGEFQRFAKAGQLMSYVGLTPSEDTSGEKRRLGSITKTGSRHARRLLVEAAWHYRRAPAKGQSLRRRQDGQPAHIIEISWQAQRRLHNVWQRLDTRRGKRRTIVAVAVARELAGFCWALANAD

SEQ ID NO: 320764 - protein, 320 aa, unidentified
MARINHPLLIGIDVSKAELVIARSDSADVTVVANTRQAILTWLKHLPATSKVALEATGVYHREVAALLCEAGHDLYLLDAYKLSHYRSGVGARAKTDMADARLILRYLTNELEALKPWQPPGEAFYRIQSLMRRRAKLVQTRIALSQSLEGLPELEPLARQIDTLIRRVEAVIVKRLAVVLKEVGWWEDAKRCKDIAGIGDLTAAALTNIFHRGHFRSSDAFIAYLGMDVRIRDSGKQVGRRKLTKKGDPELRRLLYNAAMAARRTRAWKPLYQSYLAQGLKPIPALVKLARKLARIAFALMKNQSTYQPRADEQRCYAT

SEQ ID NO: 320765 - protein, 391 aa, unidentified
MPEDAPRPAQAAIRTDLGAIFVSLELSRRAWLITSLSPGGGEKMSKHSVPASDVSGLLRRFAELRRKAAARTGRDFPIIVIQEAGLDGFWIHRVLQSEGIESHVVDAASILTSRRRRRAKTDRIDGETLVRTLMAFKRGEPRVCSMARAPTPQEEDRRRVCRERRTLVGERVTHVNRIKGLLFAQGVFGYEPLRKGRRERLEDLRTGDGQPLPMHLKAQIMRELDRLEVLLGQLKTVEAERDALLKPETDKATSPAAMLTRLKGIGPETAAVLWSEGLFRQFDNRRQIAAYAGLAPTPWKSGSIDHEQGVSKAGNPRLRTTMVELAWLWLQNQPTSALSLWFHERVRRLGGRMRKTTIVALARKLLIALWRYTTTGVVIEGAAMKAAPATI

SEQ ID NO: 320766 - protein, 313 aa, unidentified
MKKTICGVDVSKAKLDACIEPGHRLASFNNDTAGIAELAAFCREHAVTLVVMEASGGYERRAFIELWEQGISCALTNPRNVRRYAEAMGILEKTDRIDSSIIARFADAKNLAPTPLPSQAQQRLKALVARLRQVTGDLTVQKQRRAGLLDNSEMLASLDEVIALLKRQSRSLEGEIASMIADDPLWAKLAETWREMKGVAGRTVARLHAELPEIGTLSNKAIAKLAGLAPIANDSGKRKGKRTTRGGRAGVRSILFLVAAIAARYDKSLGEFRDRLLKAGKEKMVVRIALARKLLVRLNAKARDARTQYANAT

SEQ ID NO: 320767 - protein, 483 aa, unidentified
MSKKKREYIRGEKEERFKRKIKGIEKKKILGISIDVSKDYHKALIFDFEGRLVDGPFEFSVFKDGYENFKQRVGEAIKKKGAKKIFFGLEPTGPYHENLARHLKENFKEVEFINPSATYANRAQDMLVGLKTDDIDLGAIGDLLMRGKGYEYNLEEAGMYLSLKEETFWREKKLKMQTRLKNQIKARLNKIYPGLMSKYHNNEPLFSDLWRSRVARGLIRSRLTPAQIQRMKVEELVGEFERIGYALSRKWAEKIAQYTKRILAPHDKIIEIDLDLVNRDLNLLEALEGEMSRVEERMIEEVKETDSSFLLGKIKGLSDLQIASFVGAVGRIENYRLGKQIFSKSGLSSKVNQSGKRNIKGLGIRRVGSKILRSILFKMADSVKKHNPYFALYYSYLTEEKGKLWKKAHIAVSNKLVRVMFAMLRDRADFNPPTAKIDYLEMLFSQRRNRRRQERKKEKENSPSPFFGPKGIRASERIPSPVR

SEQ ID NO: 320768 - protein, 441 aa, unidentified
MKKVISFEQVNEAAAGIDIGSEKIFVSPDGTIVDNFGTYTGEYHRLISYLQQRSIKRVAMEATGIYWIGLYNLLEAAGIRVSLINPKETKQKKGKKTDVRDCRWIQKLFSAGLLKESFIPEGKMLEIRYLVRERLDIIEMGSTYVNKMQRCLELMNIKLTEVISQIHGASGMRMMKAIISGERNTEALLLLCDERIKKQKSIEIIKALEGNYNDTWLFMLAQNIRLWEQHQQQITQIDKRIEKLLQDLTADKKVDESVIGKVKPVRHHKPQIDNLHETLVKFFGVNVTSISGINSYTLLRLIGETGADMSRFETVKHFASWCGLSAGHHQSGKRNKWIKQAPCNKAGQIFKEVAQSLENSKYIAIGSFIRRLKTRRGASVAYKAGARKVAEAYYNILTKGTAYVEQGLKQYEEQLKKRELIILKKLAKKHQVQIVEKQEAA

SEQ ID NO: 320769 - protein, 340 aa, unidentified
METNTIGFDIAKTVFQVHRVNGSGEIFRERLRRDRVEKYFAALAPAVVIMEACGSAHYWARLLRGLGHETRLVPAKYVTPYVKRNKTDARDAEAIWEAGGRPNMRFVAVKSVEQQGERALHRVRDLLVRQRTQLGNCLRGLLAEMGVVAAQGAAGLGALVKLVETGEDARVPATLFETLRCLARQWRALDAEAAALEARLKTAARADAMVQLLMTIPGVGPITAHAVKAAIGDGRQFRTARDFAAWVGLTPHEHASGLKRRSYGISRAGDPGLRRLLTLGASAHLRQMRAKPERMGAWLAGVLSRRPVRVATVAQAAKTARIIWAVLTSGENYKARPVAA

SEQ ID NO: 320770 - protein, 392 aa, unidentified
MVISVGIDVSKDKHDCFIVSSEGEVLADVFTVPNNMDGFHCLLQRIQSCAVSQGKIKVGLEATGHYSYNLLGFLLDNGLATYVLNPLRTNLYRKSLSLRKTKTDRVDARTIASMLLSDAGLKPYTSTAYHNEELKSLTRYRFDKVKERAKLKSSVSRLVCILFPELEKLVPSLHIASVYALLEAFPGAKQVASAHLTKLKALLEAASKGRYKRDMALEIRDAARNSIGSRMPAKSLELQHTIRLIRELDAEIAETEEQIQSILDELHSPITTIPGLGFRMAAMILAEVGDFARFDSPDKLLAYAGMSPSTYQSGQLKNCYPHMEKRGSRYLRYALYNATKYVCQWEPGFSAYLAKKRAEGKHYNVAISHAAKKLVRLIFAMEKSGTPYHLTV

SEQ ID NO: 320771 - protein, 331 aa, unidentified
MIDGEGTQVLSRRITNDPATFLELLGELEDKTQIAVEATYGWEWLADALEEAGYELHLAHPLRTRAIAAARVKTDAVDARTLAYLLRADLLPESYIAPRELRDLRDLLRHRIALTQMRAALKNRVHAQLARHGIQRRHSDLFGVGGREFLAGLGLRTEPRRRLDSLLALIGDFEREIEAATAEVDSRAKADARVDVLTQIRGVGPYTAMLVIAEIGDVSRFPNARKLCAWAGLTPTVRSSDGKARLGHISKQGSRALRWALVEAAQHAPRDTGPLRDAFERIAERRGRKVAKVAVARKIATLCYYGLRDGEIRCLARRCRPSAAAVMAGSS

SEQ ID NO: 320772 - protein, 400 aa, unidentified
MIDTGDIDVYLGLDVGKGEHHATAVTPAGKKAFDKRLPNTEPKLRELFAKLQAKHGTVLVVVDQPASIGALPLAVARDMGCPVAYLPGPTMRRIADLYPGEAKTDAKDAFIIADAARAMPHTLRSVDLEDETIAELEMIVGFDDDLTGEATRVANRLHGLLTQIHPSLERVLGPRLQHPAVLALLERFGSPAQIRKAGRRRLVTLLPPKAPRMAERLAEDIFTALDEQIVVVPGTEAAALIVPSLAASLTAVLDQRKLLAGRIEELLEAHPLSKVLISMPGVGIRTGARILIEVGDGSSFPSAAHLAAYAGLAPATRNSGSSIRGEQPSQRGNKQLKRAFFLSAFAALGDPASRAYYDKKISQGKHHTQARLCLARRRADILFAMLRDGTFYEARPATAT

SEQ ID NO: 320773 - protein, 385 aa, unidentified
MQASNVCTPTIDHFGTILVAIELSRQSWLVTMHSPDRDRISRHKLPGGDHAGLLALIERAQERAARALGSVPAVVSCYEAGYDGFWLHRRLMAGGITNHVFDPASIAVEQRARRAKTDRIDGELLLRTLMAHWRGEPRVVRIVRVPSAEQEDARRDTRERQRLITEQTAHTNRIKALLRLLGMAVGNPRRRDWLIWLAAQRDWQGQPVPPRLAAELEREHARLMLVREQLEALSQAAVGADAPAAAAQMARRSALLLRLKGLGPVFAATLTNEVFYKDFRNRREVAGYCGLAPSPWRSGATNHEQGISKAGNPRARHKAIELAWLWLRHQPDSALSQWFRERTLNGSGRIKRIAIVALARKLIAALWRYLTTGLVPEHAVLKAKA

SEQ ID NO: 320774 - protein, 346 aa, unidentified
MEHYVGLDVSLKLTAICVVDQTGSVTREGVVDSDPETIADFVTSNAPSAVRIGLESGPTATWLLTELKQLGLPVICIDARHAKAVLKMQINKSDRNDAAGIARIMQTGWFKEVRVKDLDSHSVRALLASRALLVKIKRDLENQVRGLLKNLGLVIGRAKLNVFAVRAEELIKSRPELMAAVRPLLDARNAIEQQVDDLDRKVMRLAGNNAQVRRFMTALGVGPITALCFLATIDDPTRFERSRSVGAYTGLTTRRYASGETDWTGRISKCGDKLLRSYLYEAANVLLTRVAKWSTLKAWGIRLAKRSGLRKAKVAVARKLAVILHRMWIEGTEFKWSSKEAANQPA

SEQ ID NO: 320775 - protein, 412 aa, unidentified
MKVVHEICCGIDVHAKMLVACLLLGNGKKEIRSFSTMTDDLLRLRDWLVAAGCTHVAIESTGVYWKPVFNILEDALEVILINPEHARALRGRKTDVKDAEWLADLLRHGLLQASFIPPPEIRELRELTRYRESLVREQSAVANRIQKLIESGNIKLGQVASDALGVSGRAMLWALARGETDADKLAALARGKLKEKSLLLRRALQGRLTVTQRFVLAELLKRWAELETADARVTKEIDQYLQVRPKLARAREILDTITGLGPRVVEVVMAEIGVEMKEVFPNDAHLASWAGICPGNKASGGKRLSGRTRKGNTYLRAALVQAAWGATMKKNCYLSAQYYRLVKRLGRKKALVAVAHSLLVIIYHVLERDQTYTELGGDYFDRHNVEQQRAYHIRRLQMLGLKVNVEELIAAA

SEQ ID NO: 320776 - protein, 371 aa, unidentified
MAESSKTLFVGLDVHKDTIAVAYAPEDRGAEVVSLGMIGTRQHDIDKQIRKLESKGATLAFAYEAGPCGYWLYRYLTRRGLTCSVVAPSLIPRKPGDRVKTDRRDAVTLARLLRSGDLDSIYVPTVDDEAIRDLSRAREDAVRDLKRSKVRLKAFLLRQDIRYEGRANWNAAHLRWLARVVCPTPAQQIVFQEYVHTVTEQTDRLRRLEGELHTAEKTWRLHPVVEAVQALRGLDLTGAVTLIAEVGDLTRFDTPRKLMSYLGLTPSEYSSGASRRQGGITKAGNGHARRALVEGAWAYRYPAKVSRHLQLRLEKVPTEVRAIAWKAQVRLCKRYRLLSARGKHVNQVVVAIAREMAAFAWAIARTVPIAS

SEQ ID NO: 320777 - protein, 317 aa, unidentified
MSKIIGIDISKQTFDVSFKENQKWNHYVFKNQEKGFHQLLKIINENDWIIMEASGSYYFPLAIFLSKRNLKVCVENPLIIKRFSQTMLYRAKTDKKDAQTIAEYGEKYELKQWKQESESCTKIRHIHTRVEMLSKQIHQTKRQLEAFKSSGALDNFLEKSLEKDLSDLKKSKEKLEKEMQKLAEKEYGNTMEKLESIPGIGKKTALMLSLITDNFKKFENYKQLIAYVGFSPRVYQSGTSVKGKGHICKMGKSQIRKLLYMCSWAAKHCNIACVEMYNRLKSIGKPERVIKIAIANKLLKQAFAIAKSNNIYQENYC

SEQ ID NO: 320778 - protein, 381 aa, unidentified
MTTAATHYEQRNPTEATLFLAFELSEKTWKLGFTTGQGQKPRERTVTARQQERVLDEIAQAKRRLGLPDTAPVVSCYEAGREGFWLHRFLQGHGITNHVVDSSAIEVNRRRRRAKSDGLDVRKLLSMLMRYEQGERHVWQVVKAPSVEAEDQRHLHRDLETLKQERASTTTRIQGLLSSQGLRVTSLTQLPEQLDALRLWDGSPIPPGLRRRVLRVYAHHTFLSEQIAAVEASRRAQLQASTDARIEKVRQLMLLKGIGINGAWLLVMEFFGWRAFKNRREVGGLAGFTPTPYQSGESAREQGISKSGNRHVRWMTTELAWSWLRFQPDSALSVWFRERFGSGGKRLRRIGIVAVARKLLIALWRFLETGVLPEGAVLKEG

SEQ ID NO: 320779 - protein, 241 aa, unidentified
MTMMTDNSVGIDISKDFLDAHRLSDGAAARFHNSPAGFCSLSTWLGDSRPTRVVFEATGAYHRSFERTFSGKIPLVKVNPLQARRFAQACGTRVKTDAVDARMLASFGNALTLEPDHPVDGKQFELKELFSSRGALIKDRTRLTNRLNTQSLALVKRQTKARIDQITRQLKALQQDINTRLQDCPGRTRTNTILRSIPGIGEVAAATILIEMPEIGTLQKKKAASLTGLAPMTRQSGKWRG

SEQ ID NO: 320780 - protein, 421 aa, unidentified
MAQTVEIVYPICCGMDVHKNFLVACIAVTDKHSHTEHHIRRFSTFTGDLRRLCEWLASYNCRDVCMESCGKYWIPVFNALEKAGITVCLTHPKYVKAIKGKKTDKKDAKWISELFKCDLVRSSFIPPPDIRQLRDLCRYYVKLTGFASGEKNRAQNCLTMCGFKLDDVFSDVFGKSATRVLDALLEHGNGNFEFDGLVSGRCKASPEKIREALDGELDPAQAEKLNLIRRHVDDINALKATLETLIYQLAAKYQPQIDLLMTVPGISSPLTAIRILAEIGADMSVFETAKQLCSWAGLTPQNQESAGKKKTTRIGRAGAYLKPLLVQIALAIGKSGKHPELKNKYLALKKRRGSKKAVIAIARKLLTAMWHILSKNEAYNAELYRQADIPPVTREFTTAQAVAFLRNKGFLIVDEVTGEIA

SEQ ID NO: 320781 - protein, 346 aa, unidentified
MPRLDRSRQVTGGVDTHLELHMAAALDPLGGLLGVEQFPATRAGHSALVRWLSNFGTVARVGVEGTGSYGAGLARHLRASGVEVLEVDRPNRQSRRRTGKSDPADAVEAARAALSGRAQGAGKTRDGNVEAIRALLVAKRSCRSAKIKSMNQIRHLGFTASDDLRERFEGVSKRCLAKEAASMRPRAGSDPVAVATKTALVVLGKRVLALDEEKKQLNGFLKELVEKTAPGLCSLYGVGVDSAASLLVAAGDNPERIKSESSWAHLCGVAPIQASSGKVTRYRLNRGGDRQANAALWVIVLTRMGSDPRTRAYVERRTKEGLSKGEVMRILKRYVAREVFKYLPRA

SEQ ID NO: 320782 - protein, 478 aa, unidentified
MASPAKRKRLKKEPPLPVVHRRAAGIDVGSTFHAVAVPASLDPRPVRTFCTFTGELHELARWLTAVGITTVAMESTGVYWIPVFEILESYGLEVLLVNARGVKNVPGRKTDVSDAQWIQRLHEHGLLRGSFRPSEEISPLRAYLRVRERLVESAASHIQHMHKALMQMNVQLQHVVSDVAGVTGMRIIRAIVAGERAPDVLSAFRDARCKSSIDTIHAALCGHYRSEHVFALKQALELYDVYRTKMAECDEEIVRVLRHLNDGREAPARALPKARGQSRKQKNEPSFDVRLALYTLLGVDLTQIHGVGPYLALRLVAECGNDMSRWKTVKHFTSWLTLAPRNKISGGKLLSSRTPRSQNRAAALLRLAALGVGKTDTALGAFYRRLSARVGKAKAVTATARKIAVLFYNTLRYGKDYSDPGADFYETQYKKRVVKNLRRRAASLGLELVELTAVSEGVSYEGDDARLRAIAGAVARAL

SEQ ID NO: 320783 - protein, 438 aa, unidentified
MPTTFARLLDPSFEDEDDPLRHYDARGEPLEDRLYLPCGIDPHKKACAAVFVHPLPHRQDILCQRQIHNQYLPDALWLIDEGRRLAEPFHATPLYIFETSGPFWRPYRHFLHQLKLPTATVTGRQTRKAQGTGTRKTHNDLKAAYLIAKVFKQGESHATRIPPEPIASLREYTRLHLFFAEQSVAIQNRMFDLRYQIHPTFDDLFSQPIMPTTLALAKEELVHPVRILKSEPDTLQQVIRRASHGKLGDRLAEALHHSALTAFYTPYAPEAQSVNLKLLAQAYEHIHHQILPQLQTHIQDCLQNLPFQQFLTEIPYFGPVVTGTFLGELGLPGWFRTVDSVVAWFGLDPSLSESAEHDTGVSHLTKRGTKYGRRMMWMVARNWSRFVPEGRHLFKKERYVNKLSYDGAICVVAAKLVRMAFAMARDGSQFDMSKAFPS

SEQ ID NO: 320784 - protein, 412 aa, unidentified
MEIVHTHCAALDVHKKTVVAAVMVPDPKGGLLKEERRFETMTADLLALSDWLLGYDVTHVAMESTGEYWKPVFNILENTFEVILVNAQHVKAVPGRKTDLNDAQWLADLLRHGLLRPSFIPPEGQRDLRELTRYRSTFVRERATLVNRVQKVLESANIKLASVATDVMGVSGRAMLEAIVQGQASAPEMATLARGRLREKREALTKALEGRVKPHHRFVLTELLCQIDSLDETMARFNAEIEAYCRPFEETVALLDTIPGVARATAEIIVAEIGVDMSRFPSAHHLAAWAGVAPGNHESAGKRRSGKTRQGNKSLGAALNQAAHAAARTKDCYLAAQYHRLAARRGAKKAIVAVAHSILVIAYHLIQRQEPYRELGGDYFDKRRPEATAKRLVKRLEQLGYQVALHQQSVAA

SEQ ID NO: 320785 - protein, 348 aa, unidentified
MARPTVGVARRVTGGVDTHLELNVAAGVDHIGGVLGVAEFPTTLAGHKGLLEWLESFGEVASVGVEGTGSYGAGLARFLRGAGVQVLEVDRPNRQSRRRTGKSDPADAVEAARAALSGRAQGAGKSRDGNVEAIRALVVAKRSARASKIKALNQIRHLGFTAADDLRERLEGVPREHLGTTAALLRPRVSSDPVTFATKTALRILGQRVVARDDEKAHLDELLEKLVKATAPSLLELHGVGVDTAATLLVTAGDNPERIRSEAAWAHLCGVAPIEASSGKVVRLRLNRGGDRAANSALWVVVITRMRNDPRTQAYVERRLKEGRSKKEIIRVLKRYVAREVYAHLPRP

SEQ ID NO: 320786 - protein, 352 aa, unidentified
MNQIKYIGMDVHKAMTVIVVLDIAGKVVAEAILETKGSTILDFLKSQRGNLHVTFEEGTQAVWLYDLIHPHVSAVIVCNPSKIVRHGNKADKIDAKILAELLRTGALTPVYHGEKSARAVKELALSYISVVADGTRIKNRLKAMFRARGIECNGAGVYDPDERKEWMAKLDTKAVRARADRQWQELDLVERLIGEAEKDLLVEARKYAATRILRSVPGIGPIRAAVTLGVVGTPHRFRAKKQFWGYCGLAVVTATSAEYELVNGQVRRSQKRPLLRGLNNNYNRAMKEVFKGAAKTVTAGVWKSRYETMIANGTPESLARLTLARKIAAITLAVWKKGERYDQRKLKTMHAA

SEQ ID NO: 320787 - protein, 338 aa, unidentified
MGVYAGIDLHSTNNYIGIIDDQDRRLYQKRLPNDLGTILSVLDRFKKELVGVVVESTFNWYWLVDGLMEHGYKVHLANPSAIRQYEGLKHTDDHWDSFWLAHMRRLNILPEGYIYPKEDRPVRDLLRRRLLFVKHRTAHILSLQSMISRNLGIRMSVNAIKRLKDSDADRLFDSSNLVFAAKNNIAVINHLTEIVKSIEREVISQVKLRKEFELLLSIPGIGRILALTIMLEVGDIGRFHKVGNYSSYCRCVKSERLSNGKKKEENNRKNGNKYLSWAYVEAANFAIRFCPKAQRFYQRKLAKTKAVVAIKAVSNKLARASYYVMRDQVPYNAGKVFG

SEQ ID NO: 320788 - protein, 348 aa, unidentified
MALTIVETHAITGGVDTHADVHVAAALDPIGGLLGVKEFPATAAGYGRLLGWLGGFGTVALVGIEGTGSYGAGLARHITTAGVRVVEVDRSDRQDRRRQGKSDPLDAVSAARAAQSGRARGASKGRDGAVEAIRALMVAKRSAAGDRTPTNGQARALILTGPDDLRARFTGHTAAALVAGLASLRPRPGSTVGYATRVALRELGRRAEFLDGQLERLDELIGPLVAARAPGLLALYGIGPHTAALLLIAAGDHPERLRSEAAWAHLCGAAPIPASSGKTIRRRLNPGGDRQANHALWRIVFTRLGSDPATRAYAERRTAEGKSKKEIIRCLKRYVAREVYPHLRASAG

SEQ ID NO: 320789 - protein, 348 aa, unidentified
MSKSNQYVGLDVSLKETSICVIDDADKIVWRGRVDSTPEAIASAVKQHAPHAVRIGLESGQLSNWLFHELKAAGLPAICVDARHAKAALSLKVNKTDANDAFGLAQIMRVGWYREVTVKGLDCQAVRALLVARAQIVSQITTLKNCVRGILKTFGRVLPKGLRSQFPDRVRAAIDGHPVLGAIIEPTLRVLEAMRVQLRVYDRAVIQRARSDDTARQLMSAPGVGTVVALAYITGIEDPARFKRSSSVAAYFGMTPRRYQSGEVDHAGRISKCGDGMVRSLLFEAAKVLLSRSARPSALKTWGEALGKRIGAKKATMAVARKLAVILHRMWTTGKTFQWNAEAASPAA

SEQ ID NO: 320790 - protein, 399 aa, unidentified
MAGPSLWAGIDAGKLDHHCVLIDASGERLLSRRVRNDEAALTALIDDVIALADGGLVQWAIDLNAGGGALVISLLLARDQHLLYIPGRIVHHASAAYRGDGKTDAKDAAIIADQARMRRDLPEFRHRDEFTVELRTLCARRTDVAADRNRAINRLRAQLLEYFPALERAFDYSHRKGALILLTGYQTPEALRRIGRTRLEKWLRGRNAYNPVVIADRAIAAANAQHVVVTGQRLGSTIVARIAQQILDIDAELSDLDDMIEERFSQHQQAALIRSMPGFGPLLGAELIAATNGGLDSFHSADRLAAVAGLAPVPRDSGRISGNLKRPRRYDRRLLRVFYLAANNSIKTCPQSRAYYDRKRAEGKHHRQAILSLARRRVNVLWAMQRDNTAYQSTAKTAA

SEQ ID NO: 320791 - protein, 357 aa, unidentified
MKQRRDYILKNEKVFVGLEDSKKTWSLCIRSGGIIIHETSMPAQYGVLRNYFNNKFPKCQIEVMYEAGFRGFELHDQLEADGWECVVTPPHTVTEEKCQRKKNDRTDCRRLAKNLENGDYHRCFVPDKGLREDRQISRTCGQVQADLTRVCSRIRRMLEFHGLDNGFPPGIWRGPAYVRLRQDLAKVELSDSLRFSFEVMFRELENLRQLKKELLLQLRKLAGSDRYKGRVDLLKSAPGIGVLTAIRLALEWGDVSRFRRKEEFASFLGLVPSEYSSGDQEHRGHITKQGNRSVRRWLVESSWVAIRHDPVLLEKFRRVLRNCGSKKKAIVAVARKLALRLRRALLIGEPYVAGVVE

SEQ ID NO: 320792 - protein, 345 aa, unidentified
MNITTVGIDLAKNVFQVHAVDGRGKVVLRKQLKRSQVASFFVNLPPCLIGVEACASAHHWGRTLERFGHTVRLMAPQFVKPYVKTNKNDVADAEAICEAVNRPNMRFVPIKSIEQQAVLSMHRVRQGFVKARTAQANQIRGLLGEFGLAIPKGISHISARVPALLEDASNELPLAFRQLIDQLTGHLNSLGERVRDLEREIIDWHRSSELSRKLEKIPGIGPLAATALVASIADAKSFDNGRQVAAWIGLVPRQSSSGGKSKLLGISKRGDVYLRTLLIHGARSVISAAQRRSEIKNVWLANLLNRRHANIAAVALANKNARTVWALLAHSRDFRPDFATATTAA

SEQ ID NO: 320793 - protein, 343 aa, unidentified
MQTVTTIGLDIAKSVFQVHSVDAAGQVVIRRQLKRRTVLAFFQKLPPCLVGIEACASSHHWSRELQALGHTVRLMPPAYVKPYVKRQKNDATDAEAICEAVTRVNMRFVPTKAPEQQSGLVLHRTRHLFIRQQTSVINAIRAHLAEFGIVAPGGRKGVEELLHVVADPADNRVPTIARACLAALGVQLRRFKEQILEFDRLITAWHRSNEMSMRLDEAPGVGPVLATAVVATVADPKSFRSGRNFSAWIGLVPKQHSSGGKDRLGSISKQGDRYLRGLFVAGALAVIRYAKIHGTKHRPWLTALLTRRPTKVAAIALANKIARMVWAMMAKGERYKEPVALAA

SEQ ID NO: 320794 - protein, 405 aa, unidentified
MEIVVERACGMDIHKDNITACILTSNGKEIQSFPTKTVFLLQLIDWIKQHECTHVAMESTGVFWKPIVNLLEAEGVEFLVVNAQHMKALPGRKTDVKDSEWIAKLLRHGLLKASFIPDRNQRELRELVRYRRSIIEERARQHNRIQKVLEGANIKLSSVVSDIMGVSSRDMLHAIADGEDDPEKLANFARRTMKRKKDDLELALHGYVNPHQRLMIKTILTHIDFLSEQITVLDQEVATRVVPFSDDVERLDSIPGIATRMAEQILAEIGTNIKKQFPSVAHLCSWAGLVPGHNESAGKRKSAKSKNGNKYLKSALVEAAHSLSASKNYLGAMYRRTAARKGRKRAAISVAHAMLRIAYYLLTREEMYVDLGEDYFDKQKQQSIVKYAVRRLENLGYSVTIAEVS

SEQ ID NO: 320795 - protein, 423 aa, unidentified
MKLTYKVCCGVDVHKTFLVATIITSSFVLPQYQQKRFSTFYSGLLAFKQWLLDNNCKDVCMESTGKYWVPVWNVLEDSMHVVIANPKWVSAVKGNKDDKKDSKWIGDLFRIGLVPGSYIPPKDIRILRECTRYRSKLVAMRSSEKNRFQNAFTVCNLTLDAVVSDMFGKSSTDILNYLLDSDTVDPDHCVSLLRRSLKKKASDVIEAVNGFNMTAEQKERVRIVQGHFADIDKRISQIDQIIAKLTAEYEGTISLLCTIPGIDRRLAITIVSEIGTDMTEFGSSKRLCRWAGLTPGNNESAGKKKSVRISRAGVYLKPALVEAAHAAVKATQKCPYFRIKYERIMKRRGKKRAIIAIARMMLTAIYAMVSTGETFNPCDLQKFDMPEELKKKQIISDAKDAVKLLVSLGLVTEGSISLEALVG

SEQ ID NO: 320796 - protein, 350 aa, unidentified
MDTPRYFVGIDIASLKFFAAAGVQVNQEWQLIVQPKPFDNDYDSLPIFLHWLQQNHIKPDNAIICMEATGVYNEVLAHFLVANGYPLAIQPPLEVKRAFKPVGHKTDPVDSQQIAEYAYRFFDELRLWIPREQILEQIKTLLATREQFCMQKTAHMNALKALQRKYVRTPLAEKLHEDTINHLKSDITAIEREIERLIDQDPNHRQLIGLMMSIPGVGFLLAAHLLVTFQSCPQPYDPRSLAAFIGICPYQKQSGTSVRGAATSRHYGPPGLRRLLYLAAMSVRTHHPYFRNYFVRKVQQGKPKKLVINNIANKLLRIICAVLRTQTPFIFGYRSVHPQLLNLKQPLTLS

SEQ ID NO: 320797 - protein, 401 aa, unidentified
MKQLYAGIDWASRTHAVGVVDDQGGIRARFEVPNTGKGFGGLIRRLLKLQLAGVAIERPDGPLVEAMLDAGLRVVVITPRQVKALRSRYGAAGAKSDAADALLLADVLRTDRHRLQPLVPDSDATIVLRALSRTRKDLQKARVALCNQLTAQLERCFPGAVGLFADLHSATAIAFLGRYPTSQAAATLTPATLAASLRRIHYCGHTPVAVLLARLKTAPLAAISPDQAAGRAVCVQALLDAIQACHHREHELEAEIIERLELHADQQIFTSLPKAGHGVRAAALLSELGDVRARFPDEEALAALAGVAPVTRASGKLRSVGFRWACDKKLRNAVIDFADDSRHASPWAASIYTQALQRTRRPPQAVRILARAWIRVIWRIWQDHTTDDPTKHGGAVRLLTA

SEQ ID NO: 320798 - protein, 408 aa, unidentified
MRLADASCRLIIVVESTVLEYGNSPETKVAKHKPYQGVGMKQRANGREKVIYAGVDYHKNSFTVAYLDRLTGVLSTRKYKTEEIGKFKEHLKNFQENGYGVRVAVETLTGVTYFTEEIRNHVEELVYVNTNRFKHILKGVNSAKNDRIDAETIAIYHEMGLLPTVYIPTRKEKELRMKIKERDSYVDMRRDVMNRLHSILLEYGIKTNKRELTTKKGVERIKEETKEKVPPSMQEMIWRYIETIEYLTQKIRETEEDIKGFIENEEEFKERVELLKSIPGIGDIVAISFISSICDEKRFENGDKVAAYLGLVPRVRSSGDNERNGRITKKGNSRMRNKIVQAARALLNSKSDNSIKRFYKGLLKRGVDKKKALIATARKLVKVMFAVLRERRQFVDFVDDKCNLCVVG

SEQ ID NO: 320799 - protein, 402 aa, unidentified
MNAVGIDVSKGKSMVAIMRPFGEIVSTPFEIKHTASDIHSLVELINSVEGESRIVMEHTGRYYEVLAHQLSEANLFVSAINPKLIKDFDNDSLRKVKSDKADAVKIARYALDKWQNLKQYNVMNELRNQLKTMNRQFGFYMKHKTAMKNNLIGILDQTYPGVNTYFDSPARSDGSQKWVDFASTYWHVDCVRKMSLNAFIDHYQNWCKRKKYNFSQSKAEEIYGKAKELVPVLPKDAITKLIIKQAVDQLNSASTTVESLRTLMNETASKLPEYPVVMAMKGVGTSLGPQLMAEIGDVSRFTHKSAITAFAGVDPGVNESGTYEQKSVPTSKRGSADLRKTLFQVMDVLIKTHPQDDPVYQFLDKKRAQGKPYYVYMTAGANKFLRIYYGRVKEYLASLPES

SEQ ID NO: 320800 - protein, 453 aa, unidentified
MAKTKRNSKKYVEPMQLVYPNAAGLDIGSREIMAAIPPDREGETVRAFGTYTADLKELADWLSQNGVTHVAMESTGVYWIPIFELLEERGFVVIVVNARQAKHPPGRKSDVQDCQWIQRLHSYGLLNGSFRPEADMCILRAYLRHRDNLIEDRAKHILYMQKALVQMNLQLGQALSDLTGKTGLEILRAIVAGEHNPHELAKLRHGRCEHSQEDLIKALTGHYRKEHLFVLKQALEMFDSFTQRLLECDQEVEQLLGEIKPDLPDDFPPLPPDPKPTSNSKNAPNYDARASMYELARVDLTAIAGMNESLVQKILSEVGTDMSRFPTVKHFCSWLGLAPHNAISGGRVLYSHTLKNQNRAGQAFRLAAQAVARGKTVYSEFYRRIRARSGAKEAMVATAHKLARTFYFMLVRKTPFNQLDLETYLAAQREKDVQRLQSRAAKLGFSLQPCEAV

SEQ ID NO: 320801 - protein, 348 aa, unidentified
MVIIGIDAHKRSHTAVIADTVGRQIAVKTIGTTSNDHLALLAWANKHDDQERLWAIEDCRHLSRRLESDLLAAGEQVVRVPPKLMSHVRDSARTFGKSDPIDALSIARAALREPDLPVARLDGAEREIRLLVDHREDLVAERTRVISRLRWHLHELDPAWAAPANFDRVSAFARIKFHLDDFAGIVADLAQRLLTHLHRLTEEIDELTAELSRRIPVIAPALLAIVGCGSLTAAKILGETAGVTRFRSKDAYARHNGTAPLPVWSSNKARRRLSRTGNRQLNAALHRIALTQARCHPGARELLARRKAGGDGGMEALRILKRRLSDVVYRALIDDHHTSAARTLILAA

SEQ ID NO: 320802 - protein, 348 aa, unidentified
MALTIVEDTRAVTGGVDTHADMHVAAALDPIGGLLGVGEFPATAAGYTRLLAWMGGFGTVALVGIEGTGSYGAGLARHMAACGVRVVEVDRPDRQDRRRQGKSDPLDAVSAARAAQSGRAAGAPKGRDGAVEAIRALMVARRSARAGRTQAINQARALIVTGPGELRARFAGHTAAALAADLAALRPRPGDVPGYATRVALRELGRRAQFLDGQAGRLDELIVPLAAARAPGLPGLHGVGPATAALLLIAAGDHPGRLRSEAAWAHLCGVAPIPASSGKVTRRRLNPGGDRQANHALWRIVITRMSSHPPTRAYVTRRTAEGLSGKEIIRCLKRYVAREVYPHLRAGA

SEQ ID NO: 320803 - protein, 317 aa, unidentified
MSKLRFVGLDVHADTIVVAVAEAGGEVRSLGVIPNRLESIRKMMGKLAPLETLKCCYEAGPTGYVLYWQLTQLGVACEVIAPSLIPTKAGDRVKTDRRDAEKLARCYRAGELTPVWVPDANHEALRDLVRAREAAKKDQLRHRHRLGKFLLRHGKRPSDAGKAWTQKYLNWIRIHVHFEQPALEATLKHYREEVDHIAERIAKLEQAIDEAVKQASPEMRAVIEALQALRGVAQTTAATVVAELGSLSRFARPSQLMGYSGLVSSEYTTGNRVQRGAIIDRPIFRHFSVVMRSSCSATAKSRLSRRRSLCWILGSSR

SEQ ID NO: 320804 - protein, 415 aa, unidentified
MKVHRNCCGLDVHKQTIAACLIREVGNGKSYKEKRLFGTMTQELRELSGWLREAEVSAIAMEATGIYWVPVWNVLERAGFHLLLINPEHYRAIRGKKTDLKDGERIAELLQDGRLEGSFVPDTELRVLRDLTRYRVKLVEHQSSVACRIQKLLEQCNIKLASVASNVLGVSGTAMLRALAGGETDAQRLANLAKKQLRKKIPALQLALDGCLLPHHRFLLGEMLHELSHIESQLARLEAEIESQMQPFEKALSAWMSIPGIKHRVAWTLVAEIGTDMNVFPSAADLASWVGVCPGNNESAGKRKSGKTRKGNRWARRALCEAAWVAAKAKKSYLAAQFRRFAATRGSKRAIIAVAHTILTIGYHMLQRGTLYQDLGANYFDQRHILRTTKRLVKRLEALGHRVILQSPILNPSIG

SEQ ID NO: 320805 - protein, 355 aa, unidentified
MAKYSVSRISDFLEAFEGREIHVGVDVHKLSYHVAVRREDGACETWVAPAKPYDLVLALLELGQPIAQVTYESGPTGFGLCRAMEEAGIDCCVVAPSKVPRAVVAGSKTDRLDCIKLADYAAKGMLKGIAVPTPAEEGERSLIRRRSQIVDNIRRAKLRIKSLLLYVGVEEPPGLSQWSGQAVGRLSTLQIEPAAKLTLDSLLRELSWQKVELKEIEATLSMIMVKRHEEAMKRLRTVPGVGPTVATTFLLEVFRPERFQCHEQVVSYLGLAPTVRQSGERSSRGRLVPVGQKRLRSLLVESAWIWQAKVPKIKERYNQLVAKTGVPQKAIAAIARLLAIVLWRLSLSGRCYQSS

SEQ ID NO: 320806 - protein, 344 aa, unidentified
MGEVSTIGLDIAKSVFQMHGVDSSDAVVIRKRVSRLKLLEYFAGLPPCLVGIEACPSAHHWGRELQALGHTVRLMPPSYVKAYLKRSKNDANDAAAICEAVTRPSMRFVPIKSKEQQTALMLHRTRQLLVRQRTMLSNALRGHLAELGIVSAKGRNGIGELLRIIADGADNQIAPGTRAILDVMARQYSTIGAEIRSIDKSILAWHRSCEASRRLEEIPGIGPIVATALVAEVGDWREFRSGRNLAAWIGLVPKQHTTGGKDKLGRITKQGNRYLRWLLVAGAMAVIRYAQKHGTEGRPWLGRLMEHRPTMVAAVALANKIARMAWAIMVRGERYQEPKLLVAA

SEQ ID NO: 320807 - protein, 349 aa, unidentified
MSAKFNSEIAVIGIDIGKNSFHVVGLDRRGAIVLRQKWSRGQVEARFSNLPPCLIGMEACVGAHHLSRKLTSLGHDARLMPAKYVRPYSRGQKNDFRDAEAIAEAVQRPTMKFVATKTAEQLDLQALHRVRERLVSQRTGIINQIRAFLLERGVSVRQGLRFLRAELPRILARPCDALSPRMLRVIEDLAGDWRRLDERIEGLSSEIEVLARQDAGCERLMSVPGIGPIISSAIVAAIGGGDAFSKGRDFAAWLGLVPKQISTGDRTILGKISKRGNRYLRVLFVQAAWAVLIKPKSWARHGLKPWLEAAKKRLHHNVLAVALANKLARIAWSVLAHGRVFEATKIQAA

SEQ ID NO: 320808 - protein, 423 aa, unidentified
MDILYERVAGLDVHKDTVVACVRIATGRQTQRECRTFATTTEGLTALAAWLEENRCTHVAMEATGVYWMPVWKILGQGDFELVVANAAHIKNVPGRKTDMNDAMWIADLLACGLIKASFVPPEETQELRSLTRTRKQLVREQTRHAQRIQKTLAEANIKLDSVLSDPMGASGRRIIEAMIAGVRQPAKLAELASKQIKATPKELYDALHGRLTDHHRFLLELHLRQWDGLDAAIRNIDREIGQRIDRIEVQIGTGQAPFRDLVDLLMTAPGVSTVAAPAILSEIGHDMSRFPTAGHLLGWAGMCPGHNESAGKRKSSRLRKGAPWLKTMLIQCAWAAKRKKDSYYRAQFFRLQSRRGPQKAICAVAASLLTAIYHMLKYGVEHRDLGAAHFNSRPPELKAKRLVAQLAKLGFAVQLQPIVQAA

SEQ ID NO: 320809 - protein, 361 aa, unidentified
MHYVGLDVHAQQSTYCVLDGNGKVFQRRTVFGSWHKLIGKLDSMPKPFAVCYEASLGYGFLYDRLSKIAERVEVANTSQLRLIFRSKHKNDRADAEKLAKLLFIDQVPVIHVPKPEIRAWRSIIEHRHSLVSERTRIKNGLRAILRSRAIVPPMRLWTKAGVTWLAGIDLDSDLDILRRDMLLERLCSVEKMVARVEKALDARGTAHPGVRLLMTIPGVGLRTAEAVMAYIDEPGRFTRNKAVGRYFGLVPTQDASSRKNHLGHITKEGSPTVRKLLVEAAWQGKRRSRRIKAFYERILRDDKQRKKIAIVATAHYILRCMLAMLTTGEVWRNRDTDKIYSPPQRLRRVIDKPILAAVAGN

SEQ ID NO: 320810 - protein, 355 aa, unidentified
MSKDEFSACLQSYQLESQSHQVISRKTFKNKRTGFKACMKWLSRHTRNQPAPVRMTIEATGVYYEAFALYVREHHPAIHLSVVLPSQSKRYIESRGLRSKTDKIDAYGLALMGAERKLDAWKGIDPFWRTLRVYTRTRADLLEQRTQLRNQLHALDHSGMDILKAKHALRECIQTINDQIDELTKLIEQQLRSRNDLRTQIGCLRSIPGIGTLTIACILAETNGFTEFRKISQLISFSGYDVKIRESGKWVGKPKISKQGSKHIRRAMYMPATAIAGKNGGPIYEFYQRLLATHNIKMKAHVAVQKKLLTYMYILWNRKERFDPDIIRNQRKEYPKKVAPPESEATVDTSLVLSQ

SEQ ID NO: 320811 - protein, 463 aa, unidentified
MERKGRRKDRPRRRSSLLEQVNRNAAGIDCGSAEHYVAVPVDRDPEPVRHFKTFTADLHQLADWLVSCRIETVAMESTGVYWIPVYEILVARGIEVLLVNARHLKNTPGRKSDVTDCEWLRELHSVGLLRGSFRPDEEIVTLRSYLRHRDTLVQNAATAITRMQKALVQMNLQLHIVIRDIMGMTGLAIIRDIVNGQTDPGPLAKHRDAHCKASEADIAAALTGHYRPEHLFALKQNLEIFDAYQRQIEACDAQIEACLTELAEKMAPPSAPLPSRRSRRNRRSNEPRFEVRPMLHRLANTDLSELDGIGPYTALRLISEIGTDMSRWRTDRHFTSWLTLAPNNKISGGRLLSSQTQPSASRAAAILRMAAMSLTRTQTALGAFYRRLAFRIGKAKAITATARKLAILVYHSLKGDFVYKDPGAAAYDARHRDSVIRRLRHRAAALGLSLVDGQTGEILDGVS

SEQ ID NO: 320812 - protein, 424 aa, unidentified
MMKLKYSICCGLDVHKNVIVATIVTTNSQGISEYLQKSFSTINSDIQKFHDWLIENNCYHVCMESTGKYWIPIFNYLENDIEVCLTHPKYVKAIKGKKTDKKDSKWIADLYKFDLVRCSFIPPKDFRQLRELARYRFKLVCMKSSEKNRIQNCMTVSNIGIASILSDPFGKTATEIMSYLLEHTSESMDEKAVRKLIKKGAKAKSDEIIEAIKGYNIETDQAKKLELARAHLDYLDDMITQTEVELYVRIKPYYEFVEFVSSMPGMTELSSTIILAEIGINMDIFDDVKHLCSWCGLSPANNESAGKKKSVRIAKAGAYLKPMMVQCALAAIKNKKEPYFAIKYGRIKKRRGHKKAIIAIARMMMVCIYHMVSEKKPFSPTDYEELMDPQNHVERVVLNENNVFAYLESLGYDSSQLVNVKSYA

SEQ ID NO: 320813 - protein, 402 aa, unidentified
MNAVGIDVSKGKSMVAIMRPFGEIVSAPFEIKHTASDIHSLVELINSVEGESRIVMEHTGRYYEVLAHQLSEANLFVSAINPKLIKDFDNDSLRKVKSDKADAVKIARYALDKWQNLKQYNVMDELRNQLKTMNRQFGFYMKHKTAMKNNLISILDQTYPGVNTYFDSPARSDGSQKWVDFASTYWHVDCVRKMSLNAFIDHYQNWCKRKKYNFSQSKAEEIYGKAKELVPVLPKDAITKLMIKQAVDQLNSASTTVESLRTLMNETASKLPEYPVVMAMKGVGTSLGSQLMAEIGDVSRFTHKSAITAFAGVDPGVNESGSYEQKSVPTSKRGSSDLRKTLFQVMDVLIKTHPQDDPVYQFLDKKRAQGKPYYVYMTAGANKFLRIYYGRVKEYLSSLPES

SEQ ID NO: 320814 - protein, 480 aa, unidentified
MSPSFIAIGCDSSKGRIDVEVRNHHGTVLHAGIFDDTPNDHAAVRRLIDELRERYPEAFFLVGIESTGGMERNWLAFFRKEKRWTKCMHVFKLNASSVHAYRLSQLHRAPGDAAAASDIARFLLEKCSKRTPVTEPESGPLVFYRMIRALIGERICASQRLQTLLVAVHPDLVRFCRYGLPTWILLLLERYPTAALLAQAQISTVDAIPHIDTTRAGELIANAGQSVASLTDSATSAAIRLLVRRLRDTEKCIDEAQAELLTIITSDPQSQLAKAVALLDGMPGIATWSAACLACEIGDPSRFPHGKSIVAWAGLDPVTEASGDDHHSLGISHRGNAHVRAMLFPLAMSGIQYNPVLKAFYERLTTTNGKTKLAALVAVMAKILRIAHAILLSEKAFDPTHEANRQQLAQATQANRSPVPAAAPAPPQAPRLEAPISRREANKRKKAAAPSATVRDQSPKRMTGREPHSKHHAQPTHAKG

SEQ ID NO: 320815 - protein, 399 aa, unidentified
MRKIIGIDVSKSTAKLSVAIDAKTVYEGDITLDMIGFTSLKAIIDSYGGAEVVFEATGVYSRRLERYLLDESITYHILNPLVAKKRLDDGSRTRKNDVRDARGLAITEFAKHPKPFKPSFYDPVYRELMDISRYYDQQTEDLKRTKNRIHRLIQLSFPGIEEELDLRKPSALHTLTLFSHPAELTGLSFENIKTQILDMHLKGVGAVRSSNLARALWRSRARSYPAVSGNSFVVQAVKHETQKALKLLSEREETVQAMVSLAERTPEYVILLSIPNIAENTAVRLVAELGDIRRFKTRAKLNSFIGLDLQEIQSGNYTAQRKITKHGNAHTRKLLYWTVINMIGSGAQPSHIRDFYAKRQATASRRKPLLVACMDRLLKTIHYLVNTNQLYSYELACSR

SEQ ID NO: 320816 - protein, 341 aa, unidentified
MEQVITIGLDIAKHVFHAHGADERGRQVFSKRISRSGLLAFFARQPRCVVALEACAGAHHWGRELQRLGHEVRLIPPAYVKPFVKRQKNDATDAEAICEAAQRPSMRFVAVKTEEQQASAMVFRGRDLLVGQRTQIINALRGHMAEHGWVAPKGPSHIARLAELLEDETAVPASARPILAAMLEMLAELDRRIAMLDREIARRAREDETARRLMTIPGIGPITATALAALAPPPESFAKGRDFAAWLGLVPRQHSSGGKQKLGAISRMGERSLRRLMIIGASAVVLHASKRGAPAGSWLAQMLARKPRMLVTVALANKTARIVWALLTRNEVYRAPALAAA

SEQ ID NO: 320817 - protein, 423 aa, unidentified
MMKLKYSICCGLDVHKNVIVATIVTTNKDGISEYLQKSFSTINSDIQRFHNWLIENNCYHVCMESTGKYWIPISNYLENDIDVCLTHPKYVKAIKGKKTDKKDSKWIADLYKFDLVRCSFIPPKDFRQLRELSRYRFKLVCMKSSEKNRIQNCMTISNVGIASVLSDPFGKTATEIISYLLEHTADSMDEKAVRKLIKKGAKSKSDEIIEAIKGYTIETDQAKKLELARGHLEYLDDMITQTEVELYVRIKPYYEFVEFVSTMPGMTELSSTIVLAETGVDMDIFDDAKHLCSWCGLSPANNESAGKKKSVRIAKAGDYLKPMMVQCALAAIKSKKQPYFAIKYGRIKKRRGHKKAIIAIARMMMVCIYHMVSEKKPFTPTDYEELMDPQNHVESVVLNENNVFAYLESLGYDSSKLVKRNDN

SEQ ID NO: 320818 - protein, 412 aa, unidentified
MTAKDQFAAHVGLDWADKKHDVCVQFKNGDRIFHVIEHSPEALDIWLNELYQRAKGRIAIAVELKKGPVVYALQKYPFVTVFPVHALSLARYRQAFWPSGAKDDPQDAELALDLMLRYPHKIKAIEADNPDIRLLQQLVEQRRLLVEDKRRFVNRLINTLKQYYPQPLEWFSHRDSSLFCKLIIRWPSLQQLKRARSDTVRHFMNAKGGPAVAYTEQRVASIASAIPLTTDKTVIEANALMATALASQIKLTGDLIRTYDERIESLFDTLPDAELFKSLPGMGPCMGPRMLAALGDNRDRFNSAEEIQNYAGIAPVTERSGQKSWVHWRWQCAKFVRQTFVEWTAKTVNSSYWARLYYQGQREKGKSHQSAIRALAFKWIRIIYRCWKTRTRYDEAKYLLALEARKSPLLKP

SEQ ID NO: 320819 - protein, 353 aa, unidentified
MKGAFENSRVIVQRKEVFIGVDVHKVSWHVTARAGGEEVFNGGIPGQYHPLRKLLDRFEACQINVAYEAGPCGFWLHDKLVEDGIEVTVVPPSLIPVESGNKVKTDKRDSRKLARLLQSGLLKKVYVLTEEDRIDRELVRTRRQVLEHRNDVARQIKSKLLFHGITSPFSSKAWSQGYLRWLKGLTFEREVLRISFDVLIELYDLTTELVKLRKRIMELSQSDKYRDKVKLLKGVPGIGTLIAMEILVELADIERFARADELASYMGLTPSEFSTGEYVHQGRITRCGNKRVRTCLVEASWILIQKDPWMRSKYDRLKGIKGGKRAIIAIARNLIIRIRRILLNNEPYVVGVC

SEQ ID NO: 320820 - protein, 331 aa, unidentified
MHVNTIGVDLAKNVFQVHGVDSAGKVVITRQLRRKQVLDFFSKLPSCLVGMEACGTGHHWAREISKLGHTVRLMPPSYVKGYVKRSKNDAADAAAICEAVTRPSMRFVPIKSTDQQALLMLHRTRDLLIRQRTQLINALRAHLAEFGLVAETGREGVAQLGAIITDEGNHEVLPSAMKQALQAIVDQLAALELQVGALDRAIHAHHRANDMSCRLETVPGIGVIGATAIASTVTDPSGFKSGRDFAAWIGLVPRQHSTGGKERLGGISKQGDRYLRRLLVIGATAVVRQARLHPQKHPWIMKLLAKKPAKLVAVAVANKMARIAWAIMAKG

SEQ ID NO: 320821 - protein, 352 aa, unidentified
MWYVGLDVHFRQSTYCVLDEHGRKVKTETVKGPWDKVLLALARIKEPWAVCFEASTGYGVLWRRLQAMARRVVVAHPGDLRLIFRSKRKNDRIDAERLAKVLYLDEVPAVHVPGAEVLAWRGLIAHRNRLVKERTALKNGLRALLRGQGIVAPRSLWSRKGIAWLRALELPTLLDALRRDQLLERILTVHGQIHRVEQELNRIGEKHPGVTLLRTIPGVGMRTAEAVVAYVDDVKRFANLRKVGSYFGLVPQQDSSSTVNHLGHITKQGPGLVRRLLTEAAWQGIRRSPRIRSYFERIGQGNRERRKIALVATAHYLVRVMVAMLRSGECWRPEEAEATQGAKAEPASTPAA

SEQ ID NO: 320822 - protein, 369 aa, unidentified
MSDSTMYVGLDVHKESIEIALAPCEGGEVRHYGRIAGDLAAVDKVVSRLSKAHSTLKFVYEAGPCGYALHRHLTRKGYACAVVAPSMIPKCSGDRIKTDRRDAIMLARLHRAGELTAVFVPNAEDEAVRDLTRSREDAVANHRRSRQQLGALLLRQNIRYTGKSAWTQAHLRWLARVVMPQPTQQIVFQEYLNATQETDLRVTRIDEQLRIAVEGWRMAPVVRAMQTLRGVSLNAAATTIAEIGDMTRFDNPRQLMAFLGLVPSQYSSGPRVRMGHITKTGNGHARRVLVEAAWAYRFSAKVARAHQIRQENQPQAVRDIAWKAQLRLCRRYQRLLAKGKTKQVVVTAIARELMGFMWAIAREVKPTAA

SEQ ID NO: 320823 - protein, 392 aa, unidentified
MRISVGIDIAKEIHWVTAIDADGAVQIDRKLPNTPADIATLSDELTALRGTVRIGLDVIGGIAGLAQAMLAEAGFALVHVPGIAVNRARQGTVGGENKSDPRDARTIADQVRTRPDLRPIEPAAELDLEIRLLVSRRGDIVQAQTQRLSRMRDLLVGIFPGLEACLDLKAKGPLHLLTKFVTPAELRAAGKKRLVRHLQAAGGLPKVEDLADLVLIVAAEQTVAVPAEPMTARLIRELANEALASRTRLIELDRELETLLQRHPDAALIRSLPGMGAVLTAELIAEAGNLARFRSADALASAAGMAPVLRQSGRTRFLRRPSGGNKGLKRVFYQSAFCSLNHDDSRAFYERKRREGKRHHQAVIALARRRVNVLWAVLNSRTPFQTGFKAAP

SEQ ID NO: 320824 - protein, 338 aa, unidentified
MTQFNHFVGIDISKKTFDAALIPGGNTAGMKHQAFTQNAAGFADFLDWLNYYQIAHEEVLICMEHTGLYTYVLIDFLIATGLNLWVEMPLRIKKSMGLQRGGDDKAAAIQIALYAYRYKDQVLLWKPEQAIVLELRQLSAQRDRLKLSLNQLVVPLQEIAECSHDAGIIKMQVKLQAPVIKAIEKSIASIETKIDNLIAADPATQATINRVSSIKGVGKQTAIHVFIYTKGFTTFSSGKQLASYCGVVPFTKSSGTSVRYKTQVSPFANKHLKKLLHLCAMAAIQHNDELNQYYSRKIAEGKNKMSVINAVRNKLVQRIFAVVRDGRNYVENYAYQRA

SEQ ID NO: 320825 - protein, 452 aa, unidentified
MPKKIVRYVGLDVHKRVVEACIVDSAGKVLQRKRFPLSRDTLEHFARKTLKRGDHVALEATTNCWAVVDRLQPHVARVLVSNPMATKAIAQAKVKTDKVDARVLAQLLRCDFLPEVWQPDEATRRLRELTRRAAALTGERTKMRNRIHSVLATRLIEAPKSLFDERGLNWLAGVELDPQARMLVDTDLRQLERLQGEIDALEEELIRRAWNLEPARLLMTLPGVGAATALAILAAWGDPARFADGNHAAAYLGLTPSTSQSADHCYHGPITKRGNSHARWMLIQAAHHLETHPGPLGHFFRRLKRRKNHNVAVTACARKLAVIAWQMLTRGEPYRYAIPRSTEAKLARLRVKASGERRKGGSSKGTKSQAKLPGGSRTIRSLPQVCQSEGLPLPYPLSPGERRTVKQAGCEALVAQLAAPQVVPRNTRAKAAPNKTEHPAKGSSTRKGKTST

SEQ ID NO: 320826 - protein, 382 aa, unidentified
MNRILKIGMDVHSTSYTLCAMEPVLGGEDRIFANIQVTSDYRNVIQFIDKLKEKLGSSDSYSIECGYEAGCLGYSLYHQLTKSGVKCTILAPTTMLTQQGKRVKTDKRDAVMIAQCLSYGGYHAVHVPADKDVSVKEYLRMRDDHKVALKKIKQQINAFCLRQGYFYAGNKWTIKHLNWLKKLVLSDLYRETLNEYLTSYEEQTAKIERFDKRIEELAEDSDYQENVKKLGCLLGIKTHTALSLIVETGDFKRFRKGNTYAAFLGLAPGESSSGEKINRTGITKAGNSHLRTLLIEAARGMCRGRIGYKSKVLRSRQDGNPTEVIAYADRGNTRMRSKYYRMIRHGKKDNVAVAAVARELACFIWGLMTNNITSKEEGTKAA

SEQ ID NO: 320827 - protein, 344 aa, unidentified
MENYAGIDVSLELSSVCVVDAQGKILKEAKVASEPDALVEFFETLGFAVKRIGLEAGPLSQWLHAGLKRAGFETVLLETRHVKAALSAMTVKTDRKDARGIAQLIRMGWFRPVHAKSVDAQEIRALLIARKQLLGRLIDVELSIRGILRGFGLKVGPVTRKNFEARIRELVAGQATLERVASAMLSARSALKAEYGRLHKAVLAIVRDDAVCRRLMTVPGVGPLVAVTYKSAIDDPHRIVKSKAAGALFGLTPKKYQSGEKDVTGGITLAGDKIVRTVLYEAANVLLSRITRFSKLKRWGMDVAKRRGSKRAKVALARKLAVILHRIWVDGTTYRWAEAGPIAA

SEQ ID NO: 320828 - protein, 395 aa, unidentified
MKNCNSESSKSKTRSTTKAEESVSYPAYIGLDVHSQTIAVAVARSGREEPEFRREIANKPKSVEKLIKQLTTEFAGEVLLFCYEAGPCGYGLHRQILESGHECQVVAPSKIPSKPGDRVKTDRRDAIKLARYLRSADLKPVWVPDEEQEAMRDLVRARGDFKNHEKHALQQLNSLLLRYGHVWPSGKQRWTEAHFNWIESREFPHPWSYVVIQEYIDAVKGATRRVADIMAQIEMLLPQWSLSPVVYSLMSLRGIDKLAAIIILAELGDISRFDSPAQLMSYVGLVPLVHSSGEKTYRGKITRTGNSYVRSLLTQSSWTYRFPARQTKHIKSKAAQASEGAKAISWKAQKRLCGRFRYLMRAGKNPKITVVAIARELLGFIWDIVCNEMPKLQRA

SEQ ID NO: 320829 - protein, 365 aa, unidentified
MKQDIRTEYTMGLDLGDKKSRYAILDGRGTVVEEGDVATTRDGLSQLLRNRDRMLVVMEAGTHSPWVSRHVRQLQHEVLVANPRKVALIYQNRRKRDRVDAITLARLGRSDRRLLHPIEHRSEQAQQDLALLRSRDALIRARTRLVAHVRGVVKTVGERLEDCDADNFHQRAKDQLPAALRPILKPILETIGRLTRQIGQLDRMAEQMVKRYSETARLQQVNRVGPLTSLAYVLTLEDPGRFASSRSVGAYLGLVPGLAESGTIRRELGITKQGDRFLRGLLVQCAQQILGPFGEDCDLKRFGERLAAGGGRNAKKRATVAVARKLAVLLHHLWVSGDTYDPLYNTKKVEQKQNGAAQAEETVLV

SEQ ID NO: 320830 - protein, 360 aa, unidentified
MSFNGTSVGLDVHALSVVAHAFDEETGRVERARLCPDHGEILDWLHRLRGPLRVAYEAGPTGFGLARALTDAQIDCVVAAPSKLIRPAGDRIKTDARDAAHLTRLLRLGEITAVTVPEAEVEAVRDLVRAREDARADLMRVRHRLSKLLLRQGRVYSGGNAWTGVHETWLRRQRFDDPHTRAAFDHHFDAVLSATAARDRLDEQIVAVAASSRWSDPVDRLGCLRGISALTGLALSVEIGDWTRFTGASIGAYVGLVPTEYSSGASRVQGSITKAGNAHVRRLLIESAWHHRAAYRNPGPAMRARWAKVDPALKDRGHAGNRRLHQQWCQFNERKKPHVVANVAVARQLAGWCWSLATLA

SEQ ID NO: 320831 - protein, 385 aa, unidentified
MPGFTGSAQTAIDYNTTIIGALELSSKKWVLAVQLPGVDRHSRYVLDACGDGVVSFVARLKARCAAAGREITRVILTHEAGRDGFWLARFLARRNIEVHVMQPSSLPVDRRARRAKTDIIDVEMLLRTLMAWLRGEPRVCSMVPIPSESDEEARRAHREREDLTRERRSIVNKIDGILATLGVKGYKALRRDRREQLNCAHQPDGDPIPPKAKARIERLLDRLDLVVKLIQQVESERDAVLKNDAPADEAEGMIRSLTELRSIGPDLATLLVREAFVRQFRNRRALGGYVGLGGTPFSSGGSEREQGIGKDGNRRVRAAMVELAWMWLRWQPDSALSVWFRARVGAMGGRIRKIMIVALARKLLVALWRYVKDGVIPEGAKMKPA

SEQ ID NO: 320832 - protein, 465 aa, unidentified
MKKTHKKSQRSKSKKKLVASGGRAVEVRASGELNRINEHAAGVDIGGERHYVAVPPGSTEHPVREFGVFTKDLYAIADWLRECGVKTVAMESTGVYWVPLFEVLEECGFKVKLVDARKVKNVSGRKSDVLDCQWVQQLESYGLLQAAYRPTDEIVVLRSYVRQREMLVKSAATHIQHMQKALQQMNLRLDNVVSDITGQTGMRIIKAILSGERDARKLGMMRDYRCHATAEEIAQSLIGNYRQEHLFSLKQAVELFEYYQEKIAECEAEMEKYLECLPHVTEEEPPELPFKEKRNLMSFNVQDHAYKLLGVDLFRIRGLNSETVLRIVSEVGVDLNAFPSEKHFASWLCLSPNQRVSGGKVLSSKTNPSSNRAAAAFRQAAVSVERSQSELGAFYRRKRSQKGPASAATATAHKIARLYYSLVKNGTEYQEQGARAYEERERERIVANLKKRARSFGLELVAKGA

SEQ ID NO: 320833 - protein, 444 aa, unidentified
MYYIGLDVHKKTISYCVKDASGQVHQEGKVGATRRELDSWIKALPQPRTMAMEATIFTGWIYDHLLPHAQQVKVAHPLMLRAIAAAKKKNDRIDAGKIADCLRCDFLPECHMASTQIRDRRRTLRYRHLLVRQMVQMKNRISGLLMETGVSYNKQRLHKVGYFRELLSTNEDVHESIRPLLKLSRDTVVRLQKTEYALVSSLQRDPLLADRVKRLRTVPGVGPITALAWALEIGNVARFRSIRQAISYCGLCGEEKSSADKVLRTPLSKQRNKHIQRVLVEAAKLAPRQDHDLALVYETEKQERECQSSDSGRSSKDGRVSARRRSRRTGLRARRKLRESGGLETSAWGRTQRSHSAQAARSCRLPTERRRSNSRGSLRIVSGLAASTDSIFCDGLQGPETANGCPVLRRQEPLPRGTSASCGYWRERWCALLRSARQENCVFP

SEQ ID NO: 320834 - protein, 428 aa, unidentified
MSYRIAGIDVHKKMLAVVVSDVEIESEYQFERRMFGGNPEQLRMLAAWLLEQETEEVVMESTAQYWKPVWGALERYWKPIREKREGAKRRSGTLHLAQAQSNRGRRGRKKDFVDAERLVKRLVARELTLSFVPDVEQRLWRALTRKKYQLRRDLVRLNNQLESLLEETHIKLSSLVSDLLGVSARRMLNALADGETNPAALASLAHQRLRATPEQLCDALGACTELKPVYRRLLKMTLEHLQILEQQIGQLDQELATLLHPHQDAVQRLAEVPGLGVDSAQQIIAEVGPTAATFPSGEQLSSWVGACPGDEESAGVNYSHRSPKGNRHMRRLLNQAANAAVKVKGSIFELIYRRCVPRLGHNQAIGVIAHRQCRLIWLILHKGTLYEERGPAVNKRSKYQRTWRMIRQLQQLGYRIESPNPQASQAQA

SEQ ID NO: 320835 - protein, 548 aa, unidentified
MDHNKTVEAESAPAGAEADSASTVPRECGILRKVSAMASADAPDFIGAKCPTCRLSSARPMFIGRAAAGNCGGILPRQDFTSIPPKPTPCPDKKGKDMARHTNRFEEVRRFVAGVDLAGHADHYVCGPRKDDGTHDIEHFGTTTNELLRMAAWMKERKVESAAMESTSVYWIPVYDTLESAGIEVVLVDTRTVKMVPGRKSDVKDCQWLQRLHSCGLLHGAFRPPEKFNAVRSVIRERGNVMQMRTQAIQAAQKSLDQMNIRLHHAVSDIDGVTGMRILGAIVDGERNPRTLAKLRDKRCRKSEAEIAEELTGNWREEHLFNLKQAYRTLCFLDERIAEYDRQIRDMYAKIAEAFPPVDPPPGGGGKKPKDKADAKAKADLVRICGGFDMTKIGGIGYDSAAAILSELGPDLSAFPTERHFVSYIGVAPALGKSAGKNVSTRKKHKNTSRVGLILKMSASALFRSESALGARIRCVRSRTCSRTAIKDVAREMGKQIYRGLKYGQAYVDEGEQAYMDRTRERTIKSMKKKISKLGISAEELGIYPIAV

SEQ ID NO: 320836 - protein, 338 aa, unidentified
MKLYGAIDLHSNNNVTVLSDEQDRVVYEKRLPNDLSLIAEQLATYRDSIQGIVVESTYNWYWLVDGLMDEGHKIHLANTAAIQRYEGLKYTDDQYDARWLAHLLRLGVLPQGHIYPKQHRPVRDLLRKRGQMVRQRTMNLLSIQNLFSRNTGGSMSANRVKRLESKEIEELIPNADLALAIKANLTMLQCADGQIDILEKAVIGRVKLKPEFELLKTVPGIGLVLALTIMLETGDIARFATVGDYASYCRCVGSKKISNGKKKGQGNTKNGNKYLAWAYVEAANFAIRFNAKIKSFYQRKKSKTNGIVAIKAVAHKLCRACYYIIKDQVAFDVTKAFA

SEQ ID NO: 320837 - protein, 409 aa, unidentified
MRRLVGDDWAEDHHDVEVLDAAGRRLARARLPEGVAGIARLHAIIGELAGQDVEDEHVEVLVGIETDRGPWVAALVAAGYQVFAVNPLQAARYRERHTVSGAKSDTGDAHVLADMVRTDAHQLRPVAGDSAQAQAVKVVARTHKTLIWERTRHTQRLRHALREYFPAAVQAFEDLDAPDALELLAKAPDPASAARLTRAQIRAALKRARRRDIGAKTERIWAVLHAEHLGQPEVVTGAYAASVRSLVAVLRVLDQQIATLQRQVVAHFGRHPDAEILASQPGLGQILGARVLAEFGDDPTRYATAKARKNYAGTSPITRRSGKTKLVAARYIHNDRLIDALMTQAFAALSASPGARAYYDQLRARGAGHNAALRQLANRLVGILHGCLKTHTRYDEATAWSHHSKTLAA

SEQ ID NO: 320838 - protein, 329 aa, unidentified
MNAGVDIGARSVDLVSRVDDKNSKAERFEQTPAGHARLTKRLKALKPSCVVMEATGIYYLDLALALHEAGLPVAVINPKSYRHFAQLKLSHSKTDAQDAALLAEYAERMTPRLWTPPEPTRLALRDLGRQINRLTGARTQAKNRLHALQSKAMTMPLLIEDEQEGIALLDKRIERLQQAAIQVVAQDPVLDSQLQHLCAAKGIATASAIAILGELSVLPASLKAPQVSRFAGLDVRLCQSGSSVNRPARLSKAGNAYLRAALYMPALSAVRHDPHTKAFYEALVARGKKKIQALCAVMRKYLTGLWACIRNNTAFDASRLFSDIHMKQA

SEQ ID NO: 320839 - protein, 400 aa, unidentified
MLSIGIDVSKGKSTVCGMKPGGEIVYAPFEVQHTREGMLELVSLLRSSCEEVRAVLESTGSYHCPVVAALLENGIFVSVINSLRMKRFCSQSIRKVKTDRIDAMQIALYGLAYWQELQPTKLPEDTYRELQLLARQYYQMTSLLIKAKVDFNAICDQVLPGMQELMSDHAGRHKLSDFVLWYCHTTHILEMGETRFRKDYCKWAEKKGYRNCERMAALIFATAQNGIPVLPNAPSTQIVITEAIRVLHTVEASRDAILTQMQALAKTLPEYSLVREMPCIGDTLAPRLIAEIGDVRRFHSKRALIAYAGIDAPPYQSGKFCANNRHISKRGNRYLRKTGYEVMQSYVMHKPANDPIFTFIEKKRGEGKSGKLAMVAGLNKFLRVYYGKVTELYRSLPAIE

SEQ ID NO: 320840 - protein, 343 aa, unidentified
MTIVILGVDLGKTSCSVVGVDATGAVVARRTMRRQTLIDYVMKLPTCVVAMEACCGAHHLGRLFAAQGHEVRLMSPEYVRPYIKAQKNDDRDAEGIAEAASRPTMRFIDLKSQEQLDIQTLHRVRSRLVAERRNLINQLRAILLERGIIFPVGRQKFEIGMDALLAESNEILSPRMRQLVGDLRVEWKGLDTKIEALNTEFIQLARNDAAMRRLTSIPGIGVLNATALVAAVGDASSFKKARDLGAWLGLVPKQHSTGGKPRLLGISKRGNTYLRTLLIHGARAALPSLSRTDTPLGQWLKSMIERGVHRNAVVVALANKLARIAWAALRKEIGFERSYPVAV

SEQ ID NO: 320841 - protein, 328 aa, unidentified
MFFDVALPDGQGYRHYKFDNNQAGFSALLKVLSSESVVVMEASGPYYLRLASFLSQQGIGVSVVNPLVIRRFCQMRLSRAKTDKKDSIMLAKYGCAEKPALWQPPKEHEIVLQQMEAILANLHKEHTAVNNQLESFTSSGMLDKKLEQLLRKESAHKQGLIDQLTLEIEELAKKHYSSLLASLESIPGIGRKTAIMLLVASGGFSRFSDYRKLSSYIGICPRIFESGTSVKGKARICKMGMSGMRAVLYLCAWSAKRYNKACSELYGRLLAKGKAKKVALIAVVNKLLKQAFAIATKLTIYNENYVRKPCFCTQFIGWHSWRLVWYQV

SEQ ID NO: 320842 - protein, 440 aa, unidentified
MNQEDRSRLEDFRQFRKEIRGSSEYLLVGIDVAKDKHHAFFGTATGKTLLRRLVFENNLEGFRKLLLQAEAMKVQEGFKKVVFGMEPTGNYHKPLGEHLIRCGHGVVLVSGVAAHENRKTLDGRWDTNDTRDAANVADLISQGKCLFYEFPVGALQDLRNLLSLKRRLKRMEHGHRVRIRNHLVAKYFPELDRYYEQSESTALAIVHWCLDPSEIAGLEYPRFVQMVSSVRGRSSQEKRLQTIWRMAVDSVGCEAGPTVEFEAQVMVEGLKQIRESIRQIDEKIQEICSPFPEYEFLLSIPGFGPDVSSKVLGAIGDPFRFQNGRQVLKMAGLDLSAERSGKTSQSAIPVISKRGKADLRYALYQAALIASIRNQDFIVYYTDKLRGREREPGIKTKMRVKLAAKLLIIAWTLMKKKEPFHPSYLRAACQSFSAGAGRER

SEQ ID NO: 320843 - protein, 391 aa, unidentified
MEYVGIDLHKNESQICLLTETGEAMERRIRTEPQRFADVWGGRPPARILIEPSTGSEWVAWCLEALGHPVVVADPNFAPMHATRTRKVKTDRRDARALLDACQLGAYRPAHRLSEAQRHGRGHLAVRDPSVRTRTGDIVLIRAWLRQHGGRGPTGRADQFCRRVVARRLPGRLLSEVAPLLAVMRHVTQPLAYSDGVIATVTRSDVRVQRLRTVPRVGPVIAVAFVATIDDAGRFHRTHEVEAYRGLVPRSSARGRANDAAGSPKPGIAACAGGSSRQLGRSGACAIPGRAPGGVGPPASPRAAATRSPWSRWLAAWRASSTRYGVTGRHLLRGPCATRPRRRPFRFEGPHGEMADSHSEQSGTVRGAKSRIHVSHRFDGWVSAYVDVAAG

SEQ ID NO: 320844 - protein, 445 aa, unidentified
MQVVNPNAAGIDIGSEVHYVAVPPDRDPEPVRSFKCFTADLNALADWLDECGIETVAMESTSVYWIPLYQILEARGFEVVLVNARHVKNVPGRKSDVLDCQWLGQLHTYGLLRGSFRPEDGICVLRSYTRQRDNLIKSAGAHIQRMQKALEQMNIQLHKVITDITGVTGIRIIKAILDGERDPIKLAQLRHYNARSSQETIAKSLEGDWREEHLFSLRQEFELYEIFRQKIAECDQKIEVCLNSFESKVDPGEKPLPKYKHGNKKARGNQPNLDLRNPLYRMIGVDLVPVDGFDVLTIQTIISEVGLDMARWPTEKHFASWLGLCPNNKVTGGRIKDTRSKKVVNRASCAFRMAAQAAGKSHSALGGYYRRMKIRLGPSKAITATAHKLARIFYRMLRYGTDYVDPGLHYYEQKYRQKVLNNLKKRARLLGYELIQGHELRAAVS

SEQ ID NO: 320845 - protein, 428 aa, unidentified
MKKSEYLSTLFVGIDVSARENVICTLNFEQDKLLEFTVPNSQPGADKIADKLSALLAGSHFTRIIIALESTSFYGIHIANFLSSCALLAPYNTYVYCLNPKMVANYKKSFIGMGKKDPIDAFVIADFARVGRISCEPWRGSQFLALQRLTRHRLHLVECLTREKTYMLTNVFLKFSEFATLTNDNHPFSNKYGATASAVLTDFLSNEQIAEASIEELISFVCEKGKNRFSNPQEVASILQAAARNSYRLDKCLYEPLTIAIASSLNCIKAFEAEIKAIDKAIEKTVSGLNPTEYLCLKSIPGIGPVFASGILAEIGSMHAFSSHSALAKYAGIVWNENQSGDFHSDDTKMSKAGNKFLRYYLIEATGSVVRHLPEYDAFYQKKFHEVKIHQHKRALALTSRKFIRLVFGLLAKNQLFVPQGVDHTPNL

SEQ ID NO: 320846 - protein, 363 aa, unidentified
MIESTTVTVGLDVHARSIRLAAVRADELLEERTLAYDEEAVEQLLRRWPAVRCCYEAGPTGFGLYRYLAERGIDCQVVAPGLVPQRASDRVKTDARDARKLARLHAGGLLEPIHVPSPELEAVRDLVGARVDARLDRMRDRQRLSKFCLRHGRLLPTSAWTVIRRKWLGEQRFEHTAEQITFDTYLHAVDLVDCRVEALERAVRETAEQGPWRELVARLRCLRGVDTLTALSLVGEIGDFSRFRSAEEFMAFVGLVPSEHSSGEKRRQGSISKVGNSHVRRLLVESAWHARRRPTVGYELARRQRAQDALVIERSWRCQQRLYQRWQRMAGRGKPHQKIVVACARELAGFVWAIATDQPLRQI

SEQ ID NO: 320847 - protein, 395 aa, unidentified
MVDPMIRVGVDVGCKTHQVGIAGPDGTVLEKFSIPHTQDGFREFFERIEHHRQKLGLPVAVAMEGYNGHARPLDKMIMEKGYKLYNVNNLKLARFREIFPGPAKTDSLDVRKILELFHLKGHLPVAKDVLQEVPGVPKENEKLKRLTRRRKQLVHEKVRVMKRMQADLQAVCPELLDNLWFLRFLSSRDDLEELARLTPEEVRKIPGIGVKYAELVRKWQRGAKFSPEVEYVGPMIVADAQRILGLLSEIAGLEEAIEELCEESELARRLRSIPGFGVISAAELAGEIGTLERFGSEASLALYLGMCPLDKQSGQTHGTRSPRQVNRRAKAAMMVAVAHHIWEVPESRAYYEKKRAEGKRHNQAVRSMARHLVRVMWSMIKHGRDYEVREASCLC

SEQ ID NO: 320848 - protein, 335 aa, unidentified
MSYVVGLDVSMEETACCARNAEGRILGQGKTVADPDAIAAALARFGRPTRVVLETGRMANWLHRQLIARDLPAVCVDARQAHAVLSQMPNKTDANDAAMLAELARTGFYRAVRVKSEAAQGMRALLKARELVLRQRMDLDNTIRGLLTSMGVRLPKGPRRWADRVELALEANEALALALKPLLRLREDLARSLAELTRRLLTEARGSDLCRRLMGVPGVGAITAYAFLATIDDPTRFAHSRSVGAYVGLTSKRYQSGEVDYTGRITRRGDGMLRTLLFEAASSLITRAGGGGALREWGLRLRARVGHKKASVALARKLGVILHRMWVDGTEFRAA

SEQ ID NO: 320849 - protein, 316 aa, unidentified
MNVKTLGIDLAKETFGLHGVDALGRVAVHRRVTRKQLLVFLVKLEPCLVGMEACGSAHYWAREIEKLGHTVKLMSPQFVIPYRKGNKNDPNDAEAICEAVSRPSMRFVPIKNEEQQDLQALHRVREQLVKNRTALANQIRGLLRERGVVVAQAIARLRMLDERLRQHDQRIARICQQDERCRRLVKVEGVGPLVATAVVAAIGNARQFTNGRELSAWLGLVPREHSSGQRTMLLGISKRGNRYLRTLLIHGARAATRVAERKRDARSIWLSRLKLRGGPNVAAVALANKNARVMWALLARGDSYRVRPAMDGAAAA

SEQ ID NO: 320850 - protein, 305 aa, unidentified
MINIGCDIGKTNLDVYVEGKSRRYKNDKTGIENFVKLCLKNESNRVVLEPTGGYERVLLTKLHEQGIATAVVNPYYVRNFAKSYRDLAKTDKIDAKMLSEYGEKMNPRNQERKAEYCFELEGLTSRRDALVETMKEEKQRLEKNLEERIVQSIELHIKFLQSEIKEIESEIRAIMETKAKKITEVLLSEKGIGEQTAAILVAYLPELGKLENRKITKLVGLAPMARESGKIRANRHIRGGRTRVRKALFMASVSAIRSNPKVSEFYKKLRAKEKPAHVALVAVAHKLLIILNSKMRRFFLNKNIF

SEQ ID NO: 320851 - protein, 367 aa, unidentified
MEKSSKVFVGMDVHKESIDITLAEEGGEVRRLGQIGGDRGSLLKMVRRQQSKGLELVFVYEAGPCGFWIYREITALGQACMVVSPSLIPRRAGDHVKTDRRDSERLASLARAGELEPIHVPDIRDEAIRDLVRGRDDAVIAQRRVRQQLKALLLRNDIRYVGRTSWTGAHRRWLSELKLPEPAQRIVFEEYVDAIVVATARIERLTRAIESEVTTWRFAPVVAGLQAMRGIQFVHAVTVVAELGDLTRFPSARQLMGYLGLVPRESSSGEQRHQGSITKAGNSYARRALIEAAWAYRHPARVTRIIATRQTGLPKAACDIAWRAQLRLSAKYRRLNARHLNHNKIVVALARELSGFVWAIGQSVRPQ

SEQ ID NO: 320852 - protein, 325 aa, unidentified
MEKLYGGIDIHKEKLAGCIMDENGEIFREHIFPFSREAIERFLYGIPNSGIEIVIEACGIWRGAYKVLADLGYEVKLANPKKTHDIACKKKTDRVDARILADLLRTNYLPEVWIPDEQVLKLRDLTRHKSNLTRMRVKVQVKLKGYLLRKGTKYGKLWNERALSELAEEDPDLRNLIRVYWSLKAEEKEVMGRIRKTARSMKKANLLMSMTGIGELSSLMILAEVGDIKRFKTPKELVSYAGLCPGIYQSGDTERNVRNNAVNKWLKWILYECSGRAAMLDPRIQEYFYKVKQRKGFKTARRAVARKMLTIIWHMLTNEEPYRAS

SEQ ID NO: 320853 - protein, 407 aa, unidentified
MELATIYKRVIGLDIHQAQITACALIEMPDGSTRAEQRQFGGFKRDRRELAQWAAALDPEEVVMESTGIYWKSPYAALEEVGIRAKVVNARHVKNVPGRKTDIGDAQWLAMLARAGLLRGSFVPPAQLRELRLIARQRHKLISQLVGEKNRLHKILADGGVRLGVVVSDLHGQSARVMVKAIIKGCSPHQVLDCASRRLRASREELFDAVQGELTDSHRFVLDETMQHIEEIEARIGRFDARLLDGLKSEHNTLALLQTVPGIDLIGAAMLLVEIGPDMIAFGTADRLASWIGICPGNNESAGKRKPAKARKGNPFVRRLLCEFAHAACRTKCVFKPKFESLMPRRGYKRSIVAIAHSIMRTIFFMLKRREHYKDRTVDYEAMAVERNAPRWIKALTKFGYINPTRA

SEQ ID NO: 320854 - protein, 396 aa, unidentified
MYSFFVGIDVSKDSFSVCGLDAKEEMIFSLVAAMDRIGLSECIKAISSHSEDPSRVVVAMESTGSYHVNLFSFLTSQGIRTIVVNPLLIKNFSKLSLRKTKTDKKDAHTIARFLFGQRGSLDTFFTHQHKDLKDIARERESILKLIGSTKNDVKRMLKSTFPEVERICNVFGDVMLLFLKKYPSARCIRDANPENVIQAFQHKDQRLRITTPKEEIVKAAQNSIASLHPAIEQILPGKIETLLFLNDRLDEVTNMLVVWCESVMKEDLAILMSIDGINTKTAAPFLAEMGDHRNYETYKSFIAFSGLDPSIHESGAFTGMSKLSKRGNRHLRRIIYLMTFCVIRIKGPFKSYFLKRRNEGLPFKKALFATAHKLIRVIFAMLTKRTYYVSGEMITG

SEQ ID NO: 320855 - protein, 362 aa, unidentified
MDHIGMDVHKRESQICILAEGGELIERRIHTEPQRFAAVLGDRPRTRILIEASTDSEWVARCLEALGHEVIVADPNFAPMYATRTRKVKTDRRDARALAEACLLGAYRRAHRLSDPQRHVRGRLLVRDALVRTRTRYISLIRALLRQHGSRVPSGSAEAFPGRVLALVLPGRLLSTVAPLLAVMRHVNHQLTYSDAVIEQVSADDPRVQRLRTVPSIGPVTAAAFVATIDDVQRFRRAHEVEAYLGLVPREFSSGETQRRGRITKAGNAHLRRIVVEAAWAYRHRPAVGGALRKRQAMLSDEVKSIAWKAQHRLHGRYRKLLGRGKCPQQVVTAVGRELLGFIWAIGVAVETEQKNRHSVAA

SEQ ID NO: 320856 - protein, 347 aa, unidentified
MAGKVVIGIDPHKASWTAAAVDSSQRVLAVVRVEVNRDGYRQLRRFARRFPRAVWAIEGAGGLGAPLVTRLAADDVQAVDVPAKLAARVRLLSTGHNRKTDQADAVSVAIAALTAQGLRSVETDQTTAALRAWTEHREDLVRTRTQTVNRLHVLLAQLLPAGGAANLTADSAAALLRTVRPRELLARTQRQIAVDLVAEIRRLDRRISAAGDAITAAVAAAGSTLTRLYGVGDIVAAIVLARTGSVSRFASSAHFASFAGVAPIEVSSGDVVRHRLSRAGDRQLNRALHVIAITQIRGDTAGRAYYQRKRQAGKSHREALRCLKRRLADVVYRTLLHDANTSFGTPS

SEQ ID NO: 320857 - protein, 340 aa, unidentified
MRYIGIDVHKRISTYCVLNDAGKIELERDGVPTTAEGFQELMEYAAQRGCRILIENSTRSHFVYHLFAEAGYDIIAAHAVDLAAIAKSKVKNDRIDAYRLAQYLMRRDRGEVQFSVSNITSRENMRRRALCRLCADMVRMKTDMVRRAREYMSLHDVRLPPHYASIDSKRSLRALYARNDPVLTHMLAFVEMMNQRIESLEEDIVKEFGEDDDVRLLVSIPGMGVKTAATTVAAVDGIERFDSAQKLVSYLGVDPVSRESAGKRRPGRISKDGDPLVRYMLNNVVMNHVRHCPQSAVTAFFHRLRARMDHRKAVTATVRKIVCVIWALLTRREPFRAMSC

SEQ ID NO: 320858 - protein, 360 aa, unidentified
MEVGQTMADHGVVGGVDTHKDLHVAAVVDELDRVLESRCFATTRHGYQQMLTWMRSFGQLRRIGVEATGTYGAGLLRYMQNAGVEVLEVTTPDTHDRRKRGKNDDLDAQNAAHAAFAGRRTVTPKSRDGMVESLRVLKACRKTAVAARRVALQMIHNTIVCAPDELRETLRRMTRMQLIRTLAAWRPDLTDYRSVVSAYRITLKSLGRRYLDLHDEIADLDTMIVAIVDELAPALVARNSIGHGSAAQLLVTAGDNAERLQSEASFAALCGASPVPASSGKTTRHRLNRGGDRAANSALHIIAIGRLRTDPRTKAYIAKRVAEGHSKLEAIRCLKRYIAREVLSLISQRKREINQGRNAA

SEQ ID NO: 320859 - protein, 347 aa, unidentified
MTIVEDTRVITGGVDTHADLHVVAALDPVGGLLGVREFPATAAGYASLLGWLSGFGNLAQVGVEGTGSYGAGLARHLAAAGVRVVEVDRPDRQDRHRQGKSGPLDAVSAARAAQSGRAAGAPKGRDGAVEAIRALMVAKRSARHERTQAVNQARALILTGPEELRTRFAGHTTAQLAAAIAALRPRPGDVPGYATRVALRELGRRVQFLDAQLERLDEMIGPLVTARAPGLLALHGAGPDTAALLLVAAGDHPERLRSESSWAHLCGVAPIPASSGKVAGRYRLNRGGNREANQALWRIVICRMSSHPATRAYIERRTKEGLSKREIIRCLKRYVAREVYRHLRDGA

SEQ ID NO: 320860 - protein, 344 aa, unidentified
MSEVTTIGLDIAKQVFHAHGADAAGRAVFSRRLTRGKLLDFFAAHPRCMVALEACGGAHHWARELQAIGHEARLIPPAYEKPYVKRHKNDAVDAEAICEAAQRPSMRFVAVKTEQQQAAALVFRTRDLAVKQRTQLGNAIRGHLAEYGWVAPKGSAHLAMLADLLDGGEIGETLPEAARPMFAMMVDMLAGLDERIAALDKEIARRAREDEVARRLMTIPGIGPITATAIAAIAPPAETFAKGRDFAAWLGLVPKQASTGGKQKLGAISKMGERTLRRLLIIGSSAVVLQASKRGAPAGSWLEGMLARKPRMLVRVALANKMARTVWALLVRHENYGAPVVVTA

SEQ ID NO: 320861 - protein, 411 aa, unidentified
MEQIHDRVAGLDVHRDQVTVCVRVPGPRGRVQTQKARFGTTTGGLAALAEWLAGHAVTLAAMEATGVYWKPVYYALEDRFVVWLCNARHVKNVPGRKTDMSDAEWLADVAAHGMVRPSFVPPPPIRELRELTRYRKTQIDVRAAEIARLEKVLQDAGIKLTSVASKVLTQSGRAMVEALIAGERDPAALAGLAKGKLRPKIPQLTEALRGHFGAHHAIVAARILAHLDFLDDTITELDREIGARVAGRYQQAARLLAEVPGLERRSVEVIIAETGADMSCFPSPAHLASWAGLCPGNHESAGKRRRVATTPGNPWLRRTMIESARAAARTRDSYFGAQYRQIARRRGPNKAAVAVAHSLLDVIWHMLTTGEVFADLGADFFTSRHDKEHQTRHLVRQLEKLGYTVELVTTA

SEQ ID NO: 320862 - protein, 401 aa, unidentified
MDAIEHYDAIDVFVGVDVGKGEHHAVALSRAGKRLFDKALPNDETRLRALLSSLKEHGKLLLVVDQPTTIGALPVTVARAEGILVAYLPGLAMRRIADLHAGEAKTDARDAAIIAEAARSMPHALRSLRLDDEQLAELTMLCGFDDDLADQITQTSNRIRGLLTQIHPALERVLGPRLDHPAVLDLLQRHPSPASLAATSEKSLANKLSKLAPRMGKGLAHEICQAVSEQTVVVPGTNAATIVLPRLAHQLAALRVQRDEVAQEVERLVQAHPLCSVLTSMPGVGVRTAARLLTEVAAKAFASAAHLAAYAGLAPVTRRSGSSIRGEHPSRRGNKVLKRALFLSAFAALRDPISRAYYARKISQGKRHNQALIALARRRCDVMYAMMRDGTLYCPTPLTNA

SEQ ID NO: 320863 - protein, 351 aa, unidentified
MESQQTALPKLYIGIDIHKRSWKVHCSTDLFSGKSFSMPPDPEQLLNYVLKHFPGFEVSTAYEAGCCGYYAHRCFVSYGWNSLVVNPADIHRKGKERHTKTDRIDAQLISRELRDGRLESITIPEREREQLRSLFRRRNDLVKDFRRVKSYIKMQLLYFGIKVPEEFDNDHWSHKFRTWLDDMVFTYPTAKATLESRMRYFRFVDQELRDVSTLLRRYCKVHYKKDYMLLRSIPGIGGIVACGILCELGDLRRFNSVKHLAGYVGLAPGVYQSGDNYRVMGMTPRAHRLIRSYFVEAAWQAIRADPVMQAYYRKHLGKDTKKIIIKVARKLLSRTLAVIKTETPYVIGVIE

SEQ ID NO: 320864 - protein, 346 aa, unidentified
MGIDPHKQTHTAVALDTATGRKVGEITVKARTRGFERLLLWARELDDVDRFAVEDGRHVSGALERHLIAHGETAVRVPPAMMFQARRADRVRGKSDPIDAEAVARAALAHPELPTATLAGIERDLDLLVAHRESLVNERTDKISKLRWLLHDIDPDLAPPLRSFDRFKVLARVQRNLDSMTPTTAVAVCMDLLARCREITVQANKLEREIIGLVDLHAAALLKIPGCGALTAAKILAETAQVKRFPSEGHFARYVGTAPVPVASGASHRHRFNRRGNRQLNAAIHRVAITQLRIHEPAQAYFSRKRAEGMSKTEALRALKRQITRTIYKTMVSMDQPTDYAAAVAA

SEQ ID NO: 320865 - protein, 433 aa, unidentified
MTTSSVPMETEILAYVGLDWADQQHVICCQAAGSTSVETAVVQQRPEELQAWVAQLRQRFPQGLVAIALEQSRGAVIAALMHYDFLRLYPINPKSLARYREAFFSSGAKDDLNDAALLLDLLVKHRDRFSPWVPDDPLSRQLALRVEHRRQLVNLQTELTHKLSSHLKLYFPQALDWAGELDSLQACDFLQRWPTLQAVQKARPAQLKKFYNQHHCRRPQLIEQRIEQIGQAQALTQDTALVEASYRMVLALVAQLRPLISTLVQWQQEISQLFAQHPDATLFASFPGAGPVLAPRLEAAFGSRRDRFSSAQEILQFSGVAPVTQKSGKSCQVHRRWARPKFLHQSFVEFAAFSIPHCDWARALYQQLRARGQRHWAAIRVIAYKWIRILFRCWKDRVPYDEPKYLKSLERRNPRLWAAIQQLPPDQPKKKAA

SEQ ID NO: 320866 - protein, 369 aa, unidentified
MHDDTTAFVGLDVHKEAIAIAVAEPGRAPARFLGTVRPALAPLTKALAHLGSPKKLAIVYEAGPCGYTLARRLLKLGYLCEVVAPGKIPQRPGERIKTDRRDALTLASFARSAELTPVLIPDEPDEAMRDLARAREDAVRARLKARQQLKAMLLRHGHHYSGRIFWSTAHQRELAKVSFPHPAQQIAFTEYCLAVTEADERVARLSAALREQAETWRLQPLLSALMTLRGLQFLTAATVLAELGDLRRFPHPKRLMSFLGLVPSEYSSGLSRRLGAITKCGNAHIRRVLIEAAWAYRYPARLSRELQIRQQGQPKAVRDIAWKAQLRLCARYRRMQARGLHQNKTCIAIARELAAFIWDIARHVPIAAA

SEQ ID NO: 320867 - protein, 369 aa, unidentified
MDKDTTYVALDDSKRKIVAGILRPGDAQPELREIANDARLIRRLFERLKREGPVAACYEAGVSGYDLHRQITALGVACDVIAPALTPRRPGQRIKTDRRDAAKLVRLFRAGELTAIHVPAEAEEAVRDLVRCRDDIRRDVLRWRHRVLKLLARHGRAYLAGKNWSQAHWRWIREQRFDLPPLQRAFEATVFALEQALARQAELDKELEAIATTAPYREPVGWLRCFRGIDTLSAIILVAEVVDFQRFRRPRELMAYLGLVPSEYSSGETQRRGALTKAGNSHARRVLVEAAWHYRHRPTIGRALASRSQGQPDEIVGQAWRAQQRLHRRYRHLVGHGKRTPVAVAAIARELVGFIWAAMTRHETRHQAA

SEQ ID NO: 320868 - protein, 424 aa, unidentified
MTNAKVYAVIKILEELKMQVIYGVSCGLDVHKKEITAALFSGGSDEAVLRSFGTSTYELKEMVAWLKSENCEQVAMESSGVYWKPVYNILEMEGVPAMVVNASHMKAIPGRKTDAGDAEWLCDLLRHGLLRGSFIPDKDQREYRDLTRYRNSRTEERTREINRLQKFLEGVNIKLSSHVSDVMGKSASKLLGLALTQDEITDGQVMAAKHANMKASIGELKESLTGIISPLQKELISMVIDVIEEQTAQIEKVEKLIQKYSKEAYEEAAKQLMAMPGIGIKSATTIIAEIGIDMSRFPTANHLSSWAGVSPGNNESAGKRKSGKTTKGNKTLKKTLIQCATSAIKNKNSFYYAQYQRLAVRKGGKKAVVAVAHTMLINIYHVLSGKEYKDLGANYYTQFNREKKINSHLRQLKQLGWTPSESAV

SEQ ID NO: 320869 - protein, 344 aa, unidentified
MQNSNVIGIDLAKNVIQVCKIDKHGELTSNKAMSPSKLKALLAKSIPSIVAMEGCGSCHFWARLAQTYGHDVRIISPRRVKAFLQGHKTDANDALAVAIASTQFGMVFSQIKAEEQQSLQTLETSRKFLDKELTALNNHLRAYLYEYGITMNRGQKSLRETIVIVLDDLDTRLPMCLKNTLKVLWERYQLTVIQLKETEQYRAVLVKQLEPCNRLMALEGIGEVCAAMLYASMGDGREFKNGRQASVYIGLTPKQYSSGGKVYMVGIDKRGGNKPLRAALYQGALSVISRLPSEPRTVKEEWLLKLVERVGIKRACIALANKTVRTAWALLATGKSYEPALLSR

SEQ ID NO: 320870 - protein, 429 aa, unidentified
MKNDSSAQKNTNRAGRPRKERGPANRNAKEVMAELVAKLSQRLEPRLGAEGGLKVREEELPGPNRERLTVGVDLGDKSSNFCVLGLDGEKLTEGQIRTTPEDFAELFQLLAVSRVVMEVGTHSAWVREVVAGCGHEVLVANPRQMEAPTKRKRKNDRIDAHKLARIGRMDPQSLFPIQHRSANVRRDLVVLRARDAVVAVRKDLINATRGLVKSMGSRLPKCSTASFPHKVEAALPAAVRDALLPLVQLVESLGNCIKTYDEKIERLGNERYPHTKLLRQVRGVGPITALAYVLTLDNPNRFARSRDVGPYLGLVPKQEDSGESQPQLRITKMGDTMMRRLLVGSAQHILGPFGTDSDLRRYGLRLSQRGGKNAKKRAVVAVARKLAVLLHHLWVSGEVYEPLHRSLSESAQEASSPHVPVGSSEMAAA

SEQ ID NO: 320871 - protein, 343 aa, unidentified
MQSITTIGLDIAKSVFQVHGVDPDGHVVVRRQLKRRYVLAFFEKLAPCLIGIEACASSHHWSRQLQALGHDVRLMPPSYVKPYVKRQKNDGTDAEAICEAVSRANMRFVPTKTPEQQSGLVLHRTRHLCIRQQTSVINAIRAHCAEFGIVAPVGRRGIEELLNVIANANDEQVPEIARACLSALGDQLHRIKAQILAFDRMIGAWHRSCAASKRLDEIPGVGPALATALVASIADPRTFRSGRDFAAWIGLVPKQSSSGGKPRLGSISKQGDRYLRGLFTAGALAVIRYAKIHRIGHRPWLTALLARRPTKVAAIALANKIARMAWAMMARGERYREPAALAA

SEQ ID NO: 320872 - protein, 401 aa, unidentified
MDEVRNCCNCGGLIARLKIGDDAAGYRQLIDLLADAGDNPQQPIPVAIETSRGLLVACLRATGRQIYAINPVAVARYRDRYTVSRTKSDHVDAVVLANILRTDMAVHRPLPNDSELVQAIAVLARAQQDAVWDRTQAHNKLRSLLREYYPTFLLAFRDARGGITRPEARAVLAAAPTPTQAATLTPDDLADALRRAGRQRGVTAEADRLHQALATATLHQPPLVEQAMGRQALALLRALDTACLNAEDLATAAEQSFDQHPDAEIITSFAGLGRLIGARVLAEIGDDRSRFADTRALKSYAGSAPITRASGKSLIVMHRRVKNQRLAHASHLWAFSALTASPGAHAHYQRRRTAGDGHTAALRHLSNRLLGCLHHCLQTRQLYQETTAFTPPQPQQLPTAA

SEQ ID NO: 320873 - protein, 555 aa, unidentified
MATDEVGRQLGEKTVKATTAGHATAIMWAREQFGLELIWGIEDCRNMSARLERDLLAAGQQVVRVPTKLMAQTRKSARSRGKSDPIDALAVARAVMRETDLPLATHDETSRELKLLTDRRDVLVAQRTSAINRLRWLVHELDPERAPAARSLDAAKHQQALRTWLDTQPGLVAELARAELTDIIRLTGEINTLAQRISARVHQVAPALLEIPGCAELTAAKIVGEAAGVTRFKSEAAFACHAAVAPIPVWSGNTAGQMRLSRSGNRQLNAALHRIALTQIRMTDSRGQAYYQRLQDAGKTKRAALRCLKRRLARTVFQALRTVHQPSSEHTQPAAACHRSYCSSHLGEPPRLTDMTQKTRIQPLPPKRAGLLIRALYRIAKRRFGEVPEPFTVTAHHRRLLIANVVHEALLQRASRKLPPSVRELAVFWTARSIGCSWCVDFGAMLQRLDGLDVDRLTDIDNYATSSKFSDDERAAIAYAEAMTADPHSVTDEQVADLRARFGEAGVIELTYQIGVENMRARMNSALGITEQGFNSGDACRVPWAAPDVPSAESR

SEQ ID NO: 320874 - protein, 341 aa, unidentified
MAIVAGFDVHRRQITFDALDTETGEVRRGRIDAVAAAVTRWTERFEGREIDVAVEACTGWLFVCDALVAAGAVAHLAEPVETRALRGRKRRAKTDREDARWLRELLADGRLPEAWIPPEHVRQWRSRARLRHTLIDERTQWFQRIRATLFHHGISGSPEKLRTREGRAFLDALDVPADASERIEIALAMIDAIEVQIAPLERELRQLARRQTGCRALMGLYGMGELTALVTLCELGDVGRLSASRKAVRMAGIDIGVHRSDRRARAGKLTRQGSPQLRWALYEAALSACRPSSPDHADYLALKARGLSHTRASLTIARKLARRSYHVLRELGPAALEPTTT

SEQ ID NO: 320875 - protein, 341 aa, unidentified
MSIITVGIDLAKNVFAVHGVDEYGKAVLVKPKVSREQLSALIVQLPPCLIGMEACSGAHHWARLFRTYGHTVKLIAPKFVTPYRMSGKRGKNDAADAAAICEAVTRPAMRFVPIKEEHQQIILTLHRTRQGFVEERTATYNRMRGLMSEFGIVLPQKVGSLRREIGAHLEELPGYANRCIGDLLSHAEQLDTRIADYDKALAQAAREDARSRRLMERPGIGPVTASALLSSIGNGHDFKNGRQVAAWIGLVPGQYSSGGKARLGRITKAGDPYLRSLLVLGARAILAGLGDKQDGFSRWARTLVERRGYWRAVVAIAAKNARLAWAVLHYGEEFRPSPSAL

SEQ ID NO: 320876 - protein, 342 aa, unidentified
MQIATIGLDIAKNVFQVHGIDAAERVVVRKQLRRRQVLEFFKALAPCLIGMEACATAHYWARELMKLGHLVRLMPAKDVKAYVKRNKNDAADAEAICEAVRRPTMRFVQIKSAEQQGRLMLHRARDLLMRQRTQVINALRAHLAEFGIVAPQGRQGVKELLLIIAGGEDERLPVDAHASLVVLAAEFTAMQTMIGSIEKRIMAQHRSNEASKRLETIPGIGVAGATAIVATVPDPTVFRSGRDFAAWIGIVPREDSTGGKRRLGPISKRGDRYLRRILVVGAVAVLRYARQNPEKYPWLAQLLARKPFKVVAVALANKTARIAWALLAKGGTYRAPALAAPA

SEQ ID NO: 320877 - protein, 355 aa, unidentified
MESTKYVGLDVHTEATTIAVMNSAGKLIMESIIETKAITIRQFIQGLRGDLHVTFEEGTWAAWLYDLLKPYVTKVVVCDPRKNTLLKVGNKSDRIDPKKLAELLRNGSLSEVYHGENGVRTLKELARSYLTISKDLGRVMNRVKALYRSWAIPCAGTQVYAPCHRSEWLSKITEAGVRRRAEHYYQQLDALQTLRHEVRKDLLLESRKHNATKLLRQVPCIGPIRAAQLVALMQTPHRFRTKRQLWTYSGLGLETRDSAQYRYVEGQLQRSKKPQQLRGLNSNHNHDLKNIFKGAATMASISAGPFHDFYEALLTKGMQPTMARLTLARKIAAITLIVWKKGVRFDAEHLKQQAA

SEQ ID NO: 320878 - protein, 342 aa, unidentified
MKDHSLVRTFVGIDAHSLECSVACISVEGRFVREERVATKAAELRDSLRGLKEPVWLSVEASGVSSYVAYSLEAVVDRVIVNETRENRWIAMNEAKSDPEDARRLARQLRMNEYKEVYLPRRCRQDIRALAQLFKKCSGDLTRQKNRLKARYRGNGIDASGAGIYSSGNRDLYLSRCRRNHLRFMAEVHFEAMDAAAERKKKVLRKLCSVLRNRREYRLLKGIPGVGEKIAATMIAIIDDPSRFETDRKLWKYSGLGITTPWTGNADSAHARPCKSGNRYLKDAAMTAAKAAIARDNRFAADYERMLARGTRRSMAMKTIARKILSTALAIWKSGIPYRARL

SEQ ID NO: 320879 - protein, 349 aa, unidentified
MLYVGLDLSRKRLDFHAAGEDGEPVAVGAAPPDADGLRHLVRRLGDAEVVAVIETMNGSRFVHDQLELLGWDVRVADARKARALAPLACKTDRIDAWVLAELARRDLVPEVWLPDPTVRAERERARFRLHLVRHRSSLKNRIHATLIAFGHPCPVSDLFGVGGRQLLARLALPEAWRETLETSLYLVDELDEEIQECDRELKRLGADHPYVPLLTTIPGIAWTLGYTIAAEIGDISRFASPVKLIGYTGLCPRVYQSGESDRRGPLRKNGPRYLRWALIEAAQHAARSPAYPYRPLYERTRARIGRNRGGKVAKVVIARKLAEAIWHMLNRNQPFNPCSGKRLVSLTAN

SEQ ID NO: 320880 - protein, 397 aa, unidentified
MYIVGIDIAKRKHEAAVIDGEGAVIIKPFSFTNNCSGYNRLLAMLAKAKLPLDEVSFAMEATGHYWLALFTRLQKEGFRVQVINPVQTNSIRSFYIRQAKTDPRDALLIAEVIRFGHFSESTLHPENIYELRELCRGRHAIVSMQADVKRKVVALLDQVFPEYETAFTNMFSDTSMAILQTCPTPKELSEMPLEELCHLIEVSSRKRFRMAKAQELQALARGSFGFAMAGDVFSTMIRLYAKHLDFLKQQVREMDRKIAEIMETLDTPITTITGIGPTLGAYILSEIGDISRFSSAAKLAAYAGIDPTMRQSGEYNGVRNRMSKRGSPYLRHAIWLAASSAVLHDPALKLYFQKKRDEGKPYMASVGHACRKMVSIIYAVMRDNKAYTPCIPNEISA

SEQ ID NO: 320881 - protein, 381 aa, unidentified
MTTTATCHVQENTTAGTLFVAFELSEKTWKLGFTTGHGQKPRERTVPARHQERVLEEIAHAKRRLGLPDTAPVISCYEAGREGFWLHRFLQAHGITNQVVDSSAIEVNRRRRRAKSDGLDVRKLLSMLMRYHHGERQVWQVVKVPSIEAEDHRHLHRDLETLKQERASTTTRIKGLLSSQGLRVTSLTKLPEQLEALRLWDGSPVPPGLRCRVLRVYAHHTFLSEQIAAVEAERRAQLQASTDAKIDKVRQLMLLKGIGIKGAWLLVMEFFGWRAFKNRREVGGLAGFTPTPYQSGESAREQGITKSGNRHVRWMTTELAWSWLRFQPDSALSCWFRERFGGGGKRLRRIGIVAVARKLLIALWRFLQTGVLPAGAVLKEG

SEQ ID NO: 320882 - protein, 451 aa, unidentified
MNVETKEHGNYNLLRIISAVNKNTLTGGVKAMHRKNDIRQVEKRQRITDKTLVVGMDIGCEFNAMCLMNKEGSVLGRYPKIYNSRRGFDFFHTIVETAKKKHRFTDVIIGMEPTGNYWRKIAFFAIEKGHEVRFIRTTALRHQRELDESSSAKNDMRDAFTIANVVREGKYIDTVIEDNIFRQLRSLAHTRERIQRSNTGSKHALKGVLEDYFPELKNIFWSMKAKGLLALLVQCPFPEDVLKTDIDALTALIAKSTRRKAKAQEKARQIYDSARQSVGLKHIGEADRYRVTAYLSEIRYSETQLKEIELQMEVLLKQIPLAEHILSIPGIGVITCGVFLGEMGNPDNFKDPKQIIKYAGYDPQEHDSGQRTGRKIISKKGRWLLRKYLYFMAMRTVHRSPFFKEYYENKQKTMKKKEALCAVIIKLIKVIFALLRDKRTFMEKQSCQKAA

SEQ ID NO: 320883 - protein, 386 aa, unidentified
MFQDSRHRIVPREYAIFGGLDVDKKRMAVTFGDHGQLLQSLQMPYSSSHLINYLDKHFAGSKIALAYEVGPTGFGLYDDLTAAGYRCLVVAPSMVPTAPGKRVKTNRIDSRKLCLSLRGGQLQSIHIPSDVYRELRHLVQLRDSHVGQLKASKQRIKSLLLYEGIPFPEAPRSCQWSARVLRELATLPCNASVRFKLDSLLTTLTFHNQQAVAAHKQMRLLCQKDPELTQSISYLLTVPGLGWITASHLVARIGDWRQLGNVRQIAGFLGLVSSEHSTGDKIDRGSITRSGDSRLRNKLIQAAWTAIRKDPELREFYRRIFLRHPPKLASRKAIVAVARKLTTRIYSVLKEQRPFEPRPQPHSAPLTQEETIGPRERLDAVQSAQD

SEQ ID NO: 320884 - protein, 422 aa, unidentified
MNEAHGTRQDKNRCWAGLDWGSEAHAVSVVNDAREVLAKFKVAASLKGLEQLAKRLREHGEVAGIAIEATRNPVVNYLASKGFTVYPINPKLSKNWRACNSVASVKNDERDGLVLAVELAGRHASLRALEQEEPAVAKLAGLCEKVRDLIDVRTSLLQRLKATLGQYYPGVLGFFTDWTSPVAWRFIQKFPGPEALAHARKDTLIRFLKANRIGLRPLWLDRIEARGEVTLWPSPGDRMALEAMALATIAQLQALQPHIDRMDRLIEESTQDLPHAHLLKSLPGAGKRLAPVLAAITAGVVSGKANVEAIRCVSGVAPVEDQSGKRHRVHIRRRCNKHWRDVLHLFAYSSTHWCRWAKAFYDMHREQGDRHASALRKLGDKWLKIINRMLETGEPYDDQRYVEALRRNGSPLYLRLAEETCG

SEQ ID NO: 320885 - protein, 434 aa, unidentified
MESEFAAFVAIDWADQKHAWVLQLPGSSDRGNGTIDHTPEAIDVWAAELRLRFGGQRIAVALEQSRGPLVFMLTKYEHLVIFPVHPTVLVNYRKSFRPSGAKDDPSDAGLLLDVLMLHRDKLRQLDPDTSETRTLQFLVEERRKLVHEKTRYSNRVTAHLKMYFPQVLAWFDEIGSNIAAEFLERWPSLEKLQRARPATIERFFIDHNSRDSERIAERLEQIRRAVPATTDTAVVMSCSAAIVVWAGLLKQVLAAIATYDENIDELARAHPDYALMKSFPGAGPALIPRLIAAMGSRRDRYQGAYELQCYSGIAPVVASSGQQRWVHWRWACPKFLRQTFHEWALHSIAYSQWAREYYEQQRAKGKRRNTAIRSLAYKWIRILFRCWKERKPYDEIAYQHALAARRPKKHSAPQPVELGWKNVAGFSKLVVPGA

SEQ ID NO: 320886 - protein, 312 aa, unidentified
MYHIEEEVVYMGVDIAKAYLDAAIGNEKRRFANDALGHRELIKWVKQFSAPVQVICESSGGYERALVQALARAGVKISLVQANRVRQFARAAGILAKTDRIDAKLLSAFGEAMQPGTISASQLEQEHLRELESQRRHLTHLLVMEQNRAARMSDLCVCKMNRRLISQIKKQIEQLELLIQEQIKASPELCTKAEKLTAISGVGARTAALLLAQMPELGQLNRREVAALVGVAPFNRDSGRMRGKRAIYGGRRAVRHGLYMAALVAARHNPILRGFYLRLRAGGKPAKVALIATMRKLLIVLNSSVKPDLKYA

SEQ ID NO: 320887 - protein, 430 aa, unidentified
MTGANERSEPDFAAFIGIDWADQRHAWALQTTTEAAMKRGDLDHTPEAVDDWATELGRRFGGRPIAIALEQSRGALLFMLTKYAHFVLYPIHPTTLVNYRRGFRPSGAKSDPSDAGLLLDILVRHREKLRRLNPDTAETRTLQFLVEGRRKLVNDKTRYSNRLTACLKMYFPQVLEWFGEVSSQIAGDFLERWPTLQKLQRARPDTLRTFFIQHHSCHSENIQRRLEEIRRAVPATHDMAVIASSVAAVMAVVRLLRELRQAIHCYDEQIETTAREHPDFAIFDSLPGAGAALVPRLITALGTQRDRYNGASELQCHSGIAPVVASSGKQSWVHWRWACPKFLRQTFHEWAAHSIGSSAWARAYYNQQRAQGKSRNAAVRALAFKWIRILFRCWKDRTLYQEDLYQQALVKRTARANPNCEPPVENLRRL

SEQ ID NO: 320888 - protein, 365 aa, unidentified
MAEITRALVARVGVDLSKRVFQVHAVDRAGRQQLVKAMSPQRFYAWCAELPAGCMVAMEACGGAHHVARRVQLLGLQAKLIAGHFVTPYRMAGKRGKNDANDAAAICEAAGRPHMRFVPVKAAEQQGQLAVHRLREGYKEERTALINRIRGVLAEFGLVFPRSPEALRAALAEVIEDASNELPGVARLALQRAHLHWIDIELQMAWCDQRIASHVRSDERARKACTLLGVGPTTASAVVASVGDFKQFANARQFGAWLGLVPSQNSTGGKASLGRITKRGDDYLRTLLIQGAKSAVMSAGKRSDRISRWLVQLKERVGWQKAVVALANKNARILWAVLTRDVAFDPNHVPQPPAARGGLKPEAAV

SEQ ID NO: 320889 - protein, 319 aa, unidentified
MEAQETRETWIGIDVAKAWLDVASSREERPWRVANDDDGIAALAADLTARPPRLVVLEATGGHERAVTAALTAAGLPVAVVNPRQVRDFAKATGQLAKSDALDARILALFAQRVQPPVRPLPDAVAQELAALLARRRQVLEMRTAEQNRRPSLPPRLRAGVDAHLVWLSQQLAALDRELDQTLRASPVWREKEDLLRSIPGIGPVVARTLLGELPELGACDRWEVAALVGVAPLNADSGARRGKRCTWGGRGTVRAALYMAAISASRHNPVIRPYYRRLRDQGKPVKVALVACMRKLLTIANAILRDGVPWSPKMAPAA

SEQ ID NO: 320890 - protein, 344 aa, unidentified
MGEVSTIGLDIAKSVFQAHGVDEAGAVVIRKRVSRAKLLEFFASLQPCLVGIEACPAAHHWGRELQALGHTVKLMPPSYVKAYLKRSKNDANDAAAICEAVTRPSMRFVPIKTKEQQAALMLHRARQLLVRQRTMLSNAIRGHLSELGIVSAKGRKGTGALLEIIADAEDGRVPPAARGILDVLARQYSAIGAEIGSIDRSIVAWHRSCEASRRLEEIPGVGPIVATALVAEIGDWKAFGSGRNLAAWIGLVPRQQSTGGKDKLGSITKQGNRYLRWLLVAGAMAVIRYAQKHGTLKRPWLGRLMERRPTKLAAVALANKMARIAWAIIVHGDRYRETKPLLAA

SEQ ID NO: 320891 - protein, 372 aa, unidentified
MEKCSTVLYVGLDVHKDSIDIGVAEDGRQGEVRHVGRIGGDLAAVDRAVRKLQSTGQQLHVVYEAGPCGYVLYRHLKSKGMAVEVVAPSLIPKCAGDRIKTDRRDAMMLARLARSGDLTAVVVPDETDEAIRDLMRARDDAVRAQRVARQQLKALLLRTGIRYVGKANWGPAHVRWLSSLKLPDAPRPLAFQEYVQAVQTTNERLARIEGALHELVVQWRFYPVVEALQALRGIQLIAAATLVAEIGPIERFPHPRQLMAYLGLIPSEHSSGTKRRQGRITKAGNKHARRMLVEVAWLYRYPARVAPILQKRVERVSAEVRDIAWKAQVRLCGRFRRLAARKLMHNKIVIAIARERVGFIWAIGQVQPPRAR

SEQ ID NO: 320892 - protein, 410 aa, unidentified
MHYKQNHIYVGLDLHKDTHTAVIIDCWNEKLETIVIENKPSDFTKLLNKVKKVAGSLTPVFGLEDVHGFGRSLAVFLLEKEQIVKEVNSALSYSERMSYATTKKSDDWDAYCIACVLVRMLERLPDANPLDLYWTIRMLVNRRNAIVKSITTLTNQLHGQVYYNYPSYKKFFCDVNSKTALVFWENYPSPRHLKGVTDEDLAELLRKPSHNSCSTRKAKEILELVESDGHTFRDYQDSRDFIIQSIVRDISFKSEEIKKVEVEMEKLLKLLGYKLESIPGIDIVTATNLAAGIGDINRFHNADKLARFAGIAPVNFSSAGKGKDKQSKQGNRVLYGTIYFLAVQQIQVSKGKKTPRNPAFLEYYNRKVSEGKTKVQALICVMRRLVNILYGMMKNKTEYVMPTVELKEAV

SEQ ID NO: 320893 - protein, 338 aa, unidentified
MTVAFLGIDLAKNVFQLHGVSADGQAVLKRRIRQEGLLAEIAKLEPCVIGVEACTGAFYWQRQFEALGHSVKVIAPQYVKPFVKHQKNDQNDAEAICTALMLPNMKFVPTKSEEQQDIQALHRARRRLVNHRTALVSQMRGLLLDRGIPIALSIGRARRAIPEILEDQANGLSAMSREIIGDLFDFMGQIDARIIAFDRRIDAVFKSNEDCRRIARICGVGPKTATAVVAAVGDGREFKNGRHLAAWMGLVPRQHSSGDKRLLMGISKRGDRHLRTLLVHGARSVVRVAQRKTDPFSQWVNSLRERRGMNRAIVAVANKNARIIWAMLNRNEEFRAAI

SEQ ID NO: 320894 - protein, 388 aa, unidentified
MMADPSATPIEATTRPDAGRLFAALELGKSRWLVTVDAPGSDKLSRHAVAGGDGAALLDLLARLRTTAERRTGRPVEVLVIQEAGLDGFWLHRLLERNGISSHVVDPASIAVNRRHRRAKTDTIDGEMLLRSLMAWARGERRVCSMVRPPSPEEEDRRRLTRERATLLKERIQHTNRIKGLLYGQGTIDYDPLRKDRLARLDALETGDGRPLPERLEAGIRRELERVELVASQIAAVERERDALIEAPSEAAGPGTPAAALARLKGIGGELGALLWLEALFRRFDNRRQIAAYAGLAPSPWRSGGTEREQGISKSGDRRLRHAMVELAWFWLRHQPDSALSAWFRERVGPGRGRVRRIAIVALARKLLVALWRYTTRGVVPQGAAFKA

SEQ ID NO: 320895 - protein, 406 aa, unidentified
MDKIFVGVDVGKEVHWACCLDSAGDILMSRGVFNDETDIRALINEVEVLGAGEIAWTVDLIAVEASLLLAVLHGFDHKVRYLPGSAVHRASAGYRGEGKTDARDARVIADQSRMRSDLVQLEPDDTLVREMRILITRRADVVADRIRTINQLRQQLTSVCPALERAAKVADHHGWLILLRRYQDPKAIRRAGVSRLTTMLTNAGLRATTAQKIAVAAVDAAKAQTVKLPAADLAAELVAELAQEVSRLDALLAELDAKIDTRFRQHRLAHIVISLPGMGPRLGAEFLAAIGNINSFASANHLASYAGLAPVSHDSGKVVGRHRRPHRYNRQLRRVMYLSALNSIRYCPESKTYFEKKKSEGKRGTTAVMALARRRTNVLWALIRDDRSWTPRSQLSAPHPATAAVA

SEQ ID NO: 320896 - protein, 349 aa, unidentified
MKYYVGLDVAMEETAICIVDDGRRIVREGKAASEPEAIAAFLSATGLTFERVGIEAGPLAPWLCDGLAAAGLPVICIDARHMKAAVSAMPVKTDRIDARNIAFAMQVGWYRPVHLKRPEARKLRLLLSSRQMLLRARIDLDNHIRGVLKAFGLKVGKVATGQFEARVWELIDEGDAQIRWIVGTLLTTRAAVVSQLALLHRAVLAVVKQDQVCRRLMTVPGVGALTALAFRTAVDEPERFASSAAVGAYFGLTPSKYASGETDYTGHITKCGDKAVRVLLCEAANALLTRVSRWSWLKRWGLEVLKRRGKMRAQVAVARRLAVIMHRMWLDGTDFRWQREPDAPAGAAA

SEQ ID NO: 320897 - protein, 356 aa, unidentified
MSHEVKYIGMDVHKEAIVIAVQNENGKLVMETIVETKASSILQFLHGLRGELHVTWEEGTWAAWLYDLLQPQVQHIVVCNPRRNALLKEGSKSDKVDAQKLADLLRTGMLRPVYHGEHGLRTLRELGRSYQTISKDLTRVMNRLKALYRGWGIPCAGTQVYAARAREEWLDKLPQAGVRRRAELLYQQLDGLQALRREVRPELLAESRKYKAAKLLRQIPCIGPIRAARLIALMQTPHRFRSKRQLWTYSGLGIETHDSAQYRFVRGQLQLSKKPQQLRGLNRNHNHEMKEIFKSAATRASCGRGPFHDFYAALLAKGMKPEMARLTLARKIAAITLTLWKKEERFDAEQLKTQAA

SEQ ID NO: 320898 - protein, 425 aa, unidentified
MNYKQNEKINQVKESTLVVGIDIGSTTQYARAFDWRGIELGKVFPFSNSREGFESFKAWMQHLQDKYKKLDAIVGIEPTGHYWFDLGAYLEDEGILLVMVNPYAVKQTKELDDNSQSKNDRKDPKVIAKLVTEGRYSAPYTPDGVYADLRIMVANRKRLIREMTQIKNRFARWFAIYFPEYTDVFGDYEAQSSMLLLKKVCTPEAIVELGAEKINQIWRDAKLRAVGMKRATTLCETAKRSIGLKKGSSAARYEMKLLLEDYEYKKAQLDAVMEEIEKLCRKIPESEQMLAIKGIGVITVAGFLAEVGDVRRFESPRQIQKLAGLSLRENSSGKHKGQTSISKRGRSKLRAVLFNAAIPLIAKNPEFKSLHEYYTTRANNPLKKKQSVIAISCKLIRVFYAILAKGVTYDAQKLISDIHRQPQVA

SEQ ID NO: 320899 - protein, 350 aa, unidentified
MIVLGADTHKRSHTVGAVAAATGELLGEQTVPVGLRGFGALLRWARSLDGERAWALEDCRHVSGSLERFLIERGERVLRIPTHLTANARRSARQRGKSDPIDALNVARAALREGLESFPAAHLDGPELDLRLLVDHRERLVRHRVELNSTLLWHLHDLWPELQLPGGALFSKKWSTRISRRLARAEQTMRVRIARDELRRLRELTQAVTGLEREITELVGQLAPQLLSEPGFGPLIAAKLVGEIAGAQRFATPARLARAAGVAPIPASSGNTQRQRLDRGGNRQINAALHRVIVTRARCHPPTRDYIQRRHSEGKSTREAIRCLKRYLARRVWRLLQPTTPPRTSTRSIS

SEQ ID NO: 320900 - protein, 350 aa, unidentified
MLIGVDYHPSFQTIAFLIEETGEYEERELNHSDGQAEKFYRDLKQRGICVRVGMEATGHSRWFERLLAELGFELWIGDPAEIKAKRVKKQKFDREDARLLLRLLRENNFPQIWVPDAENRDLRQLLWHRHRLVQMRTRIMNQLHALAMNEGYCWKKKLFSEKGRAQLENLALAPWAGRRRQGLLELLDRMNPTIEELTAAVEREARKRPEAMRLMTHPGVGPLTALAYVLIIGTPTRFQRGKQIGTYVGMISCEESSGGKQRLGHISKQGNSLLRFLLVEAAQAAARVNPHWRRRYMHLAMRRHKSIAKVAMGRRLAVRLYWMWRNGCEYSPSLEFGSYAGQLGLGNGVK

SEQ ID NO: 320901 - protein, 397 aa, unidentified
MSGSFSVFLGLDVGKDTHHAVGLDPEGNRLHDGPLPNTEPKLKALFDKLAQHGPLLVVVDQPATIGALPVAVARAAGHQVAYLPGLAMRRIADLYPGRAKTDARDAFVIADAARSLPHTLRPVDVGDEALAELEVLVGFDDDLAGEATRISNRIRGLLTGIHPALEHAIGPKVSHPAVLEILSRCGGPAGIAKAGRRQLTAIAKVHAPRMGERLVEAIMAALAEQTVTVPGTAAADTVLPRLADSLKAVLLQRKQVAEQVEGILDAHPLAGVLTSMPGIGVRTAARILLEVGDASNFASSAHLAAYAGIAPVTRSSGTSIKGEHPARTGNRQLKRAFFLAAFAALSDPTSRAYYDRKRTEGKKHNAALICLARRRCDVLYAMLRNGTHYRQPAPAAA

SEQ ID NO: 320902 - protein, 412 aa, unidentified
MNMVYERCAGIDVHKRNVVVCAITPDQWGQRHKEQCTFSTRMPDLLRMRQWFQNLGVTHVALESTGSFWKPIFHVLEGYMEVLVVNAQHLKAVPGRKTDLKDAEWIADLLQHGLLRPSFVPPAFQRELRELTRYRTSVIEERSRTINRLQKILEDTNIKLAAVATDLMGQSARQMLAALLAGETNPTVVAELARGKMRAKRDLLVQALQGQFKPHHRVLISEQLAHIDTLDEEIERLSAEIAQRLRPYEAQIKRLETIPGIKRRLAEVILAEVGPDMQRFPSARHLASWAGMCPGNRESAGKRLSGKTRKGSPWLRTALVEAAHAATHCKDSYLAAQYHRLVLRRGGKKATIALGHTLLVIVYHVLAEEKDYQELGGNYFDDHDRQAVQKRLVHRLEKLGYEVTLAPSPPAA

SEQ ID NO: 320903 - protein, 371 aa, unidentified
MKKNITFVGLDVHKATIDVALADAGRTGDIRFYGTIGGDLESLHKVVRKLQSKGAELRFVYEAGPCGYDIYRSLTKHGFDCTVIAPSMIPRKSGDRIKNDRRDALNLARLHRSGDLTAIYVPAPEDEAMRDLTRAREDAVKALRVSRQVLLAFLLRHGHRYSGKTHWTKAHKNWIADIKMPHRAQQIALQEYVHAAQEQLERVDRLTRQIQELLPQWSQAPVVTALQALRGVSLIVAVTTVAELGDLTRFKSAKQLMAYLGLVPSEHSSGGTIRRGGITKTGNGHVRRALTEAAHAYCHPARESRVLLARLDGLPPEVRQIAWKAQVRLCSRFRKMLGHGKNKKTVVIATARELSAFMWAIANAVAPVTAE

SEQ ID NO: 320904 - protein, 339 aa, unidentified
MEDQREYVGIDLHRRRSVIVRMDADGMVLDTVRIENDPVALAAELAKAGPEPEVAMEATLGWYWAADVIAECGAGLHLAHPLGIKAFAYQRVKKDESDAKLLADLLRMGCLPESWIAPPEVRELREAVRYRHKIVEARANAKSQVHGVLGKAGVKVPVSDLFGVAGNALLDSVALDEMYLIRVESLRDLVALHNREIAMLDRVIAGRLDGHAGYEAIQAIPGVGKILAAVFVAEIGDVHRFDRPEQLASWAGMTPRHHESDTTVRRGRITKQGSRLVRWAAVEAAMRPRSYSWLKSDYHRIAARRGKKIAGVAVGRKILTLVFYGLRDGEVRCLADKAA

SEQ ID NO: 320905 - protein, 416 aa, unidentified
MTFKIVRFICGGMDVHKNLIVATIGTTDKQTLTTEYIQQSFSTFYSDLIRLKEWFISHDCYDVCMESTGKYWIPIYNVLETELNICLTHPKYVKAIKGKKTDKRDSKWICDLYKCDLVKHSFIPKKEIREMREIARYRCKLVYMRSSERNRYQNCLTVSNISLASVVSDPFGKTATNIMKELMQSEVIEDDKILKLIHKNCKDKDKILDSLQGYRIESDQRFKMDTVMNHIEYLDKQIQACEAELIKRAYPLRDYFQHITHIKGISALSAILIVSEIGTDMNQFESDKQLVNWAGLSPANNESANKKKSVRISKAGQYLKPLLVQCALSSIKDKNSYFGIKYCRIKKRRGHKKAIIAIARMMLVCIYHMILTGEEFNPCDYESLTNPKPKKEPIMTVESALQFLKDSNFDFSSIQL

SEQ ID NO: 320906 - protein, 391 aa, unidentified
MINIGIDVGKFKHCASVIDDKTGEILIKPFFFNNDQKGFDLFYSRTKQYIHRKHAVGMEDTGHYMINLTDFLLDKKFTVKFINPRSTCLRRKELGMSAKNDRKDSILIAEMLSEKKFWRSVTHTTQETDKLREITRLYHQLQEQQNEDMNRLQRALDIVFPEVNKLSWTRYSKAYMQFLAKYPTAASIASEDIRNLRNALKTDGRGRQCKLTAEDIKEAAKCSVGEDNIAVALEVQSIIAIINTRKQQIEKLENKIEEFSLKLNSPIISIPGISHITGMTIIAEIGDIHDFADAAHLISYAGMEPLVHQSGKYDAAHMPISKHGSRYLRKALYQAVFTVCKYCSTFNAYYTKKRNQGKTHRCAQGHCVRKLLRVIYKLLANNIAFDENLVK

SEQ ID NO: 320907 - protein, 438 aa, unidentified
MSNKVIFNVDELFISVGIDVGADFSWMSIALPNQQFVGKPYKILHNSMDSLTAAVSKIKEAEELYSLESRIFLESTGIYHYPLFCYLRDKGFNVSVINPIITKNSTNINIRKVHNDRFDSKKAALVGLKPDLKVSLMPSDLALNCRNLCREYYDLMDNRSAYVNKLQGELRMAFPQYPGIFSKVTVNTSLTLLETYTSPAAFIEADRQEIIDAIKSTARFGLTYALNKYNAIIQAANEANEFGYIIDSNIKRIRLYIGFIRKYDEEIKGILGSMHELVDANEATDFVRQIHLIETFKGAGFLSAVSLMGEIGDFSAFSKPKQLFAYFGLDPAVKQSGKFEGTKTQMSKRGSAIARRVVHTLALQSIGTSRTGEAKNPVLRDYYLKKCESKPKLVAMGAVSHKVCNMIFAILRDNKPFEIITPQEHIKKHNAAKCDIAA

SEQ ID NO: 320908 - protein, 340 aa, unidentified
MSEITTIGLDLAKHVFQLHGVDANGATVLRKRLRRVQVLAFFSRLPRCLVGLEACTTAHYWARQLRALGHEVRLMPAQYVKAYVKRNKNDAADAAAICEAVMRPTMRFVPVKTAEQQAAVLLHRGRERLVRQRTGLVNALRAHLAEFGVVAPQGLRHVGRLIAIVRDESDARLPDLARQVLAVLATQIEQLELAVQALEKQLLAWHKSNPVSQRLATIPGIGPIIATAIAATVAEPSGFRSGREFAAWLGLVPRQNSTGGKTRLGGISKRGNQYLRRLLINGASANLLRSKATNADPWVIGMRRRRPSLVVAVALANKTARIAWAVMHRQEDYQRMAAAA

SEQ ID NO: 320909 - protein, 407 aa, unidentified
MLFVGDDWAEAHHDVCLMNDAGEVLARQRLSEGLAGIGPLHELVADRADDPNDVVIGIETDRGLWVQALVAAGYQLYAINPLAVARYRDRHHVAGAKSDAGDAKVLADLVRTDRHNHRPIAGDSDDVSAIKVLARAHQNLIWSRTRQTNALRNALREYYPAALIAFDDLASNDCLAVLAKAPTPQAGARLSISQISAALKRGGRQRNLDRRSREIQHALRTDQLIAPEAITNAFAATATAAVGVIAELNRQITNLEHTLATRFEQHPDADIYRSLPGLGVILGARALGEFGDDPERYATAKSRKNYAGTSPLTVASGKKRVVRARHVRNRRLYDAIDHWAFCAITASLGCRAFYDHRRAHGDLHHQALRALGNRLVGILHGCLQTRTHYDEHTAWAHRTETPNDLAA

SEQ ID NO: 320910 - protein, 376 aa, unidentified
MSYSTKYVGLDVSKSKIAVAIAEEGRQEPHYWGTIDHTKEAVRKLMERLRTAEDIVLEVCYEAGPTGYALYRWLLEMGISCTVVAPSLIPKRSGDRVKTDKRDALRLAQLFRAGELVSVYTPTPEDEALRDLVRAREDAKEDLNRHKQRLGKFLLRYQLADPKGSNPWTHAYEEWLDTVKFEDDCQRLTFQEYRRSIQETKERIKRYDEEIKRQSETHTQAPLIQALQALRGVAVLTATTLASEICNISRFPSPSAFMSYCGLVPSESSSGNSQWRGRITKAGNAHLRRILVEAAWSYRYSPIVARKMRERTTGLPPEVQLISWTAQNRLHKKYKNMLRMGKHKGTIAAAIARELAGFVWAIAKEMEKTQQPKDAA

SEQ ID NO: 320911 - protein, 413 aa, unidentified
MRVMIERCCGLDVHQETVVACVLIGAPGRHPTKEVRTFRTMTRDLEALRDWLKAAGVTHIGMESTGIYWRPVYAVLEEHFELIVGNAQHIRNVPGRKTDVKDAEWIADLVRHGLIAKSFVPSHPLRELRELLRYRRKLVESQTAERNRLLKLLETANIKLASVAADVFGVSGLAMLKALIEGTASAEEMAALAKGRLRRKHDDLVLALEGRVEEHHRFLLTVQMRRFEAAEEDIKSLDLRIAERLEPYSFEQALLMQIPGVDWVVAAVLIAEIGVDMSVFLSVHHLAAWAGVCPGNHESAGKQRSGRARKGNVHLRTILVGAAISAGRTKGSYLKDKFYRLKARRGALRAAVAIAHKILVAAYHMLAKGLPYRELGEAYLDQLDQTRTAASLKRRLERLGYTVTLQLKEAAIT

SEQ ID NO: 320912 - protein, 445 aa, unidentified
MFIQSQDDSHCCYSFFIKVVILMMKLKYSICCGLDVHKNVIVATIVTTNKDGISEYLQKSFSTINSDIQRFHNWLIENNCYHVCMESTGKYWIPIFNYLENDIDVCLTHPKYVKAIKGKKTDKKDSKWIADLYKFDLVRCSFIPPKDFRQLRELSRYRFKLVCMKSSEKNRIQNCMTISNVGIASVLSDPFGKTATEIISYLLEHTADSMDEKAVRKLIKKGAKSKSDEIIEAIKGYTIETDQAKKLELARGHLEYLDDMITQTEVELYVRIKPYYEFVEFVSTMPGMTELSSTIVLAETGVDMDIFDDAKHLCSWCGLSPANNESAGKKKSVRIAKAGDYLKPMMVQCALAAIKSKKQPYFAIKYGRIKKRRGHKKAIIAIARMMMVCIYHMVSEKKPFTPTDYEELMDPQNHVESVVLNENNVFAYLESLGYDSSKLVKRNDN

SEQ ID NO: 320913 - protein, 354 aa, unidentified
MTQHSADNTLTLASIGIDIGKDVFHIVGFDTGGKIVLRRKIKRFSLVAEFKKLPPSIVGMEACLSAHFVSRTLRKLGHQPRIIPAIYVKPYLKGQKNDYNDAEAIAEAALRPNMRSVTEKSQDQLDLQACHRVRSRLVSRRTATINQIRAFLIEQGITVRTGAHALRNSLFAILENRADEISLRMHDLIMGLYEDWVRLDERIEAITGEIEAISKREANCQRLMSVPGIGPIISTAMVAAIGTGEAFERGRDFGAWLGLVPRQYSTGGRTSLGRITKRGNKYLRTLFIQAANVILMRPHNWEKFSFGPWLTEAATRLHRNKLATALANKLARIAWSVLRHDKAFDSHNPEVTAI

SEQ ID NO: 320914 - protein, 359 aa, unidentified
MDVRDPAKRHVVGGVDTHKDLHVAAVVDERDRVLGSQSFATTRQGYRQMLAWMGSFGEVQRIGIESTGSYGAGLLRFVQTVGIEVLEVTTPDRQDRRRRGKNDDLDAQNAAHAAFAGQRTVTPRSRDGMVESLRVLSACRKTAVAARRVALQLIQNTIVCAPDGLREVLRSMTRMQLIRTLAAWRPDLTAYRDVEAAYRITFKSLARRYLELHDEIADLDVMIGAIVDELAPDLVARNSIGHVGAAQLLLTAGDNPDRLRSEASFAALCGTSPVPASSGKTIRHRLNRGGDRHANSALHIIAIGRLRTDPKTKKYVAKRIAEGHSKLEALRAVKRYIAREVFTLIMRRHKMINQTQIAA

SEQ ID NO: 320915 - protein, 356 aa, unidentified
MTKVTASFENQTVYVGLDIHKRNWNAAIYLGEQYIRNIHQPPTPQALYHYLQQSYPQAQYVCAYECGKFGYWIQREFKQLGVECLVVNPADIPSTHKDEVYKTDSRDARGIGHALSAGQLKSIYVPYEDQEADRHLVRQRKKIWRDLVRCKNRIKGFLDYKGIEVPTQYGNANWSRNFINWLSKLEFEHSSNRVTLNYLITEMELLRKELLSISNTIRKLMRSKKYKKLYYLLRSVTGIGPLTAAALITEIGDMKRFTSFYHLNSFIGLMPMEHSSGERELKGRITVRKHRQLRSDLVECAWTAKRSDAALALYYSEQIKKGKNGKAAIVKVARKLLSRIRWVWVSGEAYQTAVVK

SEQ ID NO: 320916 - protein, 389 aa, unidentified
MQVVRIGLDLAKYVFEVHGVDSHGKVVVRKMLRRDAVARFFANLPRCLVGMEASNGAHYWARVLSDLSHEVRLISPQFVTPYVKSNKNDRNDAEAICEAVGRPSMRFVPPKSTDQLAIQAVHRIRRRLVADRVRLVNQIRGLLSEHGIVIARDISQLRRGLAVIVGNNDDGLSDMVRSLMRELRAEMAELDNRIATYDRRIREIFRTSEQCQRLGKIEAIGPVTATALIAAVGDRTCFKNGRQFAAWLGLVPKQRSSGGRARLFGISKRGDRYLRTLMIHGARAALGKAAGKQDPRSLWLGKLRQRRHPNVAAVALANKNARIVGHALGQHILRARTLGESSLRRSGKRRNNRRRSHPGNCSKMVGDGETVIPSLPEPGVWTGLASANV

SEQ ID NO: 320917 - protein, 331 aa, unidentified
MEEVKRFVGIDVAKVALDVFIGSAGGAFSVANDEVGIRELLRQMKPADFVIVEATGGLETPVASALAAAGIAVAIVNPRQVRDFARATGKLAKTDRLDAEVLARFGEAIRPEARPLADEQAQALEALVTRRRQLVEMLTAEKNRRARAPKVLHRSIDEHIRWLEKRLSEFDDELGELIRHTPLWRERDELLRSVPGVGKVLSSTLLAQLPELGMLNRKQIAALAGLAPFNRDSGNMRGSRSIGGGRAQVRRVLYMATVAGVRSNPTIRTFYLRLRTNGKQAKPALTACMRKFLVILNAMLHNKTRWQTPAPTFLTSSLSPLLGAVSEHGCC

SEQ ID NO: 320918 - protein, 412 aa, unidentified
MEVLYTCCCGIDVHAKMLVACLIKDGKKEVRTFSTMTDDLLHLLDWLTAAGCTHVAIESTGVYWRPVFNILEGTLSVMLVNARDAKGFKARKTDVIDAEWLADLLRHGLLKASFIPPLHIRELRELTRYRESLVREQTALSNRIQKLIESGNIKLGQVVSDALGVSGRQMLRALAEGETDVERMSELARRRMKRKVPELKRALAGRLTEAQRWVLTELLDQYEQVEAAVKRVEEKIGEEVERATDPFVAEAVKLLDTIPGIAERVAETIVSEIGVEMSRFATDGHLASWAGMCPGNNESAGKRKSGKTSKGNRYLRAALVQAAWAASHQKGTYLAAQYQRLVKRMGKKKALVAVGHSILVIVYHVLKNRTNYQELGGDYFDQRHVAQQRARLIRQLEGTGLKVTVEELSLAA

SEQ ID NO: 320919 - protein, 421 aa, unidentified
MSDDRCRLGSDDVVIGLDLASAEHQAVVVTAAGKRLTRFRMPHTRAGLEELLRRTTPAALGRPGGARVFAFEATGHLWEAVAYVLRARGEPYVVVNPLATFRVREARQLSREKTDLTDAEQIAELCRTGLVTRTQLEARPYLALRRAWGEYARLREERARLKVLVAHQLYGLFPEFLRVWADLLQPGALAVLRTGLTHAAMAALPLTEFVAQARAHGAGHRLWRDTLAQVHRAAAQTMACPDGLDVLAREVQRAVARIDMLTAHMTAVAAEIDSMLAELEEVPSLRPIPGLGWTSVAGLLAPVGAITKYHHGRQLIKLAGTNPSRRDSGQTVGHGQRMSHRGRAGLREVLYLATISCLQHNPSIRAHDDRLIQRPDRPLPKMQALGACMNKLLLYAFAVMHRREAFQLDHDWPRTTMARVA

SEQ ID NO: 320920 - protein, 394 aa, unidentified
MIYAGVDIAKTDHVIGAVDERGAEMCRPMPFKNTEAGLERAVAWLEGLAESPSDVVVGMEATGHYWMACYSFLVARGYSVAVINPMQVRAVRRLKGLDKVKNDRIDAGLIAEALRIGQYDETRLATDEVASLRSLSRYLQSLRGMVAELKTQCVCLMDAHFPEYAGMFSDMFGAGSRAVLSKSPLPFELARRRSDSLARDIAEASRRPGRSAGLAAEVKAAAKSSIGVRLGQEAASFQIKSLVRQIEFADSECAKVEARVRELLDEVEPLVLTIPGVSYVTGAQIVSEIGDVSRFRNAPALVSYAGLNSSVSQSGKFDSGGGPITKHGSPYLRRALWLAANRARQYDPGLRAFYDKKRAEGKPHRVAVTAVARKLCHIVFAVMRDQVPYDPERE

SEQ ID NO: 320921 - protein, 385 aa, unidentified
MSQLNDLSRSLTSLEQDNAIIAVIEMSQSSWLVAGIVPGIERHPLKKLEPNEGELLRLLMRWRAEATKMGCTITRIAVAYEAGRDGFWLARWLRAHDIETYVIHPTSVAVSREHRRAKTDRLDTGLLKRVFIGWLRGEPDHCHMVTIPTLAEEDAKRPNREREGLVRERTRIVNRMKSCLARFGVRSFKPTLRKAPERLAMLVTPEGVPLPANTLLELRRDMARLRFIMDQIKEVEEARGQRLEQAPQEKSHAMVRMLARVIGVGIETADMLVHEILSRSLRDRRAVARYAGLTGAPDESGSRRQEKGLAKAGNARVRRGMIQLAWRFLLFQKDSALAQWYRTRTESAGKKRKTMIVALARKLLIALWRLVTTGEVPAGVVLRAA

SEQ ID NO: 320922 - protein, 400 aa, unidentified
MNAVGIDVSKGKSTVAIMRPFGEVVAEPFEVLHTDTELRKLACFLEKLPGETKIVMEYTGNYWQPIANVLYDAGIFVSIVNALLIYKYGNNSIRKGKTDKLDAVKIANYCLDRWTVLERYTPVDQIRQALKTCRRQYDQYIRLKVNLKNNLIALLDGTFPGLNILFKSAPRDMDGHEKWVDFAGKFWHRQCVCGNSEKAFANQYRKWCAKAGYRFNAEKAVAIYSHAGSQVDTLPMSSAIQSLITHAVAQLNMIIETISAIQHEMLTLASQLPEYPIVMRMFGVGPVLGPQLMAEIGDVRRFHCKQSLVAFAGVDAPPCQSGTFESKNRHISKRGSPRLRKTLFQVMSTIIQHAPADDPVYQFLDRKRREGKHYYVYMTAAANKFLRIYYGTVMAYFEKP

SEQ ID NO: 320923 - protein, 368 aa, unidentified
MLYLAIDQHSKQLTVNLRNEAGEVLLRRQVSTRGDAPRQFLGDVQQRSAAEGGYVTIVEVCGFNDWLLELLPQCGCQETVLVQADKRSKRKTDRRDANKLGELLWVNRHRLSAGKPISHLRRVRILTRREREDRRVTQVRKSIGRELTRTINAIKTILRRENLEQHCPTKGIQTQAAAKWLRSLSLAPLDRMEMNQLLARWELLKQHKQQVEEEIARRAAAHPDAPLVKTLPGAAAYAALGLASRVGPIERFPRPRSLANYWGLTPSCRNSGEATDRLGSISKEGSTLARYLLGQLVMHVLRKDPVMRAWYKRIKQRRGSKIARVAVMRRLATIIWHMLKKREPYQIGGPPRRKLKRHKPAGVGAGPA

SEQ ID NO: 320924 - protein, 425 aa, unidentified
MNDDMMIAVDPHKASNTAAVLDPVTKTLIETARFANSAEGYDRLTAFAARWTQRRWAVEGCHGAGRSLAQRLAADGELVLDVPAKLAARVRVYSRGHGRKTDKHDAVSIGLAALDGAGILPVACDDVTVSLRLLCDRRDELASQRTQAVCRLHRLLAELTPGGMRRGLTANKAQALLAQIRPADDVAAVRMHIARDHLADIRALDARLKYIAGQITALVCASGTTLTSMFGVGSVIAGRVLAEVGDVSRFATKDKFASYNGTAPIDVSSGDQARHRLSRAGNRKINHAIHMMAVTQIRYPGTAGRRYYERKRAEGKTPKEALRCLKRRLSDQVYRQLVRDRQGRIGTCGSPTTQPPTPPTSTSPASGSPEAAPASRPPRLKASRPSSFSTGKTTTWSASKSSTPAAASTPTSSKRPKSSADADAP

SEQ ID NO: 320925 - protein, 353 aa, unidentified
MVVATIVEPSMQAVTTIGLDIAKSVFQVHGIDATGNVVIRRQLKRRYVLAFFQKLPPCVVGIEACATSHHWSRELKALGHTVRLMPPAYVKPYVKRQKNDAADAEAICEAVTRMNMRFVATKTPEQQSCLMLHRTRHLFIRQQTSVINAIRAHLAEFGIVARVGRNGVEDLLNVVADSSDRRLPEVARVCLAALGVQLRMLKAQILEFDRRIMAWHRSNETSKRLDEIPGVGPALATALVASVADPKAFRSARNFSAWVGLVPKQYSSGGKDRLGSISKQGDRYLRSLFTAGALAVIRYAKIHGTKHRPWLTALLARRPTKVAAIALANKIARMAWAMMAKGERYKEPAALAA

SEQ ID NO: 320926 - protein, 343 aa, unidentified
MEITTVGLDLAKNVFQVHAIGSTGGVVVRRSLRRAQVIPFFSKLPPCLIGMEACGTSHHWARELVGLGHEVRLMPPAYVKPYVKRGKTDAGDAEAICEAVTRPTMRFVPIKSVEQQAALALHRTRDLLVRQRTQLVNMIRGLLAEFGIAIPKGITNALAFVRRAAAGEANEVPDLATKVIAALAEQAIEVQCRIRQLERDLLASFRSNDLARRIATVPGVGLLGATAIAATVTDPTQFRSGRQFAAWLGLTPLNNSTGGKERLGRISKMDDQYPRRPLIVGMTSLVRRNLHRPDAADPRITALLARKPVRVATVAMANHAARAIWAIMVRGEVYRALGPVAAA

SEQ ID NO: 320927 - protein, 318 aa, unidentified
MAEEVSFEQIVERGCGLDVHKQTVVATIDGAGLKRETREFSATTRSLTELKEWLVSAGITHVVMESTGVYWKPVYHVLEPSGMTVWIVNARHVKYVPGHKTDKRDSKWLCKLLLAGLLKPSYIPPREQRELRDLTRYRRKLIQQIASEKNRIIRLLEDCNIKLSSVLSDTQGVVGTKLIDKLCANGRVSMADIEEVYHGKLQASKEEIYEACEGVVTEHHVFMLQAIKKDILSCEAIISELTLRIKEMLSPYENVLELLKEVPGLGTKSVEDLIAEIGLDMSVFPTEKHLASWAGVAPGNNESAGKKKVDELRMATNK

SEQ ID NO: 320928 - protein, 318 aa, unidentified
MSEAMFIGIDVSRDTLEVASSAQAASWRRANDTAGIEALCAELAALAPALVVLEATGGYEFEAACALQASGLAVAVVNPRQARDFARAMGALAKTDSLDARMLAAFARVLHQHPERERFVKPLADAELQCLQALVLRRRQIVGMLTSERQRLRMSHASARPSIEETIAFLKKQLDGIEGQCAGHVQAHHGALARALSSVKGIGAATVATLLAELPELGSLCRRRIAALVGVAPINRDSGQMRGQRSIWGGRADVRRTLYMATLVAVRHNAVFKTFYQRLLAAGKLKKVALVAAMRKMLTVLNAIAKSGKHWEDSLHTT

SEQ ID NO: 320929 - protein, 401 aa, unidentified
MVSDFRKGRYNLMKIFVGIDIAKLNHFAAAISSDGEILIEPFKFTNDADGFQLLVSKLESFDKNSIIIGLESTAHYGDNLVRYLVTELYQVCVLNPIKTCQMRKNNVRKTKTDKVDTFVIAKTLMMQDDLRFITFFDLDMMDLKALGRFRQKTIKQRTRLKIQLTTYVDQVFPEIQYFFKSGLHQHAVYALLKEAPSPKEIASMHMTHLANLLKVNSHGHFTKEQAKELRVLAQKSVGANDSAISIQITQTIQQIELLDSQLEKIEAEMTDIMKFNDSVIMTIPGIGYINGGMILGEIGDIHRFSNPNKLLAFAGLDPSVYQSGNFQAKTTRMSKRGSRVLRYALVNAAWNVVRNNATFKAYYDAKRAEGRSHYNALGHCAGKLVRVIWKMLTDEVEFNLE

SEQ ID NO: 320930 - protein, 363 aa, unidentified
MNDTHFSSLTTNSIVVGMDIHKYSHTAVAMNILGKELSKLEFDNDELNNCILWLKDLGVKKDLVIGLENVHGYGFHLAHILSSNGFNIRYVPPVLTEREKKHSVHREKTDHIDAKRVGKVILHKIEETLPASPIIAKKQQKLRLIDLHIQERESLVKQQTGIKNRLHNLLHQYYGNNYKQNFSDIFSAKALKYYEEDIKDSVNKLGYLEGAICRLIEHLKIVQVHIKEIDKILKNLGETVESISVIDEKMFGCGLLTACKIMAEIKTIERFTSQDKLARYGGFAPVKSKSGSSGRLHTDKHGNRKLNRAVHTVALSQIGRYGPKSFKAYYKRKIAEGKSKLWALRCLKRQIIRNIFDILTEEA

SEQ ID NO: 320931 - protein, 401 aa, unidentified
MTTMQDNVQRVKRFREVKATLRTEHQRLLVGIDIAQAEHVVQVRHAHTRIVGPTLTIPNTSRGFTQLWARIQQAQRATGCREVVCGLEPTGTYHQAVAAFLEAQGATVVLISSSVAYWNRRTQDGTWDKHDRKDAANCADLLEQGKVLFYSQPDGPLAELRHLVKCLRRARAELAACKARWRTTLRPALGPMGEPLPNRLRAELPAVLQGWERAAPGRPAVAKGRLPLGLATACADLGAQVTAVQARIAAIEQALMPLAERLPAYTLLRTIPGVGPTVGAILLAEIGDVAWFTQFSQLRKLAGLDIVRVQSGQFAGQARISKCGRGLLRWALYQAALGQARTIVGRARLAALKAKRHGDRYAGFKATVELAAKVLRIVWGVWRSGTPYDPRRTGGLQRQPR

SEQ ID NO: 320932 - protein, 424 aa, unidentified
MNLTQNDRLKQVTSDTLIVGVDVGSQTHFCRAFDWRGFELSRRVFKFSNTGMGFLTFLRWAEELMNKTEMKKVIVGCEPTGCYWLTFQKFLQDHDIQLVTVNPFTVNRSMELDDNSPEKSDLKDPKTIALLVKDGRFSTSYLPSGVYAEIREASVCRDQIMKQHVRLSNQIQGWLQKFFPEYFECYTDWDSTSGLMLLREAPLPQDILKIGAGGINQIWRDAKVRAAGIKRAQTLVEAAQNSVGLEAGEAARLEIWVLVNDYILKAEQLKRLDEYLEEKIKEVPNVEKLLAIKGVGMSTVIGFIAEVGDIGRFTDPKQIQKLAGLEIVKKSSGKKKGQPRISKRGRRKLRRTMYESARALMTWNPAFQDVFLYYRNRTKNPLGGMQAKIAVACKAIRIFYAVLQTGCDFDEEKFRKDIIRPEAA

SEQ ID NO: 320933 - protein, 362 aa, unidentified
MQVRHIFVGIDLGDKNSVARIALDRDKSERFGFVNNRHGRARLFREVKAKAEQAGGARIVMAYEASSCGFVLSDEAEREGIECRVLAPTKMEKSVEQRKHKNDDRDAEDVVEKLRAHVLAGNRLPTVWVPDAQTRDDRELIRARLELVDKQTQLKSQIQMLLKRHGVEKPWGLGAGWTIAYRRWLQALAESESLGWGSRQALSSLWRQLQFIEAEIQRLQTPLEQLANEPRHKPMIEELTQESGIGLLTAIVYRTEIGYAGRFGRGRQVGKFVGLTPTSHESGQQNDRKGHISRQGPPRLRKVLCQASWVHVRHDPLARRMYQELVLRNPKKKKVALVAVMRRLAVRLWHRMRKIELQLAEA

SEQ ID NO: 320934 - protein, 355 aa, unidentified
MTRLADTIDGVIGVDTHRDTLAAAATDRVGGPLGEAAAATDLAGYQRLLAFGQAQVPGRRCWAVEGAGSYGAGLTNFLQARGEWVVEIGRPTRPARRTGAKSDALDAIRAAREALACDHLVMPRRRGDREALRVLLAIRHSACRAKVAAINQLKALIVGAPEELRAELRGLGTNQQIRRCARLRERPARSLEHRMTARVLRCTAQRIQLLAAEAALLRAELERLVAAIAPWLLELAGVGPISAAQVLVSWSHAGRLRSEAAFAALAGANPIPASSGQVTRHRLNRGGDRQLNRALHTIVVARLRDDPSSRAYAARRRSQGKSTRDVRRCLKRAVARQLFKLLEGHDQAVVEILRA

SEQ ID NO: 320935 - protein, 408 aa, unidentified
MELLYPRCAGLDVHKDSVVARIRCVSEPLQDEVKTFATTTSALLELNEWLRQHGITHVAMEATGVYWKPVWHLLEGDFELVLANAQHIRNVPGRKTDVNDATWIAELLAHGLIRSSFVPPQPIQELRDLTRTRKQLVREIAQHATRIQKVLEDANLKLGSVLSDVMGKSGIAILRAIIAGQSNPEVLAGLAQGTARKKRAELVEALHGRIRDHHRKLLRVHLELVEALQQAVQELDNQVGKSCASIRESTRVLTTMPGISEISAQAIVADIGTDMTRFHSDAHLRSWACICPRNDESAGKRRSTRVRKGGTWLKTALVNAAWAAVRVKGSYFQGQFQRLRTRRGPKKAILAVASSMLTCAYHMLKTGVEYRDLGAEHFARRDRQKMIQRLVRRINDLGCDVQLLPQEA

SEQ ID NO: 320936 - protein, 362 aa, unidentified
MVGIDLGIASRHSVRVLEADGLVVCRTSCVPTTESLTLTERAALAGAPEGTRLAVVFEPTGPAWMPIAVFFARRGHDVYRVSSAKAADLRRFLRRHAKSNGIDAETLARIPLADPAGLHRLELPGADAAALDRRVRACDRLTSAASEHKVRIKDLVRQLLPMTPLTGDLGKADLAVLEQFADPRALLAAGAAELTRLITSASGHQQGTERALQWRAAAAAAIDLYGDHPAVPFEELAAEVATEVRLLRAIGAELAVHAAAREQHYRQVDPAQLARSLPGSAEISAPVPVAIMGRPGRFRNGTKFKSCAGLAPKASETGETDTVNALDRDQIIIDDVHHPVLADPQPVIAATVEGFRRVRVGS

SEQ ID NO: 320937 - protein, 412 aa, unidentified
MSNPLVVGIDVHRKTHTVALMEQSGREVAPRFTVQNNRPGTATLAQTLQATVQQGGYDAIHVAAEATGWYWWHLFYTLDKDPLLHQNPLLLYPFNARMTANFRKTYSDRDKTDRVDAGVIADRLRLGRDLPQPYAYDETYLGLRFLTRHRFHLVHQIVREKAYFLAHLYLKASEYTRLQPFGDVFGAASRALLLDYANLEEIAAIPFDHLVEVIDQLGKHRFADPKQNARSVQAVAGDSYPLPQGLQAPVNLILCQSLQQILSLQRLVQRTETAIATAIEATPNTLNTIPGLGPVFAAGTASEIGDPARFDGDEAKVAKFAGLSWRRTQSGDFQAEETHLTHSGNRYLRYYLCEGANSVRMRNAEYRAFYERKYKEVRLHQHKRAIVLTARKLVRLVVRLLTTNQPYQPRRR

SEQ ID NO: 320938 - protein, 398 aa, unidentified
MTESSDYESVQVFIGVDVGKDTHHAVAVNRSGNRLFDKALPNDENKLRSLISDLKQHGQILLVVDQPATIGALPVAVARSEGILVGYLPGLAMRRIADLHAGEAKTDARDAAIIAEAARTLPHALRTLKLADEQIAELSMLCGFDDDLAAQTTQASNRIRGLLTQIHPALERVLGPRLDHPAVLDLLQQYPSPEKLASLGEKKLATQLCKLAPRPGKRLAADITQALTEQTVVVPGTNAAVVVLPRLALQLITLRKQRDEVALEVEQRVLAHPLYPVLTSMPGVGVRTAARLLTEVACRAFASAAHLAAYAGLAPVTRRSGSSIRGEHPSRRGNKTLKRALFLSAFAALRDPISRAYYTHKMSQGKRHNQALIALARRRCDVLFAMMRDGTFYTPTAS

SEQ ID NO: 320939 - protein, 322 aa, unidentified
MIEVREFIGIDISKATFDVYSSTLGALKFTNDADGFDLFLSVVDPSDCCVMEATGAYHHRLAEYLFDHAIMVSVTNALAIKRYGQMKFKRNKNDKADAKLIWSYACDQGVNLWEPFPEYIEVCRSHQAVISLYLKQNTQLKNKLEYLQSRGLEKGAVARSLRLQLKRVRKEIETLENGIEEIIKQQDQELLTCLKSIPGMGKKTAMFLIVFTNRLSGFENAKQLVSYLGLAPTERTSGTSIKGKSRISKAGNPKLRSMMFLCSFTAYKYNEPCKALYERLVAKGKTPKLALIAVANKLLKQAFAIANSRIPFDPEYRSVKPC

SEQ ID NO: 320940 - protein, 398 aa, unidentified
MTESSDYESVQVFIGVDVGKDTHHAVAINRSGKRLLDKALPNDENKLRSLISDLKQHGQILLVVDQPATIGALPVAVARSEGVLVGYLPGLAMRRIADLHAGEAKTDSRDAVIIAEAARTLPHALRTLKLADEQIAELSMLCGFDDDLAAQTTQASNRIRGLLTQIHPALEHVLGPRLDHPAVLDLLQRYPSPEKLASLDEKKLAAQLCKLAPRLGKRLAADIAQALAEQTVVVPGTNAAAVVLPRLALQLVTLRKQRDKVALEVEQRVLAHPLYPVLTSMPGVGVRTAARLLTEVACRAFASAAHLAAYAGLAPVTRRSGSSIRGEHPSRRGNKALKRALFLSAFAVLRDPISRAYYTRKMSQGKRHNQALIALARRRCDVLFAMMRDGTFYTPQAS

SEQ ID NO: 320941 - protein, 360 aa, unidentified
MNATTVAVDLAKSVFQLAVADDQWRVVETQRLTRTQFERWFVDRNVGLVIMEACGSAHHWGRWLNRLGIEVRLLPAQYIRAYVKRNKTDAADAAALLEAARASDMRPVRVKSVEQQALQGMHRIRSLWMGTRTSRINALRGFCREFGIAVPVGARTGIETISRVLADPNTAVPDLIRGTAKLLVEEIRLLEGRIAQLERELAALAKLSPACTILLSIPGIGLLTATALVAATSGDVSHFKDARHFSSWFGLTPKEYSSGNTRYLGHISKKGDRYLRMLLTHGARSVLRSSKVAQDTGREVCGVRRWALDVQSRSNHNKAACALANKLARICYATLRDKEPFGEDQRLNKKINRESFVMPA

SEQ ID NO: 320942 - protein, 355 aa, unidentified
MMIIGCDFHTRQQQIAMLDTETGEMVERQLQHESGEARKFYEQLAKPVRVGIEATGYTQWFERMLAELGHELWVGDAAKIRAAVVRRQKTDKRDAAHLLELLLAPDRFPRIWMPTPAERDLRQLVLHRVKLVQMRTKVMNQLHAMAMGQGLCRKKKLWSRAGRQELEALPLGPWAARRRQELLTMLDQWEKPIAELDRAVEQQAAAHGQAVRLMTHPGVGPVTSLAFVLTIGTADRFPRGRQVSSYLGLDPRTDRSADRVRSGPISKQGSSTTRWLLVEAGQTAARLDPELRRVYQRLKFRRGSQIAKVAVARRLAVRLYWMLRSQADYGELTARLVRMRGSSGSGPMEKSPSRR

SEQ ID NO: 320943 - protein, 403 aa, unidentified
MVFVGIDWAEAHHDICVVDEEGHVLAKRRVPDGLEGVGKLHALVAEHAEDPAQVVVGIETDRGLLVGSLVAAGYQVYAINPLASSRYRDRHATSGAKSDSGDARVLADLVRTDRHKHRPLAGDSNLAEAVQILARAHQGLVWTRQRQANQLRNALREFYPGALAAFDDLDAAGAVAILERAPTPSRGRALSKAKIISALRQGGRERNLEAKAAQIQAQLRLPQLEVPALLSQAYGHSVAASVAVIKQLNLQIAALEQELAASFEMHPDAEIYLSLPGLGVVLGARAMAEFGDDRTRFLNPKARKSYAGTAPITKASGTRKVVLARIARNRRLADACYQWAFSALTRSKGARHRYDVLRARGQTHHQALRALGNRLVGILHGCLTNRQIYSEHLAWSPHLEVAA

SEQ ID NO: 320944 - protein, 333 aa, unidentified
MLPPNCGTATPYILRNTVGLDISKLTFDATAIVGNAEYSAKFDNDSKGLNQFSDRLKSLGCQNLHICMEATGNYYEEVADYFAQYYSVYVVNPLKISKYAESRFKRTKTGKQDAKLIAQYCRSAKESELVKRQKPTDEQYRLSRMIAAYAQIKSECAAMKNRHHAAKDEEAAKAYAEIIKAMNEQLEVLKEKIKEQTEKPKCKEGVKCLETIPGIGRMTAAVLFHHLTSSKFETSNKFAAFAGLSPQQKESGTSVRGKGKLTKFGNRKLRAVLFMPAMVAYRIRAFPDFIKRLEEKKKPKKVIIAALMRKLAVIAYHVHKKGGDYDPSRYKSA

SEQ ID NO: 320945 - protein, 365 aa, unidentified
MYIIGIDIGKNHHEASIVSPEGKQIGHSLRFATTHKGADSLMSFIFNNIGNSSCIFGMEATGHYWYPIYSFLKASGYTIYVINPIQSDFLRKMYIRQTKNDSVDSFLIAEVIRFGQFTTTSMADENILAMRQLCRYRDSVISSRTEIKLRISTIMEQIFPEYEKQFSSLWLSTSMGILEKYLTPENIENAPIDELFEIIKDKSHNKLTMKKAFSIREAAADTFGIKIAQDAFSFQLKQLIDRMNFLDKQIAAATILAEIGDINRFKSSSALVAFAGIDPTVRQSGEFSSTHNHMSKRGSPYLRHAIFLAATTCSFHNSPLNAYYKKKREQGKHHLTATGAVARKLTTVIYAVLRDGKPYEPKSFC

SEQ ID NO: 320946 - protein, 437 aa, unidentified
MNASQEPSVPPSVFSTLTHYGAVDWARGHHDLCVVDRAGGIVFELSIDDTPQEWAKVRDKLAEMTGPDGSPAIVGFAIETSSGPAVERLLEAGQPVFPLNPKAAERYRDRNAPAGAKSDRLDAFSFADALRTDGHKWRPLRPQDPLTCELRLLCRDEITLIAQRTALVNQLQATLNEYYPTALAAFDDWAAGGAWEFIIAFPTPHQLASAGKRKWEKFLHAHKLYRPQTSQRRMELFAAAVAWASPNPAVTAAKSFLAVRLARQLRMLQTQLDEYRARINELFAQHPDRDLFGSLPGAGEKIAPRLLAELGADRQVFDDAEAMQCYGGAAPVTQKSGKTCRVFFRRACNTGLRTTLHLWADCSRAKAPWADAYYRRKREQGMGHAAALRCLAMRWLKILHKMWIDRTPYDADRHLRDQLKHGSWVISLLPQPAMQSN

SEQ ID NO: 320947 - protein, 358 aa, unidentified
MKIVGCDFHPQWQQIAVFETETGEINEYKLRNGDGEAERFYRAFPSPGLIGVEACGNSQWFIELLERLGHQVWIGDAAQIRASYVRKQKTDRRDAGHILRLLMENRFPRLWAPSAEQRDLRQLLVHRHKLVEIRSRVKNGLQHLAMNRGLQKQSRLWSVRGRACLEELPLAGWSARRREDLLELLAGLDRQVAELDGAVEQAAEQHPQARLLMTQPGVGPITALAFVLTIGEVSRFAHSGQVASYVGLIPREHSSGGRQRLGAISKQGNRFLRQLLVEAAQTACRFDEGFRRQYHARCHHKPKAVAKVAAARKLAVRLYWMLRQNVGYPEIARIESSSGVPLAGTYADGLIERSRIQQ

SEQ ID NO: 320948 - protein, 445 aa, unidentified
MRRHNLAGELSCPDNQTACRLSSGPIKEIGVLEKEAPYQGRKHGRRARPILTEPEYFLKETTLIRSVGIDLSRTGSHQVRCLGEQARPCDSFSFDSTVEGLEKFEKHVFSNGDTPAIIFEPTGLAWIPMAVYLRARHPECQMVKARLQKVAALRRYLRNHTKSDRVDGLTLAKMPFIDAEQLDEAYLPPSEYHALQRLTRQRERLMKSITIRKNRIGSIVNGYLPDLRKAFSDEWSDRARLFYRQRLNPFTVVRDGKSALETFLVSDKAKGAMTESHRVYQVCQKLAEFYEKSKPAGMIDEDFFDDLQNEIACELRLMETEEAEVERVSGRIEELYRHLHPSDHLRTIPGIGVRTAQVFLAIIGDPHRFRSQSAFANWTGVVPGARQSANSEGKGLRMTKAGPSMMKRALFQAGDIARRYDPQLADLYYRRWCSMARHTCKPWEQ

SEQ ID NO: 320949 - protein, 345 aa, unidentified
MKIHTIGIDLAKTVFHLVGLNARGEVVVRKKCSRNQLLRFTSNLHVSLIGMEACGGAHFLGRALREQGHNVRLMPAQYVKPYVKTNKNDYIDAEAIAEAVGRPTMRFVPIKTDDQLDLQSLHRIRERWVTRRTAVVNQIRGLLLERGITIRKGRRHVEVSLPAILEDPDNKLSGALRLLLAQLQLEMQYLSRQIDESDKLILRIANEIESCRRLIAIPGIGPLTGTATIAAIGNGAAFKKGRGFAAWLGVVPGEHSTGGKQKLTGTSGRGNKYLRKLFVQGAQTVLLRKEKQSTGLRTWLIDLTSRKRKQVAAVAMANKMARMVWAVLSKGEAYCPPLLAQTVAA

SEQ ID NO: 320950 - protein, 417 aa, unidentified
MEEEVYYERCAGIDVHKKLLVVCLRIGRKTEIKEFGTLTHEIRELVAWLKSNDCQMAAMESTGSYWKPLYNIFEQEGLPAMICNAYHIKNVPGRKTDVKDAQWIARCLSQGLLKPSFVPDRAQRELRDMTRFRKSQIEERSRNINRLQKFLEGANVKLGSWLSDIEGESATKLLELVIGKPDFTVEDVAKRIRGNMKSTAEELFLSLEGSITSAQREFFSHIMAVIRQQTAQIEKTDALIQRGLNDNYKAAVEALDDIPGIGRISAEQILAETSADVSSFKNQHSLSKWAGVCPGNNESAGKRKSSKTPPGNKMLKSTLTQCAKCATRNKKSFFSAQYSRLVSHRGKNRATMAVAHSMLIAVYFVLSGCKYKDLGADYYTQFNRERKINSHVKQLSKLGVNIPDSVLKAAIARLKDP

SEQ ID NO: 320951 - protein, 340 aa, unidentified
MPLYGGIDLHANNSVVALMNEQDEVIYQKRLPNDLPTILEQLAPYHADIEGLVVESTYNWYWLVDGLMEADYRVHLATPAAIQPYNGLKYSDDHSDARWLGHLLRLGVLPEGHIYPKADRAVRDLLRKRAHFVRQHTANVLSVQNIMVRNTGSRCSVKRIRELTAKELKHLLPEAYQVLAITSSLAILDCLSQQIKTLEKAVSKRLKHTPSYEQLLTVDGIGTILAQTIALETGQIGRFPTVGDYASYCRCVNSTKLSNGKRKGTGNVKNGNPYLAWASMEAAQFALRFQPAAQRLYHRKLAKSRNNTVLARKSVAHKLSRACYYLMRDLVPFEATKAFG

SEQ ID NO: 320952 - protein, 345 aa, unidentified
MQLHTVGIDLGKTVFHLVGLNERGEVVVRKKFSRKQLLHFTANLKVKLIGMEACGGSHFLGRALREQGHEVRLMPAQYVKPYVKTNKSDYIDAEAIAEAVGRPKMRFVPIKSDDQLDLQSLHRVRERWVMRRTAVINQIRGLLLERGITVRQGRRHIDAALPGILEDASAKLSGALRALLAQLRLELDHLQMRIDEADAVINKAASENEACRRLVAIPGIGPVTATAIIAAIGNGAAFKKGRGFSAWLGIVPGEYTTGGKQKLLGISKRGNSYLRRLLVQGARAVLQQRAKQSSGLSAWLAQLTTRVHSNVAAVALANKLARMAWAVLAKNEPYRPPMLAAAATT

SEQ ID NO: 320953 - protein, 428 aa, unidentified
MNCNTQNAKIASITEKTLIVGIDVGSETHFARAFDWRNYEYTKKPLEFSNTEAGFLTFKAWVEDIAEKQGKTAVIPGMEPTGHYWFALGKFLQDNGMKPVHVNPHHVKKSKELDDNNPNKNDRKAPKTIAALVNEGRFSYPYIPTGIYAEIRSLSNLRFQTQEELTRIKNRIARWFAIYFPEYKDVYGDLKTVSGRMVLKVAPLPEDIGKLGVEGVNQIWRNAKLRGAGIKRAKTLVSAAEHSVGSKEAPEAARMELKNLLDDMDVYVSRLDELLVNIEEKLKEIPYVDKLMEIKGIGLVTVSGFIAEVGDIGRFDNPKQLQKLAGYAIVANDSGKHNGENRISYRGRKRLRYVLYEAAISLIGKNAEFKSIHEYYRTRKENPLKKMQSVVAVACKILRVFYTILTKGVDYDPVKLLGDIKRPQLQAA

SEQ ID NO: 320954 - protein, 423 aa, unidentified
MENIAARKLKQVPEGYLIIGVDPHKKRHAAVAITQDFTTRDKFKLDNTREGLEIMLRRARMEMVKSDCRGVMFAIETGGHYWRNVAYFLDEQGIPFRFINQFTLKRRREGKDLNRRKNDYRDSEVAAQLLCTGEFTESKVPQGVYAELRTAHNAYRRLVKERTRITNLIKGLLDALFPEFTQVFKDPCGLTALSVLSTCPIPSVIAGMTEEEFVATIEAKHQGRLMRKKLRALHHMARASIGIAAGARSVSSEISFLVEKLELIRGHIYIIERTLVSLVDETEEGKYLLSIRGLNYIAVAGLLAELGCFKSYRTAKQMIKMAGSNPTESESAGKRGTHTPMSKQGRPVLRYCAWTSVIPMLRLNSDFRAWAKQMRERPAHANPLNGREIVGAALNRLLRLAFALVKNQTYYQVSKPELTLVAV

SEQ ID NO: 320955 - protein, 447 aa, unidentified
MQQPIEIDVDEQEQIVSRVAGIDVAKASGMVCTRVPHDTNTTRRVTKVWQVNSDTGSLLELADHLICQGIERVVIESTSDYWRAFYYILAARGLTVWLVNAAQVKNVPGRPKTDKIDAVWLAKLAEKSMVSPSFVPVEAMRHVRDLARARFDLVADRTRVKQRVEKLLEDALIKISSVLSDIHGVSGRAILDALIAGQRNPTVLAELAKGRARARRGDLERALHGRFTEHHARLARMLLEQIDELHAHITQVTALLDQAIAALPDNPAPADTHDGATVDTGPAGVACAVQRLIQIPGAGPDSVRAVIGEIGLDMSVFGTHQRLCSWAKTSPRTKQSGRKKGKATTGKGNPYLKAALGQMATGAAKTDTFLGARYRRLIKRMPKPKALAALERSILVIIFHMLADPTIEFADLGADFYTRRIDRDRRTSQLTRQLQALGYTVTLTTAA

SEQ ID NO: 320956 - protein, 379 aa, unidentified
MPSKNIVYLAIELSVTSWLIGARLSGTEKVRLHRVDGGNTGALVALIEELRSRASSKLSGAAEVACCLEAGRDGFWLHRLLTAHGFAAYVLEPTSILVNRRKRRAKTDRLDAEGMLHVLAAWLGGDRRVCSMVRVPTPAEEDAKRPHRERGHLVQEKLRIENRIEALLFTQGIRGRPSLRSWERDMAELRTGDGRAVPPSLRAELDRLRRRLVLTLELIRELEADRAKVMGEARTADMMVGKIIALQHIYGIGENFAAVPGREVFYRSFSNRRQLASYVGITPMPYQSGGKDRDRGISRAGNPRARTTMIQLAWLWLRYQPDSPLATWFRERVGRLRGRTRRIAIVALARKLLIALWRYVETGVVPDGIVLRATPAANA

SEQ ID NO: 320957 - protein, 447 aa, unidentified
MELSSLQQKRGMIDGMIIVGIDPAKAKHQAMVIDPIGSQLGKTFPFDVSHEGYTNTLWHKLRQIVPNCNPQSVVFAVETSCNLWLTLCAYLDREGYRVLLVSPLTTHHARPMLNHDFSRTDPKDALIVASNAQHGYFDLYSTHPSLHGAMHRLSITYDKLRKEYAQNRGRLRALVEQIFPEFLTLVEPDTHTAMYLLKRYLFPQDFLSLNVAKKAEAIATISRNQYGLNTLLQLQRAAHHSIGVPKNKEECTAERISLTCWIALIETIATQVDQVLAELIRCAEQLPEYHILLSLKGISCTTAALFLAELQNIHRFGHFKQIEKKAGLNLRLSQSGQFVGTRHISHLGDNRLRWLLYSMTEETARWIPEVRIKYLHRQLKSRKHRKSIIASTPQLLKLIMALVKENRLYESRPETLAEMKALEQQYTELKEKQKKAKRQVLSPGRAA

SEQ ID NO: 320958 - protein, 312 aa, unidentified
MTREAYVGIDVSKRWLEVCVHGESETRKVGNDEEGHLRLVEQMKGLQSALIVFEATGGYESRVAQALREAGCEVAVVNPTRVRRFAEGLGILAKTDKIDAQVIAQYAAVVKPAVNGAQTPSEERLAACVERRRQLLVELVAEKNRLSTCPASVREDIHEHIAWLEEHIDHLEAEIQLCISQNPDWQVRAEIIDSVPGVGAVTASTLVAELPELGQCNRQQIAALVGVAPFNKDSGPKKGKRRIFGGRSGIRRTLFMATFSATRHNPVIRAFYQSLLKRGKEKMVALTACMRKLLVIINALVKKSEVWRYVPA

SEQ ID NO: 320959 - protein, 338 aa, unidentified
MKVTTVGVDLAKRVFQLHGVDQHGRVVLRKRLSRSKLTECLTHLPPCLIGMEACGGAHYWARKFQQMGHEVKLISPQFIKPYVKSNKNDYNDAEAICEAVSRPQMRFVPVKGVAHQDIQALHRIRERLIGARTALVNQTRGLLAEYGIVLPQGVNQVRKHLPCILEDADNGLTSLAREVFADLYEHLQAVDEQIAAAERRIERVFRSHPICQKLAQVNGVGRFIATALVAAVGEGREFRNGRGLAAWLGLVPRQHSTAGKPKLLGISKRGNCYLRKLLIHGGRAVVRHAQGKTDAQSRWVTALKQRRGGNIAAVAVANKNARILWALLTRGEDYRQAA

SEQ ID NO: 320960 - protein, 344 aa, unidentified
MTNIQHKETAREAKPDLFAGIDVGAEELILVIRKNGKPFDPQKFANTPADRDRLVKKLVKLPGIIVCLEATGVYHFDLSLALHDAGVLLMVVNPKASHNFAKVLMKNSKTDAVDANTLAEYAARMDFVAWTRPSDETIALRSFSRRINALTGQKAAAKNHLHALTATSETPKVVLKDAKLAITQLEKRIDCLTAGALVLIGKHSELERILALLIGIKGVGETSAIALMGELLLLPPDLSHREWVKFAGLDPRAFDSGKSVHKKTRISKAGNRHIRAALYFPALSAKQHDKHVKAYFQHLMDNGKTPLQGVCAVMRKLLHAIHGMLKKNEPFDNTRFYAIPESIG

SEQ ID NO: 320961 - protein, 354 aa, unidentified
MNNIKYIGIDVHQATSVFAIMNQQGKTLGEGFFETKQQTITDFLKSQRGTLYVTFEEGAYANWLYDVIQPHVAKLVVCDPRKNKLDGNKTDKIDARRLADLLRMNALKPVYHGQQSTRTLKELARSYVTLQQDSTRAMNRVKAIYRGRGIPCRGTSLYQPKNRKEWLGKLNEDGARHRAELLLKQLEFLQKFRLEAQKSLVRESHKHKESKILRTVPGLGNIRVALILAFVMTPHRFRNKRQFWTYTGFSVVRHGSAEYEITQGIVKRTKKKPLPRGLNRNCNHVLKNVFKGAALTAAYRGAFQELFNQRVDNGAVPNLVLLTLARKIASITLALWKKGERFDIERHRLSEQKT

SEQ ID NO: 320962 - protein, 403 aa, unidentified
MIVGIDIAKERHHAFFGTATGRTLLRRLVFSNDYEGFRKLLDQTEALRVRHGLKKVVYGMEPTANYHKPLGEYLITQGRTVVLVSGVTVKRNRESLDGRWDKHDVKDSANVTDLISQGKCLYYEYPSAGLRGLRGLLSLKRRLKKQEHGYKVRIRNHLIAQYFPEMDGEYERLGAAGLSIVRWCFPPIQMTEIDVDPFIERVTSRRIRMETRRRLEGVWEKAGETIGCGGVPGVEHEAKVMVEGLRQIREMIKETEEKIQELCEQFPGYPYVLTIPGFGPDVSAKVLGAIGDPYRFQNGKQVLKLAGLDLSADRSGKDSDKAIPEISKRGKADLRYALYQAALIASTKNQDFMRYYTRKLEGRQKEKGIQTKMWVKLSAKMLLIAWTLMKKKEAFDPVYLKVE

SEQ ID NO: 320963 - protein, 339 aa, unidentified
MFYVGLDISVARTAVCIMDASGQVVREQSVASTPEAIAAAIRASGKEVERVGLEAGINSAWIARGLLELKLPVLVIDAAHAAAALKTGFRNKTDKNDARGIADLMRVNKFRAVSVKSVAAQRDRALLTVREQLRQQSLDARNVIWSILQVEGLKPPKVTSPTFQALVVQSLDDEALAPMLRPLVVVVEHIDGQVAGLDKEIARRAKASTACKRLMTVPGVGPLVALTYAAGVDDPARFSDSRTVGAHFGLTPRRFQSGEMDWSGGISRAGDAGVRRALYQAANVLIHHSRGWCALKSWAVRVAKRRGLGKAKVALARKLAVVLHKMWTTGEDYRLKAAA

SEQ ID NO: 320964 - protein, 478 aa, unidentified
MARTRKKPVPAPAGGGVEVIDAPVQVIARAAAIDVAKGSGMVCTRLPSDTKAGRRTRRVQEVTATFAAVVALMDHLVNQGIERLVLESTSDYWRIWYYLAEAAGLEVWLVSARDVKHLPGRSQSGKLDCVWLCKLNERGMLRRSFVPPGQIGDLRALTRLRARLVHDRTRHQNRIEKIPEDALLKISGLISDLMGASGRPMLAALVNGERSPKALAALGDCRLRATPAQLEAALTGRFRGIHAFETGMLLELTGALTAKITRLDQQITGLLEQIPGISGACTSCGVIGGGHAPACASGQAKVLPVIERLDEITGAGPGTAPVIIAELGTGMTRFPAPGHAAAWAELTSRTIQPGAATKNGRAGKGNPYLRGALGAAVMTAASTGTFLGGRYRRIARRRGKQKAIVAVARTICEIASLIIKDPGFRYTELGAGYYARLDPERQTSNKIRELEKLNPGMVVTLTPREPAPGTPATQTPAA

SEQ ID NO: 320965 - protein, 353 aa, unidentified
MTSEKYVGLDVHKATIVAAVQDALGKCLITSVIETKAETIRAFIKGLTGTVHVTLEEGTHASWLADLIRPLVAEVIVCNPRHNALLQSGNKSDKVDANKLAHLLRTGMLKPVYHEAHGTQSLKQMAQCYETLVVDSIRVMNRIKALYRGRGIDCSGNGVYCVSQQKDWLAKLEEPGARSRAQLLYSQLESLKKLRRQARNELIKESRRHPAYKLLTPVPGLGPVRVALIMATVVTPFRFRTKRQLWTYVGLAVVTKTSAEYEIVGGRVHKRNKPTSTRGLNRNYNRRLKKVFKSAALDSTRTEPFASYYRNLIETGTSPEIARVNIARKLAALVLSMWKRGEEYDRQRMKKSA

SEQ ID NO: 320966 - protein, 336 aa, unidentified
MTLYCGIDLHSNNHFICVIDDKDKRLLEIKCENELEQTLKALSKYKKRLHAIAIESTFNWYWLVDGLMSAGFNVMLVNTAKVVQYEGLKHSDDRYDAFHLAHLMRLGILPTGYIYPKESRGQRDLMRKRMQLVQDRSSHIIRYKSLLHNLSGKTERADKIKTLKYQVPDLGDEYVQLTLTTHIAMIRSYSRQIRTVEMALQQQMLSDPSFELLKTVPGIGDILAMCIALEVGDIKRFDGPGNFASYCRCVSSHRHSNGKIKGENNRKNGNRFLAWAFVEAANFAVRRSDKASRFFQRKSVARNGVVARKALAHKIARACYWIMRRQQPFDESLLFG

SEQ ID NO: 320967 - protein, 360 aa, unidentified
MRQHSKTTLGVDVGDRRSHFCVLDEAGAVVERGDFRTTPAGLKKMLAARSGATVAFETGSHALWIRHEVEAAGCRALEGNPRQVRLIYGGHTKNDRLDAENLARLARLDEELLKPVRARRDRDQRDLAGIKARDQLVRARASLANFVRGVIKPFGVRLKKCGVGTLPKRAPEQLPPELKATLHPVLETIADLSRRIRAYDRAIEKVSAERYPVTEHLREVRGVGPLTAMAFVLVIGDPARFPKSRTVGSYVGLRPKQDQSGDRDVPLGITKAGSSLLRRLLLQCAHYMLGPFGTDSDLRRYGERIAARGGKVAKRKAVVAVARKLAVLLHRMWVTGEVYDPLRVSRQRGEVAEETVAVPA

SEQ ID NO: 320968 - protein, 420 aa, unidentified
MYNKCIIKKGKFVKRNILVVGIDIGKHIHKAVGVTIESDFTKPYVVSNNRQGFEGLIKKIGDWKRRLNCKDVVVGFESTGHYWKPLGYYLIGKGIEIVEVSTKFTKKSREMMDNNPLKDDVKDSRVIADLVRQGKVLTIILPKGEKLELRELVHTRENFMKERTSIINRLHKIADITFPERGEIIKAIENKTSLYLLRESPFPDDILKKGRKWLSEKMRKISHGRYGERKIWRLYLLANESVGLKEGIAGFRYELFSLLSSIEILDKKIEDVGNRIRKILGGIEESRFIESIKGIGMITTASIISETGGISNYRSSFELEKIAGLNIYEVSSGNHKGQKKITKIGRSLLRQKLYYAALQQTREGMPLYYFYRRLVDRGTIKVKAIIAVARKLLALIFALVRDKREYEWEYAVVRKMAEVI

SEQ ID NO: 320969 - protein, 385 aa, unidentified
MRGQTFIPRNYEVFAGLDVDKRSISVTFTAHQGFLKSLRLPYSVEHLLNHVRKHFSDQQVAFAYEAGPTGYGLYDGLAAHAYPGLVVAPSMIPKAPGQRVKTTRLDSRSLSENWRGGPRKSLHVPSPSYRELRHLTQLRDTFVSEVVAMKLRIKSRLLLEGIPFPSAPAGSQGSLLVKAALRKLPCSGTVRFKLAQVLDSLEFGEKQAVKTTKEIRRFCQHEPELAQGLKYWLTIPGSGWIVASQRLARIGDWRELQKVRQLAGFLGVVPTEHSTGERTARGAITHSGDGRLRSSLSQASWSALRQDGELREFYRSGCRTHPRARAARVAIVAVARKLTTRIAAVLMEHRPDVVRKEVPPPPVTTEETRPQGTTRRRREPGESNS

SEQ ID NO: 320970 - protein, 359 aa, unidentified
MASKVKRNAISFNGKIVNIGVDMHKQSWRVTALVEGEVAFTGTLAKPNYVSFRKLLARFEGNYLRIAYEAGPGGFGLYDRLTVDGIECIVTPPSLIPTESGSRVKTDKKDSLKLAKLLESNMLKKVWVLSPEERAHRQLVRTRRQIVDHRSDVMRQIKSLLFFHSMDIPFSMHQQWTGPFIKWLHELDLDDQCLNQSLKTLLHLFDYLSAEKKRLTHEVIELAREEKYAQRVKLLNSIPGIGTLSSMEILVELQEITRFKTSDELAAYLGLTPSQYSSGEHIRMGHITHAGNDRVRTTLVESSWILIGKDPSMRRKYENIKHRRGGKKAIVAIARVLSACLRRMLLDQVPYEIGFSKAA

SEQ ID NO: 320971 - protein, 472 aa, unidentified
MSHTRPALSLTNEYSDAVVSERLYYKFFAEQKASMFHPADDYFYQVLMEEQVMEQATPFAALIGIDWSDAKHDICLVETATGTQELSVVKHTPECLNEWARSLRARFGGAKVAVCLEQSRGSLIYALLKYDFLVLYPINPQMLSRFREAFTPSRAKDDPTDAGYLVELLIHHRERLKAWTPDDERTRTLHLLVEHRRRLVGDQTRISNRLTALLKGYFPHVLQWFPDIRTKMVCDFLLRWSSLDALKGVRRATLEKFFREHNSQRTETIEKRLTAIKAAVGLTTDRAVINSSVVMAGALAAQMKTALEAVHEFDRQIEELCRAHDDFELFIALPGAGKVYASRLLVALGSNRERWTSADELLCFSGVAPVIERSGKSSWTRWRYFCPKFIRQAFVEYAGESIRHSEWAQAFYVSQKAKGKRHQAAVRALAYKWIRIIWKCWQTREKYDEARYVEVLRKKGSKLVAEVASAAA

SEQ ID NO: 320972 - protein, 342 aa, unidentified
MLHRLNPAATLIQRTTTVAPRGHMYYIGLDVHKKTISYCVKDLSGRIQQEGKVGSTRRELDCWMKTLPQPWAVAMEATIFSGWIYDHLLPHATQIKVAHPLMLRAIAAAKKKNDQIDASKIADCLRCDFLPECHMMPAEIRDRRRTLRYRHLLVRQMVQMKNRVSGLLMETGVEYNKQRLHKVSYFRELLSGNEEVDPSIRPLLKLSRETIERCQRTEYALVNSLQRDPMLADRIKRLRMVPGVGPITALTWALEIGDVSRFRTIKQAISYCGLCGDERNSADKAMRMPLSKQRNKHIQRTLVEAAKLAPRQSHELALIYDREKQKGNRNRATLAVARKMVA

SEQ ID NO: 320973 - protein, 388 aa, unidentified
MVMWPVGVTLFRLSAIEHVGQIGAPARFILLVRTVSWAIAVLCVSPHTREVKMEAMREVLGIDVSKSKLDIELLINGKVKTKVLQNTPAGHKSLLEWIDKSKASRSSLHVCMEATGVYHEALALTLYDAGIKVSIVNPACIKGFGHGENIRNKNDEIDAGLIARYCLAMNPEPWAPPPLEQRQLRGWTLRVQALKDIRQQEENRLEAHTIGGMDDVAMNVKTHITWLDIEIKKLEKEIDDHIDRHPGLKNDAQLIASIPGLGTTTIARVLGHIGDIRRFKNAKAFAAFLGVTPKQRTSGSSVRGRTVMSKTGSSSLRAALFMPSMVARRHNPILRQFADRLLATGMAKKAVIGAVTHKLAHLIYGVIRTGKPFDANFLSNRLAIQDGI

SEQ ID NO: 320974 - protein, 398 aa, unidentified
MFKHSRLWLRRSVNAVFPYNSLNLTVLKGVPMALKIVYKICCGIDVHKTFVVACVASTSDKGITSYESHRFSTYTSGLKTLLQWLIDRNCKDVCMESTGKYWIPVYNILEKGCSIVLAHPKYVKAILGKKTDKKDAKWIADLFKHDLVAGSFMPPSDIRQLRDLMRYRFKLTCFKSSEKNRLQNCLTVSNIQLGNVVSDTFGKSAQAILDKILENPADTSFDLEPLVFKSLKKKLPELRDAINGYITPEQAGKLKVIKTHYEDLESRKAELEELILALAAPYQQELAILQTAPGISSDFTAIGIIFEIGTNMEAFPSAKHLCSWAGLTPTNNESAGKKKSVRVSKAGCYIKPLLVQCANAVIKSTKHPEMRNRYLRLKKRRGHKKAILLENRSSSSRA

SEQ ID NO: 320975 - protein, 329 aa, unidentified
MKKDWYVGIDVSKKWLDVAIFVENCDLMGYFHTQVSNDKTGYKELLRWLKEHDVDASTCMYGMEHTGFYSDGLQHFLDKKGYRYTMLEPAVIKHYPIQPREKNDRLDAAKIADYLFRFKETINLSRVPDKTMEELRNLHRERKFYVEDRVVYLNRRQVVGKEEAKRLDKMIALLDKQVESIEEKIREIIRNDESLMENYLYLTSITGIAFVNAVNAIVITQNFTVFKTARDYASYIGVAPHTKKSGTTVRWKPKPYKHCDLTAKADISQAAKIAVVHDVELKRFFERKLGGKEDADTIRKAMNAVKFKLVLRMFAVVKQKHEYRQFTTK

SEQ ID NO: 320976 - protein, 402 aa, unidentified
MNCVGIDVSKGKSMIAVMRPFGEVVVSPFEVRHTASELSELARLLKNLDGETRVVMESTGNYHAPVAWLLHDAGLYVSVVNAMLVHDYGNNSLRRAKTDKKDAVKLANYGLDHWLTLPRYIPEEDTRLMLKICYRQYQQYSKVQTMLKNNLISLLDTAFPDANRLFTSPPRADGSEKWVDFVATFWHCECVCGRSEKAFTTQYQKWCRKHGYNFSEDKALDIYASACRHFGVIPKTDTAKLLVEQAISQLQTTSSALAALKQEMQSLAASLPEYPVVMEMFGVGPTLGPQLIAEIGDVRRFHSKKALVAFAGIDAPPYQSGQIDVRSRSISKRGSASLRRTLFLVMGVLLQCAPMDEPVYQFMNKKRSEGKPYRVYMMASANKFLRIYYASVKAYLDSLEHD

SEQ ID NO: 320977 - protein, 338 aa, unidentified
MQTYAGIDLHSSNNFIGVINDKDKILYGKRHPNRLDDVLRALDPFKDSLQGVVVESTFNWYWLVDGLQEQGFSVHLANPSAIQQYEGLKFTDDQWDSVWLAHMYRLGILPEGYIYPKEHRAVRDLLRRRLLFVQHSTSHILSLQSMISRNLGFKMSNNEIKKLKPEDIDGLFTCPNLVFMANNSLAAIKFLKKISLDIEKKVKSQVKMRKEFEMLLTIPGIGNILGLTIMLEVGEIARFPKVGDYSSYCRCVESKRISNGKKKGENNKKNGNKYLSWAYVEAAQFARRYCVKAQSFYQSKEAKTKPVVAIKALSNKLSKASYYIMRDQVAFDEDKLFS

SEQ ID NO: 320978 - protein, 500 aa, unidentified
MKTKGSKAKIRTGRKSISVACSEPAQELRILRPDAAGIDCGAQEHYVAVPPDRVSAGQPTVRRFSAFTEGLDAVVDWLKDCRVTTVAMESTGVYWIPLHQKLETAGIEVYLVNARHVRHVPGRKTDVQDSQWLRQLHRFGLLNASFRPEDIICRLRSLHRHRDNLVSSSASEIQHMQKALQQMNLHLHHVVSDITGLTGLRIIDAILAGQRDPEQLVRLRDRRVYKSTPQEMQAALVGDYRGEHLFVLSQSLQAYRFYQARIEECDREMEPLLEKLAQQIEAASANLMLDALQPSGLKGESNRPEQLPEPKPTSGSKSKKKRKPRANEPKIQLAGLLERICGIDLTQVVGLNVLNVLLIVSEIGVDMSKWRSAKAFCSWLGLCPGNKISGGKLLDSRTRQVVNRVADALRLAAQSAGRTQTCLGIFYRRKQAHLGAPKATTATARKLACLIYHLLKNKQPYQEPDSASYQLRLQKSALSKLQSQAIALGYTLLPTAPVPA

SEQ ID NO: 320979 - protein, 413 aa, unidentified
MVLGIDVGSETHFARAFDYRGIEYSKKPFKFSNTEAGFVTLKAWILDIKEMHGKDKVVPGMEPTGHYWFNLGKFLQDNEMKPVLVNPHHVKKSKELDDNHPTKNDRKDPKVIAGLVREGRYMIPYLPDGIYADLRTASNMRFQLQGELTRIQNRISRWFNIYFPEYKTVYGKPDAKSGMLILKRAPLPKDILTLGVDGVNQIWRDAKIRAVGKARAKTLVEAAEHSVGNKEGEVSARMEIRMLLEDYESRNTRLQEVMALIEELVKQIPMAEKLLEIKGVGIRTVSGFLAEVGDISRFDTPKELQKLAGLALVENSSGKHKGETTISRRGRKRLRYLLFEVAMSLVAKNAEFRELHYYYTTRKQNPLKEMQSLMAVAAKLLRVFFAMLTKGVDYDPEKMLSDIKRPAVYLQAA

SEQ ID NO: 320980 - protein, 347 aa, unidentified
MRFYTKQHRYYCGIDLHARSMYVCILDPQGEILLHRNMPCAPELFLKAVAPYREDMAVGVECIFTWYWLADLCAKQNIPFVLGHALYMKAIHSGKAKNDKIDAHKIAVLLRGGMLPMAYVYPPEMRASRDLLRRRMYLMRKRSELLAHVQNTNSQYNLPEIGKKIAYKANRQGVAERFSDPSVQRSIEVDLKLMDHYDQLLTDLELYIVRTAKQHDAHAFYRLRSVPGIGKILALVILYEIHDINRFPTVQDFVSYARLVKCAKESAGKRHGTSGKKIGNVHLKWAFSEASVLFLRANPKGQRFVEKLSSKHGKAKALSILAHKLGRAVYYMLSRKQAFDMNKFFNS

SEQ ID NO: 320981 - protein, 411 aa, unidentified
MDVVYTRCCGLDVHKDSLVACIVTPNDQGQPAKTIRTFGTMTADILAFGDWLAEHGVTHLAMESTGVYWKPVWNLLEGQLELLLVNARHVKAVPGRKTDVADCEWLADLLRHGLLRGSFVPDRPQRELRELTRYRTALVRERAREANRIQKVLEGANIKLGSVATDILGVSGRAILAELVAGTTDTAAMAELARAQLRNKRAELEQALAGRFDAHQRFLVAHQLGHVALLDESIEALSAQIAERLQPVDATIERLDAITGIGRWHAENLLAELGTDMGHFPTAGQCASWAKLCPGNNESAGKRKSGKTGQGNRWLRGTLIEAAKSAGRTKDGYLAAQYRRLRGRHGPNPATVAVAHSILVIVYSMLKHGTRFEDLGSDYFDRLHQDSLRRRLVSRLQQLGYRVSLEIEDAA

SEQ ID NO: 320982 - protein, 370 aa, unidentified
MSVRRILAKTIDTDLEYEAIGIDLAKNCVSAALLTTDGEVVCIDRLDYSELEKSAQALSPTTFAMEPCTEMNYLVQKLEAWGHRCLVIGGKNVQNYVENHYSGQKTDLNDAQALAFLAQDKQLRTIKAKDIEQQKYASLTTLREQYIKQYRQTIVSLKGICQAWGLNISKGISGKAQLKDLIENHAAFPEELRESLVDMVTHAQTTQKVLNKITKTLEVLAKNDKVCQLIQTIPGLGTICSCRLRATIGDIKRFKNPKDFPAYYGLVPRSIATGHNEKKGKITHRGDRTMRSLMVQGAGCVIRLATCGKLKSKQLTKWILKKQKEKMPWGKLVCAVAAKLLRIVRAILISSKPYNPKIAGVAKCSLSKGS

SEQ ID NO: 320983 - protein, 399 aa, unidentified
MRIVGMDIHRSFAQVAILEDGRITDDRRVELVHHRLVAFARTLSIEDEVVIEATGNSAAVERVLRPYVKRVLVANSRMVRAIAYARVKTDKIDATILAKLHASGFLPEVWVADDETQRRRRQISERMAVLDQMVRVKGRVQAILHANLIPKYEGHLFGKTGRKWLDGLPLPEDERAILRRLLPELERITKQLAELDKAMAQQALADPRAVRLMTIPGISSVVASTVLASIGDISRFPSPDKLSSYFGLTPKIRQSGDRPARHGRISKQGNAAARKMLVEAAWSAKTAPGPLRAFFKRIQVKRGAPAAAVATARKLAIIIWHILTGDREYAFARPAFTAMKLRKVALKAGARREYGKAGPGRDYWIKEIRRKEMEYVERAEQAYERMVAAWRQQPSAVDR

SEQ ID NO: 320984 - protein, 367 aa, unidentified
MDEITYVGLDAHAETTAIAVAESGGAAPRFIGTASANFAELAKVLGKLGKPDQLRVVYEAGPCGFTMVRQLRQAGYHCEVVAPSKIPRKPGDRVKTDRRDALSLAGLARAAQLTFVTVPDERDEAMRDLSRARIDAVRARLKARQQLKALLLRHDRRYTGKTSWTAAHERYLAAKVSFAHRAQEIAFVEYRRGIGEAQARVELLTQALSQELEGWRMRPLVQALMTLRGVNELSATSLVAELGEMKRFAHPRELMGYLGLVPTEYSSGQKRALGAITKTGNSHARRLLIEAAWNYRFPARISLPLQKRQEGQPAAIRDIAWRAQLRLTQRYRRLTARGLQHNKVCVAIARELAGFVWSIGQQVAVGS

SEQ ID NO: 320985 - protein, 385 aa, unidentified
MAPPTRPRIVIGLDVGKSAHWACVVTREGELLASGPIPNREDAIDGLYAQYPGALVVVDQVRNIGSLALSRAKLAGMPRAYLPGLAAHGASKLFAGDAKTDERDAMVIAKTALGIPDALLAVADRPPEIEAARSLAAQRDFLTCENTRSKNRLRSILLESCPEFEAQVDLSDPATLKLMAAVGGPWSISEASPQAVGALTRGCRRAKVAALVESVESSSRPHPAAVACEDRAVRLLARRISENAAEIESLTSEISALLAADETYRCLLTVPGIGPRTASELVISIDIADFAGHDRLASYCGLAPRNRRSGTSISSVSASRQGNKRLKNLLIFSCNCLARSRNRWGEYYARCRDRGMPHGKALKAMARKRLKVIYAIMRDKVPYAA

SEQ ID NO: 320986 - protein, 341 aa, unidentified
MMKITTVGIDLAKNIFSVHGIDEHGKAVLKRTVSRGKVMEVMADIGPCLVGVEVCSGAHHWARELGRLGHNVKIMTPRFVAPYRKSGKNDGNDAEAICEAVGRPSMRFVAVKSAEQQALLVVHRVRKGLTDERTALINQLRGLLSEFGIVMPKGRYQARHQLPVVLEDGGNGIPDLARRVLLEVNEGIRDLDARILAYDRRIEALARESEAARRLMAIPEVGPVTATAVVWTVGRATEFKNGRQFVAWLGMVPRQYSSGGKVRLVKITKRGDVYLRTLLIHGSRAVLARLAQKTDRQSAWLRSLIERRGFGRTAVALAAKNARTIWAMLAKAQTYSSALAA

SEQ ID NO: 320987 - protein, 429 aa, unidentified
MTITSSTTRATWVAIDVAKLTHHVLIETVDGKRRSMKVANTMADIERLTASLVSLTPACVIAFEPTGDYHRALMHRLGRAGIALCQVSSIAVARTRDAMYNSWDKNDPKDAQVILHLLKTGTTQRFVDPLVAGHHDLQEMANTYPQVSLRKVRLQHAIVTHHLPRDFPEAERYLQSSRAEWFTAILHLAPCPAAVRQYSKADFIAAARARVTGHKADKTRWLADFYETAGHSIALPVHPESAAITMCRVVLEEYQQLCQRRKALEADIVARLADHPDCIRLQTIPGIGPILGLLILAEAGDLRRFGHVRQFLKYCGFDLCTEQSGQFRGTTHVSKRGHARLRYACWLAGAVAVRMTENSFRQKFDTYMRPDPQNTDRRRKAYTAVAAKMARVVYAVVTSGHDYRRFPEAARPGGRIPSPRAVEASTTTS

SEQ ID NO: 320988 - protein, 406 aa, unidentified
MQVVHERCCGLDVHKRVVVTCVLSGRGRTIRSFGTMTEDLEAMAAWLEECDVTHVAMESTGVFWKPIHNVLEGHAFELLVVNAQHMKAIPGKKTDVKDAEWIADLLRHGLLKPSFVPSRPQRELRELVRYRKSLVRERAAESNRVQKVLEGANVKLASVATRVLGLSGRAMVEALISGVTDPTELADLARGRLKTKHADLQRALRGVVGPHQRMLLAAQLRHIHYLDGEIESLSQEIASREQPDEAALAQLQTIPGVGRRTAEVILAEVGADLSRFPSAGHLASWAGLCPGQNESAGKRRSGRTRKGSAALREALTEAARAAARMRRCYLSAQYRRIAARRGANRAAVAVAHSILVIAYHLLTKGSVYEDLGSNYFDDRDKVATVNRAVARIKRLGYEVTVTPNAA

SEQ ID NO: 320989 - protein, 329 aa, unidentified
MPRVDDSRTPPAQLTLGIDVSKRRLDLAYSDGHAPAPIDYDDQGLRALLQLLRQRPASLVVVESTGGIERPLLDCLLDAGVPVARVEPGRVRHFAKADAQLAKTDAIDARVLALFGQRMAPRLLEKRSKNRDELDALVTCRRQLLLVKTEQANRRRNVKSKPALKAIDAVLATLDKQIDALDRQIEKLIDSDDDFRDIDRILQSVPGVGIGLSAAVLASFSELGTLHKNKAAALLGVAPFNHDSGQHKGTRHVRGGRVDVRNVFYMAAYAATKFNPVIKAFYERLTAKGKPFKLAVTACMRKLVGYLNVMLRQQLTWDQLAVNKTLKKA

SEQ ID NO: 320990 - protein, 346 aa, unidentified
MKIIGCDFHPSFQQIAMLDLATGEWTRKKLPHASGEAEQFYRSLQGEAVRVGIEATGSTRWFERLLEELGQELVMGDAARIRSLVTRKQKTDARDAEHLLQLLEHDQFPAIWVPSAGERDLRELVLHRHKRVEMRTRIKNQLQHVALNEGLQKKRQRWTERGRRWLEDLALPRWTERRREDLLHFLDELDARIAELDQAVGEAARQDARVRLLMTHPGVGPVTALTFVLVVGEVTRFPRSKKLASYLGLIPSEDSSGSRRRLGAISKQGNPLLRTLLVEAGQSAARYDPELRRAYQRLCHKKQPTGIGKVMVARKLAVRLYWMLKTQQPYRPARMQSSPSHSVSAA

SEQ ID NO: 320991 - protein, 457 aa, unidentified
MAADRPHYKDFAIPGSRVPVNTIRKEDGMGNTQAPTEKEEYAALIGMDWASEKHDVWIHDTDTGKDRHQVVAHTPEALAEWLGDLQARYPGRQIAVCLEQSRGSLIYALMGYDFLTLYPMNPVTLARYREAFSPSRAKDDPSDAKLIAEILELHRDKLAVWKPDDEQTRSLGFLNESRRKAVDLRSKLELRLRATLKLYYPQAIEWVGVSLHTELASAWLLKWPTLEAVQKAKPEQIRSFYYKHNCRRPDYVQGCIAAVAAAKPLTRDAAVITVSSLNVQMLSQQIRLLNRSIKEYDQRIARLFKNHPNAFIFDSFPGAGPALAPRLVSAFGTDRDRLPSPKDMQTYSGIAPVIERSGKRTWTHWRWNSPKFLRQTFHEYAGNSIPFCPWAKAYYERQKERGKGHHAAVRALAFKWIRILHRCWREGVPYDEERYMRTLQQRGSELWTVMNRTPKEA

SEQ ID NO: 320992 - protein, 481 aa, unidentified
MRFERPRGDLRLDEEGRGARPVGSRATSACTGVTGHHGRSRPTIAEGRNAVAQDESYGWFVGIDWATQAHQVWVLDGHGHRVVERSVIHAGGAIAEFIDWLVNLAGGQAERVGVAIEVPRGAVVEALVERGCHVYALNPKQLDRFRDRFTVAGAKDDRRDAFVLAASLRTDRPAFRRVRLDDPVIIELREYSRMDDDLRDELARLANRLREQLHRFFPQMLELVPAADEPWLWTLLEAVPTPQTVARLRRQRIEKVLRIHRIRRFDAAAVLATLGTPPLPVAPGTVEAASAHVALLLPRLRLVSDQRVSCGRQIDALLGRLGETSVPPGPSGAPSDVQILRSLVGVGSRVSATMFAEAAQLLTDRDYHALRAHSGIAPVTRQSGKRKQVVMRHACNGRLRGAVYHWAFISMQHDEHSAATYAEYRGRGHTHGRALRGVADRLMRMLIAMLRSRTLYDPQLARRSSRPVASVTLAAHAEATP

SEQ ID NO: 320993 - protein, 403 aa, unidentified
MNMNAVGIDVSKNKSMVAILRPFGEIVSLPFEVKHTSTEIHSLIKYIRSIDGESRIVMEHTGRYYESLIHELARANLFVSAINPKLIKDFDNNSLRKVKSDKADSIKIARYTLDKWTELRQYSLMDEIRNQLKTMNRQFDFYMKHKTAMKNNLIGILDQTYPNVNSYFDSPAREDGSQKWVDFASCYWHVDCVRKMSSSAFVDHYQNWCKRKGYNFSKAKAEEIYEASKELVSVLPKDNLTKLIIKQAVEQLNTASQTVEKLRTMMNDAASRLPEYPVVMAMCGVGKSLGPQLMAELGDIRRFTHKGAITAFAGVDPGINESGSYEQKSVPTSKRGSAILRKTLFQVMDVLVKTKPQDDPVYLFMDKKRSQGKPYYVYMTAGANKFLRIYYGRVKEYLSSLPE

SEQ ID NO: 320994 - protein, 328 aa, unidentified
MTHFSDSSVSELYVGIDVAKQSLDLARSDAKAVERFDNDKTGIAKIVDRMIQAKPVMIVIESTGGLERPLLEALLDAQLPAALVHPGRVRSLARGLGILAKTDRIDARVLVLFGQKAGPRLSQRASKNRTELSDLIACRRQLSVTLVQQTNRRLSTFSSAACKSIDVIIAALEKQIEKLDRQIRNLIDADDDFRDLDRLLRTVPGVGPTLAATLLADVPELGQTQRQQVSAVVGVAPFPDDSGSIHGQRRISGGRSDVRGVLYMATLAAMRFNPVIKAFAQRLKALGKRNKVVIVAAMRKLLCLLNAMVRHRLSWHQLNIVQKLDSAS

SEQ ID NO: 320995 - protein, 353 aa, unidentified
MWIIGCDFHPRYQQIAAMNLDTDELVERRLSHEGKETAAFYEALPRGALIGMEATCTAQWFERLLERCGHTLRVGDAAQIRASVVRKQKTDTRDALHVLDLLLTDRFPSVWIPTPAERDARQLLLHRHTLVRWRTAVQNQLHALARNQGLLPHTSFWTRTGRRQLESLALDPWAHRRRQDLLCQLDHLNSQIDELSEQVRQQARQRTDTAKLMQQPGVGPIVSLAFVLTLGRAKRFPRGKQVASYLGLNPAEHSSGGTQRLGHISKQGNRMMRWLLVEAAYVAVRKDPELKRIYQRLAFRRGRKIAAVAVARKLAVKLYWRLREVQEQGSAPPAPVQGCSGSGLVKAVSSPSV

SEQ ID NO: 320996 - protein, 343 aa, unidentified
MQAVTTIGLDIAKSVFQIHGVDAAGNVIVRRQLKRRYVLPFFQRLPPCLVGIEACASSHHWSRELKALGHTVRLMPPAYVKPYVKRQKNDAADAEAICEAVTRANMRFVETKTPEQQSCLMLHRTRHLFIRQQTAVINAIRAHLAEYGIVAAVGRNGVEELLGVVADPSDKRVPEIARACLAALGAQLRMLKAQILEFDRMITAWHRSNETSKRLDAIPGVGPALATALVASVPDPKAFRSGRNFSAWIGLVPKQHSSGGKDKLGSISKQGDRYLRSLFTAGALAVIRYAKIHGTKHRPWLTALLARRPTKVAAIALANKIARMAWAMMARGDRYKEPVALAA

SEQ ID NO: 320997 - protein, 354 aa, unidentified
MRFYTKQHKYYCGIDLHTKKMYLCILDGAGAIVLHRNIKTDREVFLKTIEPYREDIVVAVECLFTWYWIADLCIEENIPFVLGHALYMKAIHGGKAKNDKIDSHKISVLLRGGMIPMAYVYPARMRATRDLLRRRNHLTRKRAELFAHIQNTRSQYNLSEFLGRVDKPKNREGIVERFEDPSVQKMMETDLAVIEAYDPIIAKMERDIIRMAKQHDPIAYALLQSIPGIGKILGLVILYEIEDINRFPTVQDFASYSRLVKCKKESNNKIYGSGGKKIGNAHLKWAFSEAAAIFIRGNGPERKFYDRLANKHGNGKALSIMAHKLGRAAFFMLCAIFFNRKRILIRCDALLMNW

SEQ ID NO: 320998 - protein, 337 aa, unidentified
MSYQWFIGIDVSKQTLDITVLNNNEKKMYEQIINSDQSIKAFLKKLVNDQKIFLDDCLFCLEHTGIYNSHFLKVMEEKKLSVCLESSVQIKQSGGLLRGKNDKVDSYRIALYAFKNKEFLTLWQPERTVIKHLRRLAGIRERLLNARKQLTNTIKEDKKFIDKGSSAQMIKCCKQSIKALGEDIKKTEEEIKKVIDNDEKLKELFSIIESVPGVGKITATEIVINTNEFRKINDPRKYACYSGVAPFEHSSGTSVRGKTRTSKKANLKAKSLLHMTSLVAVRFSDDLRDYYERKVAEGKNKMNILNAVKNKIIHRIFACVNQKRLYEKNYKFCLAES

SEQ ID NO: 320999 - protein, 330 aa, unidentified
MKFNEFIGIDVSKDTLDIYNLSSGSYNRYSNTVGGFNRLQRWMKRTFGTFEEVLICIEYTGMYSNGIMGYLDEEGINFTMVSGLEVKRSMGIQRGKNDKIDARRLAEYIYLRRDQVKLYKLPSKKLMNLKALLSFRTRLVRQRAGYIASKKEYSRFMPIKDAQCLIKCQEELIDELSLKIKEIDKELKQIIKSDEVIGQQYKLATSVRGVGILIALTMIAYTNCFTSFKNWRKFASYAGTAPFENSSGTSIKGKTKVSHLANKRVKSLLHLAAMSAIRHNAELKSYYERRIAAGKNKMSTLNIIRNKLISRIFATVTRQTPYVDVFKFAA

SEQ ID NO: 321000 - protein, 306 aa, unidentified
MFVGLDVAKSSLQLNLANQLHHFPNNPKGQRQLIKRLQAQPTLVQVICEATGGYEQTVVQALQEAALTVSVVEAGRVRHFAKAKGLRAKTDPIDAAVLTEYGRAFAPAPTPAASSVQRQLGEITARRRQLVDVRIIELNRADHYADAFSRKQSRQLLALLDKQIAQCDRSLNQLIEQDAELRAKAIRLDAIPGVGPTIATVLLAEMPELGQLSKGAAAALAGVAPYNQDSGYQNNPRRIAGGRKAVRCALYMAALSAVRHDRILKAFYLRLRSSGKKPKVALVACMRKLIVLMNRLLKNPHLQLAT

SEQ ID NO: 321001 - protein, 430 aa, unidentified
MKSNTQNAKIEAITEKTLVLGIDVGSETHYARAFDYRGIEYSKKPFKFSNTEAGFVTFKEWILDLKEKHEKDKVVPGMEPTGHYWFNLGKFLQDNEMKPVLVNPHHVKKSKELDDNNPTKNDRKDPKVIAGLVREGRYMIPYLPDGVYADLRTASNIRFQLQAELTRIQNRISRWFNIYFPEYKTVYGRPDAKSGMLILKQAPLPEDILTLGIDGVNQIWRDAKMRAVGKARAKTLIEAAEHSVGSKEGAISARMEIRMLLEDYESRNIRLQEIMTLIEELVNQIPMAEKLLEIKGVGIKTVSGFLAEVGDISRFNNPKELQKLAGLALVENSSGKHKGRTTISRRGRKRLRYLLFEVAMSLVAKNPEFRELHTYYTTRRLNPLKKMQSLMAVAAKLIRVFYVMLTKGVDYDPKKMVGDIKRPAVYLQAA

SEQ ID NO: 321002 - protein, 285 aa, unidentified
MANPNKVYVGIDVSAAHLDMAVLPSGEEGQFTNDPEGIKAVTDRLAGVGSVLVVVEATGGMEVPVVSELAGVGVEAAVVNPRQVRDFARALGKLAKTDALDAQVLARFGEAVKPSVRPLPDATLRELRALTTRRHQLMKMLTAERNRLHPAAQRVQPQIKDHILWLQRQIKDLDKDLRDSIHSSPLWRTQENLLRSTPGVGPVVSSILLAQLPGLGILNRYQIGALVGVAPLNRDSGTFRGKRKVWGGRAPVRAALYMGALVPTRHSPVIKAFYQRLLDAGKPKR

SEQ ID NO: 321003 - protein, 347 aa, unidentified
MTEISRIGMDTSKRIFQLHGVDRAEQPSLRKKLRRREMMLFFERLPPTVVAIEACGSAHFWGRVLGEMGHAVKLIAPQLAKPYVKRGKNDAADAEALCEAMSRPTMRFVPVKTADQQAALMLANQRDRLVRDRTRLTNTIRGTAAEFGLVAPTGPAAVLPLLAEVQADATLPALARELFAEMADELKQLDERLATADARLLAWHRASTMSRRLEKVPGIGHVTASLLVMKTPDPHAFESGRDFAAWLGLTPKDHSTAGKTRLGGITRAGDEALRSLLVVGATSVIRHTKIGQSRHKSAWLDGLLARKCPKVAAIALANKTARIAWKLMTTGEAYKPAHEVPGPMATA

SEQ ID NO: 321004 - protein, 344 aa, unidentified
MKKVLIGIDFSKEKFDVAIIVKSTSTQEHSLFDNKVSGYRKMIKWINSVVEDIPCSSWLFCGETTGGYSRMMSDWLYAQGYDVWIENALVIKRTFPLKRLKNDTVDAFMIAEYALRFEDRVQLYEPMSQALTELREIFLYRHHLVRHRCSFEVRRIEKRFTQQKSANKNVISQSARHIITEINKEIAKCDEKIKEYIESDDQLSSIFAIVTSMPGVGTINAVSLMVYTNNFTKFAYNPRKIACYYGIAPFGRDSGTSVHTDPRVGFIANKMLKSLLTQAALASVRTCPQIAKYYQRLIERGKKPMVALNNVKNKMIAIITAMVRTGCMYQPDNICLATKSVNVK

SEQ ID NO: 321005 - protein, 448 aa, unidentified
MEGLPVIRPGVAGIDLGSERHWVCARTADGAGREIADFGATTPELIRMGKWLKARNVESVAMESTGVYWIAPHEVLEAEGFEILLVDTRQLARVPGRDKKTDPTDCEWIQRLHSCGLLKSSFRPREDVCMLRTLVRDKANLVAESGDWVRRMQKSLDQMNVRVHRAVSDIDGVTGMAILRAIANGERDPRQLAKLRDPRCRKNMEEIAEQLSGHWREDHLFSLRQSLQMYDAIQQRIADYDHEILRKLAEMERDESRGQPTPPVKNPQKAKAIKKRGEEQMRQALYRMSGVDLTSIDAIGVETVQVVLSEYGPDLSRFPTEKEFVSHATLAPRRPMSGGKPVRKKRRNTASTRVAAALRMAALSLRNSTTALGAYYRKIARRIGGDVAVFATARKLATLIYRLLRWGQPYVDEGADAFEKRYLDKRIRFLQAKVKELGYQLVQREVTG

SEQ ID NO: 321006 - protein, 323 aa, unidentified
MFFLGIDIAKRTMAVALLRPDGKWRSKSVANTADGHGALLAWVGHHAPEGPVHVCLEATGTYGTAVAETLHDAGHRVSIVNPAAIEAFSRSRLSRTKTDPTDARLIARFCRAQEPPPWTPLPRELRELQALVRRLDALEGMRQQERNRLEAAPDSAVVCASIQHLLDTLDDEMTALKDQIHDHFDRHPPLRQQRDLLTSIPGIGAATAAVLLAEFGLMRRFAQARQCAAFVGVVPRERRSGTSLHGKPMLSKLGSAAVRKALYYPALTALRCNPIVIALRDRLRGKGKHPMAIVGAAMRKLVHLAYGVLKTDQPFDPNFSQTR

SEQ ID NO: 321007 - protein, 402 aa, unidentified
MNAVGIDVSKSKSVVAIMRPFGEIVSTPFEIKHTASDIHSLIELINSVEGESRIVMEHTGRYYEVLAHQLLEANLFVSAINPKLIKDFDNDSLRKVKSDKADAVKIARYALDKWQNLKQYNVMNELRNQLKTMNRQFGFYMKHKTAMKNNLIGILDQTYPGVNTYFDSPARSDGSQKWVDFASTYWHVDCVRKMSKNAFIDHYKNWCKRKKYNFSKSKAEEIYEKAKELVPVLPKDNITKLIIKQAVDQLNSVSTTIESLRTLMNETASKLPEYPVVMAMKGVGTSLGPQLMAEIGDVSRFTHKGAITAFAGVDPGVNESGSYEQKSVPTSKRGSSVLRKTLFQVMDVLIKTHPQDDPVYQFLDKKRAQGKPYYVYMTAGANKFLRIYYGRVKEYLASLPES

SEQ ID NO: 321008 - protein, 417 aa, unidentified
MAEAFRLFVGIDWATQKHQVCVINHERDLVAEREVEQSGAGLAQFLDWLSGLAHSEPDSVAVAIEIPRGAVVESLCERGFQVYSINPKQLDRFRDRHTVAGAKDDRRDAFVLADSLRTDRHLFKHVRVDDPVIIRIRELSRLHDDLRQDLNRVLNQFREQLQRYYPPLLQLSPSADEPWLWDLFEAAPLPKDGAKLTPHRIERILKQNRIRRYTADQVRDALRTQPLPLARGAPEAAAEHALILLPRLRMIHQQRSVVAHRIQEVLDQMTTPSASESETGKHRDVALLLSLPGVGRVIAATMLAEASQPLAERDYHALRAYGGTAPITKQSGKKRFVVMRQACSGRVRHALYHWARVSSQLDPRSKEQYQRLRKADHSHGRALRGLADRLLAVLVAILNTGVPYDPAVRNPPPPQPA

SEQ ID NO: 321009 - protein, 398 aa, unidentified
MALTIVETRAITGGVDTHADVHVAAALDPIGGLLGVREFPVTPAGYASLLGWLGGFGTVCLVGIEGTGSYGAGLCRHVTAAGVRVVEAGRSDRQDRRRQGKSDPLDAVSAARAAQSGRARGAPKGRDGTAGAIRALMVAKRSAAGERTQTINQARALVLTGPDDLRARFARHTAAALVAGTASLRPRPGDVVGYATRVALRELGRRAEFLDGQPGRPGELIVPLVTAHAPGLLALYGVGLSTAALLLIAAGDHPERLRSEAAWAHLCAAAPIPASSGKTVRHRLNPGGNRQANHALWRIVFTRMGSHPATRAYAGRRTDLAALTARRAAHRPLLPRCWELRDNLTVYDAANVALAEALKATLLTGDRRLARAPGPQCPIEILQPTPWAPTRGVRLRYH

SEQ ID NO: 321010 - protein, 365 aa, unidentified
MMETVYCGVDFHARMQTIAYCDSANGEIQLAQLDHRKDDVRGFYSQFTGQVIVGMESGGYSSWFETMLEELGHTVWIGHATEIRRRANWRQKNDRRDAELVLEIMLRGDFPRIHCHSRESVEVLRMLRYRARLIKMRTMICNNLQAIAMSCGLTERSRMLSRAGQERLKSARMTPVIKQQSEDLLTLLVPINERIGRVDRWLKQQASTDDRVKLLMTHPGVGVLTALGVVHTLEPFNRFSKQRSVVAYVGLEPMERSSAERKRYIGISKAGSRLLRFLLGEAAHIAVRFDPELKQFHERIGKRRGKAKATVAVARKLLIRCWIMLRQNIDYAEFRSRGVEARLARLGHRPTMPEVVIERPASSDR

SEQ ID NO: 321011 - protein, 343 aa, unidentified
MNQITTIAIDVGKHTFQVGGENALGEEQWQERYTTREAFVRYLATLPPSLHVVMEVGLGSQAWARQLQSRGLRVSLLPAAAVAQHRSGPKNDRNDVRAILRAARDISIHSVPIKSAEQLAMQALHRARAGWIRRRTALANQMRGLLTEHGVVFAQGECALRRGLEQTFADASVPIPARLVDLLRLLRAEWEHLAEQLNTMDAELIRLAHADPVARRLDTIRGIGPIGASALACKGLDLARYANGRQFAASFGVVPEQHSSSDRYCLGRMSRRGDRYVRSLLICGAQAVIRALPRRTHDDSQETRRLRRWYARCGAKGAAVRLANHNLREAYALLTRGEDHCMT

SEQ ID NO: 321012 - protein, 382 aa, unidentified
MQASNLDTPTTGHSGTIFVAIELSQKSWLVTLHSPDRDRISRHTLEGGDHAGLLALIEKVRSRAEQQLGGSLRVASCYEAGYDGFWLHRLLLAAGVMNFVFDAASIPVEQRGRRAKTDRIDGELLLRTLMAHLRGEPRVVRIVQVPTVEQEDARRASRERERLIKEQTAHTNRIKALLRLQGMAVGYPRRRDWLNWLAKQRDWQGQPVSPHLLAEVTREHARLMLVREQLAALERAEATQACPVPQAMAERRDQLQRLKALGPSFATTLTCELFYKDFDNRRQVAAYCGLPPSPWRSGGIDREQGISKAGNPRARLKAIELAWLWLRHQPESELSRWFNTRTANAGKRARRIAIVALARKLMVALWRYLTTGLVPAGATMKA

SEQ ID NO: 321013 - protein, 329 aa, unidentified
MKVLQIVGVDLSKDSIDLFHHDSKNHVKIKNSASGFKELVYWLSNLKLDKTCVFLVMEHTGFYSFQLEKFLHQQHIQFTKVSALAIKRSLGLIRGKNDKIDAERIARFGFEKKDKLMAEKPAHPVLQRLQMLHSTRARLTRYRQSLECALKEYRMVLSSSDPIIKIQLTLVKEVAKKIKVLDDQIKQCIAKADQSVNQNFKLLTSIKGIGDVIATATMVKTKNFTAFKNARKFSCFCGSAPFDHSSGKSIRKKTRVSHLADKTMKTLLTMGARTAIQHDKELKAFYERRLAMGKSKNSTINIVRNKLIFRMFAVINRQTPFIQQYEKAI

SEQ ID NO: 321014 - protein, 416 aa, unidentified
MSQKLKEQRLKELAFVGVDTHKDEHTASIANCFGQSLGVFTSENRPKELKGLLEKVDETAKSHNLKPVFGLEDVMGLGQHLARSLISGGYHLKEVNPIETERKRLRKAHPDKSDPLDALAISRVLITDFDKLPTIQSLNEIYLAIHELSNRRDSLVKEKTRIKNKLHILLHREYPYYQTMFKDTFSKAALAFWERFPIASLLKGIGVERLAQYLRANSNNTVSTKKALSILKLVDKNSVPSCLNLVHSSIIRNLVKHLRFIEEQMAIVKKELEPLVDETGMKLSTLTGVDLVTAAKLIAEIGDVNRFSSSDKLAKCAGIAPQQKSSGKKLKFKKSNRGRRQLNTAIYHIALCQIGSDRSSRPRNAKAKEYFLRKISEGKTKKEALTCLQRRLCDIIYAMMKNKTEYRFQRITNLAT

SEQ ID NO: 321015 - protein, 402 aa, unidentified
MTEGTKEMFVGIDTSKNDHQVSFLNQTNVKDDLKIGNDRAGFEELTEKLNSYKDKGYRIKVACEPTGHYWENLGRHLKEKDFTVEIVNPYHTSCYKELLDNSPQKDDKKDSRIISQLLKDERTLNNNLPEKPYAELRELTHLREDLLKDRNRLKNKLHKWLDRHFPEYPKLFSDVLGTTCLGLLKEYGGPEEIKEVDIKELSEKVYSLSRGQLGLDRARKIKKEAAETIGKRIAPTAAKVKLDHLLSRITTLLERINQIEKLIKEQLDELEEAKYLKSIPGVGWWGAAVFLGEVGDPTKMDRAKAVVKLAGLNLYRKQSGQSKSGLSITRRGRSLLRKVAYQLAVASQDENEEFTDYYERKVDRGKEKQNALVALSAKVLRVMYGVVKNGETYRPLEKRNLN

SEQ ID NO: 321016 - protein, 338 aa, unidentified
MKLYGGIDLHSNNAVTTLIDTQDKTQLRKKLPCDLEKILSALAPYKEEIEGLAVESTFNWYWLVDGLMDAGYRVHLVNTAAVKQYEGLKHSDDVTDAFFLAHLLRLGILPTGYIYPKETRPLRDLLRKRSQLVQQRTSQILSIQNLYIRNSGVSINGNAVKRLKLEQLEQRFSDPDLVLAMDSNRLVMLALDEQIKRLEQRVVEQARLEPRYQYLLTINGIGKILALTIMLETGDIARFEHVGNFASYCRCVDSQRLSNGKQKGTGNTKNGNRYLAWAFVEAANFAIRYHEPAKRFYQRKMAKTKRVVAIKALSHKLARASYYVMRDQVPFDPDKIYR

SEQ ID NO: 321017 - protein, 373 aa, unidentified
MVCPVEPQLREASVSIERTFVGLDVHAWSVTGHALDGMTGEFWRRKLTPDPADVFSWLRGLPQPVKVVYEAGPTGYGLARFLHGHGVSCLVAAPSKLHRPHGDRVKTDARDAELLARLLKLDEIVEVTVPSVEQEAARDLVRAREDVRGDLMRARHRLSKLLLRQGIVYTGGKPWTGVHDTWLRSQRFDQSGRQLAFDAAYETMMLTSGRRDRLDVAITEMAEQSEYTEVVRRLGCLRGISTLTGFGLAVEIGDWHRFTGASIGAFVGLVPTEHSSGGSRSQGSITKTGNGHARRLLVEAAWHHAKPYRVPGKTMRDRWEQAPAAARLRGHDGNRRLHQRWQTFNARKKKPVIANVAVARELAGWVVCAASPS

SEQ ID NO: 321018 - protein, 355 aa, unidentified
MTDAKYIGLDVHQATISVAVLDSTGKLVMEAILETKAETILQFIHGLRGSLHVTFEEGTSAAWLHDLLKPHVTQVLVCDPRKNALIKAGNKSDRIDARKLADLLYLNKLNPVYHGETGIRTLKELARSYLALTRDTTRVMNRLKALYRSWAIPCAGQRVYAPRYRSEWLAKITEAGVRCRAEIYYQQLDGLRSLREQVRRDLLAEGRKHRAMKLLGQIPSIGPIRAILLIALMQTPHRFRTKRQLWAYCGLALQTSTSGEYRIVKGQLKRSKRVLAIRGLNANHNHDLKNIFKGAATLAAAVPGPFQEFHSGLVARGMKPTMARLTLARKIAAITLIVWKKGVRFDAEHLKQQAA

SEQ ID NO: 321019 - protein, 533 aa, unidentified
MVTKRNSRKSRTIGPAVLGKPNGVIQSRVQAVGPERFGIVAVDCAKARSKWMLCDFYGKVLLPPTVVEHRRAALEMATLQLREACEEHGLRDHIVAVEMTGTYHRPVQRAFRRAGSETRLVHPFASRHYRLPAHGDIKTDDHDLEGIFRAAVNGFGLLEPAWNETYMHLQLLARHRRDLVQKRAKLQCQIRQYLERCLPGYADLFPGDDLWAHATAMTIARRADSAEAILEVRVPGLIQWLREAKVRTQSRTIERVVAWAANAAEPDPLRLHLAEVWRALHDDWLAKTQQILRVEKKLAEILVKTPYVLTLSHPGIGVVSAAELAGEMGPIEHYAHAKAITGRAGLFPSRYQSDEVDRADGPLARHRNARLRAAWLRVADNLIKCNAHFRGKFQLWKQQGVDARDCRCRVANRAARTIFQMVGGRQLYHHPSRLDRGYVLDKLLSFHREHDTPPHEILRDMRQAVEQIPRCEQATEAVPLQRVYQRARRSRRPGPQALGEILVAVLARLGAGGLQWEAEAPSPDANVFDASPR

SEQ ID NO: 321020 - protein, 483 aa, unidentified
MKPKRVEKNKKASCRPTPNNWHKMNSKQRREITRKIQSEDLSLEVVHPHAAGIDIGNESHYVAVPPTRDSQPVRRFGCTTWELKEMAVWLKECAIRTIALQSTGVYWIAVYDILEDAGFEVYLVNARETKNLPGRKSDVQESQWLMKLHTYGLLRNSFRPSQEIRTMRTYWRQRNDLVRAAGRHIQRMQKALTQMNIQLANVLSDVSGMTGQAIVKAILAGERDPYQLAALRNWRVKASEEEIARSLEGNWQEDLLFVLQQEQDGYEFCQKQIAECDQRLQQYLQQLEDRSHGAGLPEEKRKERLRKKKKGNAPQFDLRAELFRMTGTDLTQIDGIDVTTTMTILSEAGWDMSKWKTEHHFVSWLRLCPDNRISGDKIIGKGRLPTNNRVTNALRMAASTLRLSNTYLGAQFRRLRTKLGAPVAIKAMAAKLARLVYRMLRYGITFIDRGPEFYDAQHRKMQINYLKRKAANLGFQIIEAPAA

SEQ ID NO: 321021 - protein, 340 aa, unidentified
MAQMSVASSAWTFVAIDVAKLVNDVLMEFPDGTRQRWRMTNTQHHYRLLRDRLQALVVPPLIGFEATGNYHRPLAYFLSQAGFELRLISSLAMARTRDALYNSWDKNDPKDAQVLLHLLKGGVTQCYHDPLVQGVNDWQELAQAHFQISLRKTRVQHSILTHYLPLYFPEAERYDTQSRAQWFSRLLHRFPCPAAITRYSKDAFSQEAWSVVGRKVNKRGFLDDVYTTAQHSIGLPVAEDSEAIQTFRLTLQHHQELCAARAALETQADETLTGHPDYHRLRTLPGVGPILALTILAEAGDLRRFPHHRQFLKFCGLDLSTQQSGQFRGQSRLSKHGHGR

SEQ ID NO: 321022 - protein, 441 aa, unidentified
MAMRKRDEEVVFPNAAGIDVGASSHWVAVPRHSASEPVREFGAMTDDLNALADWLLACGVDTVALESTGVYWIPVYEVLESSGLKVWLVDARQMKYVPGRKSDVQDCQWLQKLMSLGLLRAAFRPGNEVCVVRAVVRQREVLLAEQASWVLRMQKALVQMNIQLGEVLTDVMGMTGQAIIRDIVAGQRDPAVLARHRHARVKASEHDIVRALTGNWRDEHVFVLTQALAMYDSLAQRIVECDARIEALLAPLGCHEVTLAGPAKRAGKNTPGFDLRTALARWAGVDLTRINGIAVTSVLTVLSEIGPDLGRFASVKHFCSWLGLCPGTKVSGGKILSARTRRSTNRVRQTLKLAAMSLSRNGSALGAFYRRMCARMDKPRANTAVAHKLARMIYFMLTRGEAYVDQGQQNYEEQQRQRSIAALRRRAAELGFAVTPTAATA

SEQ ID NO: 321023 - protein, 412 aa, unidentified
MGARNECRDASDWNNDIPISFSRSSPCRRNTPSTYFLGLDVGKSEHHACALNRDGNKVFDKPSPQLESDLAGVFHQLQELGSVLVVVDQPNSIGALPITVARDCGCEVGYLPGLAMRKAADLYPGRVKTDKRDAFIIADTARTMPHTLRAVDRNDEVLSALKMLSGFDDDIARDCTRTVSRLRSILTQIYPSLERVFAGSTLTRAPILDLLIHYNGPQGLKRAGYQRMLNWMIKHTRKDPTPLVDEIFAALKAQTVTVLRSDASELVIPQLATNIKALKEQRNTIAEQVEEMLADFPFCEVLMSMPGVGIKTAAQILLVIDDGSDFGSVGHLAAYAGIAPVTRRSGSSIRGGFPARSGNKRLKTLCSIPFSPLSAAINRHGTTTNANVLKVNATTRRSSAWHHADATSSTRC

SEQ ID NO: 321024 - protein, 351 aa, unidentified
MPHRSTARAVTTIGIDMGKNTLHMVGLDSLGAIVLRERVSRGRITSRLANLPPCLIGIEAGMATHYVARELAALGHDVKQVPPAYAKPFRQGHKNDFRDAHAVAEAVQRPTTRFVPAKTNEQLDLQALHRVRSRLVSERTAVINQIRGFLLERGIIVRQGLRFLRHLLPDILAKRTDVLSPRMVRVVSDLVGDWRQLDERIETVTDEIETLAKSDDSCRRVMTVPGIGPLISSAMVAAIGNGTAFAKGRDYSAWLGLVPRQMSTGDRTILGRLSKRGNGYLRMLFMQAARVILLRPANWPKHGFGAWLVRAAQRLHPNVLAAALANKLARIAWTVLAQERSYEARVTRAAA

SEQ ID NO: 321025 - protein, 422 aa, unidentified
MPDPSVTTHVVGIDIGMESCTMSCLTMDKRQVIKSTPFVNAVQGFDWLFERLEGLGVAPQQILVGLEATSRYGENLLQALLKRGYQVCLLHPAQMHAFAQQRGLRAKTDQLDAVTIARALLSGEARFGYVPSEQVATYRELMRLQHQLSDDVVRYKNEIHALLVVLFPEFTQVFVDPTRPTALAVLKRYPSAQVIAQTEVQTLSKFLHELAPRHYGRPTAQALVRLAKASVSSGVAVAARSSSLRILCDQLDHTQKNLEQLQREIDQLLGQDPKATRLLSVPEFGSTTVAVLRAELGDLARFTRIDQVVAYVGLDLQVKQSGKWKGQTKLSKHGSGRVRRILYLAALRSIHLQASPFGAYYQRLVARGMKKGMAVVAVMRKLLIVAVHLIQTEERYDPGKVAMQAGAARLAPCLHGDPTPNG

SEQ ID NO: 321026 - protein, 351 aa, unidentified
MLIIGVDYHPSFQQIAFMDQGTGECDERRLCHGDGEAEKFYRDLKQRGVCVRVAMESTGYARWFERLLAELGFELWIGDAAEIQTKRVRKQKTDRQDAQLLLKLLREDRFPRIWVPSPENRDLRQLLWHRHRLVQMRTRIMNQLQAAALNEGLRRKTGLWSERGRTQLASLRLAPWATRRRQDLLELLDRLDPTIEELTAAVEQEAKKRPEALRLMTHPGVGPLTALAFVLIIGTPDRFCGGKQIGSYVGLIPCEHSSAGRQRLGHISKQGNALLRFLLVEAAQAAVRYDPDWRRRFLHLAMRRERRIAMVAMARRLAVRLYWMWRKGWEYQQSVEFGSHAGELVTGHGVN

SEQ ID NO: 321027 - protein, 314 aa, unidentified
MKTATFVGCDVAKAELCFAVHGTAHVQRIANQKGELNRFLNTLPPTSLLAVEATNTYHQLVVELAHARGIRVYVLNPRDLSHYASSIGARAKTDPTDARLIARYLAKEHPELHAWQPASSAQKALQVLLNRRATVVTTRTSVQQSLRHVDDLKLVLRALEQQFAKAVAAIDKAIVHHLRQEPALAAHAEQLRSIPGVGPVVSAALATLLNRYEFTSADAAVAFVGLDPRPKESGTYRGQRKLSKRGPAELRRLLYVAAMTTARHAVVKSEVARHRAKGLAATAIYNIMARKLVRTAWSIVKHQCPFEMKRFVMA

SEQ ID NO: 321028 - protein, 459 aa, unidentified
MRQAFLGIDVSKGYGDFMLLDDSFELLAKPVQFDDTPKGHQALADWLARCIQTYPLTRIYAGVESTGGFENNWHAMLIELGRSLPIQIARLNPSVVKDAAKATLSTQVTDPISAHNIAHYLIRYGDQVTYGQPETRYRSFRNLDTHLRLLIRQRSQLINQLKQLLYSCFPELQRFCKQGMPNWVLQLLIRYPTPQKLSRAHAHTVAKIPYITLEKAEDLIGKATQSVASQGGYSDGYLITSLAREIRNKQKRITIHKQKLATECEGAETQLLQTISGIASYSASCIMIQIEDIRRFASPAKLAGYFGVFPKVKESGDKPPVVRMSKKGRAAMRATLYMCANNAVLADPHLKSIYHRHRTKGKSHKQALGVIMHKLLRIIWGVLTSGTPYDPQIDKNNQENNASTSGQSRQNQIASKRRHQKFDEDAPISRIATTKRKAYQQSQVSSAEQARDPVGRPDD

SEQ ID NO: 321029 - protein, 344 aa, unidentified
MEHYAGLDVSLELSSVCIVDERGTIISEVKVASEPEALIGFLRTQEVKIGRVGLEAGPLSQWLHAGLADAGFEAVLLETRHVKAALSAMTVKTDRRDARGIAQLLRLGWYRPVHAKSASAQEVRALLTARKLIQAKLLDIESGIRGVLRGFGLKVGPISRGRFEARILELVDGHATLEEVIGAMLSARAALETEFKRLHRALLALVRDDPVCRQLMSVPGVGAIVAITFKSGVDDPSRFRRSRDVGPHFGLTPRKYQSGELDVTGSISKVGDRMVRTALYEAASVMLTHSVRFSALKAWAMAVAKRRGTKKARVALARKLAVILHRMWSDGTSFRWTNEETAIA

SEQ ID NO: 321030 - protein, 351 aa, unidentified
MSHQSMPAAVATFGIDIGKSTFHLVGLDQRGNIVLQLKTSREQLQRRLTNIPRCLIGMEACSGAHHIGRQLVALGHDVRLIPAQYVKPFLKGHKNDYRDAEAIAEAVQRPTMHFVSIKTPEQMDLLALHRVRSRLVSQRTGVINQIRAFLIERGITVRQGPAPLRKAMPEILSSTSGVLSPRMIYLIVDLTEDWRRLDERIATVSAEIEALAEQDGSCRRLMTVPGIGPVISSAVVAAIGNGTGFKQGRDFGAWLGLVPKQESTGDRTILGKISKRGNKYLRTLFVQAAHVVLARRPNAAMRGLWPWIEQAAKRLHRNMLAIALANKLARIAWAVLARGRDYQPTIMPHAA

SEQ ID NO: 321031 - protein, 353 aa, unidentified
MAKVARKVWEGKRKMCVKTGDRVFVGLDVHKASVHAALMINGVIVKTWSMPYNPAVIAASLEPYRAARCGVVYEAGPTGFSLARRLIALGYVVKVAAPSRIPRPSAPQAKSDRLDCRRLADFLAKGQLTFVTIPTETEEADRQVMRSRGQCLGKVKRAKQQIKSFLLQHGIVEPDGLAYWSNASLQALKDLKLNAQLRFCLDRLLRELAFLCAELKAFEEHLGRLARTERLRKAIRILDAHPGVGPLTAMAFAVEVYRPERFTQGKGIAGYTGLAPKVSQSGLTRREGPLMKTGRGELRALLVEASWRWVSKDTHGRQLFAHLVRNTGSKQKAIVGVARHLSIELWKRLVQAA

SEQ ID NO: 321032 - protein, 416 aa, unidentified
MNAVGIDVSSRKSTVAVLRPLGEVVCLPFDVTHDIAGLASLAEKLKALDGETRVVMEHTGRYYEAVAKALHEAGFFVCAVNPLLIKEYGANSLRRVKTDKADAVKIARYALDNWADLRDFTPMDAIRYDLKTLNRQFQLASKQRTASANNLIALLEQSFPGIRKCFDSPVRSDGTQKWVDFAHSFWHVDCVRKQPFPAFCERYRKWCKRHAYFFKLSNAEEVYALAKRAVVLTPKSKVVKVLVQEAANQLSSISRSVEVYRAEMDRLAAMLPEYPVVMAMYGVGKSYGPQLMAEIGDVRRFERKQALVAFAGIDPMPNQSGDKNVRSNKSSKRGSPYLRKTLFNVIRTYLQCAPQDEPVFQFLNRKRAEGKPFYVYMLAAANKFLRRYYAKLRDYFASLDTLQSVDPIPATLKASL

SEQ ID NO: 321033 - protein, 346 aa, unidentified
MRYKGMKNKSFIGIDISKNVIDASIFCEGTPIKDFPHAVFNNSRKGFGEMCTWLKKNHVVLSNCLFGMEFTGSYSMELEKFLYARNYQFCMLSTHVVKHYPMGSKDKSDKIDSAKIADFLYRYNGTECVKPYKMPDKTMQRLKTLMNERKFLVEQRTCFMNRRQLCSTKEDAQLYDGYIRKLGHDIENIELEEQKLLATDDSLLTTYKNLLTIPGIGFVNAINAIVITRNFTAFETARQYASYVGVAPHSHTSGTSVRWRPRPSARCDGQAKADLSMAATVAVQYDAELQSFYNRKLGGKQDSDTKRKALNAVKFKLVLRMFAIGKQNRKWEPLDSKSSNEKLAIS

SEQ ID NO: 321034 - protein, 337 aa, unidentified
MLIIGCDFHPSFQQIAIFDNRTGEWREKRLGHREEAEGFYRSLAGAVRVGMEACGQYPWFEKLLGELGFELWLGDAAAIRAKMVRQQKTDRRDAEHILQLMLEERFPKIWVPSLAERDVRQLLVHRHKRVQARTRSKNQLQALALGQGLRKQRKLWTAAGRAEMEKLEMLPYAAERRRQLLQDVERLDAEIAGLDQRVVEEVRKRPGAVKLQTHPGVGPVTALAIVLTLGPAERFASAKQVGSYFGLIPREHSSGEGRQKLGRISKQGSSFLRFLLVEAGQSAARGDAELGQFYRRLAVRKNRGLAKVAVARKLAVRLYWMLREDWNYAQLCRALCG

SEQ ID NO: 321035 - protein, 341 aa, unidentified
MGIVTVGIDLAKNVFALHGVDQSGKAVFIKPKVVRGQLLEMVAQLPPCLIGMEACSGAHHWAREFSRFGHTVKLMAPKFVAPYRMSGKRGKNDAADAAAICEAVTRPNMRFVPVKDVDQQAILCLHRTRQGFIEERTALYNRLRGLISEFGIVLPQKVERLRREIGAHLEELPGWANRCVGDLLVHADRLNERIEEYDKAIAQAAKQDQRSRRLMQLPGIGPTTASALVASLGGGHDFKNGRQLAAWAGLVPGQYSSGGKARLGRITKAGDAYLRSLLVMGARAVLAGLGNKQDRFSRWARNLVERRGYWKAAVAIAAKNLRLAWAVLHYGDDFRLIEETA

SEQ ID NO: 321036 - protein, 343 aa, unidentified
MDHFAGLDVSVKETSICIVDDTGRIVREVKVASEPEALLQVLGNPIYRFKRIGLEAGPLSQWLFSALAEAGLPVICVETRHMRAVLQAQINKTDRNDARGMAQMMRAGLYRPVHVKTLRSQKLRMLLTHRKLLQSKAIAIDNDLRGTLRNFGLKVGVVGTVKFEARIKELVENLPDLAVLVEPLLMVRRVLREQFSILHRRLLAIVRDDEVCRRLMSTPGVGPVVALTYRATVDVPARFRNSKAVGAVFGLTPSKYQSGEINRTGPISKCGDEMMRVMLYEAAQIMLVRTAKWSWLKAWAMKIARHRGMKKAIVALARRLAVIMHRIWVDGTEFRWTREVTAA

SEQ ID NO: 321037 - protein, 365 aa, unidentified
MKNIAYVGIDYHLKSLTIAVMIESQNQFHDVITMSNEDKLITKYMKKLAKDFEINACYEASFSGYSFKRKMESWGYHCDVIAPSLIPKKKGDHRKNDKRDAMELAKLYAGGLLTIVHAPTEYEESVRNLIRCRLSFKDSEKRAKNQINSLLLAQGISWGNKKWNKKHRSWLANLQLSEKYLQVALEEQLGLLSYLETRINALDDQIEEIAKSDVYACSVIKLRAFRGIGTLTAMLLIAEITDFRRFPDARALMAFLGLIPSEDTSAEKHRGGAITKAGNSRIRKHLVEAAQHCSKVPKLSQQMMENLSQIDAHSANIAINCMKRLHKRYWHLILKGKIRSVALTATAREFVGFIWAMMQPELATV

SEQ ID NO: 321038 - protein, 438 aa, unidentified
MRAKCNDDLSTVNFSTIGLDVHKNRLVACAVHVQHDAKGREVHEKEYFESTGTYSGRQRLTEWCSSQNADLILMESTGIFWKAPFRDLEKADLHPVLINPRIFNRGSDKRKTDKSDATWLANLARLGLYRASFIPEEPYRSLRLVQSQIKSLVAERQRLKNRLVKVLDDSGFRFTVAFADIGGASSQSLIAGILEDAPREELALMIDPLCKKSIEEILDAVSGELSQINKDIVQSILRLIETHTKEIETLEQTVIRELKKCEKVKQNIRLMTTIPGVSEKSAQLLMSMIGPDFVENFSSPHAFARWLGVCPGNNESAGQIKSGRTPHGQRLIKKVLTECAQAACQTKGSHLAVLFGGWKHKGFCKAVMAVAHKLALLIHWVVVNQKPYIDKEFDYTGVFKQDGQRRPRWIRALRRYGLMTLADVEKEKAARGWIIAKA

SEQ ID NO: 321039 - protein, 415 aa, unidentified
MTEQRWYAGVDWASESHHVFLTDGAGRKIGEKIFKHSGDGLAEMAAWLLSASGAASSSQIYVAIETPHGPVVETLIERGFTIHAINPKQMDRFRDRFTLAGAKDDSRDAEVMASALRTDPPCFRPLAALDPTVIELREWSRIASDLGTERNRLTNRLREQLWRYFPAMLELESDLGAPWLLDLWELAPTPGKAARIREATVAKLLKRHRIRRFDAVHVLDVLRKPAVQVAGGTVKAASAHIKTLVARIRLVNGQIKEANRQLDALTAKLIPVEDTEAGQAKQHDVEILASLPGVGRIVLATLLTEAWDALMRRDYAALRSLAGVAPVTKRSCKACIVIRRQACSNRLANAMYHWARIAIQHDPRSKAKYAALRGRGHSHGRALRSVADRLLNVTCAMLKTGAFFNPQPEARIAPC

SEQ ID NO: 321040 - protein, 356 aa, unidentified
MNKSNKLDFTGQQIYVGMDIHKKSWSISILTDNLEHKTFTQPPHIEVLVKYLKRTFPGGTYKSVYEAGYCGFWIHDRFKEHGVQCLVVNPADVPTKDKERRHKTDRVDCRKLARSLRSGEIGSIYVPSRSKVEDRSLLRSRHSMVRKQTRCKNQIKSLLHFYGIQVPEELTKGHWTKRFLSWIESIRLQQASGNVALRVHLEELNHMRKILVDITRSIRSLANTEEYRQNVHLLKTVPGISTLTAMTLLTELYDIRRFKNLDKLCSYIGLIPDTDSSGETERRTGITKRRNAHLRGILIESSWVAVRKDPALLMTFQTLCKRMPKTNAIVRIARKLLNRIKYVLRTQQEYVPAVVR

SEQ ID NO: 321041 - protein, 363 aa, unidentified
MKCSTKLNFKKKATTNTLGNMYAALDLGQKNIQVVLKNKDGKIIKENKIQRNTKKILEFIDNSSDKDHNNIDIVMESGYNYQYLYDLLQDEGYNVKVAHPLMVKAIAYAKVKTDKVDARILADLLRMDMIPECYIPNKEIRDLRDLVRRRYYFVSIRTMFKNKVHVEMSKRWLDANVTNNITTTMIKNDPFSKNGKFRLRSLRIPALDDCLDTIDFLDRKIKDLDTEIKKLAIEDKYSKHLLTIPGISYYAALLISSEIADINRFPDYEHLCSYSRLVPGTYQSGSTSFSKTDKKQGSKMLNWIMVQCTHTHVRYCQSSITVHYNKIKNRKRNNKIAIIAAARKLMRVIYVMLKEDRPFRLDE

SEQ ID NO: 321042 - protein, 310 aa, unidentified
MDANSIFVGIDISKATLDVDIYPTSEPRSFLNDDASREELCQWLKTRSPALIVMEATGGLDIPVAGLLAAAGLPVAVINPRQARDFAKAIGVLAKTDAVDAIVLARFAQAVRPAVRALKSEEAQELEAVLTRRRQIVEMITAERNRQTKAQARIAKQIKGHIAWLEKRLDEANDDLDRLIRKSPIWQHKSELLTSVPGVGRVVATTLLAELPELGSLNRREIGALVGVCPFSHDSGRRRGKRLIWGGRSSVRAALYMATLCATQFNPIIKAFYRRLVDAGKHKKVAIVACMRKLLVTMNVMIRTDTSWRY

SEQ ID NO: 321043 - protein, 370 aa, unidentified
MRVDRKNGKRKGCKMNSIVAGIDLGDRESLATVLSPIGDVADRFSFPMNEEGYAYFASRVPKNARIAFESTIMAYPILRAFRTHGYSDITVAHPKTLAWIVKSKKKNDKADSLKIAKLHMAGMLPESHLLDRDQQIARDLLVQRVKLGVEIGRLKNSLIGYLKREGVYDSLPKTGDNFSVKRRHAILSLRFDDKRDLILGTMMGRLEFLEGQCIPLEDSVRENARVSDDVKLLMSITGVDYYLASLLSSFIGDVERFPSDDHLASFFGIIPTSRDSADVKRRGRMTKDGSSIVRWALSIMVDTVMLHNDPIREYYTGVKKRTGSGKLAHVATMRKLTRMLYHMLKTKQHWKWENPLLTERKMAKLESGWR

SEQ ID NO: 321044 - protein, 384 aa, unidentified
MAQMALQSNDSGLVGVLYMALELSKSTWKVGFEYQGKRRIKNVPGGEVSALRQTLDEARHKLGVPAGALVRCCYEAGRDGFWLHRLLEGWGVQNVVVDPASIEVSRQARRAKTDRVDLQSLLSKLRQYHAGEWGVWKVAKVPSEQDEEGRLLHRELERLKKERTAHVLRIKALLFAQGVRVERVGGKQWAAALMALRRYDGRALPADLMAQVRRESERLAMVQAQITAIEKEQARRVREAAQAGGAMAMVRALRQLKGIGPVAAWVFVMEFFGWRQFKNGKQVGALAGLTGTPYASGQMQREQGISKAGNQRVRALAVEIAWLWLRHQPDSAISRWYAERFAGTSKRHKRVGIVAVARKLLVALWRYLDTGERPVGARLKAARA

SEQ ID NO: 321045 - protein, 403 aa, unidentified
MNAAGIDVSKGKSMVSVMRPLGEVVAKPFTVCHTGSELKELADYLKSLDGETRVIMEHTGRYYEPVAQFLHDAGLYVSAVNPKLIKDYGNNSLRKVKTDKADSKKIAKYGLDNWGELRQYASMDMIRYQLKTLNRQHALYSKMKTAMKNNLIALLDQTYPGVNALFSSPAREDGTQKWVDFAASFWHADCVRGMSQATFTERYRKWCKRNRYNFSSDKAAEIYTGAKDQIAMIPKDDLTKRLIRQAIDSLNTVSKTVEQLKAEMLKLASQLPEFPVVMEMHGVGDSLGPQLMAEIGDVTRFAHRGSITAFAGVDPGANQSSEREAKSVRTSKSGPPELRRTLFLVMDGLLKSMPQDDPVYQFMDKKRAEGKPYLVYMTAGANKFLRIYYGRVKEYLASLENAD

SEQ ID NO: 321046 - protein, 349 aa, unidentified
MEQNEVILGVDTHLDAHVGAVISNTGKLLGTLSASTDMAGYLNLLTWANSFGHLRRAGVEGTGTYGAGLARVLRDHEIEVLEVNRPDRTTRRFRGKSDPTDAENAARAVLAGTATAIPKEQSGAAEAMRAVSVARRSAVKAKTQAINQLRALLVCAPQEIRERLLKTKTAQCIASCARLRSLGATPVLQALTATLRLLAKRWLALSEELKTLDAMLESLTNQHARRLRERFGVGPQTAAVLIAVAGDNPERLKSEAALAALCGTSPLQASSGKTVRHRLNRGGDRSANNALWTIAMVRMRSDPRTRAYVERRTKEGMSTKEIHRCLKRYIVRELYPLILADLADSTRAS

SEQ ID NO: 321047 - protein, 362 aa, unidentified
MRHVGVDLHKQTSQIAVLSEEGELTQHRVANDIQRLEQFFTQLPPATPVAIEASGTWWWLVDLLERLGHHAILSHPKQTKAIAAARLKNDRVDAHRLVLLLRGDLLPSVWIPPAPLREARELLRHRMQLVWLRGEIRNRLVALLDRRNLHPTTAKSWFTKRGQRELQQLPLAETPSRVREDCAALLPLLDAQIRRLDAELVAHWGRDARVQRLTTIPGIGPFIAILLVLELGDIQRFANAKRVGSYIGLTPRIRASADRVRTGHISKEGNRLLRWALVLAATQAVRRPGPLRAWYHAGKKRRGRNVARVALARRLAEIVYHVWKHECDYFTVLRRGDRAGVSSPGDMGLSTAALIGQPPSRG

SEQ ID NO: 321048 - protein, 326 aa, unidentified
MTASHSADNTFIGIDVGKANLDVQWHRGDSAQYANRPDAIAELVQRLQAGSRVTRIVMEPTGGYEKPLVAALRRAQLPVELVHTSRFKGYRMMVGVRAKSDTSDARLLAAYAAAPDDVRGRKADRVELPEDAIREELRELASRRDQLKDMIHAESCRLAITRHATLRQSILAHLDTLSAEDKQMLQMMRALVRQRLDLRRDQQLLRTIKGLGVVSALTLIAAVPELGRIDNKQAAALIGVAPFVHKSGTLTAPARIHGGRAAVRRILYMAAVTASRHNPVLKSFYERLIAKGKPAKLALVALMRRLVVFANAVLRSGQPWKGATIA

SEQ ID NO: 321049 - protein, 391 aa, unidentified
MSQQPCHFDTSRCLTALEQDSTIVGVIEMSQSKWLVAGLVPGVERQPVKKLDAQEKELLNLLHRWRNKAGQAGREIKRIVVAYEAGRDGFWLARWLRARNVEVYVIHPTSIAVSREHRRAKTDRLDAELLMRAFLGWLRGEKRHCSMVVIPTIEEEDARRPNRERQNLVTEQTRIVNQMKAIFTRFGIRTFRPTLRKAEQELKSLRTAEGAPLPENTRAELCRHLARLRVVREQIRAVERERLRKLAVATADNGSHAMVRLLGRVLGIGIETADMLVNEVLSRRWRDRKAIARYAGLTGSPDESGKRRRERGLARAGNARVRCSMIQFAWRFLRFQKNSALTHWFHARTADGRGSTRKTMIVALARKLLIALWRLVTTAEASGGIALRPAS

SEQ ID NO: 321050 - protein, 336 aa, unidentified
MQQQQYVGIDLHRRRSVIVRMNGEGEKLSCVRLPNDPVEISAEMAKAGESPEVVIEACYGWYWLVDMLKDQGASVHLAHPSGLKWEGRRLKNDEIDATDLADRLRMHRLPEAWIAPPEVRELRELVRYRAKLVALRSGLKAQVHAVMAKQGILPQLDDMFGPGGQALLDAMPFDRAYALRVESLREMIDAFDKEVALFEREVHKLLRDDKGYRAVQAIDGVGKTMAAIFVAEIGDVTRFSSPDKLCCWAGLTPRHDESDTKVHRYGITKQGAKLVRWAAIEAVARYHGGAPIKPFYSRVADRRGNKVARVAAARKLLTLVYYGLRDGEVRCLAKAR

SEQ ID NO: 321051 - protein, 343 aa, unidentified
MTRFVGLDVSQKLTAICVVDETGRRLWRGQCATDPGQIERTMRGHAGEGAKIGVETGPMTPWLVHELRGRGLDVVCLDARHASAALKMQMNKTDQNDAEGLAQIMRTGWYRPVHVKSLDAHRARALLGARAQLVGMTTRLSNHIRGVLKTFGLLPGAMRGLPFDRRVEELLAGRDDLAPIVQPMLVAWRQLREQIAAFDKAVRALAKASPTCRLLMSVPGIGVLSVLAYVSTVEDPARFARSRSVGAHMGLTPRQYQSGEIDRSGRISRCGDTLARTLLYEAAVVLLTRVKRASPLKDWAQAIAKRSGIGKARVALARKLSVILHSIWRSGEPFRWSEQPVGA

SEQ ID NO: 321052 - protein, 334 aa, unidentified
MNTPVVGIDVSKRKLDVALLVDGKVKAKVVSNSQEGFNELESWLIKQKVSLTEAHVCLESTGVYSEPVALYCSDKGIKVSLVNPNCIKSFGSSENIRNKNDQVDAGLIARYCAAMAPSSWDAPSREQRQLRAWGNRLGALQDMRQQELNRLEVHETAKQHDVVAHVLAHIKWLDAQIAQIVQDIDDHIDRNPGLKQDAQLIESIPGLGRTTAAKVLAHVGDVRRFANAKALAAYIGVTPRQRQSGTSVRGRTMMSRMGNKHLRAALFLPSLVAKRYNPILKQFGQRLEANGLSKMAVAGAIMRKLVHMIYGVVKSGKPFDPEYLGKGLAIEDGI

SEQ ID NO: 321053 - protein, 429 aa, unidentified
MKIIYPRVCGIDVHKKFIVAVICISESVEPVYLKKRFSTFHNDLIRFRDWLIQNDCQNVCIESTGKYYIPVYNILESHISNIVVANPKWVRAVKGEKDDDKDAKWIADLFKLGIVKSSFIPQKDFRILRELTRYKYKLVNMRSSEKNRYQNALTSGNCKLDMVFTDVFGKSASNIIDLILSDNPYTDEDILSKVHKNCKASPDMILNSINGTDLTPVQKSRIELVNNHIKQLSSNIQRLDKLIDLMIEPYEDYISFLCQIPGVSRNSAITILSEIGVDMNQFTSTRRLTSWAGLTPSSNQSAGKKKSVRISRAGVYLKPCLVEVAHAAVKDTNHPYYANKFNKISKRRGKKRAYIAIARKILVAAYHMLLTGEIWNPADLAEVETPVEQRIKYVKNNLKSDIKQLLDIGLTVEELTLMIQQNANNIATQ

SEQ ID NO: 321054 - protein, 428 aa, unidentified
MRFIGLDVHRDFCEIAISEGGKARSAGRVQSSLEELRVLGQSLLPDDKVILESTGNALEIARVLEPFVSEVVIANPMHVRAISHAKVKNDQFDARTLAELLAADLVPRVWIGDERTRVLRRLTSRRTQLVRQRTRPKNEITAVLVRNLKGRPPMSDLFGKRGRGWLAELELPNDERDTVEACLRQIDFLTTEIAHVDRQLAEQALQSDEIKRLMTIPGIDVTTAATLIAAIGDIHRFPSAKKLVGYLGIDPRVRQSGQSPARQGRISKQGSSSCRHVLGEAAWSAVKTPGPLRAFYQRVRARRGAQVAIVATSRKLACLCWQLLTTEQDYAFKRQTIVDRKLRALELRAGAPTRHGTQHTKGTPTLKQRNLQERQLTQQAELAYQRLIQDWQATATRRNGAGAAPGRASQRPSSGTAARQETAPQPAL

SEQ ID NO: 321055 - protein, 412 aa, unidentified
MKDLLEISCGLDIHKEKIVACILTGPLGKPTHSEIREFTTLIPDMLALRDWIISENCHHIAMESTGIYWIPIYEILEDAFSGDITLLVVNARHMKNVPGKKTDMRDSEWISTLLRAGLLNASFIPEKRIREFRDLNRYRKSIIRDITSQKNRVEKFLQSSGFRLSSFISDIFGASGRNIILHLMEHGQIDKISLDSYLKTKTRKRIDEILMSVNGTLSEHQKSFLKILMCHYDSMKEHLIEIETHLQEDMLPFALQIEQLNTIYGISTTASCAIIAEIGTDMKPFKTAEHICSWAGLCPGNNESAGKRKSTSITKGNPYIKSMLCEIAWVIAGKRNTYLSAWYWRIKQKKGAKKAIVALARKLLVIIYTMLKQGTLFDESCFEARRKSCEQKQLSRYIRELEKRGYHVEAQV

SEQ ID NO: 321056 - protein, 315 aa, unidentified
MDEQRTVFVGIDVSKDRLDVHLRPSGEAFCVPREGKGMDDLVIRLQGLSVALVVLEATGGFEATVAAALAGVGLPLCVVNPRQIRDFARAMGRLAKTDTLDAEVIALFAERVRPQARPLREPERVHLAELVGRRRQIIEMIGMETNRGRQAIDKPLARRLARHVAYLQKELDAIDHDIGDAIKHSPAWREAEALLKSVPCIGDVTARTLLAELPELGTVSRHQVAALVGVAPINRDSGLTRGRRAIAGGRTSVRAVLYMAALTATRSRSPFRAFYDQLTARGRPKKVALVAVMRKLLTILNAILRDHTPWRPLNA

SEQ ID NO: 321057 - protein, 346 aa, unidentified
MSQIIRIGMDTSKYIFQLHGVDASEQVVLRKRLGRKAMLEFFAKLPPTVVVIEACGAAHILARELGKLGHTAKLIAPQLVKPYVTRNKNDGRDAEGLCEAGSRPRMRYVPVQTVEQQAALMLLGVREQLVMRRTQLSNTIRGYAAEFGLTEARGLDKLAAFLATIERDERVPALARELFAMLARQYDQVQVELKAIEAKLVTWHRANALSRRLAEIPGVGPVTAAALVMKAPDPHAFRSGRLFAAWLGLTPKDHSTAGKTRLGKITRAGDERLRQLLVVGATAVVKQASGKHRRGSRWLLDLLARKTPKQAAVALANKMARIAWKLMTTGESYDSARIDAQKAVAA

SEQ ID NO: 321058 - protein, 345 aa, unidentified
MEHYVGLDVSLKMTAICIVDRTGKIEREGVVASDPEAIAAFVRLHAPHVVRIGLETGATSTWLWTELNKMGLPVICIDARHAKAALKMQINKSDRNDAVGIARIMQCGWYKEVRVKGLDSHAIKALLVSRALLVKIKRDLENQIRGLLKNLGLVIGRAKMNVFVVRAAELIEDRPELATAVEPLLKAREAVEKQIAGLDRKVMRLARNDVQVRRFTTAPGIGPITALCYLATIDDPTRFKRSRSVGAYVGLTSRRYASGEVDWTGRISRCGDPMLRSYLYEAAGVLLTRVAKWSVLKAWGMRIAKRSGLRKAKVAVARKLAVILHRMWVDGTEFKWSKEVATQPA

SEQ ID NO: 321059 - protein, 337 aa, unidentified
MEFKRIAVDTSKSVFTLYGVDERDRPILRQDLTRARFETFLGKISPTEVVLEACGSSHHWGRVAQELGHTVRLIPPQYVKPFVKRGKNNRNDAEAISEAACRPTMRFVPVKSAETQAEAMDLSARDLLVRQRTQLVNAVRGHAAEFGIVAAKGIAQVDPLLRKIAETDMPQAAKETLAQLGRVIAQLDAQLAEINQRLAAQHKTNPVSQRLAAIPGVGPLTALTVAMKVDAGQFQSARHFAAWLGLTPKERSTGSHQSLGGISRAGNERLRQLLVVGAMAVIRHAKSGSKTATPWLLQLLGRRPRKVAAVALANKMARTLWAMMANGTAYRRTPQAA

SEQ ID NO: 321060 - protein, 338 aa, unidentified
MEQVTTIGLDIAKRVFQVHGVDGSGAVVVRRQLKRGQVVRFFAGLPDCLIGLEACGTAHHWGRQLQALGHDVRLIPPAYAKAYVRRNKTDPADAEAICEAVSRPAMRFVPIKSEADQAMAAVHRVRERLIAQRTMLINMLRSQMAEFGSVVAKRPQHVKELVAELVEPGSVPEPLRQALLGLVRLLAGLKEQIAGLEKQIVGWHKGNERSRRLAQIDGYGPILSSAMALRVQHPERFACGRDLSAWIGLAPRQNSSGGKIRLGAISKKGDVYLRRLLINGAQAVLNSKRAKEDPWIRQLLEKKPRMVVAVALANKMARIAWAVMVRATDFRRAPAAAA

SEQ ID NO: 321061 - protein, 417 aa, unidentified
METTQTTYKVAAIDVHKSMLAVVIADAAREGEFRFERRKFGATESELRQLATWLAEHGVREAVMESTAQYWKPVWQQLEGQCELYLAQAHSNRAPRGRKRDFADAERLLRRHVAGELILSFVPNPEQRLWRTMTRTKLQLTRDRVRIHNQLESLLEDARIKLSGCVSDLLGLSSRRMLKALAEGETDAARLAAMADPKLQATQERLQDALHAAATLSALHRQILGLFLARLELIENQMEILERSIGEALHGYHDAVLRLAEVPGFGVDSAQQVIAEVGPTAAVFPSAGQLSSWVGTCPGREESAEVSKNNRSPKGNRMMRRVLNQVANAAVKSKGSVFQAVYRRLVTRLGHNKAIWAIAHRLCRLTWKILHQGVRYIEHGNRPNPKAVKTRMNKLIRELRSLGYQVQVAPLPTPTTP

SEQ ID NO: 321062 - protein, 431 aa, unidentified
MKLPKHLEHINRYAAGIDIGSKSHFVAVPEGTDEQPVREFSTFTGDLERLAEWLISCGVTTVAMESTGVYWIPVFEILESHGLEVKLVNARHVKNVPGRKSDVLDCQWLQQLHTYGLLHGAFRPTDEVCTLRAYVRQRSTLVRSSASHIQRMQKALAQMNLQLHNVVTDITGTTGMRIIKAILDGERNPDALAAMRDPRCKNSSAMIARSLKGNYRPEHLFGLQQAVELYEVYQTKIADCDCQILKQLKSFDDSPNNMPPTSVEDALVRMSGVDLTAIDGINTTTALKVLSEIGTDMSRFKSAKHFASWLGLSPGTKVSGGKVLSSATKQVANKAATALRMAAFTLFNSKSALGAYLRRQRARLGAPKAITATAHKLARLVYAMLTRGTVYVDAGQEYYEERHRSRVIQNLKRRAQELGFELVTTKATAVL

SEQ ID NO: 321063 - protein, 375 aa, unidentified
METTRQALMNDTSVVRMLYMALELSGNKWKVAIADGQRAPSQRSIAAGDTSELLQVVEKAKTRCRLPGVVRVLSCYEAGRDGFWLHRWLLEQGIENVVVDSSSIEVNRRARRAKSDRLDAAKLYEMRIRHSVGEKRLWRVVRVPSVQQEDERRVHRELERLKRERNAHINRMRSLPVLHNVRLGKVGGRGWSERLPQLKEQLPAGLWAEIERESVREQLVCQQMHTLEKSRQEQVKHMSAGPLVALLKLRGIGLTSAWLLTRELFGWRGFGNRRQLAGCAGLNPSPYDSGDCQREQGISKAGNRRVRALLVELAWYWLRYQARSALSAWFTRRFAAGGKRMRRIGIVALARRLLIALWRYVEHGVIPEGAQLKSA

SEQ ID NO: 321064 - protein, 388 aa, unidentified
MNRIIKIGMDVHSTNYTLCAMEPTIGAEDRIFGQVQVAPDYKEVICFIESLKMKLGFFDHYSIECGYEAGCLGYTLYHQLMGAGIKCVILAPTTMLTPQGQRIKTDKRDAHLIAQCLCYGGYHPVYIPTGEDDAVKEYLRMRDDHKLALKKLKQQINAFVLRHGNLYAGTKWTIKHVTWLKKLELDPMYRETLDEYMVSYEEQEAKIERYDQRIEEIAAEARYKKNAEKLGCFLGISTHTALSLIVETGDFKRFAKGNTYAAFLGLVPGERSSSKNVNRLGISKAGNTHLRCLLIEAAKGICKGVIGHKSKKLRSRQSAQPADVIAYADKANTRLRSKYYKMIRHGKKKNVAVAAVARELSCFIWGMMTGNISITSGTGTSVPAVSQG

SEQ ID NO: 321065 - protein, 330 aa, unidentified
MTREYIGIDLHKAFFQACALTASGERLWEARFPRTSDGFARFTPRVGRQTTLAVEASGPTWAFVDTLAATGAAVCVVDPRKTKLKAGFAAKTDRLDARRLADAVRRDSVVSIYVPPPAIRELREVCRSRHQLVRLRTRIAQMIRALLLRSGVADAPMRRLYGARGLAWLRQVALPADAEATGRRLTRVLEAVHEEVVLAEAALTARAQADPIAVALDGLVGIGPVIALTLRAEIGEIRRFARGAQMASYAGLVARVDASADHRHYGHITREGSPWLRWAFVEAAMHATKRQDPLGQWARRLTVRKGAAKARVALARRLCDEVVRVWPRSA

SEQ ID NO: 321066 - protein, 319 aa, unidentified
MSDSVFIGIDVSSQTLELASTAQATTTWQVANDMAGIEQLVRQISALAPELVVLEATGGYEFEAACALQAAGLAVAVVNPRAARDFARAMGALAKTDALDARMLAAFARVLHQHPQRERFVKPLADAELQQLQALVLRRRQLVQMLTAERQRLRLAHVAARPSIERVIEFLKRELDDSDAEVAAHVQRHHAQLAQALASVPGIGPASVAVLLAELPELGKLDRRRIAALVGVAPLNRDSGQMRGQRCIWGGRADVRRTLYMATLTAVRHNPALKACYERLLAAGKRKKVALVACMRKLLTMLNAIAKHGSTWNSTMHSA

SEQ ID NO: 321067 - protein, 388 aa, unidentified
MQDVADQSAAPTTIGADLCAIFVSLELSRSTWLVTSLSPGGGEKMSKHSVSAGDMAALLARFSELRRKACARTGKSFPIVVIQEAGLDGFWIHRVLLSEGIESHVVDAASIATSRRRRRAKTDRIDGETLLRALLAHKRGEPRVCSMVRAPTPEDEDRRRICRERKVLIMERVQHVNRIKGLLFSQGASGYEPLRRDRRARLDALQTGDGRRLPQHLKAQVCRELDRLELLLQQIKAVEAERDALLDAEQTKASAPPPMLLGVHGVGPEFASVLWSEGLSRHFDKRRQVAAYAGLAPTPWQSGSVNREQGISQSGNRRLRTMMIQLAWLWLRHQPRSALTLWFKDRMERHGGRRRKTTIVALARKLLVALWKYVSAGVVIEGAMIRPA

SEQ ID NO: 321068 - protein, 345 aa, unidentified
MEQISRIGMDTSKHIFQLHGVNSAEQPVLRKKLRRKEMLAFLEKLAPTVIAIEACGASHHCARLLQSYGHSVKLIAPQLIKPYIKRGKNDAADAAALCEAMSRPTMRFVPVKTAEQQAALMLVGVRDRLIRNRTQLSNAIRGYAGEFGLTAAKGKAHLGPLLDRIQAEARLPVLARELFAAQAEEYAQLQGQIDKLDARLIAWHRADESSRRLTKIPGVGPIGAVLLKMKTPEPELFRSGRQFAAWIGLTPKDHSTAGKVRLGGITRAGDEALRSVLVIGATAVIQHAQRGGRPSPWLTQLLKRKPPKLAAVALANKMARTAWKLMVTGENYAAKAAPAAVANAA

SEQ ID NO: 321069 - protein, 368 aa, unidentified
MKKNSTRPPSRKPSGRPAAIGMDLGDKSSRYCVLDEEGEIVKEDSVGTTKKAMLQVFGSMPRCRIAIEVGTHSPWVSRLLKNLGFEVTVANSRSVPLISASTQKSDRRDAQMLARLVRVDPELLRPIRHRGEQAQTDLMRIKVRAALVEARTSLVNAARGLTKAAGERLPSCDADAMGEKQAEGLPLELQAGLRPLLQQVESLTEKIKGCDAELKQIAEERYQETELLQQIKGVGPLIALTFVLTVEDPERFKKSRDVGCYVGLRPKRSESGEQQPQLGITKEGDIYLRKMLVQGAHYILGYQGPDTDLRRWGLKLAQRGGKNAKKRAIVAVARKLGILLHRLWVSGEVYEPLRNSNARQAAAQRAAA

SEQ ID NO: 321070 - protein, 370 aa, unidentified
MSQSSTLFIGMDVHKDTIAVAYVAQEHGAEVTYLGTLGTRQCDIDQLTRKMQSKAKHLVFVYEAGPCGYWLYRYLTKKGYDCWVVAPSLIPKKAGDRVKTDRRDAVQLARLARSGDLTTVYVPKVEDEAIRDLTRAREDTISDLKAAKFRLKAFLLRQDIRYTGRANWNPAHLRWLSEVVCPTPAQQIVFQEYVRAVTEHTERLGRLEQELQEQVTAWRLSPVVDALQALRGVQFTVAVTMVAEIGDLSRFDTPRALMKFLGLVPSESSSAGQRRQGSITKAGNTHARRALVEGAWAYRYPAKVSRHLQLRLEKQPKRIQDISWKAQVRLCKRYRRLVAKGKHANVVTVAIARELAGFMWAIAREVPVTP

SEQ ID NO: 321071 - protein, 348 aa, unidentified
MRNRPLGAVVYGIDLGKTRFDVVGCDAAGQPIQRVKFSRDTIFTFFAVAPKALIGMEACPGAQWMARKLSELGHTVRIIPAQFVKPFVKSNKNDARDAEAIAEAVIRPTMRFVEIKSCEQIDLQALHRVRDRIVGNRTQLICQMRAFCLEYGIPIRPGTGAFKLDITRIISDETNDFTSAIRVLLKELWDELKIVDIRLASVSRQVELLAAKHDAVRRLMTIPGIGPIGATALIAAVGDGRQFRKARDLAAWLGLVPRQYSTGGKTTLLGISKRGNPYIRRLLIHGARSCMIHLDRSRDRMGVWLNGLDGRMHRNKAIVALANKIARIAWVLLRRPHTLYERIAPARP

SEQ ID NO: 321072 - protein, 346 aa, unidentified
MIIVGCDFHPAWQQVAWVDTETGETVERKLEHSSGEARAFYASMAGPALIGVEATGNCQWFLDLMMELGHQVWVGDAAQIRASYVRKQKTDRRDASHLLKLLLEDRFPRIWVPNRDERDLRQLLLHRHKLVEMRTRVKNELQHLALNQGVQRKRQLWSEAGQELLRSLPLQPWAARRREDLFSLLALLHRHVGLLDRAVEEASQRDKMAQLLRSQPGVGPITSLAFVLTIGEVSRFQNGKQIASYLGLIPREHSSGGKQRLGGISKQGNRMLRMLLVEAAQAAVRYDPEFRKQYLRRCHSKPKAVAKIAAARKLAVRLFWMLRTQTRYPEIVRIESSPRVPLVGAS

SEQ ID NO: 321073 - protein, 343 aa, unidentified
MQAITTIGLDIAKSIFQIHGVDAAGNVIVRRQLKRRYVLPFFEKLPPCLIGIEACASSHHWSRELKAFGHTVRLMPAAYVKPYVKRQKNDAADAEAICEAVTRANMRFVATKTLEQQSCLMLHRTRHLFIRQQTAVINAIRAHLAEFGIVAPVGRNGVEQLLDVVADPDDKRLPDVARACIAALGAQLRMLKARILEFDRLIIAWHRSSEASKRLDEIPGVGPALATALVASVADPKAFRSGRDFSAWIGLVPKQHSSGGKDKLGSISKQGNRYLRSLFTAGALAVIRYAKIHGTKHRPWLTALLARRPTKVAAIALANKIARMAWAMMARGDGYKEPVALAA

SEQ ID NO: 321074 - protein, 348 aa, unidentified
MRFYNRQHRHYCGIDLHVKTMYVCILDAAGQVLVHRNVQSTPEAFLETVAPYRDDLVVAVECMFTWYWVADLCAAEGLRFVLGHALAMKAIHGGKAKNDKIDSHKIASLLRGGLLPQAYVYPAEMRSTRDLLRRRLHLVRKRGQLLAHIQNTRAQYNLPEFKRRLAYPANRDGVSEHFADPSVRKSVDVDLVLIDQYDRLITDLEVTLVRDAKRHDADAFHRLRSVPGIGKILAMTILYEIHDVTRFDRVQEFASYARLVKGQKQSGGKTLGTSGAKMGNVHLKWAFSEAAVLFLCRNAEGKRLLAQIQKKHGKGKALSILAHKIGRAVYYMLVRGTVFSMEKFLHAS

SEQ ID NO: 321075 - protein, 344 aa, unidentified
MGEVITIGLDIAKSVFQVHGVDGLGAVVIRKRVSRARMLEFFAGLPRCLIGIEACPAAHHWARELQAIGHTVRLMPPSYVKAYLKRSKNDANDAAAICEAVTRPSMRFVAVKTKEQQAALMLHRARQLLVRQRTMLSNAIRGHLSELGIVSAKGRNGTDELLEIIGKDADSRIPLAARSVLKVLAAQYRAIGAEIASISKSILVWHRSCEPSRRLEEIPGIGPIVATALVAEISDWKAFRSGRGLAAWIGLVPKQHTTGGKDKLGSITKQGNRYLRWLLVNGAMAVIRYAQKHGTKKHPWLGRLMARRPTKVAAVALANKIARIAWAIMVRGERYREPALLLAA

SEQ ID NO: 321076 - protein, 355 aa, unidentified
MKRGSSAVPKLTTGLDVGDRWTALCTVDEGGAALERGRIATTPAGVERRFRQGPVQRIVLEAGKQSPWMSRLLASWGHEVIVANPRRVRLIAAAANKDDPRDAETLARLGRLDPQLLRPITHRSAEAQQDLAVVRARDALVRSRTLLINHVRGVVKSLGSRVPRCSAHAFARQADRVVPDALRPALAPMIAIIEQLTGEIRRQTRAIEALVQTRYPEALPLQQVKGVGPITALAYVLVLEDPTRFATARSVGPYLGLVPRRRQSSRADPQLRITKTGDGLLRRLLVQSAHYVLGPFGPECDLRGYGERISARGGKNAKKRAVVAVARKLSAVLYHLWVTGEAYEPGHGAAPKVAA

SEQ ID NO: 321077 - protein, 429 aa, unidentified
MQYAQIQVLPPTPPGGVTAGIDWATADHAACVVDEAGKVRSRFSAVHDRDGIRKLVAGLRAAGAAEVAIERGEGILVDALLAAGLTVVVITSRQVKNLRSRYGSAGAKDDRFDAFVLADVLRTDRARLRPLVPDSPATLSLRAAVRARRDLVAHRVAACNQLRAHLNASFPAGTGLFSELDSPISLAFLSRFCTQDAADLLTEDDLAAWLKTLPNRGRTSGPGQLLGRLRAAPAGAAGADGAARGVVTSALVATLTTLTAQVKTLEAEIAAQLAAHPDACVFTSLPRTGTLRAARLLAEIGDCRPRFPDPESLAGLAGVAPVTRQSGKHSAAGFRWAVSKPLRDAVCDFAGDSRHASLWAAALYDGARDRGKDHPHAVRITARAWIYVIWRCWQDGTAYDPAKHRALQRILDQQHPADDGSPAGTENGQ

SEQ ID NO: 321078 - protein, 379 aa, unidentified
MDVFIEKCAGLDVHSKSIVACILKGKAGEEPYAETQTFGTMTKDLYKMLKWLEEHGITHIAMESTGIYWKPVYNILEDFFDITLANAQRIKNVPGRKTDIADSEWIAKLLRHGLIEKSFVPPEDIRNLRDLTRLRKKFISHLVSEKSRIQKVLQCSNIKLATVISDIFGVSGRKLLTKLVDNGYLDSDEIDESLHWRVKNKKDLIQDSLHGTLNQHQIFLIKQSWDHIKFLEKHIQEVEEQMDEILVHYEEEMKLLETIPGVKKNSAASIIAEIGVDMGQFPTAQHLASWAGVAPGNYESAGKRKSTKTTKGNPYIKTTLCEVAWALARKKNCILAAKHWSLSARRGSKKAIIATSHRLLRIIYCILINKEAYQEKLII

SEQ ID NO: 321079 - protein, 343 aa, unidentified
MNEVITIGVDLAKSVFQVHGVDAAGETVICRQLRRRQVLPFFRKLTPCLVGIEACATAHHWAREIGALGHEVRLMPPHYVKPYVKRNKNDAADAQAICEAVTRPTMRFVAVKTAEQQSVLMLHRTRELMVRQRTMLVNAIRAHMAEFGIVARVGLPQVKALLAVIADEKDCRIPPLARTCLEGLAAQLLSLHREITAAEQRIHAWHRANEASRRLESIPGIGPITATALAATIADPSIFKSGRELAAWIGLVPRQNSTGGRKRLARTSKQGDHYLRWLLVAGSMTVIRHAKRRGTANPWLAKLIAGKPTKVAAVALANKLARIAWVLLRDGGTYQMPATAAAA

SEQ ID NO: 321080 - protein, 355 aa, unidentified
MTRTVYCGVDFHARMQTIAYCDSADGEIQLAELDHRKDDVRGFYSQFTGQVIVGLESGGYSSWFEAMLEELGHTVWIGHATEIRRRAKWRQKNDRRDAELVLEIMINGDFPQIHRHSRESVEVLRMLRYRARLIKMRTMISNNLQAIAMSCGLSERSRMLSRARQQQLKSARMTPAIKHQTEDLLTLLVPINERISRVDKWLKEQASIDDRVKLLMTHPGVGVLTALGIVHTLEPFNRFSKQRSVVAYVGLEPMERSSGERKRYIGISKAGSRLLRFLLGEAAQVAVRFDPELKQFHERVGKRRGKSKATVAVARKLLIRCWIMLRENIDYAEFRSRGVEARLARNMPRPSVPVE

SEQ ID NO: 321081 - protein, 343 aa, unidentified
MDYFAGLDVSVKVTSVCIVDDAGKIVREARVASEPEALLQVLTNTIYRLKRVGLEAGPLSQWLYSVLAEAGLPVICVETRHMRAVLKAQINKTDRNDARGMAQMMRVGLYRPVHVKTLRSQKLRVLLTHRKLLQSKAVAIENDLRATLRNFGLKVGVVGAVKFEARIRELVESLPDMAVLVEPLLIVRRVIREQLGILHRRLLAIVRDDDMCRRLMTIPGVGPVVALTYRVTVDVPARFRNSKAVGAVFGLTPSKYQSGQNDRTGAISRCGDEMMRVMLYEAAQSMLVRSTKWSWLKAWAMKIARHRGMKKAIVALARRLAVIMHRMWVDGTEFRWTREVAVA

SEQ ID NO: 321082 - protein, 359 aa, unidentified
MQTQSNKIDFNGQNIYVGFDVHLKSWMVTILTEKLTHKTFSQPPRPEALHHYLVKTFPGGTYYSAYEAGFCGFWIHNRLVELGINSIVVNPADIPTTGKEKVMKTDPRDSIKIARSLRNGDLKGIFVPSSMTLEDRGLVRMRATLVKDLTRYKNRIKSFLHFHGIEYPDVFNKSQGHWSNRFVKWMEDLELKDLTAKATLTTLLEQVSSLRGAVLKITKQLRQLAKTDRYKEQEMLLRSIPGVGLITALTILTEIETINRFANIDQLCGFIGLIPSTNSSGEKVVDGDITPRGHSILRNVIIESAWTAARHDPALNKSYHAYCRRMESNKAIVRIARKVCSRISFVLKNNHPYVCSVVK

SEQ ID NO: 321083 - protein, 424 aa, unidentified
MREEGLSMAEEIEWFVGIDWASQSHQVCLVDARGECLGERAVAHGGLGIEELCDWLIARTGATPEVIGVAIEMTQGPVVEALLERGFCVYGINPKQLDRFRDRFTVAGAKDDRRDAHVLGDSLRTDRHAFRRLSNDEPVIVKLREWSRMADDLQQERARLASRMREQLWRYYPQMLELADDLAADWFLDLWNQAPTPAKAVRLRETTIERFVKAHRLRRWQAPEVLRILKQKPLSVAPGVVEAASDHIRTLTVRIRLVNQQLKAAHRKLDELCAQLIPSEEDEPGQQCEQRDVVILRSMPGLGRIILAVLLAEVWQPLRRRDYHALRSLSGVAPVTRRSGKTCVVVRRYACNKRLANALYHWARVATQHDALSRRRYAALRQRGHSHGRALRTVADRLLSVACTLLEQQTLFDPTYEVREAAGA

SEQ ID NO: 321084 - protein, 340 aa, unidentified
MAVIIGIDPHKLLHAAYAIDEHEQEVGHLEVRADARQCDRLLEWAGEFTGRSWAIESASGLGALLAQQLVNAGEHVVDVPATLSSRVRLLGTGWSNKNDTNDARAVAVAALRAPTLAGVRVEDHTTVLRLLAKSHLDLGRSRSQACSRLHALVRELIPGGIRKEVVVSQAETVLAGIEATTSVQAQRLELAWETLDDIRRFDTKQKRSKQRISDAVTAADTTLLDIYGVGPIIAATLIGYSGDVRRFPTAGHYAAYNGTAPIEVSSAGRTVHRLSRRGSRALNHVIHMAAVTQIRHADTEGRRYYDTKVAAGKTKREALRALKRKLSDRVYRALLVDSKQ

SEQ ID NO: 321085 - protein, 341 aa, unidentified
MREVSTIGLDIAKSVFQVHGVDAMGSVVIRKRVSRAKVLEYFGELPPCLVGIEACPSAHHWGRELQGLGHTVRLIPPTYVKAYLKRGKNDANDAAAICEAVTRPSMRFVPIKTKEQQTALMLHRTRQLLVRQRTMLSNALRGHLAELGIVSAKGRNGTAELLRIISDGRVSPAVCGILKVLARQYGAIGTEIASIDKSIMALHRGSEASRRLAEIPGIGPIGATALVAEIGDWKTFSSGRSVAAWIGLVPKQHTTGGKDRLGSITKQGNRYLRWLLVVGAMAVIRYARKHGTQKRPWLGRLMERRPTKVAAVALANKIARMAWAIMVRGERYKEPKLLLAT

SEQ ID NO: 321086 - protein, 372 aa, unidentified
MSQSSTLYVGMDVHKESIAIAYVAQAHGAEVVSLGTIGTRQCDIDKLIRQLQSKAKHLVFVYEAGPCGYWLYRYLTKKDYICWVVAPSLIPKKAGDRVKTDRRDAMQLARLMRSGDLTPVYVPALDDEAIRDLSRAREDTLRDLKAAKLRLKAFLLRHDIRYTGRANWSPAHLRWLSEVVCPTPAQQIVFQEYVQTVTEQTERLGRLELELHEQVKTWRLAPVVEALQALRGVQFTVAVTTVAELGDLTRFANPRQLMNYLGLTPSEYSSGARRQQGSITKTGNSHARRALVEGAWAYRYPAKISRHLQLRLEKLPTAIQAISWKAQVRLCKRYRQLMAKGKNANQVVGAIARELSAFMWAIAKQVAGAPKA

SEQ ID NO: 321087 - protein, 352 aa, unidentified
MDVSKDSISVGILHPEEESPVVEKIFHDETSIRRLIRQFPSPAGLAVCYEAGPTGYELYRLLASMKVRCDVVAPSLIPKKSGDKVKTDKRDAKRLARLHRAGELTPIRVPALEEEAVRDASRARADMVDDLARARKRLQAFLLRHAEVYRDGTAWTFKHHAWLRARHFEDRALGLTFGRYLAVVEAREAELDAMEAELRPYLEHPLFSDQIARLCAYRGIAALGALTLSSEVCDWRRFPGAGAFMAFCGLTVSEYSSGASVSRGHLTKTGNSHIRVQLVESAWAYQHRAGIGAELRKRQAGLDAATVVRSWTAQQRLCGRFQRLQARKNNKPVVVAAIARELAGFLWAEMVA

SEQ ID NO: 321088 - protein, 426 aa, unidentified
MKEKTDFAATIGLDWADQKHDLWIQPAEGSKAEHLRLDQTPEALHEWVAKLRERFGNRPVAIGIETSRGPVISAFLAYDFIVLFPVNPKALKDYRAAFSVSGAKNDRTDSMLLEEFIRLHRHQLIAIKPDTELTRKLAGLVQNRRRLVDERTRIVNQLHSTLKTYYPLSETLLGGQLNSPMAAEFLARWPDLETLQKAQVKTLRSFFYQHNSRSAQLVEERLQAVAKAKALTLDEAIIAPARLLVSAWAAMLKPLHKAVARLDKEIEQAMDQHPDAAIFRSLPGAGPALAPRLLVAFGTHRDRFDSAAEVAQFYGLAPVVKQSGNSKTTHMRQRCPKFGRQTFHENAGCALKKEPWARCYYDQHKQRHDKKHHQACRALAYRLIRIYFACWKHRKPYDPDRYILALQKQHSPLHKKLESQISTACE

SEQ ID NO: 321089 - protein, 392 aa, unidentified
MVVSVGIDVSKDKHDCFIVNSEGEVLADVFIIPNNMDGFHYLLQRIQDCTNTQDKIKVGLEATGHYSYNILGFLLNEGLDTYVINPLHTNLYRKSLSLRKTKTDRVDARTIAAMLMSDVDLKSYSNTAYHNEELKSLTRYRFDKVKERAKLKSSVARLVNILFPELEKLVSSLHIAVVYALLSNYPGASYIANANTEELAETLCTASKGRYTKSKTAEIQVAAGVSIGSKMPAKSMELKHTIALIRELDKEISEVESTIDKITSQMDSPIFTIPGIGRHMGAMILAEVGDFSNFASADKLLAYAGLSPSTYQSGQLQNCYAHMEKRGSRYLRYALFNAAKYVCLWCPTFSAYLEKKRSEGKHYNVAISHAAKKLVRLIFAMQRSGKAFLADY

SEQ ID NO: 321090 - protein, 385 aa, unidentified
MTIQPVAYKFIPRDYDVFAGLDVDKKSMSVVFADHQGAMRALRMAYRAEPLVNYVRKHFAGQRVAFAYEAGPTGFGLHDELVRQAYTCIVAAPSKVPRAPGERVKTNRLDSRKLAESLRGGQLQGIHVPPVVYRDLRHLVQLRDTHVRQLTASKLRIKSLLLYEGVPFPDPREKWTVRAMRELQRLPCSETVRFKLDDLLDTLHFHFQAAARATKQIRQHCLRDPELQQSIKLLLSLPGIGWIVASHLAARLGDPQQIKNGKQIAGFLGMVSSEHSTGEKENRGEITRSGDSRLRNKLIQSAWTAIKKDPELRDFYRRIYQRHPKKVAARKAIVAVARKLTTRVYVVLKEQRPYVMRPDSSIAPLTAEETVGPRDRLDSAQNDQS

SEQ ID NO: 321091 - protein, 372 aa, unidentified
MQEDSEVYVGLDTSKLKISVALAAAGRDGEVRFFGDIGSTPEAVERLVRKLEKRHGKLSFAYEAGPTGYGLQRQIVALGHACAVVAPSLIPKRPGERVKTNRRDALALAKLHRAGELTPVWVPDPEHEAIRELVRAREAAMEDLRAKRQHLQSFLLRHGRVYSGRSAWSRAHARWLCELQFEHPAQYLVLAEYRQAIADAEKRLQRLSEQVAELVPSWSMAPVIAAYQAMRGVAFLTAVTFVAEIGDVRRFETPRQLMAYLGLVPSESSTGEQVRRGGITKAGNSRARRVLIEGAWTYRFPARMSRLLEERQAGLPEAVSDIAWKAQLRLCGRYRKLMARGKQKAVVTTAIAREMAAFLWAIGREVEPLRAS

SEQ ID NO: 321092 - protein, 402 aa, unidentified
MDISKRDAKVCLRLPGQRAGTYTSTVTTWGATTGQILALRDFLEGEHVTTVVMEATSDYWKPFFYLLEETLPVMLVNAKAARNIPGRKTDVSDAAWLAQLGAHGLLRASFVPPESIRELRDLTRARAIAIRDRTREIQRLEKFLEGSGIKLSSVVSDLAGVSSRAMLEALVSGERDPEVLTGLAKGTLRSRVPELVEALTGRFKAHHAFMVRLHLDQIDAQSRIIDALTGRSEEAMEPFRAAREFLATIPGVSLKVADVIIAATGADMSRFETRGRLASWTGVCPGANESAGRIKSAHILPGNRYLKGALGIAALSASRSKNTYLAAKYWRIAARRGPMKATVALEHSILTAVWHMLADGECYADPGADHFNRLYPIKAKNTAIIKLNNLGFNVTVTPATAA

SEQ ID NO: 321093 - protein, 320 aa, unidentified
MSETSTKACVCAGIDVGKASLAYALAGGGGSLRCANTPEGRARMIAFLASREVRRVGMESTGAYHFEAAEELRAAGFEVVVLQPMQVNAYAKFKLKRAKSDPIDAQLIAQCTAAVDAPRAAPDPRLAGLAEHLTMIEQIEDEIARAKVRRERYRDPRLKGLIEDDIKQKTALRRRELRLLVEAVRAHKDLARKLDLLQSIQGVGERTALALVVRMPELGALSREEAASLLGVAPFDHDSGRYKGQRRIGGGRARPRTSLFAAAQAAARRWNPALVALYDRLVAAGKSHTVAIVACVRKLIIYANTVLAQDRPWKIIQAHI

SEQ ID NO: 321094 - protein, 362 aa, unidentified
MSVRERTHVGLDVHAHAVVGAALDGDTGEVVRRRLGSSPAEVLAWIRSLPGPVAAAYEAGPTGFTLARALRAAGVRCEVLAPSKLQRPVGERVKTDARDALHIAKLLKLDEIVAVTIPSESQEAARDLVRAREDARRDLMSARHRLGKLLLRRGLTYPGKTTWTSAHHDWLRQRRFELPGLQAAFDAAHEAVVAVQDRRDRLDAAILAMATESEFTGVAQRLSCLRGISTLTGFGLAVEIGDWSRLDGRRIGSYLGLVPTEHSSGQSRSQGGLTRTGNAHARRLLVEAAWHHRTRYTPTSPTLRARWALASPAARERAHQGNLRLHRRWRAFEARGKRRVVANAAVARELAGWCWSLAVMES

SEQ ID NO: 321095 - protein, 439 aa, unidentified
MILIGEVADAPVIMGISKPAGLKSPCGEVKIMNPLFVGIDVSSRNNVAYLMKPDGSKHSSFSVQNNLGGAKLLSERIVSALGSMQLSDVVIGLEATSIYGDSLVYALREDGRLGQFQRKIHVLNPKQVRKFKEAYPDLPKNDWVDAFVIADHLRFGRIAREVYMDDYRYKALQTLTRARFEVIQNLTREKQRFANYLFLKCSGMAQDKDIANSSSTTIALMERFETVDDLANSDLEELTAFVTETGRGRFADPAATAKAVRAAAKGSYRLPKTVNDTVNQAMSVSIASMRALKEQVKVLDKAIEQQFEIIPNTLTSIPGIGKVYSAGIIAEIGDIHRFDSQASVAKFAGLVWHKNQSGEFEAEHSRMIKSGNRYLRYYLLEAANSVRRCDSEFRRYYDLKFKEVNKYQHKRALALTARKLVRLVFRLLKDNRLYIPPEG

SEQ ID NO: 321096 - protein, 374 aa, unidentified
MGRSIGVDLHRDCFTTAILAENGRCYTREWKLKELGKFAGTLLADDKIAVEMTTNVRLFRDAVWPHVERVDVVNTRQFKVVTESVKKTDKNDAILLARFLAKDMLPTVHLKSKAMAELASLTRTRDTLVKQRTTLKNQVNNLFAASGVKLRRERLSSNKALLEVEREASELMPVAEALEIEVLLGQIRAINIGVAKLEARIEADAKKQPGYTELTSIKGIGVNSAAILLSVIGDVKRFENAGKLAAYVGIVPRVSDSNESEWRGRITKRGSKLARTALVQCALVAKRYSPYLASYHERLKRKKGGGKANIALARKLLEIVYRTLRNGWVFADFTTFQLKDGTIPVWSRDGARKYAASRRDLSLSAKTGKRKRAT

SEQ ID NO: 321097 - protein, 437 aa, unidentified
MEKRPSRILRFVGIDWADQRHCWKLLVTGTQASESGELKQTPEELSQWATTLHHRFGGRPIAVALEQSSGALVYQLSQYPHLWLYPVHPATAARYRQAFYPSGSKSDPADTGLLLELVVHHRDRLRRLAPDTPETRLLRMLVEQRRQVVDEKTRWNNRLKAALKMYFPQVLDWVDIDTIMGCDLLERWPTLQQLQHAHPGTLRKFFREHNSRSESLITERIAAIYQATPAVKDPALLEGESAIAATCVAQIRTLLASIAKLDHQIQPLASQHPEASLFAELPGAGAALQPRLIAAFGTQRDGYANAAELQAYSGIAPITASSGHSRWVHVRWACPTFLRQTFHEFAGCSISRSEWARVFYDTKIAAGKSHHATVRALAYKWIRVLFRCWKDGRPYDERTYLQTLAERNSPLNWGPGASIKPVWKTVGGFKKLSTENS

SEQ ID NO: 321098 - protein, 373 aa, unidentified
MNASITYVGMDTHKKEHTVAVNYPGHEEIARFTIRNTPAEIRKLVKRVGKQAPGEVRFCYEAGVCGFTLKRRIETLGCSCSVIAPSLVPTKPGERVKTDRRDALKLLGLFKAGLLTEVYAPNGEQEAARDLVRCRDAARINLKRIQHQVVKFLTRHGYVFTDGDHWTQKHFRWMRTLQFDVPRLRDVFEHYFTELQHSMQRLASLDKEVEALAQESPYREIVGILRCFHGIDTLTAIAYVTELFEFGRFAGPRGLMSYLGLTPSEWSSGKTERRGSITKAGNKRVRRLLVQTAWNYRHPYKVSRALRQRRAGQPQWAIDIADRAGRRLRRRYWYLINHGKMSCKANVAIARELIGFLWSVFREYELRTGQTGF

SEQ ID NO: 321099 - protein, 343 aa, unidentified
METKRFIGIDLHRDCFTACVRLENGREYLKKWKLEDMPKFAGKLRPADQVAVEMTGNTRLFHDQVAPLVDRIVAVNPTQFQVITHSVKKTDPNDARLLALYLAKDLLPEVRMKDKTQAQIASLTQTRDTMVKLRTALKNKVNNICSANGVNLNRESLASEKGLRAVGQMPFDPLVNLEMKIIVDQIRSLNQSIAELEEIIGQEGQKLDGHKNLTSIKGIGKLSGGILLSIIGDIGDFADEGKLASYFGIVPRVSNSNETEHSGRITKRGTKLGRTTLIQCALIAQRYRPYLKTYYEKIKSRRGAGKAIVALARKFLGIIYRTLKNNWVFEDFPNFVLAGEATA

SEQ ID NO: 321100 - protein, 388 aa, unidentified
MQTAADHPEAPTAIRHDLGAIFISLELSRSTWLITSLSPGGGEKMSKHSVRGGNVAGLLERFAQLQEKARARTGRTFPIIVIQEAGLDGFWIHRVLQNEGIESHVVDPASVATSRRRRRAKTDRIDGEALLRTLLAYKRGEPRVCAMVKAPTPEEEDRRRLCRERKVLTNERVQHVNRIKGLLFGQGVSGYEPLRRNRRQQLNELRTGDGRPLPKHLKTQISRELDRLELLLEQIKAVETERDALLAAQKVALPGPAAMLLDFNGIGPEFTAVLWSEGLFRHFDNRRQVASYAGLAPTPWQSGSVDHEQGVSKAGNPRLRTTLIQLAWLWLRHQPQSALALWFKERVARNGGRHKKTTVVALARKLLVALWKYITAGVVIEGAVMKTA

SEQ ID NO: 321101 - protein, 344 aa, unidentified
MDHFAGLDVSVKETSICIVDDTGKIVREVKVASEPEALLAVLKNPAYHFKRIGLEAGPLSQWLFSVLAEAELPVVCVETRHMQAVLKAQINKTDRNDARGIAQMMRVGLYRPVHVKTLRSQKLRMLLTHRKLLQSKAIAIENDLRGTLRNFGLKVGMVGKVKFEARIKELVENQPDLAELVEPLLIVLRALREQIVVLHRRLLAIVRDDEVCRRLMTTPGVGPVVALTYRATVDVPARFRKSKAVGAVFGLTCSKYQSGEIDRSGRISRCGDEMMRVMLYEAAQSMLRTKKWSWLKAWAMQIARRRGIKKAIVALARRLAVIMHRIWVDGTEFRWTREQAAAAA

SEQ ID NO: 321102 - protein, 311 aa, unidentified
MTEHTIGVDISKSHLDVFDAERREAKRFENSISGFRAFGKWLGKLEITRVVYEPTGPYHLNFEERFCDKLPLVKVNPLQARRFAEACGTRAKTDALDARGLARMGVALELEPDIPVAKTTRILKDLQVARVALIKERTRLNNRAHVQTNAVLKRQTKARLALVEKQLCELDREIDALIQADRTTARRRVIVQSIPGLGSVASAAILTYLPEIGTLDRRQVGSLAGVVPYNRDSGQWKGKSFISGGRKPLRDALYMPALVAMRYNPDLKAKYEALRAAGKPAKVAIIAIMRKLIETANALVKADRVWVPKTS

SEQ ID NO: 321103 - protein, 409 aa, unidentified
MDILHPCCAGLDVHKQKVVVCVRKLQGGSVRQEVRTFRTETNALLEMADWLTDEGVTHAAMESTGVYWKPIWNLLEGLFDLLLANAEHIKNVPGRKTDVKDSEWIAQLLQHGLLKPSFVPEKPIRQLRDLTRQRVQLIRQKVQVANRIQKTLEDANIKLGSVASDVLGASGRDMLKAIIKGENDPITLANLARQKLRAKIPQLQEALNGEIEDHHRFLLGTLMEQVEFLEGQIDKMSKRIEEVMPAPFAEAIERLDTIPGIDRRAAENIIVEVGADMERFASAAHLASWVGICPGNNESAGKRKSGKTTKGNKWLRVVLVQCGWAASRSKGTHLRQLYGRLVGRRGKKRALVAVAHRLLVIIYNVLKKGQEYVEPAPAIPKPQDKERLKQRLLRRLEKLGVKIVEEAVA

SEQ ID NO: 321104 - protein, 356 aa, unidentified
MRYIGVDLHKNRFTVYNATTGRYRDYGTNKVGIASFIEECKRTEGTGAIVVGVESTGNTRYFKRQLEEEGIQVKVINTMKFKVITESVKKTDKHDAQTIAEFLEKDMLPEAWICSDYSEMLRRLLHIRRQLVKAIVTTKNQVHSILTAYGYEDARATLQSKRGRQAVLDTLGSTEIGLVVHLLIEMIDSLDEKVKQIEGKIEELVKGDKAIELLQTMPGCGRITAWMIRAYTDDIRRFRSAKHYAAFVGVVPYVHNSNENIRHGKITKHGPELLRTAFVQLVMGMRRIKQVQDYRLMKRYKALQRTKGSGKAIVATARKLTHIVWHILTYNEPFDASLQMVSGYENNRSMQEKQLA

SEQ ID NO: 321105 - protein, 423 aa, unidentified
MEVMHERVAGLDVHKAIIVACVRIMSEGKIKRECRTFETSTASLEALLDWLTASGCTHVAMEATGVYWKPAWNILSDGAFELIVANAAHIKNVPGRKTDVNDATWIADLAACGLIKASFVPDEAIQQLRSLLRARKQLSREQINHIQRIQKTLEEANIKLDSVISDIMGVSGRRMIEAMIAGVRNPHKLAALADRRIKASPKVLYDALHGRLTDHHRFMLGLYLGQHDALGNAITKIDEAVDAAIVQMDEEVQAGQATFLSLISLLCSVPGINVLGATIILAEIGRDMSRFPTAGHLLAWAGMCPGQNESAGKRKSSRLRKGAPWLKTILVQCAWAATRKKGSYYGAQFKRLRAKRGPKKAICAVAASRLTAIYHMLKDGTQHQDLGADHFDRRSNEVKARHHVAQLARLGFSVELQPVADAA

SEQ ID NO: 321106 - protein, 344 aa, unidentified
MDHFAGLDVSVKTTSVCIVDDTGKVIREVKVTSEPEVLLATLTNPAYRFKRIGLEAGPLSQWLFSALAEAGLPVICVETRHMQAVLKAQINKTDRNDARGMAQMMRVGLYRPVHVKTLRSQKLRMLLTHRQLLLSKAIALENDLRGTLRNFGLKVGVVGKVNFEARIRELVESLPDLAVLVEPMLIVRRVLREQIVILHRRLLAIVRDDEVCRRLMTTPGVGPVVSLTYRATVDIPARFRKSKSVGAVFGLTCAKYQSGEVDWDGRISRCGDEMMRTMLYEAAQAMTRSKKWSWLKAWAMQIARRRGMKKAIVALARRLAVIMHRIWVDGTEFRWTREQAAVAE

SEQ ID NO: 321107 - protein, 439 aa, unidentified
MIETISPGVAAIDLGAEKLFVGLAEQPVRSFGSCTRDLHALRDWLRENKIKRVAMEATGVLWIIPHDYLQAEGFEVTLFHGAHARNLPGRKTDVQDCQWHAMLHGHGLLQPCFVPPEPIRELRTYVRQREDHLSMAAQHIQHMQRALDSMNVRLGNVLSQLHGVSGMRVIDAILAGERDARVLAALCEAQVRKAKEAELIASLEGTWAKHHLFALEQAVEAYRFYLQLVEKCDQKIEHQLGVINQGVETVPRPKGRKVKVTRHNRPQIADLYGQLLTACGGRDAQMLPALGPLSWLKLVGEVGTDLGHWKEQDHFTSWAGLAPTHHRSGKSRRRVPRRKTKVAQIFREAAMSLAKSKDCVLGQFYRTVRGRRGAAVAMVATARKLAVLYWQVMTHGIEYVEKGLEQHQKQMAERKERHLRRQAAKLGFSLNPLKPSASV

SEQ ID NO: 321108 - protein, 368 aa, unidentified
MNKSSNSKRTSKKAAVKEAFAFYIGVDLGDKNSDVCVRGQAGEVVKEFRLGMKGADIRKYFASIERSRVAVEAGGQSRWVAEAITECGHEVYVSNTRKVPYIHDSDDKHDRGDAAKLSELVHFKPQLLHPIQHRSGETQADLAWIRTREVLVESRTRLVNAVRGMSKAFGERLAKCSVEAFTGKRAEEIPASIRGAVAPLLETIDHLNEQIHYYDQMEEQIAREQYPKHWLLKQVDGVGVHTALTFMLTIEDPERFEKSRSVGSFLGMRPRKKDSGSSQPQLGITKAGDEFLRTTLVNCAHHILGPHGKDSDLKRAGQRICERGGKNAKKRAVIAVARKLAVLLHRLWVSGEVYEPLRNSQKKVAEAA

SEQ ID NO: 321109 - protein, 356 aa, unidentified
MSRGIQYIGMDVHKEAIVIAVLNDGGKLVMESIIETKASSILQFIHGLRGELHVTWEEGTWAAWLYDLLKPHVHQMLVCDPRRNALLKAGNKSDKVDAHKLANLLRTGMLRPVYHGEHGLRTLRELARSYQTISKDLARVMNRVKALYRGWSIPCAGTQVYAPRYRQEWLGKIEHAGVRRRAELLYQQLDGLHALRRTLRPELLAESRKHKAAKLLRQIPCIGPIRAARLLALMQTPHRFRSKRQLWTYSGLGIETHDSAQYCYVNGQLQRSKKPQQIRGLNRNHNHEMKEIFKGAATRASCGVGPLHDFYVALLDKGMKPEMARLTLARKIAAIALALWKKEERFDAEQLKTQAA

SEQ ID NO: 321110 - protein, 409 aa, unidentified
MNTGTITAVGIDVSKHKSTVAARRPGGEVVLLPFDVEHTAEGLKKLITKLRELDGEIRIVMEHTGMYWRPIAMTLKEAGFYVSVVNAILIHNFSDSSIRKVKTDRADAMKIANYGLTFWSDLQEYAGEDENRQLLKIQSRLYERTATTAGMLRNGLISLLDQTFPGANKLFRDESRNSKGRVKWIDFVLRFWHKECVAALSLATFTDTFQKWCKRTGYKFSASDAERIHAIARNAVATLPKNDGTKLLITQATNSLNAIYDSLQAIRTEMDRLASMLPEYELVMGMEGIGKVTGPQLMAEVGDVRRFSHKGALVAYAGVDASPYQSGSFDSKSRHVSKRGSPHLRRVLFVIMSMTLIRANTANPVFCFMDKKRAEGKHFYVYTVAGSAKFLRIYYAKVKEYLNALEDTA

SEQ ID NO: 321111 - protein, 413 aa, unidentified
MDVVHPRCAGIDISKKDAKVCVRVQGRGRRSAAATVTTWGSMTNQILALREHLLAEEVTCVVMEATGDYWKPFYYLLEEGLTVMLVNAHDARNVPGRNTDVSDAAWLADLGAHGLLRSSLVPPPPIRRLRDLTRARTALTRDRSRQVQRIEKVLEDTGIKLSSVASDIVGVSGRLMLQALIDGQNNPTVIAELAQRRLRAKIPVLTEALNGRFTAHHGFLISMHLKLIDEYNQALGELDDKIAEALAPLAAARELLVSLPGFSRIVAEVFLAETGGDMSVFPTAAHLASWAGTAPGCNESAGRVKSTKTRPGNRYLKGALGVAAMAASRSKGTYFSAKYRRIASRRGPMKALVAVEHSMLIATWNMLTNGEFYRDPGADYFTARQPAKTKARAINQLESLGYHVILQPLSDTA

SEQ ID NO: 321112 - protein, 354 aa, unidentified
MSKHSIKLFIGMDLGDKKDQICVIDHEGSIVDSTSIPNTIMGLIQFFDRFDIPQEVLVAMETGTHSPWISQLLNARGFRVLVGNARKLRAIWDTDNKYDDKDAEMLARIARFDPELLYPIIHRSRAAHMDLTVIKARDALVRCRSKLINFLRGISKTAGERLPSCSAETFDRTVVDHIPEDLLPAAVPCLNMIHELNSQIRQFNRQIEKICTESYPEVMELRKITGVGPITALSYVLTLEDPYRFSKSRGVGAYLGLTPKRDQSGQTDKPLSITKAGNSYLRRLLINSAHYILGPFGPDCHLRRYGMRIASRGGKISKRKAAVAVARKLTVLMHRLWISGETYDPWYQYCKKAA

SEQ ID NO: 321113 - protein, 422 aa, unidentified
MEVLIYMKNHESLFFAGIDWGRNSHQVCVVDREGSVIGEKSFKHSGGGLLEMAQWMRKISDSEVCDIAAAIEVNHGPVVESLVEQGFRVYSINPKQLDRFRDRFCVSGAKDDRRDALVLASALRTDRYHFRFIEPQDPNVIILREFNRTREELTAEHTRLVNRLRGLLFRYYPQFGELLGKKVSAWHLELWELMPCPDSTKGKRVSTVKNLLRRNGVRRFNAKEVLRVLHDKKIELNDATTESCVWHIRKIIERMKVIDRQIKETEDSIKQIVETMNLKLKTEGQGPTDIEILISIPGVGHVVLATLIAEAWDLIRRRDREALRCLGGTAPVTRQSGKSRQVVLRRAVCRNLADAFHVLGRIAAVNDPASKAKYKALRAKGHRHCRSVRTVCDRLLSVACTILKKGELFDKEFKKPLEDIAA

SEQ ID NO: 321114 - protein, 345 aa, unidentified
MKITTVGVDLAKNVFQVHAVDETGEIVVCRALRRRQMIPFFSKLAPCLIGIEACGTSHYWARELSGLGHRVKLMPPAYVQAYVKRGKTDAGDAEAICEAVTRPTMRFVAIKSPEQQSILALHRTRDLLIRQRTQLVNMIRAQLAEFGIVLAKGIQHALRLAGQLVEGAVPDIPPLAVEVIVTLAEQLHDLQARIGGLDKGLRTWSRDNEVVKRLQTIPGIGIVTASALAASVTDPHQFTSGRQFAAWLGLTPRANSSGGRERMGRISKMGDRYLRRLLVSGMTSQGQSIRRNPDAHPWVTSLLRRKPAKLVAVAMANKAARIAWVVMTRDEIYRAPKPATEQRAA

SEQ ID NO: 321115 - protein, 311 aa, unidentified
MGGVNAAIDVGKHQLDVALGSAGELFSEPNQPRAIRRLAKRLAQVGCERVLIEGGSYQNVLVAALRAAGLPVVIINPRRVREFAKSIGQLAKTDHIDARVLARYGERIEPPVRELPDEQSQALRGLWVRREQLIEMLVMEENRLEHAPKALHRSLRAHIAYLRKQIKQSDSDLDREVRDSALWDKYELLSSVPGVGPVLSVALLSDLPELGRLNRSEIAALAGVAPFNCDSGTLRGQRKIQGGRKRLRRVLYSATVAAVRCNPVLRPFYQRLRAAGKPAKVALVAVMHKLLLILNAMLKTKTAWRPPCLVA

SEQ ID NO: 321116 - protein, 363 aa, unidentified
MEAEKRRPVGIDLGKREYTMAIIGKNGKMKIHQGKTGIQGRQALYRLLTAGDKVALEAGNLAFIIAREIQEQVGSEVRVLNSAKLPFIWDAPTKTDKEDAMKLAHLIEERRDEKLPIVPLPSEKEIERRKVLANYSREVKGRTRNINLLHAMFVHQGHTTIVRKNLATAEKRLEAVKLLTGQEREEAEWILKHLELYEMRMKELKSKIQKEAGKDEDMKNLQTITGVEPVVAYAYVAHVGDGSRFSSGSQVSNYLGFVPRLDYSGTIQRQGHITKRGNGYLRGLLVQAAWVAVRSKHGGALRERYLYKTVRMGLSKKKTVVAAGRRLAELMYSVLRNKTEYELRPWTGIREYTTALTKLENSA

SEQ ID NO: 321117 - protein, 385 aa, unidentified
MAQFEDLSRCLAAFDQNSTLVMVVEMSQSSWLVAGLVPGVARQPLKKLEPDGAALLRLVQRWRSEAVKAGRMIDRIVLAYEAGRDGFWLARWLRSHGIESYVIHPTSIPVSREHRRAKTDRLDAAMLLRALLGWLRGEPKHCAMAAIPTIEEEDAKRPSRERESLVSERTRIVNRMKGALARLGIRGFKPELRKAAQHLGGLRTPESTPIPPNTLGEFRRGMARLAVIHEQIKAIEVARREHLEQAPDSGPPAMVRLLARVLGIGVETADMLVYEILYRKLRDTKAVARYAGITGSPDESGAKRREKGLAKAGNARVRRGLIQLAWRLLLFQPDSALVQWYRARIAGGARKTSMIVALARKLLIALWRMVNTGEIPDGFVLRPAV

SEQ ID NO: 321118 - protein, 354 aa, unidentified
MPKTASAQVAVIGIDIGKNSFHVVGHDKRGSIVLRQKWSRGQIEARLANLSPCLVGMEACVGAHHLARKLTGLGHDARLMPAKYVRPYAKGQKNDFNDAEAIAEAVQRPTMKFVATKTADQLDLQALHRVRERLVSQRTGIINQIRAFMLERGIAVRQGIRFLRAELPIILASRTDELSPRMLRVIEDLVCDWRRLDERIENLSREIETIARHDSGCDRLMSVPGIGPIISSAVVAAIGSGDVFSKGRDFAAWLGLVPKQISTGDRTILGKISKRGNRYLRVLFVQAAWVVLVKPKSWERHGLKSWIEAAKKRLHHNVLAIALANKLARIAWAVLAKGRGFEATRTIDGSTQPA

SEQ ID NO: 321119 - protein, 403 aa, unidentified
MGKVFIGVDPHKLSATIEVVDDRETVLATGRFATDKAGYAAMRRHVAAWPQRTWAVEGSNGAGRPLAQRLLADGEDVVDVPAKLSARARLFDTGHNRKTDAHDAHAVAVVAVRTRGLRVLSYDGELETLRMLVDRREELTRARVQTVNRLQRLLSELTPGKAKKNITAPQAKAIIASVRPRDLAGKTRRRLAVEQLAELVAIDKKITASTKELKVMVLARGSTLMHLTGVGPVVAARTLADVGDVARFADRNRFASWTGTAPLDASSGEQIRHRLSRAGNRRMNHMIHIAAATQIRLDTPGRAYYRRKLAAGKTPMEAIRCLKRRISDAIYRQLLLDARAGQSHPVGADPGGHCGASQEPSAVDLPPHIDTSDQPHPGPAQPTLQPPKTIRKPPTRKELQTTS

SEQ ID NO: 321120 - protein, 339 aa, unidentified
MGRLEFECIGVDVSKCTLDVALFCYKVDWKEGHIKVSNNESGYKELKKWLHIKHVEKKRLRVCMEFTGLYAHNFRSWLEKEDITYYMVDPKRMHNFAPPLNIKGIRQTKTDKADAFRIAIYCSLFHASMETSKLPSPAYFKLKRLLAERRQYVKHTTLYKQQLHDISVFDSVNTRIRKQEGLTELKKAIRQTEKEIGEVIESDNSIKQNYELLLSVAGVGMVVAVTTIVLTENFTTFTDPRKYASYIAIAPFPHESGTSVRGATRVSKQGFRQAKADLSFCVLPAIRFDPEIREYWQRKKAEGKHTGVIFNAIKFKLVLRMFAVVKRGTPYVNTKGYKG

SEQ ID NO: 321121 - protein, 336 aa, unidentified
MIAVGVDTHKHEHVAKALDGLGQIVGGLQIMADLDGYVELLRWLRALDDDVVVGIEGTGSYGAGLCELLLAEGIRVVEVERPRREDRRRGKSDQIDALLAARKVLAKDGLSTPRAGHTRQALQALLIAQRSCISERTRLLNQLQALHTTAPLALRERVGPGNGRALVTRLHRMRARQGAPEAEQLIFAVLRDLACRARELAGRADAYKRELSRLIGSLDSTLLDEPGVGPISAAKLLACDPKRLKSEAAFARCNATAPKPASSGQTIRHRLSRGGDRQANNALHTIARIRARHNEQTRAYLDRRISERKTPREAMPALKRHPSRSPYKRLITVPLT

SEQ ID NO: 321122 - protein, 340 aa, unidentified
MEKRFIGIDLHRNRFTCCIRLENERTYVTEWELEDLGKFVKKLRASDEIAVEITGNTRLFFDAVAGHVARVVVVNTNQFKVIRQSVKKTDPHDARALALYLSKNMLPEVRMKDKEHGQLASLTQTRDTLVKLRTALKNKINNILSARGLNLAKEALSSEKKLAEVLELPFEEIVRIELRVIVEQIRSLNKSIAELEKTIGEEGSKLEGHTGLSSIKGIGKITGAILLSVIGDVNDFADEGHLASYFGIVPRVSNSNQTERSGRIHKRGTKLGRTALVQSALIAANYSPYLKRFYEQVKARRGAGRAIIALARKFLGIIYRTLKNKWVFDDFPNFVLAEAS

SEQ ID NO: 321123 - protein, 303 aa, unidentified
MSKVRFIGLDVHADTIAVAVAEPDGEVRALGVIPNRPESIRKLVKKLGPAEPLRVCYEAGPTGYVVYWQLTALGVKCEVVAPTLVPTRAGDRVKTDRRDAMKLARSYRAGDLTAVWVPDAPHEALRDLVRAREAAKKDQLRARHRLGKFLLRHGRRPSTAMTPWTQCHLTWVKQAVHFEQPAQDATLLDYLHEVEHVAGRIERLERAIDDAVKTVPPRMRAVIEALQALRGIAKVSAVTIVAEVGELSRFARARQLMGRRTTPRRSTTGAFCGRRKRTWRGRGDYDEASRLRGRGTVTTKPSA

SEQ ID NO: 321124 - protein, 336 aa, unidentified
MTARHQECVLAEIAQAKHRLGLPDTAPVVSCYEAGREGFWLHRFLQAQGITNQVVDSSAIEVNRRRRRAKSDGLDVRKLLSMLMRYHHGERQVWQVVKVPSVEAEDHRHLHRDLETLKQERASTTTRIQGLLRSQGIRLTSLHQLPEQLEALRLWDGSPIPPGLRRRVLRVYAHHTFLSEQIAAVEAERRAQLQTSTEAQIDKVRQLMQLKGMGINGAWLLVMAFFGWRAFTNRREVGGLAGFTPTPYHRGDSARAQGITKAGNRHVRWMTTELAWSWLRLQPDSALSVWFRERFGKGGKRLRRIGIVAVARKLLIALWRFLETGVLPAGAVLKEG

SEQ ID NO: 321125 - protein, 354 aa, unidentified
MTNPQLERTVIGGVDTHKLTHHAAALDARTGQILGDQEFPATGAGYAQLLDWLLAFGVLMKVGVEGTGSFGAGLQRHLEQHQVLVREVSRPNRQDRRARGKSDPIDAINAARAVLSDTATAVPKARAGFVEAVRLIRATRRSAAKARRVAIQQIHGILYSAPDELRDRLAGYDRAALVSRCAKLRLTPGAAIDDSAATAHRMLRRLARRIRQLDEEIAEADQELRIILAERTPHLLAATGVGTEAAGQLITTAGENIDRLRSEAALARICGIAPIPASSGNTTRHRLHRGGDRAANSAIHMIVINRLRWHAPTRAYVTKRTADGKTKKEIIRCLKRAVVRELYTLLRQDLENTP

SEQ ID NO: 321126 - protein, 405 aa, unidentified
MSNNVFVGLDWAAQTHAVCVIDADGRVLDRFEVVHDRDGLTGLMRRLARFGSQLRIAIERPSGLIVDALVEAGHQVVPIHPNAVKASRPRYRSHGGKSDSSDAYLLADLLRTDGHRWRALCPQSDAIKALRALVRSRDDLVATRVALGNQLRSALEASWPGAACIFADITSPIGLAFLKRFPSPASAARLGERRLQAFCRREHYSGHRSAAELLTRLRNGAPALGGPAVIDAMAQVVRSLVAVLQPVVDQIAELTRRIARTVEELPDGQIVMSFPRAGHVCAAQILAELGDVRERFPSAEQLAAEAGAVPVTYQSGKTRSVSFRWACNHRLRRAVTCMADNSRHANAWAHTIYVAARARGCDHTHAVRILARAWLRVIWRAWTDRRPYDPELHGAAAQFVKTSGG

SEQ ID NO: 321127 - protein, 412 aa, unidentified
MEQVYERCCGLDVHKDTVVACLRVPGEGVRRHKEVRTFGTTTAELLALADWLLANRCTHAAMESTGIYWKPVFNLLESVCEVMLVNARHIKAVPGRKTDVKDCEWIAELLEHGLLRSSFIPPEPIRELRDLTRYRKTLIQQRAAEVNRVQKFLETANIKLGSVASDVLGVSGRAMLDALIAGERDPARLAKLARGKLRKKRPALLAALAGRFTQHHAFLLGQILAHIDELDQHITQCDLKVDECVRPFVRERELLDTIPGVGRRTAEAIVAEVGVDMSRFPSAAHLASWAALCPGNNESAGRRRSGKTRHGNHWLRTVLIECSLAATHSRDTYLSSLYSRIARRRGGKKAAVAVAHNILIAVWHILHDGVPYQELGANHFDRLNAERLARHYVRRLHELGLQVTVQPIAEAA

SEQ ID NO: 321128 - protein, 356 aa, unidentified
MKKQCVGIDISKANFAAVLCSRSATDDLSFSVSRKFDNDKKGFNQLTRWVAKESDKATTLVFLMEATGVYHENLTHHLNGVGKTVHLILPNTSKNYFRSLNIKTKTDDVDARILAQFGVERTHREWQPPKKIFREMRDLSRYRIQLQEQKTALSNIAHSKEYSYEISNDIMKSNKKLIKLLDKEVDAIKSKLEALVDTDENLAERIRKISTTKGLGIQTVAGLIAETNGFESFRNGKQLASFAGYDIVHQESGTSIKGKTRISKKGNRYIRHLMHHPAMSASKHVLEFKNLRDRVIKRTQIPMKAQCAVQRKLLLLVFTLWENETEYESEYHLKKIARAKAQATQDKLTRSFPLET

SEQ ID NO: 321129 - protein, 320 aa, unidentified
MNKTTQTNTKNKRRREAKTYVGVDISKTELVCDLPEGQRVHDNNDKAIQTLLKRLPRNAHVVCEATGGYEKPLLEALLRAKIPVSCVMSRRVRHYASSQGQMAKNDRIDAGMLSEYGRHSERMRECKRLEPGVTKLRELTRARDSLLEMIKVQANLDEHPATQTLLQKQATQRLAFYRQQLKELEAEIEKKINEDKKLKAKAQACEAIAGVGKVSTWSVLSEMPELGGFERGQAARMLGVAPICQESGSYIGARQIADGRPRPRRVLYMAAISATQYNPIMKAFYLRLRAKGKAPKVALVAVMRKLIERINVLFSELNPP

SEQ ID NO: 321130 - protein, 380 aa, unidentified
MNTTTVGIDLAKSIFAVCEGDYRGHGSRSSILKSGEFLKWLRTLPTGTVVAMEACSSAHSWGRTMQALGLEPRLIAAEFVRPYRKNQRIKNDTRDAEAVLTALHAPGMRFVTIKTEDQQQRLAWHRLREGWKAERTALFNRIRGLLTEFGIVVELGAAKIRRKLAELESDAAYPQSIQLMAQSVRAQIGILDQRLAECERQIARQSKSDPAVARLRSRPGIGPLTADAIVATVGNARQFKNGRQFAASLGITPRQHGSGGKTHLGAITRRGDSYLRCLLVQGARCVLQAALRLHKNKPNTLNRLQLWMITLHERVGYHKAAVAIANKHARQVWAMITRGEAYNAEAYKDWEAAHATVRPGDIQEASDYDLSTAAVAAASV

SEQ ID NO: 321131 - protein, 448 aa, unidentified
MEATKQPIKEVYPMRLKDYARNPRKRKEYVQQPGLLLIGVDISKAKHDACIGTRNGIITRKLTFAHCREGFQMFEKAIRKNIFKAKCRRVLIGMEPSGIYWYALYERLKSCGYGVCLVNCQAVSNNRKTMSDGRDKTDEKDAYSIFDLLTQGKFLLPVQRDSELMAAYRMMQRHMALKKRISRLRNQLRQAIHLAFPELNPLIKDLTLPTSLRFLQANPAPRSIRYNGRRRFMEKWRPRQRCGQWRPEKLERIYELAGTSIGLKDPHRINEFEIKALAQDLADAVGKARMWLDKAIELVEHRNDYWLLLQMPRIGKPTACAILTAVGDINEFLSGKQLVKLAGLDIRRFESGLTVKKRPRISHIGSGYLRHWLYHYAKRLVAFDPQFKALHQRKKQNSPGKGSGQRALIAVSDKIIRIVYRILKDNTNYSSKKDQVIARQYGTLKKAA

SEQ ID NO: 321132 - protein, 364 aa, unidentified
MKKSISATRREMKIDWNEVSAVGIDLGDRFSQFVCVNAAGERIGEGRVPTTAAAMEKQFGAVGSKLIAIETGTHSPWVSRLLARLGHQVTVANSRKLRLIYENRRKNDRVDAEYLARLVRLDRKLLCPVEHRNEHAQQHVALFRARDEAVETRTRLINHVRGAVKSMGMRLPACSAEAFVKRATAALPTELKSALEPLLTLITVSNEQIKKYDRNVERMIKDEYRQVQVLTQIAGVGALTAVAFAVTIGDRNRFARSRTVGAWLGLTPGQRASGNQDPQQRITKEGDHYLRRLLVNCAHYILGPFGPDCDLRRHGAAIAARGGMNAKKRAVVAVARKLAVLMHRLWCTQAVYEPLRKAADSIAA

SEQ ID NO: 321133 - protein, 391 aa, unidentified
MIYVGIDIAKDKHDCFITNSDGKVLFKAFTISNNLEGFNNLYQKIESVMEDITKVKVGLEATGHYSYNLLGYLIDKGLATYVINPLHTNLYRKSLSLRQTKTDKIDARTIASMLMSDVNLKSYSDTSYHNEELKSLTRYRFDKVQERAKLKTSVSRLVCILFPELEKLVPTLHMASVYALLSEFPSAHAVASAHLTRLANLLSENSHGRYNKDTAILFRETARNSIGSNMPAKSLELKHTIKLIHELTSEIDEIEAEIKSIMDTINSPILTIPGISYRMGAMIIAEIGDFSRFDSPDKILAYAGASPSTYQSGQLDGAYSHMEKRGSRYLRYALYNAAKYVCHWDPTFAEYLAKKQSEGKHYNVAISHAVKKLVRVIYHLEKTNQQYIKAA

SEQ ID NO: 321134 - protein, 395 aa, unidentified
MFIVGIDVAKRSHEVCMITSDGQTVQRPFSIRNNCTGYNLMLEKIRKHTNIKSQIVFAMESTAHYWLALFTRLRKDGYHVILLNPIQTSAMRDMFIRKIKTDAKDSFIIAELIRFGRYAESNVAQDRLLALKELCRNRFYLVDMAGDLKRKLIALIDRVFPEYEAQFDTIFCKSSVALLKKYPTPQKLSNAHLDKLTELLWNSSNGHFGEWKARELRELARNSFGVEDCDGAYSTLILLMLDQIQSLSGKADALEKEISRLFQSFDTTVTTIPGVGPIIGAVILGEVGDISRFSSADKLAAYIGVDPSVNQSGEFQAAHAHMSKRGSPYLRRCIWMASQVAVQRDPMFRAYYEKKAAEGLKYMTIIGHVTRKMTTVIFAILRDHKVYEPVLPTAA

SEQ ID NO: 321135 - protein, 346 aa, unidentified
MKITTIGLDLAKNIFQLHGVDERGKQAARRAMKRDDMLPYFANLEPCLIGMEACGSAHHWARKLIALGHTVKLMAPQFVKPYVKSNKNDARDEEAICEAVTRPNMRFVPLKNVEQQAELSIHRARQGFVKARTAQGNQIRGLLSEFGIVIPKGIAHVYKRIPEILEDGENGLPGSMRQLILRLTDNLKGLDEQVVALEKEIKQWHTGNESSRKLAEVNGIGPLTASALVATVGDAKNFDRGSQMAAWIGLVPKQHSSGGKTVLLGISKRGDTYLRTLLIHGARAVIRHAENKPGYADSWLGKLIARRGKNVAAVALANKNVRIAWALLAKESKFRPDYVAVQPTAA

SEQ ID NO: 321136 - protein, 520 aa, unidentified
MASTRTRCHSYRRRSPMSLGKPRGVLHPRVQQVGPEHFGIVCFDCHKASSKFLLADFYGRQLIAPTKVHHNRPELDAAIAQIRQAFEQHQLGDGLVVIERTGRYHRVVQRAFAAAGFETRIIHPFVTKQYRQPVDPSQKTDDADLGAIHRATVTGCALLEATRDEAWTILQLLIRHRRDLVRKGAALNCQIRDHLEAALPGYAACFDKLWESTIPWHLLRHFPTAGQLRDAGLTTLCHSLDEAGIRFQQRTIQTVVDWAHQAAPGDIGASLHRRIALALYEDRQRKTQEITALEREIAGRLVQTPYVLLLSFPGINVVSAADFGGEAGPMEHYLNAKSITGRAGLRPSRYQSDQVDLANGPLVRNCNRSLRAAILGIADNLVVCNHHFQVLATQWRAQGKDPRHTRVKIGLRFCRIAFQMVAGRQVFRHPSIQGRHYILDKLTAFHLAHGTKMPDLLRDLQAAIGQIPRRQYAAEAKPLQDEYRKIHDGRRRGPQLLGDILPIVLARLGVDVVQSNESGE

SEQ ID NO: 321137 - protein, 392 aa, unidentified
MEVMDEAGRVLAKRRLPEGVAGMTQLHGLIGRFVPEDADDVEVVVGIETDRGPWVAALVAAGYAVFPVNPLQASRYRERHGVSGAKSDGGDAHMLADMVRTDSHQLRPAAGDSAEAAGIKVVARTHKTLIWDRTRTVQRLRHQLREYFPAALEAFGDLDAPEVLELLVKAPDPARARRLTRAQVSAALKRARRRNIADKTTAILAALRGEHLAQPGSLTVAYAATVRSLVAVITTLNDQVKVLEGEVGEHFGRHPDAEIYLSQPGLGTVLGARVLGEFGDGPGRYASAKARKNYGGTSPITRASGKKKVVAARFIRNDRLIDALMTWAFASLIASPGARAFYDQQRAKGLEHNDALRRLANRLVGVLHGCLKTHTLYDETTAWSHRESSLAA

SEQ ID NO: 321138 - protein, 338 aa, unidentified
MKLYCGIDLHSTNNWLGIYDEEDRAVFSKRLPNDLGVVLESLEPYKAELAGIAVESTYNWYWLVDGLMEQGYRVLLTNPAGNEQYNGLKYTDDRHDSRWLARMMRLGIVATGYIYPKEERPIRDLLRKRMRLVQHRTAHIVSVLNTMARNTGSSLSWGKIEAMSDDQISKLLGDELIGMAPRASLAVIKSLDQEISKIEKTVKARAKLRSEYKLLKTVWGVGPILALTIMYETGEIRRFAQVGDYCSYARCVGSLRISNGKKKGENNTKNGNRYLSWAFVEAANFASRFYPQAHRFIQRKRAKGNHTLAVKALGHKLARASYYVMRDQVEFDPARLFG

SEQ ID NO: 321139 - protein, 347 aa, unidentified
MKPNFEPGKWFMQCVGIDIAKGTFTACLCMYEFDQGCSTAPVVFNNDKTGFNQFVKWSRKEALKGYPLRYVMEPTGVYYEQLASHLNKLSLNVCVVLPNKAREFAKYEGILTKTDDMDAYTLGMLGCLDKRLKPWTPPSPIYRELRQMTRFVADINKVKTELRNHLEALAHSETAEKSIVKHYNKLIDEIDKQLVSNQKAIREKVKQVPGLSERIDRITTINGIGFMTVVTVVVETNGFALITNRKQLTRYAGLDVPAHQSGPVDPKRHISKQGNVHIRTALYFPAIVSTQCNPQMKDFYRRLCARNTQSKMIGVTATMRKLLLLIYSLWKSGEKYDPTRDKPACDK

SEQ ID NO: 321140 - protein, 377 aa, unidentified
MKKVRFLGLDVHAETIAVAVAEADGEVRSLGTIPNREESIRKLVKKLGPGEQLRACYEAGPTGYVLYWQLTGLGVQCEVVAPSLVPVKAGDRVKTDRRDATKLARSYRAGDLTAVWVPDAAHEALRDLVRARESAKRDQLRARNRLSKFLLRHGRRAPLGVRPWTMKYMTWVREQVQFEQPAQDYTRLDYVHEVEHANDRVRRLEEAIGEAVKLAPVTMREVIQGLQALRGIAQLSAVTIVSELGPISRFAGARQLMGYSGAVASEDSTGQRIRHGAITKTGNAHLRRVVIEAAWAYRHRPAIGATLHKRQQGVCEEVKEIAWKAQHRLHKRYRHLATAGKNKPKVVTALGRELLGFIWAIGVQVERHSSHQHRLAA

SEQ ID NO: 321141 - protein, 411 aa, unidentified
MEPKLIVAGIDVHKRMLAVVVVDEDNPKQALVKRTFGSNAGELKHLAAWLIAHGVTQVVMESTAQYWKPVWLALEKDFDLHLAQAQSNAGPGGRKLDYVDALRLARRFLAAELRLSFVPDGEQRSWRCLSRSKYQKRRRRVQLQNQIEALLEESQIKLSSVLTDLLGGTGYRILKALARGESDPQELIKLAANNLKASPEQLADSLSGPMQDRHRKVLTMQLEELDLIDKHIAELNQQLQEALQDHQQAVLRLCEMPGLKQDAALQIIAEIGPRAAVFETPEGLASWIGVCPGREESAGESKSNRSPKGNRAMRRLLNQIAWGAVRTKDCFFRELYNRLVYKLGVHKAIWAIAHRIAKLIWKVLHEQVTYIERGPLALDPIAMKKRVTRLSQQMRKLGYILEVKPLVVETN

SEQ ID NO: 321142 - protein, 344 aa, unidentified
MKYSVIGMDIAKQVFQLHRVEVETGEVERIKLRRDDVLPYFARQAPAMVALEACGSAHWWARKLSALGHQVRLLHPKSVRPFVLRNKTDAADARAIWTAAQQPDARFVAAKTETQQAILALHRLRAQLLKFRIMQTNALRGLLYEFGEVLPEGHAALSKALPAALANLDTHLPAVLLDSLREQWTRVMSVDKEIAAIERRLATILRDNPSCQAVAEIPGVGLLTATAAVASIGEAKAFKSGREFAAWAGLVPRQRGTGGRVRQLGISKRGDVYLRTLLMHGARAVILRYRHVPWLDGLLKRRPYNVVVAAVANKLARTIWAVLAKGKPYNPDAFSAVVATQGGV

SEQ ID NO: 321143 - protein, 399 aa, unidentified
MLAVVITDAAAEGEFRFQRRKFGTLGSDLKALSEWLAERGVREAVMESTAQYWKPVWRQLEGECQLYLAQAHSNRAPRGRKRDFEDAERLVRRHVAGELILSFVPDPEQRMWRTITRTRHQLTRDRVRLHSQLESLLEDARIKLATRVSDLLGTSSRRMLHALAQGETDPAALAALAEPELRATPEQLADALSAAPSLGSLHRQILQLFLERLELIERQMATLKLSIASTLHAHQQAVLRLAAVPGYGIDSAHQVIAEVGPQAAVFPTAGQLASWVGVCPGREESAEVSRNNRTPKGNRVMRRVLNQVAHAAVKTKGSLFQSLYQRLRPRLGHNKAIWAIAHRLCRLTWKILHEGVEYTEYGQAPNPKLLRNRVAKFVRELRSLGYQVIPPVPTAGASV

SEQ ID NO: 321144 - protein, 330 aa, unidentified
MFVGMDVHRNRTQVCVLDRKGNELRNRNVTNDRESLRKELAGLRRGTPVAFEAAYGTGWIAELLGDLGFEPHLAHPSGCRAIADAKLKNDRVDARTLANLLRTGYLAEAWLAPREVREQRLLLRERARLVRIRTTAKNRIRAQIADEGVPAPSHGLWTKAGATWLDAVELSPMHRWVVTDCEALIDVLQSRISLLEAEIRRQAKPDKRIDALMAIPGIGLLSAMTLVSEIGDITRFATARKLCAWAGIIPSMRNSDRTRHHGHITRAGPAAVRHVLAEAAHGAIRKEPYRSDFLATKRRRGTGIALVRTSRKLLTEVFYVLSALEEEQHS

SEQ ID NO: 321145 - protein, 338 aa, unidentified
MKVHVLGVDLAKNVFQLHGVDRKGRCVLVRRVRRDLLMTLVAELDPCLIGIEACTGAFYWQRQFERHGHTVKIIAPQYVKPFVRRQKNDSNDAEAICTAVQQPNMRFVPKKTLEQQDIQALHRARQRLVNHRTALISQMRGLLLDRGIAIGVAATRARSMIPKVLNEPNEDLSSLTREIITSLYDFMLQIDARIRFFDQKIDAIFKANEACQRIAKIRGVGPKTATAMIAAIGDGSDFKNGRHLAAWLGLVPRQHSSGDRRVMLGISKRGSQHLRTLLVHGARAVVRTAVRKTDPRSVWVNDLRERRGHNRATVAVANKNARVIWAVLRTGEPYRAAA

SEQ ID NO: 321146 - protein, 347 aa, unidentified
MLHLGLDLSRKRLDVCVLDERGEKLAVTAAPPDTDGLRELVRRTATYGGPVHAVIESMTGARFVHDTLELHGWDVDIADAQKVKGLAPLACKTDKIDAWVLAELSRRDLVPAIWLPDPDVRGERERARFRLHLVRHRVMLKNRIHASLMSFGQPCPVSRLFGLAGREMLATLDLPEPWTKNITTALGLIDDVDEEIKSIERELRTLGADHPYVSLLQSVPGVAWILGYTIASEIGDISRFASPKQLVGYTGLCPRVIQSGEKDWRGPLAKNGPKYLRWALIEAAVHAARHPVYAEHYQRTKTRLGRQRGANVARVEVARKLAEAIWHMLQTGSYFSPTRSHCVSGRA

SEQ ID NO: 321147 - protein, 431 aa, unidentified
MTEQEQQVVANQAAEPVFAAFVAIDWADKKHYWSLQVANSGKIERGCLENSPEAVEVWVAELSQRFEQRPIAVALEQRRGALAVMLSKYGQLHLYPVHPLTLSKYREAWYPSRSKDDIKDADLLLEIVTQHRDRLRRLDPDTEEMRLLQFQVENRRKLIDERTALSNRMTDSLKIYFPQLLQWFDDVTAPVAANLLNKWPTLEALQKAKPSSLEKFFRENHCKTEKIPERLQQIKSAIPATYDAAVISGMVPMVQVWANQIAVLCKAIRELETRIERNAKSQADWAIFDSLPGAGDVMAPRLLAAMGTRRERFEAADQLQCFTGIAPVKEASGKTEWVHMRWACPKFLRQTFHEWAACSIPFCGWAKGYYDQQKAKGNSHHTAVRALAFKWMRILYACWRDRQPYQEEVYLASLAKRRISIPALAKAVKMP

SEQ ID NO: 321148 - protein, 343 aa, unidentified
MVYIGMDVSSKEFVVHVIDQRKQKVFEGRIAPSRAGLRKLIGDLGVGPKLFVFEAGNQMKWIALMLMRQAGVRIHVVHPNEVKWISQSNGKTDQVDARKLAHLAWGNLLPRPVHIVEGKTRQLRELVSAREHLQGKRVALINALRGTIRQEGVRFPAKFFQRSDWKTSLEKLPLGSTQQLILKSFMEAIDALKRSEEELTAKMLEIQDSRCDLLETIPAIGKIASRVIVSALDDARRFDNKKCVANYGALTPTIYQSGGTTNLGRINRDGRQEVRKVLLQCAHTIQRTTNHPAAPIREFFERIEKRRGKKRAVVATARKLLTIAYGVLKSGVPYDPERLRAFA

SEQ ID NO: 321149 - protein, 413 aa, unidentified
MELVFWICCGLDVHKQTVTACLRIADRSGQVRKEIRTFGTMTEDLLVLHDWLRANGVTHVAMESTGVFWKPIFNLLEDSFTVLLVNARHVKAVPGRKTDVADCEWIADLLAHGLLKGSFIPPREIRDLRDLTRYRKSLIDERVREVNRLHKLLQSANIKLSSVATDVMGVSGRKMLEALLEGNNTDPEILAELAKGRLRKKLPDLKKALVGRFRDHHRFLLEQILTHLDFLDESIEKVSQEVAQRTSPFESKIQLLSTIPGVNRRAAETLVAEIGLDMERFPSHGHLASWAGMCPGNNESAGKRKSGKTRKGDQWLRRSLIEMSWAASRTKGTYLNAFYHRLAKRRGAKKANVAVGHSILVSAYFIIKFDVPYRDLGEDHFDRLNSAQIQRYHIRRLERLGFKVTIEPLETAA

SEQ ID NO: 321150 - protein, 341 aa, unidentified
MNVTTIGIDLAKTVFSIHGTNQHGKVVVRKRLNRPKLLAFFAQLPPCLIGMEACSGAHYWARELTKLGHDARIIAPRFVAPYRKSSKNDDNDAEAICEAVGRPNMRFVPIKTEDQQAVLCLHRIRRGLIKERTDQINQIRGLLAEFGLIIPQGRYHARHRIPEILEDAENGLPMLARRLLNNINQRILQLDEDILAYDREIEAMARRDEQAKRLMAIPGIGPQTATAILASAPDPRQFKSGRHFAAWLGLVPRQYSTGGKPRLGRITKRGDKYLRTLLIHGTRAVIAKLADKSDRLSGWARDLVERRGYKRAAVALAAKNARIIWALLMNQTEFKTQPVAG

SEQ ID NO: 321151 - protein, 310 aa, unidentified
MGQVNAAIEVGKHKLEVAVGSDGELSSEPNQSRAVTRLAKRLIEIGCERVLIEGGSYQNVLIGALPAVKLPVVIINPRRVRAFARSIGRLAKTDHIDAKVLALYGERIQPPLRELPDEQNQQLRALWIRREQLIEMLVMEENRLEHTPKALHRRLGSHINYLRKQIKHADKDLDRAVRNSALWDKYELLSSVPGVGPVLSFALLADLPELGRLNRCEIAALVGVAPFNYDSGTLRGQRKIQGGRKRLRRVLYSATVASVRCNPILRPYYQRLRTNGKPTKVALVAAMRKMILILNAMLKTQTTWRPPCPT

SEQ ID NO: 321152 - protein, 347 aa, unidentified
MKFYTKQHQFYCGIDLHARTMFVCILDQSGKICLEKNLHSCPDEFLTTIEPFRSDIVVSVECLFTWYWLADLCSEQGIPFVLGHALYMKAIHGGKAKNDRIDAHKIAVLLRGGMIPQAYVYPPGMRSTRDVMRRRLYLVRKRGQLLAHIQNTNHQYNLPEITAKLAYKANRKGFVDRFDDPSVRKSMEIDLELVAHFDQIIRDLELFIVRQARQHDADMFHRLRSIPGIGKVLALTILYEIHDITRFERVQDFASYSRLVKCAKESAGKKYGTGGKKIGNVHLKWAFSEAAVLFLRNNPEGQKWLARLTQKHGKGKALSILVHKLGRAAYFLMSRERSFNMDKFLAS

SEQ ID NO: 321153 - protein, 336 aa, unidentified
MGLDQHRAQISAEWMDTITGEISRARVAPADRAAVRAFLKQFHGEPLEVALEATTGWRFVVEELKQVGAEVHLAEPAEASALKGKKKRAKTDWADARHLRELLLIGRLPESWIPPAHILDLRARVRTRHLLSHQRTEWQQRIHAVLYHHGVPQRRDLLTIQKREWLAELTLPAAAREQLTIALSVIDALDLKLVPFDVELRAYAKKQPGCRVLMDQIFGVGGLTSVTILAELGDPRRFDNSRDVVHYAGMDITVHQSDAHRAPGHLSRQGPPALRWALYEAAQRARFPASPDRPYYEQLAARIGGNRACLALARKLLKRSYHILRELGDEALAPVA

SEQ ID NO: 321154 - protein, 340 aa, unidentified
MKILSVGVDVSEKTVDVAYWDQDENEPVFVGSFPNNHKGFQTIQRKIEKRRKDINAVIIHVVMEPSGGYEQPLAHFAHQQGWRVSLPNPLYPRRWGESMGRRAKTDPQDARNLAHFGFVNDPLPWKPLPPEVEQLSHLLDRQDNLKKMLSQEKNRAHSTEYHVNGHEAVCDDLAEVICFLEQRIEQLQKVIKEHLKAHPHLKEQRKLLLTVSGVGDKNVLHILVMMHRWGTLTDGEGDASGLVAYLGLDPKPHESGTSVRKRSGISRQGNRPMRSRLFMSALGGIKGKNSPLTAFYQRLVGRGKPKKLALVAASRKILVWSWAVFRTNTPFDAARFEAFQ

SEQ ID NO: 321155 - protein, 319 aa, unidentified
MTSDVAVTYVGIDVSKARLDIAVEPSGEQWSVANDQAGIGCLIGRLKGQAMGRIVVEATGGQERLVVAELYQAGLPVALVNPKRVRHFARALGRLAKTDRIDAAVLASFGRLTEPLLVRLPSEQEEALATLVTRRREVVDMRIAEENRLRLAKPAARPRLEKHIRWLEEEEAELRREIEALLRDTPELEDKHTLLCSVPGVGLILSATLLSRLPELGQLSRRKVASLVGVAPFNRDSGPRHRSRHVAGGRQAVRTVLYMATISALRCNPLLIAFKRRLMAQGKSAKVAIVACMRKFLTILNAMVRDKRPWSDSFSLREA

SEQ ID NO: 321156 - protein, 421 aa, unidentified
MRKADTRKVKAIGDDTLIVAVDIGMEMNRGYCTTPDGRSSKTFKFDNTRAGMDTLWDMITINKNRFKCNEVIVGYESTGPYGEPMLHYLMKKPVRIVQVNPMHTKKVKEISDNSPLKTDDKDPRVIADIIRWGRALSIVIPEGDAAYLRRLNNSRERHVRERTALVNQLQQLVFLLFPEFRTVIKDIKCKTPLYLLRKYPTPETLSVLDKDVLGEEMRKRSRGKLKEHHADMLINLARNTVGIREGAAGLSMDIRHILIQLEMLTNLIAELESEMEIALGRIPYSSKLLSIKGLGVVSVAGIIGEIGNFKKFNTRSEIMKLAGLDLYEISSGKMKGQRRISKRGRSLIRKILYYTAIQTIRKDGILHDYYTRLTDGGMKRMKALIAVSRKLLGIIYAIVRDDSEYSANFESMKRQVIKKAA

SEQ ID NO: 321157 - protein, 482 aa, unidentified
MEQKEQTYRRCCGIDIHKKSVTVCVLPPTGRPEAETKKRTFRTFTRDLKQLRTWLKNCKVTEIAMESTGQYWRAVWNILEDHFEKLILVNPQHIKGLNGYKTDPKDAQWIAGLLDGCKLRGSWVPPREIRELRDLTRQRVHVLEDLNRVKNRIEQLCQTGNIKVSSVATDLFGVSGRKMLAAIVEAKHDAGWIADYARSSLRSKKRELELALEGSFTDNQRWLLDKELRQLEWLEIQVQVLEQQIERRVVTFEEPMQRLMTIPGIDRKTAWMIVAEIGVDMSVYGDAPHLASWAGLCPGNRESGGRRMSGRTRKANRYVRRAMCQAAWAASHTKNTYLSAFYRRIQMRKGAPKAVLALAHHLITIVYNVLARGEQYVELGADHHDRRNKPKTVARLVARLARLGYHVDLKPIKSDLANEPAALVDSGSEGSSARTSAGADHEATVALKPKRGRPCKCVERGIICKHGRAVRANSLAEQVSSA

SEQ ID NO: 321158 - protein, 337 aa, unidentified
MSVYVGIDVHRKRSQVAVVTGDGTVELNKNVVNGSEPMLRLIGDLPPGTPVAFEAAFGWGWLAALLEDYGFEAHLVHPLRCKAIASARLKNDKVDAATLAQLLRADLLPEAWIAPPAVRQLRALLRHRAGLVRLGTQQRNRIHAVVADFGFDRSGSYLSGPGRGWLAGLDLPPVSREVVADCLAVIDGLAPVIERIDGELRLHAKADPRVKVLTTLPGVGQFTALVMLAEIGDITRFGSARKLASWAGLTPTVRGSDRTVRHGHISKQGSAWLRRVMNQAAQTAKRSPEFSATYSAIAKRRGKKIATIAISRKLLTRAWHLLADMQAASTNEPPRRP

SEQ ID NO: 321159 - protein, 420 aa, unidentified
MVYLERGYNLKELPWSKTVSNSFLFKEACMILVGVDVAKDKHDCYIMTSEGEVLFKSFTIANNMEGFNQLYEKILSVIDNFDNVKIGLEATGHYSYNILGYLLDKGLTPYVINPLHSNLYRKSLSLRKTKTDKVDSRIIASMLMSDVSLKPYSNTLYHNEELKSLTRYRFTKVQERAKLKISISRLVTILFPELEKLVPTLQMNSIYALLYEFPSAHAISKAHLTRLTNLLNTTSKGHYTKDKAVLIREAAKNSIGSNMPAKSLELKHTIKLIKELTSEINKIEEEIKIIMNKINSPILTIPGIGLSTGAQILAEIGDFKNFSSPDKLLAFAGLSPSTYQSGNMYSSNAKMEKRGSKYLRFALFNAAIYVSYWEPTFSQYLKKKRVEGKHYYVAISHVVKKLVRVIFHLEKTNERYSTVI

SEQ ID NO: 321160 - protein, 482 aa, unidentified
MKKRNIYRNQSQEILSLFESAGDRTKAMCVPMDYAKKDHVVMFCNGNGDILRKPFSVKNSLEGKNYLVDQVEKSYQRRGISRQHVFFGGEDCGSYADNFIAALRSDSWMVAGVNACDAKKYRDNKQASTDILDLLGICKMLINCKGNCSPAQTGIYWNLRMLVRQRRKIVQMATGVKRRIHFLVDQIFPGFLDEKKSGIFPFSRGSLALMGNRFSVHQVRRRKRSTLSRFLACNLVHHADHCAEHLQKYTSQVLQPPTEHIATLQLALQQQVKLFICLQENIQQLEKEIAEHLAQTSGAFLTSIRGVGIVLAAGVCAEIGDPDKQKSLSQLVSYAGIIPRIKQTGGIQGKTQVKKVGKRCNRILKDYVVRSGYHIGVNGPEELKLDHKRRGAQGQHADFGMSRRYLRMAMCLMRGSQTYLPKSLRDTSTSMKERAKYYVLTWSTLRDKWKKKGALEFAFDKDRLLGQWRNVVQDLYGIELEL

SEQ ID NO: 321161 - protein, 362 aa, unidentified
MNKTTYLGLDVHAATITIASQDEEQERPELRDIPNEPAVIRKTIQRLGKGRELRCCYEAGPCGYVLQRQLAAMGIDCQVIAPSLIPQKPGDRVKTDRRDAAKLARLLRAGELTPITVPTEDQEAVRDLVRAREAARRARTDARHRLTKFLLRHGHRYHACNWTGQFWKWVNDVTFTHPELTKVLQHYTDMVLHLDRQIEDLDAHIETVAAREPFRATVARLSCLRGISTLAAMVILSEVYDLRRFATASQFMAFLGIVPREYSSGPKQRRGGITKTGNGHVRRILVEAAWAYRHYPKVTSRQRKMLAHQPPVIADVCRKANLRLTRRFQRLEARGKKSPVAMTAIARELAGFVWALARTDSA

SEQ ID NO: 321162 - protein, 432 aa, unidentified
MKYKLKQKQNQRITRITEKTLVVGADIAKKIHVARAVDFRGIELGKECVFHNDQEGLTKLAAWMKELGRIHEKTDIVFGIEPTGHYWFPLAAFLKEQDIRVVVVNPHHVNKSKELEDNSQTKSDYKDAKVIADLIRSGKYSEPNLPTKEYAELRILMNFREKVMVSLNQVKARITNWFDRYFPEYPQVFKDWEGKASLMTMRQFPTPEEIVSIGARGVLTHWKTEIKRGVGIKRAEQLYAAATVSIGLTEGLTAARIELAALLQQYDLYCKQEESIMTEVLQILEKIPGTKQMLSIPGIGILTVAGFLAEVGDLNNYDHRQQIIRLAGLNLTENSSGKRKGKTGISKRGRSRLRGILFRCMLPMVAKNKEFKALHEYYTTRSQNPLKKKQSIIALCGKLVRVLYTLGTKQKEYNANEVLGPIRQAQLQQSAA

SEQ ID NO: 321163 - protein, 369 aa, unidentified
MVHSTEVFVGIDVAKARNAVAIADGERGGEVRYLGEVDASAESMRRLVKRIAAKHGLVHFCYEAGPTGYGLYRLISALGYPCMVTAPSLIPRKPGDRVKTNRRDAVALAKLLRAGELTPVWVPDEGHEAIRDLVRARAAAVETVRVHRQQVSAFMLKHGRIFARKTAWGARHLRWLQEQRFDHPAHQIALQEMVEAVRISKERVERLEAAIEEFVPTWSLAPIVQALQALRGVELIVAVTFATEIGDMRRFDSPRQLMGYLGLVPSERSTGDTVRRGGITKAGNGRVRHMLVESAWTYRHPPRIGKAKLYRLEAVPPKVREIAWKAQTRLTARYRALSGRGKKTTVVCTAIARELVGFMWSVAREAQTA

SEQ ID NO: 321164 - protein, 395 aa, unidentified
MENPIIACDVSKGKSHIQGFIGLSNPVGNPFVVRHLKSDLKLIKELAKSLEKQAHKKPKFVFEFTGIYHECIAKYIRTLGLDLYAISPLESAKVRKSQIRVTKTDSKDCLNIATVYYTRCIRKFESDNNDIKSLSRRKRDIREERVRQRGVYHRYLDLIWPCFDEYFDVDSKVCDIIISTYKHPYVIKRRSVNMVVEILLNNGRFSKNRAFDIAYKIKDYASNCVSGVDEKSDYVNALINSYGKIKSLTNEMEEINLELDNLLRKSPVYQLLKTVPGVGENLLIQMSAEIGDYTRFKTAKQFVAYIGLDPSILQSGTNDGEHYSITRKGNGILRSCLYLAVSQMLTQKLDNQITRFYFKKKSSGLSHKVAAVASCRKLACCVFGMFKNGTCFETI

SEQ ID NO: 321165 - protein, 313 aa, unidentified
MILALRCVGIDVSKHHLDIFDEAVGVPERIANAPQAITQLVARWRCDALVVFEATGVYDLALREALRQAGIRFARINPARARDFARAGGQLAKTDPIDARMLAAFGRAMQPATEQAATAARNALARLAKRRDQLVAMRAQEKNRRSEAEDLAMAERIGRLIEVLNDEIVEIEAEISALVKAEPELADDAQLMRSLPGVGPVACMQLITQMPELGHVGPKEVAALAGLAPFNVDSGAYRGKRRIGGGRKRVRDALYMAALNAVRRAGRFKVFYDRLRQAGKPAKLALIAVARKLLTILNAMMRDRKPYKIAPST

SEQ ID NO: 321166 - protein, 344 aa, unidentified
MNSMHYIGFDIHKKVISFCEKVMDGTIVEQGVIRATRHSLNKWVTKRTAPWIGAMEATLFTGWIYDHLLPHAAELKVAHPEMLKAITASKKKNDAADADKIADLLRCNLLPECYMAPEEQRELRRILRYRNFLVSEAVKMKTKTASLLMEVGAEYSKAKLHGTKYFQELLGHLDYVPESVLSLLQMTRSNMECFQKMQKSLIGALRSDPQIRERVELLMSIPGVGEVTALTWVLEIGEVSRFNRIGQAVSYCGLCSAQKESAGKKYRGPISKKRNKHLQTVLIEAAKLAPRWNPQLAAVHERELTKGNRNRATLSVARKLVAYMFAVDKKQRKFVPRELLAEAA

SEQ ID NO: 321167 - protein, 409 aa, unidentified
MPTIFECPTGAVAGIDTHTDTHTVAVISDTGRHIATDTFPATNPGYVDIAEFMAAHGVITVGVEGTSSYGAGLTRHLLTQKYSIVEVLRPTRSIRRRDGKSDPVDAVAAARQVLTGEALSIPKDTSGPVESLRGLQITRRQLVMTAAKLITTIKSLLVTAPDEIRRRYSAMSTLVMVEALSRCRPAAELADPRNGVLIALKTLATTYRDVHKQGTQLEEHISILVEAINPHVTSIFGCGAVVAADLIVSVGENPGRIHSEAALAHLCGVSPIPASSGRTHRHRLNRGGDRRANSALHRIALVRMHHDQRTRDYVAKHTKEGLSKREILRCLKRAIVREVYRVLCLGQSVIPTGQVRVDELKARRIERQLSQAQVAEQLGCAPARISDIETGKRPLPELRSAYEELLKSA

SEQ ID NO: 321168 - protein, 313 aa, unidentified
MITEEVHVVGVDVSKATLELGCMSLTLPASIPNTPAGFKTLLKSISKCITPVHIVCEATGPYHGPLIRFLHLAEIRVSVVNPRLTRDFARARGKLAKTDAIDALLLADYGRTMKPDPTTPPEEHVVLLDELVTRRAQLVEDRARERNRLEQSSGPDVTASLRLHIRHLDEQIKKLLKRIAEVVEKHPSLKTKVSLLAQVHGIGTLTASVLLATLPELGTLSKNEVTALAGLAPFNRDSGAFRGKRSIHGGRIGVRCAIYMSALCASRGNPILKAFYQRLRAAGKPHKVALVAVMRKLLIYLNSLLKQHSLSPA

SEQ ID NO: 321169 - protein, 333 aa, unidentified
MYYSGIDLHSDNCYITTINDDGLVVKQQRVENNDDLVLNYFHSLPGSHQAVVESTTGWYWLNDLLGDHGIDLVLAHAKYLKAISYAKVKTDKVDSQTLAILLRQGLIPPAHKISRELRGLRDTMRIRLRLVQQRSACLLRLNSIHLKFNGSIPDPYRFQNAVLEHTRNTFTEQILALEKSLHPALIPNEDIQRLLQIPGIGKLSAFTLYLEIDGIERFASDKHFVSYCRLVPAADNSNRSVHHRSSKDGNKYLKIAFSDVAVHAIQYYPEYQRFFQKRARRSNEAIARTVVAKELAKIVYYVLKNKQPYKGFKGQEISRQKSAQWPRLSSPNA

SEQ ID NO: 321170 - protein, 397 aa, unidentified
MVNIGIDLHKTQFTVCVRSRQRDKFEKYPTTQEGYQAFLKKAAVWQKAGEEVRVGVESTGNTRFFKSKMEAAGIGVTVINTLKLKVVTESVKKTDKHDAATIAEFLEKDMLPESKLCSKQSEKIRRLLKARTTLVRAAVVVKNQIHALLTAEGLEDEKGSLQSKRGCQRVLNTLNEWENGLEAQPLVETIDRLKEDVKRIEGQIRGVVEEDRMVQLLMSIPGCGEISAWTIRAYTDDIKRFSSAKKYCSYAGLVPWVQNSNETIHHGKITKRGPEELRTALVQVVMGMRRMKKKTCGWRMMQRYEAMKKSKGSGKTITATARKLATIIWHMLSEDSEFDWGRMVQEKMAEKSESKSGTTRVVEEAIKAEPKKSAKTKNRKNEIKKTGVTGKKEKKVG

SEQ ID NO: 321171 - protein, 464 aa, unidentified
MPKRPAPAVPPPECPPKAPVPPAPTRPQGGVGYLGLDVSQAEVTACLLLPDGREAVRRWTVLNSQPGAEALASRVALLAAEQQLAGVAIGMEATNLYWWHLACLLRDTPLLAGLWHEVYVLNPALVAGLKRAYPTGGKTDCRDAFFIAERLRVGRLPAPFQVDVLYAPLQRLTRFRAHLAQSLAREKNYFLSFLWLKFSAFSQEEPFGDPFGATSSLVLDQYAVEDLVQWPVDDLAAFLQRQGRGGFDNPAEVAATLTKAARDSYRLDKVLAEPVSLVLATTMATIRTLQAQLKAVDATIARELASIPEVRRTIRSIPGLGPVWTAGLVAEIGNIHRFADDGALAKYAGLVWHPYESGTFQAQDTTMSKAGNAYLRYYLVEAANSVRLHCAEYQAFYAAKLAQSPKHDQKRAVVLTARKLVRLLDALLRAGALYQPQDRKEGQTPPHTARPQPQRRARLAAAAG

SEQ ID NO: 321172 - protein, 416 aa, unidentified
MSTTDPLASPVDPCGFTYVVGIDVGSEHLLYTICQPDKRAVVKPSQINNDRVGFGQLDQALHALGSEPSRILIGLEATSRYNENLYQFLAEQGYTLCLLHPRQTHQFAQQRGLRAKTDRLDASTIARLLLSGEARVGYVPDELIASYRELERLHSQLTAESARYQNEIHALLTVLFPEFTQVFADPCGATALGVLKRYPGAAAIATAGVEALTATLRELARRRYGRPTAVELVRLAERSAASGVATSARALSLKVLCDQLEHTLVNLAHREQELDRVLGGDEGASRLSSVPEFGRQTLAVLRAELGDVTRFSRIDQAVAYVGLDLEVRQSGKWKGQVKLSKRGSGRVRRVLSMAALRSLTLPDSPFAAYYHRLVARGLKGRKALMAVMRKMLLVACHLLRSNESYDPAKVCAVTGP

SEQ ID NO: 321173 - protein, 427 aa, unidentified
MSKRDFSKQVERRQKIKRTTLVVGVDIGSTFNAVALMNKEGEVLGKYPKIYNSRRGFDYFAKVIEEVKTSNGFKGVLMGIEPTGHYWRKIAYFAKERGYEVRFIRTTGLKHQRGLDESSSAKTDMRDPTLANITREGKYIDTVIEDGVFRQLRTLAKLRERVLRYSVSSQNTLGAVLDDYFPELKRIFSSMKIRSLWAKLQCCPFPQDVVTLEVSMIAEVIGKSSRRRAEAAQKAMDLYQAAKESIGLKQVINTDRYRLKLCLQEVQRSEGLLKEIGMQMKKLLEQIPCCEYILSVPGVGALSAAVFLGELGNPNHFNHPKQIIKYSGYDPQERDSGKRVGRKIISKKGRWLLRKTLFFMSMRVVQQCQFFKDYYRRKLENQNRFGQLLKKKEGLCAVAIKLIKVIFALLRDKRGYGENVSSLTLAA

SEQ ID NO: 321174 - protein, 335 aa, unidentified
MNQARMHVGVDVGKDSLDICYPNGDKEHIRNTKRCRATLIKKARALGAVVSFEATGPYDEALESECVASGVPAVRLDAWKTRKYAESQGMLEKTDSIDCEMIRDYAASLRPDQLHFVRERSAGYRKLKRAVSVRRNLLKAKALIASQLEGDLDAEIKSAIARAVASIDRQVERMDAVCVAAIRSDERMGAIAARFGQVVGIGPVLISTALASCPDIGSFTSKGIAKFAGVAPLENRSCTITKKPRPRRGRRDLRCALYMAAVSACRSNHRLRRTYEGLVARGIPKRAALIALARHIIVLMNYIAKYPDFNPEVDPKKAAQMALPKRRPGRPRKNP

SEQ ID NO: 321175 - protein, 330 aa, unidentified
MRKETEAGIDVSKDVLDVAVRRDERRLETARFDNDAGGHRKLARWLTRGGRTARVVLESTGTYSLDVALALHRTRGIAVMVANPRAIKQFTGALMQRSKTDLTAAVALRDFVIRMPFVAWQPPAAHVLELRGIARRIAALVVERTRERNRLHALAATAEASAVVSNDIEVNVRHLDRRIELLTEQAVALIADHATLHEAFERLISVPGIAAHSAVQLLPELLVLPSGMTVRQWVAHAGLDPRAHQSGTSVDKPARISKVGNAHIRRALFMPALVAVQHNQHVRAFFDKLVARGKTPLQAYVAVMRKLLHAIYGMLSTRTNFVATKFHAAA

SEQ ID NO: 321176 - protein, 372 aa, unidentified
MRFYTQQHRFYCGIDLHARSMHVCVLDQAGAVLFDRNLPARPEAFLRAIAPFREDLIVGVECMFAWYWVADLCQAEDIPFALGHALYMKAIHGGKAKNDRIDAGKIARLLRGGTFPVAYAYPKGMRETRALLRRRTYLVRRRAELLTHLQILNAQYNLAPFPKKLSFAANRTAMDIAQRFADPSVQKSAAVNLDLIDRLDELIGELELYLVRTAKVDDVQTYHRLQTIPGVGKVLALILLYEMHDVGRFGDAGPFLSYARLVRCLHESAGKKLGCGGKKIGNAHLRWAFAEAACLFLRASERAKRWKQQQAARRGEGKALAILAAKLGRAVYHMLRKREAFDEGRFWQGGPGRTGTGSSSLSRTEEACHAGD

SEQ ID NO: 321177 - protein, 321 aa, unidentified
MSNQESSISIVGIDVSQQWLDVHILPEGTKDRVSNDEHGFQALTQRLIARNPKVIVLEGSGGFELLPATYLAQAGLPVAIVNPRQVRDFAKADGTLAKTDSLDAQIIARFGEAMKVEPRFIPDLQRNELRAMVSRREQLIGMLKAEKTRQQRVFDQSVRQSHNRIMEAIQAELDSIDRQIDDLIQNSPVWRVKDQLLQKIKGIGPQMARMVIAALPEIGQVNRRQIAALVGVAPFNDDSGKRTGKRRIRGGRPHVRRVLYMAAIAAMRFNPQIKAFHDRLQEKGKTNKVIIAACMRKLLITMNATLKSEFSPVTCATAQIT

SEQ ID NO: 321178 - protein, 407 aa, unidentified
MIFVGVDWAEAHHDVHVQDETGKRLGGGRLPEGVEGVARFHDLVSGHATEVEEVVIGIETDRGLFVAALVAAGYQVFAVNPMSTSRYRDRHSTSGAKSDPGDAKVLADMVRTDRHNHRAVSADSETVQAVKVLARAHQSMIWSKGRQTNLLRSTLREFYPAALAAFDDLTSGDALEVLRVAPTPELGRGLSRSKIAAALRRGGRQRRIEERAREIQTALRAPQLAAPAAVSTAMGAAVSASVAVIATMSAQIAELARELEAGFEQHPDAEVVRSLPGLGTILGARVLGEFGDEPNRYCTAKSRKNYAGTSPITKASGTKRVVLARYARNDRLADAIYLWAFAALSASPGARSYYDGRRANGDTHHAALRALGNRLVGILHGCLQHHTIYNENIAWGHRNEQQINQAA

SEQ ID NO: 321179 - protein, 349 aa, unidentified
MAGKVTETAVVGGVDTHKDLHVAAVVDQNNKVLGTQFFSTTRQGYRQMLAWMTSFGALKRIGVECTGTYGSGLLRYLQNAGLEVLEVTAPDRMERRKRGKSDTIDAECAAHAAFSGIRTVTPKTRNGMIESLRVLKTCRKTAISARRVALQIIHSNIISAPDELREQLRNMTRMQLIRTLGSWRPDASEYRNVTNVYRISLKSLARRYLELHDEIADLDVMIAAIVDELAPELIKRNDIGYESASQLLITAGDNPQRLRSESGFAALCGVSPVPVSSGKTNRYRLNRGGDRAANSALHIIAIGRLRTDDKTKEYVARRVAEGHTKMEAIRCLKRYISREVYTLLRNQNR

SEQ ID NO: 321180 - protein, 401 aa, unidentified
MLRKACGVDVHRDGFVATILQSGGCESRSYEKTLNSMEAFKEWLRREKCRAVAMESTGVYWIPLYASLEDEFTVSLANAQRTRKVPGRKTDQSDSEWLAYLLRGGLIEACYIPDRDIRVLRELTRLRTKLVQNRTDYKNRVHKVLQRCNIRLCSKLRVFGKAGMMLLEGLMAGRGLDEVVDGSGSRTLTERRGELEAVVRDGLDEEDVFILRRCLGMMESLDEEIGRVDERIAMRMKSREADARRISRVPGVAQVSASAILAEIGDPGRFGNGKRVASWAGLCPSVYQTGGKNLTGKIKQGSKNLRRLMVQVAHAAARTKNSRLRLFYLRVAARRGKRKAIIALARKILCIIHHLLVNGEEYVEEGFVKYPRLRFRAVERMPLEMMAETLRFAGYIVRDPG

SEQ ID NO: 321181 - protein, 359 aa, unidentified
MNATTVAVDLAKNVFELAVADHHWKIVERHRLTRGQFERWFANRAVGLVVMEACGSAHHWARWFAGLGIEVRLLPPRYVRPYVKRNKTDAADAAALLEALRCADIAPVRIKSVEQQALQSLHRTRSLWMATRTSRINALRGFCREFGIVIAPGSRVGVEQIARVLADPHSAIPALLRATLPLLIEEIRLLEARIAHLETQLTAAARQSPACTTLLSVPGIGLLTATAMVAATGGSVAHFKSARHFAAWFGLTPKESSSGATRRLGRITKRGDRYLRMLLTHGARSVLRAASVAQRAGRPLDALRQWALAVQARANHNKAACALANKLARICYAVLRDQEPFASTRLNRKLTRQAFPMPA

SEQ ID NO: 321182 - protein, 426 aa, unidentified
MRVLYDRVAAIDVHKDMVKVAIRVPGAKRGTRKTDVLEFRTFYGVLQAMARELRGRGVTHVVMEASGVYTDPVYYALRELDFAEVMVINPAHAKALKGHKTDARDAIRLLDLYECGLLSGSYIPDPDLREVRDLARYRMKTVQARTSEIQRLQKTLETAGIKLSSVVSDVTGGSATAMIEALISGERRGSVMADLAQTRLRAAGKMADLSMALTGRFTDHHALMCRLHRDRITIFDDAVKDLDAKIAPLVARYAREAELLKTLPGFGDVIVAGWLGAIGPAPHQHFATASRLASWATICPGNYMSARKSKGGRTGDGGAYIKPLLIQAAWAAVRVPGRLQARFRRLVRKFGGPRNMGAQKRAITAIAHTLLKIAYGVLKTGKPYADLGADFYTRRESPDARQDYLMRQLRKLNPGCVITITPAEAA

SEQ ID NO: 321183 - protein, 351 aa, unidentified
MMIIGVDYHPSFQAIAFFMEETGECGEQELNHSDGQAEKFYRDLQQRGICVRVGMEATGYSRWFERLLAELGFQLWIGDPAQIKAKRVKKQKFDREDARLLLRLMREDNFPQIWVPGPENRDLRQLLWHRHRLVQMRTRIMNQLQALAMNEGYRWKKKLFSEQGRAQLEKLLLAPWASRRRQELLELLDRMNPTIEELTAAVEREARKRSDVLRLMTHPGVGPLTALAFVLIIGTWERFPCGKQIGNYVGMIPSEGSSAGKQRLGHISKQGNSLLRFLLVEAAQAAARINPDWRRRYIHLAMRRHKSIAKVAMGRRLAVRLYWMWRNGCEYSPSLEFGSYVGQLGTGHGVK

SEQ ID NO: 321184 - protein, 444 aa, unidentified
MDVQEPEEISQSEELVARVAAIDIAKSSGMVCMRLPHETREGRRTQQVWNVAATTNAILELGDRLICQGVTRVVMESTSAYWKPFFFLLEARGLECWLVNARDVKNVPGRPKTDKLDAVWLAKLTERGMLRPSFVPPKPVRELRDLTRTRTVLIEERSRHKQRMEKLLEDAHIKLSTVATDIFGVSGRAMLEALIAGERDPRALASLAKGRMAPKQQALTEALTGQFNEHHGYLCRMLLDTIDYLSAQIEKLSVRITTAITELPGPDSDDSGPGGSRPGPSLVERLDEIPGVGPAAAQMLLAELGTDMGVFPSPAHLASWAKLTPRTVQSGSKTSGRGTGKGNPWLKGVLGEAALAASRTDTFLGARYRRLVKRRGHKKALVAVARSILVITWHLINDPTARFTELGPEHHQRRIDPERKTHDLVRQLKALGHSVTLTPADQAA

SEQ ID NO: 321185 - protein, 346 aa, unidentified
MEQISRIGMDTSKRFFQLHGVNAAETVVLRKKLRRKEMVGFFEKIAPTVVGIEACGASHHWARLLQSFGHTVKLIPAQLVKPYVKRGKNDMADAEALCEAMSRPTMRFVPIKTAEQQAALMLVGLRDRLIRNRTQLSNAIRGYAAEFGLTAAKGVANVRPLLERIQADEGVPDLARELFAVQAEEYAQLEEQIAEISGKLMAWHKADECSRRLAKIPGIGPIGAALLMMKTPAPELFRSGRQFAAWIGLTPRDHSTAGKVKLGVITRAGDEALRAVLVSGATAVIKHAVGCKGRASPWLIDLLKRKPPKLAAVALANKLARIAWKLMVTGEAYAATSTPIASASAV

SEQ ID NO: 321186 - protein, 359 aa, unidentified
MNEIKYIGMDVHQSSTSIVVLNAAGRVVTTAVVKTHASALLAFIQGQRGTLHLTFEEGTYAAWLYDQLLPHVSRLVVCDPRHNALLQAGSKNDPLDAKKLADLLRLNALRPVYHGQHSLATLKELSRSYTTLVRDSTRVMNRIKALYRSRAIPCPGTKVYSPSHRASWMEQLKSAGVHQRAQLLYQHLDVLSRLRRQAKRALLAESRKYSVSRLLRPVPGLGPVRIAVLLAAVQTPFRFRSKRLFWAYVGLGLVTRISAEFAVVNGQLQRSRKAPAIRGLNPNHQRELKEIFKSAASAAVHRPGPWQQFYTQRVDAGRKAELVRLTVARKLAAVTLHLWKKGERYDVKHLKSTLQSTAV

SEQ ID NO: 321187 - protein, 425 aa, unidentified
MSEKIVVGIDVSKAFSDICILSPNNDIIKRLKISNDITGMKSLIYVLEKVEDEYKDRAIIIMEATAHYHQILANFFRKHNYEVIVINPIQSGALKNINIRKIKSDKTDAYNIALLYRIKNYNETITHSDTVNSIKKLCRQHKELTDEIVEHINRLIAFLDISFPDFKKVFTDLQGKTPLSLLEKYPTIQEVLSPENKQDIIQLIKENSHKSSSYAEVKYEKLLKAAEKSIEVCIVSLSSAVLIQTTVRVIFSLQEALKAIDDEIKRLSLLDEKFHKEIVLLQSIPGVGEYTACVVLSELGDISNFSKPKELVAFFGLDPGVSQSGTYNRKNNKISKRGSPHVRSILHMLAKSNVYPNRNREYLNPIMRAYFEKKIAEKPYKVVMCAIMRKMVQIIFAVLRNQKSFELRTPEEHQKLIREKSKLVA

SEQ ID NO: 321188 - protein, 314 aa, unidentified
MSSKVIVGIDVSKARLDCFGLPMQEAWSCDNGPEGIERLVHRLRELDCELALMEATGGYETQAATALAAAGLRVAVVNPRQVRHFAKALNKLAKTDRIDARVLAEFAHSVNPQVRPLPDEHTRELSELLARRAQLVGMRTQEKNRLGQAAGRLREGIKTHIKWLDVEITKLEADLSAKLHASEAWCDKRDLLLSAPGVGPTTTFALLAELPELGQLNRQRIAALVGVAPLNDDSGKHQGRRFTWGGRASIRSVLYMAAVSAMPHNPLIRVFYQRLREKGKPFKVAIVACMRKLLTILNAMVKHNKPWQSLPQTA

SEQ ID NO: 321189 - protein, 666 aa, unidentified
MIALLCLVLAVLTAPFKSRSRLEAGNAVLRHQLIVLQRKVRGRVRLTNNDRRFLIQLYRWFPSILQVLTIVQPETLVRWHRAGFRCYWRWKSRPRGGRPQIETDLRALIRWMSIENPLWGAPRIHGELLKLGFEVAQSSVAKYMVKRRGSPSQGWRTFLRNHAPDIAAMDLFVVPTIGFDLLYAFIIVRLDRRDLVWINVTSHPTAEWIARQITEAFPWDDAPQYLIRDRDQLWLSKPETSNRTPSLADFITITFDFRSHGEVDSNRYSGRVRLLPPTLEATMQTVAERPEAPTAIRTDLGAIFVSLELSRSTWLITSLSPGGGEKMSKHVVRGGDVTGLLERFAQLREKTRARTGKVFSFVVIQEAGLDGFWIDRVLQNEGIESHVVDPASIATSRRRRRAKTDRIDGEALVRALLAYKRGEPRVCVMVKAPTPEEEDRRRLCRERKVLIAERIRHVNRVKGLLFSQGISGYEPLRRDRRERLVTLQTGDGRLLPDHLKAQVCRELDRLELLLEQIKAVEAERDVLLAAQQAPAAMLLDIKGIGPEFAAILWSEGLFRHFDNRRQVASYAGLAPTPWQSGSVDREQGVSKAGNPRLRTTLIQLAWLWLRHQPQSALALWFEERVRRNGDRLKKTTIVALARKLLVALWKYVTAGVVIEGAVMKAA

SEQ ID NO: 321190 - protein, 348 aa, unidentified
MKQVTTIGLDLAKAVFQVHGVDASGVVRLRRAVRRRQVLSFVAKLPPCLVGMEACATAHYWAREIAKLGDDVRLIPPAYAKAYVRRNKNDPADAEAICEAVSRPSMRFVAFKTEVQQAAAGIHKVREMLIKQRTMLINALRGLMAEFGIVVAEGPHHVGELVAILADPADRRIPTPLYEGLLAIVETLRGLERRIEIVEKQIVGWGRGNQTCRHLITIPGYGPILSSAMAAFTVDPAAFGSGRHFSASLGLVPRQDGTGGKVKLGPISKRGNGYLRRLLVNGAMSVLCSKRGKEDPWLVKLLETKERKVAACALANKMARIGWAVMRRQEDFRGRRHNQPCPDGETAL

SEQ ID NO: 321191 - protein, 414 aa, unidentified
MKAQPESRTIHRYVALDLHKEYVMTGAMNAAQEWVLRPRKVEMMRFREWAAANLRQGDAVILETTGNVWDIYDIVAPLVTRTVVAHAGAVRQIAEARVKTDSEDIKRLLRLLIADIVPEVWVPPAHVRELRSLISYRNRLVKTATMIRNRLHSLLHRHNLKLGENGLTDADWWESQPLRALEKLQVRQELALLSRVEQSKAELETELAKMSMSAEWGKSAARLLQLPGLGLITAMTVLSAIGDIRRFASPKQLVGYAGLGAGIHQSGKEHQDKGITKSGRKELRWALVEAAWRAVRSSEVWKQRFDQLAKRRGEHKAITAIARKLLVTIWYVLTREETDRHASEEDLAYKMLVLSWELNEEARLGLTYKQYAKYALMKLGIETDMTRFVRKNVPRRVAPREEVLARMKELGLSL

SEQ ID NO: 321192 - protein, 408 aa, unidentified
MEVLYPRCAGLDVHARSVVACVRIAEGATVTSAHRTVSTTTAGLLDLAGWLTAQRVTHVALEATGVYWKPVWHVLEDSFTLVLANARHVRNIPGRKSDKNDATWIADLLALGLIRSSFVPPAPIQELRDLTRTRKQLVREITRHTQRLQKTLEDANLKLTEVVSDILGQSGRAILTALVAGETDPERLVDLTRGRLKASRETLVQAVHGRVTAHHRFMIQLHLTQITALETAVADLDARIGEALAPFRAAVSLLTTMPGVKSTAAAVILAEIGTEMSVFPSAGHLLSWAGLCPRLDESAGKRRSTRTRQGAPWLKATLVQIAWPAARKKDSYFHAQFLRLKSRRGPKKAILAVAASMLTDVYYMLRDGVEFQDLGDQYFAQRDKERVTKRLLQRLRDLGVDVEVKNAA

SEQ ID NO: 321193 - protein, 322 aa, unidentified
MNGSIALGIDVAKAKLDCALRLPDGKFKNKVVENNPKGFKTLTEWLEKHGATTAHVCMEATGVYWEAVAEYLVSEGMTVSVVNPAQIKAFGGSQLVRSKTDKVDARLIAGFCAERNLEPWQAPTPSEQALRAMALRLDSLQVMRAQESNRLEVARDAVKPGIVSHIEWLDKEIKALAKKIGEHMDGDADLKDKQTLLDSIPGLGERTIAILLAFFADLDRFGNARQAAAFAGLDPHHHESGTSVKMKPRMSKVGHAFLRKSLYMPAMVALYKTAWGIRFRERLAAAGKPPKLIIGAMMRKLVHVAFGVLKSGKTFDPALHGC

SEQ ID NO: 321194 - protein, 348 aa, unidentified
MKYIGLDCHKQYDHATMIDTETGEITAKRLLHIKEEFKAFIGDRASTRMVIESCRDWSKTYELSDDLVEEVILAHPLKVKAIASAKVKTDAVDSRTLAQLLMADLIPQAHLRKSDNRLKQRVIRHRAFMVVMRTRVKSRIHVLVDSQLLPPDKLQTKPINLFSKKGMEWLSSLEWAKAEDKKLVESHLRTMEAINQEISITNDMVKEIYEKDQDAQLLATIPGIGVTLAMLISTEIDGIDRFPSVSKLCSYAGLVPSTHSSGGKTYHGKITSEGNRWIRWALVEAVVPASYADVEIRERLNTLRKKKGANVAKTAIARWLLKVVYHVLKKRRPYITAYNNIAKAGVAF

SEQ ID NO: 321195 - protein, 351 aa, unidentified
MKKVSTVATKQSRNISRQKLTIGLDLGDRNSWYCVLDEAGTIQLEQRVRTTAKALQEVFGAMPRSRIALEIGTHSPWISRLLSDLGHEVIVANARKVRLIGQSRKKDDRLDAQTLARLARIDPELLYPVKHRSAEAQADLMMIRARAGLVRARTGLVNTARELAKSYGERLRGCNVRDMDPEKAENLSPELQRALEPLLATIEELSERIVEYNDRIEALAQASYPQVELLKQIKGVGTLIALTFLLTLEDPHRFGKSRDVGGYLGLQPGRRKSGESEPQLHISKEGDPYLRTLLVQGAQHILGPFGMDCDLRRWGLKLAERWKKRKEASDRCHGQKACGVAASSVGKWRSV

SEQ ID NO: 321196 - protein, 342 aa, unidentified
MQVTTIGLDIAKNVFQVHGIDAAEKVVVRKQLRRRQVLEFFKALPPCLVGMEACATAHYWARELTKLGHQVRLMPAKDVKAYVKRNKNDAADAEAICEAVRRPTMRFVQIKSTEQQGRLMLHRARDLLMRQRTQVINAMRAHLAELGIVAAQGRDGIKELLKIIASEEDARLPVDAHASLVVLAAGLHAVQTMIRSIEKRIMVQHRSNEASRRLETIPGIGVIGATAIVATVPDPKVFGSGRDFAAWIGLVPREDSTGGKQKLGPISKRGDRYLRRILVVGACAVLRYARHKPEKYPWLTQLLARKPFKVVAVALANKMARIAWALLAKGGTYRVPALAAAA

SEQ ID NO: 321197 - protein, 399 aa, unidentified
MKSPCIAVDVSKGKSYYQGFIEIDKPASKATSMMHDLEGFKSMYQLGQVLRQTYGDVIYVFESTGIYHKALETFITNQEEKCIILNPLEASKIRKTDLRSTKTDARDCKSIAKAYFMKDYRLHSPKDELYGNLQRMNNHYSFLVQQLREMKVHFRNALDIVYPRFDEMYPDPYLDIPVAVLKRYSHPDELKGKRVETMMKYIMKDTIYRENKSMDEAKKLKAYIENVSSGCRSNAYEVTILRTMVSKISEQIVEVELCLDDMRNLVIDLPMYHQLMSIPGVGDNLAIRLIGELGDLDRFDKSEQLVAYAGIDPRVYQSGQMTGEHLHITKKGNKRLRTLLFLAVSSNVRIGKTNSILDFYNKKRQQTNPLVYKAALIACANKLLRIIFGMNKSGRNFHK

SEQ ID NO: 321198 - protein, 358 aa, unidentified
MNRNTGMNAGQIIGTMNGRQVVGLDIAKHVFQLHTVDMGTGEVINVQLKRAKVIEHFANRQPCLIAIEACGSGHHWARELMALGHTVRLLHAKAVRPFVSGNKTDATDARAIWLAAQQPGVKFVGIKTAVQQATLTLHRQRELLMKMRTMQTNALRGLLYEFGATFAKGRNALFKDVEQALEELSPQLPQMVRDSLHEQVERIKALSQDMQTVEKRLALQLKADADMQRIAQIPGVGLLTATAAIATMGEASAFKSGREFCAWLGLVPSQTGTGGKVRLGSISKRGDTYMRTLLIHCARSVLAHTKEPGACLEGLKSRKPANVVIVAQAAKMARTIWAVTAKQQDYQRGFQSVRPQTA

SEQ ID NO: 321199 - protein, 310 aa, unidentified
MDVFVGIDVSKDRLDVCVRPSGETFAVTRDDQGLERLVERLRALSPALVTLEATGGYETVVASALAAAHLPLALVNPRQIRDFARSTGKLAKTDRLDAAAIAHFAEAIRPPARRVADGEAQALGELVARRRQVMEMIVAEKNRRRLAGQRRVLKAIDRHVDLLQAELSELDRDIDGAIRKSAAWQADADLLASVPGVGKATLRTLIAELPELGRLDRRKIAALVGVAPINRDSGLARGRKTIAGGRTPVRTALYMAALVASRANPVIAAHYQKLRTNGKAAKQALTACIRKLIVILNAILRDRKPWSLPA

SEQ ID NO: 321200 - protein, 349 aa, unidentified
MAVTIVEEARAITGGVDTHADVHVAAALDPIGGLLGAGEFPATAAGYARLLGWLGGFGTVCLVGIEGTGSYGAGLARHVTAAGVRIAGVDRSDRQDRRRQGKSDPLDAVSAARAAQSGRARGASKGRDGSVEAIRALMVAKRSAAGERTRTNGQARALVLTGPDDLRARFAAHTPAALVAGLGSLRPRPGGDVAGHATRVALRELGRRAQFLDTQLERPGELIVPLVTAHAPGLLALYGVGPNTAALLLIAAGDHPGRLRSEAAWAHLCGAAPIPASSGKVTRHRHCPGGDRQANHALWRIVFTRLGSDPATRAYAERRTAEGKSKAEIIRCLKRYVAREVYRYLRPGG

SEQ ID NO: 321201 - protein, 349 aa, unidentified
MRFYTTQHQFYCGIDLHARSMYVCIQDQSGKILLHRNYRAGPDALLGAIDQYREDLVVAVECVFTWYWIADLCSREGIAFVLGHALYMKAIHGGKTKNDKIDSNKIAALLRSGMLPMAYVYPQGMRSTRDLLRRRLYLARQHAELQAHIQNTNTQYNLPYFEKRIDRNSNRAGIAMRFTDPAVRTSVEVDGALMDALHQQILAIERQINAQVPEHDPVALHLLRSIPGVGKTLALVILYEIHDISRFPAVGNFISYARLVKCTHESGGKRKTGPNNKIGNVHLKWAFSEAACLFLRKNERGKLYHQRLVSRYGKAKALSILAQKLGRTVYTMLKRRTPFDAKRFFETVG

SEQ ID NO: 321202 - protein, 342 aa, unidentified
MNHYAGIDVSLEYSSVCIVDGSGKIVREAKVASEPEALIAWFGSLGLEPERIGLEAGPLSQWLYAGLKKAGLAAELLETRHVHDAFKAMPVKSDRNDARGIAQLMRLGWFRPVHCKSMEAQEVRVVLTARKLVQAKLRDVENGLRGLLRGFGLKVGKTSTTGFAGRVQELVSDHPSLEAVAAALLSVRAVLLREFKAFERQVRRMARSDGNARLLMSTPAVGPIVALTYASAIDDPTRFRSSKRVGAHFGLTPKKYQSGETDYTGRITKIGDASVRTALYEAAHIMLTKPVRGCSQLKSWAMRIAKRAGMSKAKVALARRLAVILHRMLATGTLFNAAAAAA

SEQ ID NO: 321203 - protein, 350 aa, unidentified
MFPIVAETYQYVVGVDTHARKHVATVVNNLGVVIATRTVHVTAKQMQQFANWVVKITDGNVLFAVEGTSSYGETLTKLLLERQLQVIEVKPPKAKSRGGDGKTDQIDSELAALSVLRQPIDRLCTPRLGDTRRSLRIVLGARRQLVGQQVASKNALMALLRGIALDVDARKPLSQATYKTISLWHIQGSSTEVQMIARIEAKRIAGDVTRTQARLEQNKQTLISLVGSLAPQLLAEPGIGPVTLAQVICSYSHKGRVHSPEAFVALAGTAPIPASSGNTKHYRLNRYGDRQLNHAFDTIVLARMRSDEQTKRYIAKRTASGLSKRDIKRSLKRYVARSLFKQLENCDITA

SEQ ID NO: 321204 - protein, 402 aa, unidentified
MEEIDPWIGLDVGKSDHHATVVDAAGGRLFDRPVRNDEAAIEKLLDDAGPHAALVIDQPGSIGTLAVAVARRRGFPVAYIPGLVMRRASQLYPGEAKTDRRDSFVIADTARIHRARVHWLTPSDELLQELSVLGGYDDDLAHDRTRTANRLRDLLLQASPAVERVLGPRLDHTAVRTLLERYPTPTAMRAAGKRRLLRVVQPKAPRMGARLVDDLIAALQAQTVEVPAETTIGRVIRDLATELTRLAASREQLARDIEAVFTRHPHAPVLLSIPGIGARTGARILTEIGDVSRFPTAGHLAAYAGLAPVTKQSGSSIRGEHRSRRGNHRLKNALWLSAFCSLHHPPSRDYYAMKRSQGKPHNAAVLCLARRRCDLIHKMLRTGLTYGESPAGKTGSPIPIST

SEQ ID NO: 321205 - protein, 340 aa, unidentified
MSDVSIIGVDLAKQVFQVHGARADGSVAFRKKLTRTQFLPFIAAQPECVVAMESCATAHGWAREISDLGHEVKLIPPQYVKPFVKRQKNDRADAEAITEAAARPTMRFVEIKTVEQQSRGMLFRSRQMFVSQRTQTINALRGHLAEYGVIGPKSKAGLKTLRAAVDNEDIEIPDIVRASAELYLEHIDTLAEKIAHFTKQLEAEAKSSKLIKRLKTMPGVGLQTALAIEAFAPDMSCFKKGRDFAAWLGLVPLQKSTGGKSRLGKVSKMGQKDIRSLLIVGAMSMVTAATRFGVKPGSWLARMLARKPKLLVAITLANRMARGIWAMLTKREDYLNPEAA

SEQ ID NO: 321206 - protein, 344 aa, unidentified
MKHYVGLDVSLKETAICVVDENGVVIREGKALSEPEAIGAWLNESGLPIVKIGIEIGGLARWLYSELRAAGLHAVCIDPRRLRGVTKTMPIKTDRNDARAIAQVMRVGWYTVVHIKGDVSQELRMLLNNRKTLLIKQIDIENEIRGVLRVFGLKLSGRIPQATFEQQTNELTDGHPRLAAMLRPMLVARAALREQYGVLHKMVLEIVRREPTCQRLMTIPGVGALTAITFLTTIDDPDRFQRSRDVGAHLGLTPRKYASGETDRNGAISRCGDVMLRTILYQAALALLTRTKRWSALKAWGVRVAKRRGLRRAVVAVARKLAIVMHRIWADGSEFRWTREEATA

SEQ ID NO: 321207 - protein, 380 aa, unidentified
MNKTCGLDVHKDSLFACILDEQGKKIFEKRYGTLTPDLDELRTNLLENGCGRVAMESTSIYWMPIWHVLESDFELKLANPYFIKQLPGRKSDVKDAQWISECLQKELIRGSFVANDVMQQMRQYTRQHRRQTKSRVRLEQQLDNQLQRCNIRFSNYVSNQGNNVSMRKIIRAIIGGERDPVKLCRLVHGRTKNKHGETVITNSLNGVIQQADVEMLKQCMEQIELLEKQQATCLNHLEELANKYFAEEISLLCTIPGVQKFSAWCILSEIGNDMDVFQKANALVGWSGLRPRNDESAGKIQSRKTLHGNKYLRQILVEISWAATKSGKSFLGKKYNVLSKRMKSQKALLAITRKILVIIFNVLRTKQPFDPKRNIQAVVA

SEQ ID NO: 321208 - protein, 384 aa, unidentified
MYKHNILFIGLDTHKVSTEVAHVEDQRGAKPVHYGKVKTTKAAITKLARQYQSKYPHATLHFVYEAGPCGYWIYRLLTSLGHCCYVVAPSLIPKKPGDKVKTDKRDALKLAKLLKDEELTPIYVPEPEDEAIRDLSRARETAMKDLKDSKYQLKALFLRNNISCKVNDNWSLQHLRWLTELILPHPSQQIVLQEMIQIITERIQREKRLANELFHQVKSWRFYPVVKALQAVRGVRLLIATGIIAELGDLRRFDHPRKLMSYLGLVSKEHSSGDNRRLGSITKCGNGRARRLLVQGAHTYKHKANISTELQKRQEGLPKEITDIAWQAQLRLCRRYNRLLSRGKHRNVVVIAIAREMAAYLWAIAREVVITPVNTRLRISRVPA

SEQ ID NO: 321209 - protein, 460 aa, unidentified
MKNTKQRKQIKSKRISKHLEQVNLFAAGIDIGSQSHYVSVPEELSPQSVREFPCFTGDLNRMADWLVEMGIQTVAMESTGIYWIPAYEILEERGLIVLLVNSRHIKNVPGRKTDVLDCQWIQQLHTYGLLEGAFRPEEETVALRTYLRQRETLTQQSSDQIRRMQKALRQMNLLLDNVVSDIDGVTGMKIIRAILEGERDAVVLAEYRDGRCKKDKKTIAASLEGHYREEHVFSLRQSVELYDIYQTKIIDCDQAIQAQLDKMESKGDKKDLPPSKKSKSKNTPKFDVRGDLYQMTGVDLTRIDGLNESSVLKILSETGSDISAWPTEKHFCSWLGLSPGNKVTGGKILSGKTKPSANRAAAAFRLAAFGLLNSKSALGAYCRRQRTRLGAPKAITATAHKLARTFYSMLKHGTEYVDKGQDYYEKQYQERIINNLKKRATEMGFELIAKDSSMLEISKA

SEQ ID NO: 321210 - protein, 339 aa, unidentified
MIGCDYHPSVQQIAWVNTETGECGERRLTHCAEAEQFYRDLKQKGFRVRVGLEATGHSRWFERLLAELNFEVWIGDPAQIRAKQVRKQKNDRRDAEHLLKLMLENHFPRLWVPTPQDRDVRQLILHRHRLVQMRTRVMNQLQAIAMNEGVRRKHGLWTRQGRAQLEALQLPPWTSRRRQELLEVLDRFNPSIDELTKAIEQEAQRRPEVERLQTHPGVGPITALAYVLVVGTPERFACGKQVASYLGLIPCEDSSADHWRLGHISKQGNALLRFLLVQSALSVAHVEEQWRRQYVHLSMRRNHAIAKIAVARKLAVRLFWMWRRKWDYEQLKKFGSHAG

SEQ ID NO: 321211 - protein, 408 aa, unidentified
MDVIVERVGALDVHKAQVTACVRVPGKEGRAHEVAEFKTTVRGLLVLRDWLASHGVTQVAMEATGDYWRPIWHVLEDEFELLLVNARHVKQVPGRKTDVKDAEWLCQLAEAGLLRASFVPPKPIRDLRQLTRYRKAQIGERQREANRLHKTLEDTGIKLDCVATNILGVSGRLMLDALVAGTTDPDVLAELARGKLRKKIPALREALEGRFEPLHALLVGSILAHLDFLDEQIERLSDAIEQQLRPFAAAVELLRTIPGVERRTAEMIVAEIGTDMSVFPTAGHLASWAGQCPGNHQSAGKRKSGRTRKGSKWLNTALKEAAMAALRTNDSYLQALYRRKKSQLGHGRALGAVKHSIICACWQMLTTGELYTDLGGDYYQRRDPARQTRRLIAQLERLGHTVTLNEAA

SEQ ID NO: 321212 - protein, 351 aa, unidentified
MLIIGVDYHPSFQQIAFFDQETGECGERRLNHSDGEAEKFYRDLQQRGVGVRVGMEATGYARWFERLLAELGIAVWIGDAAEIKTKRVRKQKTDRQDAQLLLKRLLENNFPRVWVPSPENRDLRQLLWHRHRLVQMRTRIMNQLQALAMNEGTRWKKRLWSEQGRSQLEKIPLAPWASRRRQDLLELLDRMNPTIAELTAAVEQEAKRRPEVLRLMTHPGVGPLTALAFVIIIMTPERFPCGKQIGSYVGLIPCEDSSAGRQRLGHISKQGNTLLRFLLVEAAQAAVRCDADWRRRFLHLAIRRERQIAKVAMARRLAVRLYWMWRNGWEYSQAVEFGSHAGQLVTGHGVN

SEQ ID NO: 321213 - protein, 388 aa, unidentified
MIYAGIDVAKDKHDCLIVDSNGKNLSKVFTITNNKQGFDELFANLRTHSKDLSELKVGLEATGHYSDNLLEFLISNDLPTTVINPLHTNLYRKGLSLRKTKTDKVDAHSIVTMLRTECLKPYSQSSYHVRELKSLTRYRFSLVQDCARLKSSFARLCVILFPELEKLVPSLHMASVYALLAELPNARAISECHLTRLTNLLSEASKGRYSKDKAIEIRNAAKVSIGSYSEVKSLELQQTLQLIQMMEKQIAQAEARINPIVDSLHSPIMTIPGIGYRMAAIIIAETSNFANFDKAEKVLVFAGLEPSVYQSGQLTSTHAKMVKRGSKYLCYALFNAAKYVCPWDEGFRQYLSKKRAEGKAYNIAVSHAAKKLTRVIFHLVKTNQSFSR

SEQ ID NO: 321214 - protein, 430 aa, unidentified
MKSNTQNAKIEAITEKTLVLGIDVGSETHYARAFDYRGIEYSKKPFKFSNTEAGFVTFKEWILDLKERHEKDKVIPGMEPTGHYWFNLGKFLQDNEMKPVLVNPHHVKKSKELDDNNPTKNDRKDPKVIAGLVREGRYMIPYLPDGVYADLRTASNIRFQLQAELTRIQNRISRWFNIYFPEYKTVYGKPDAKSGMLILKAAPLPEDILTLGIDGVNQIWRDAKLRAVGKARAKTLIEAAGHSVGSKEGAVSARMEIRMLLEDYESRNMRLQEVMVLIEELVKGIPMAEKLLEIKGVGIRTVSGFLAEVGDISRFNNPKELQKLAGLALVENSSGKHKGGTTISRRGRKRLRYLLFEAAMSLVAKNPEFRELHNYYTTRRRNPLKKMQSLMAVATKLIRVFYAMLTKGVDYDPKKMVSDIRRPEAYLQAA

SEQ ID NO: 321215 - protein, 355 aa, unidentified
MNSEKYIGLDVHQATISVAVMDSRGKVVMESILETKASTILEFFAGLRGTLSVTFEEGTWAVWLYDLLKPHVAKVVVCNPRKNALLKDGNKSDRIDARKLAELLRLDNLKPVYHGETGMRMLRELARSYLTIVKDLTRVMNRLKAMYRSWAIPCAGRDVYYTRHRTEWLGKIREAGVRRRAEQLYQQLDMLQHLRQQARRELLAESRKHPITAKLRKIPSLGPIRSALAVALIQTPHRFRTKRQLWAYSGLALETRTSGEHRYVRGQLRRSKKQVSIRGLNKDHNHDLKGLFKAAATRASVQPGPFQDFYQRSLAKGIKPTMVRLTLARKIAAITLTLWKKGENFDAEKLKSQAA

SEQ ID NO: 321216 - protein, 343 aa, unidentified
MEYGAIDLHTKESEIRIIDEKGVVVFERRIATTRARLTDVFGCRAPLRILLESGTGSEWVAHHLDGLGHEVVVADPNYTPMYGQRTRRIKTDRRDVAALAEANRLGIYRAAHRVSAPQRDVRRRLRVRDQLVHVRRQAINLMRAQLRSEGVRVPTGAAETFAARFRASEASAAVREAMAPLLELLAALAPLLGQAEQWTRHAAKADPVARRLMTAPGVGPVVALAFQATVDDVGRFATPGAVTSYLGLVPREDSSGERQRKGAITKAGPSRMRVLLIQSAWHLWRSPAGSATLHAWARRLGDRRGRRIAVVALARRLARILWAMWRDGRDFEPARVGRLAVAA

SEQ ID NO: 321217 - protein, 388 aa, unidentified
MLFDHPSDGPAAIRTHIGAIFVSLELSRSNWLVTSLSPGKGEKMSKHGVTAGDVAGLMKLFAGFKRKAAIRTGQNYPIITIQEAGLDGFWLHRVLQQERIESHVVDPASIAMPRRRRRAKTDRLDGETLLRALLAYKRGEPRVCAMVVAPSPEEEDRRRLCRERATLIAERITHVNRIKGLLFSQGISDYAPLRRDRRSRLETLRTGDGRELPSHLRAQIGRELDRIELLLEQIKAVEAERDALLAARKPAGEEAAPDTVTMLLALKGVGANFASVLWSEAFYRQFANRRQVAAYAGLAATPWQSGGIRHEQGVSKAGNPRLRTTMIQLAWLWTRHQPQSALTRWFKERSPQGRKRAIVALARKLLVALWKYVAQGVVIEGAAMKPTA

SEQ ID NO: 321218 - protein, 309 aa, unidentified
MADKPVVGVDVAKGWLDMCVSGACERIDNTAAAVLSWLDRVRPGLVACEPTGGYERVLLDALRARAIPFVRVHPNQLVAFRQSQGMRAKTDRIDARLIYAFVCHRLSQRGLHTAIPGDPALAALAARRRQLVETLHAERCRLAMAHLNVLRDSHQDVIAALSHSLDLIESELAATIADNPHTQKLAALLQTIFGIGPAVATALIADLPELGLLSVKQIAALVGLAPHTNRSGKAQYREPTGHGRPGVRRALFNAARAAIRHPSPLRDFYDRLVQQNQRPGKVALTAVMRKILVCANAVARDQQPWKRAA

SEQ ID NO: 321219 - protein, 348 aa, unidentified
MNHYAGIDVSLECSSVCVVDANGKIWREARVASEPEALIAWFHSLGFGLERIGLEAGPLSQWLFAGMKAAGLAVELLETRHVRKAFEAMPVKSDRNDARGIAQLMRLGWFRPVHCKSMSAQETRAILTARKLVQSKLHDVENSLRGILRGFGLKVGKTTEREFAGRINQLVTDHPHLQRTVDALLAVREVLRTEFAAFQKQTRKMAQSDSRTRLLMSTPAVGPIVSLTYASAIDDPARFRSSKQVGAHFGMTPKKHQSGETDYTGRISKIGDSSVRTALYEAAHIMLTKPVKGCSQLKSWAMRIARRAGMSKAKVALARRLAVIMHRMLADGKPFNDAAKAKIMAAAA

SEQ ID NO: 321220 - protein, 338 aa, unidentified
MSKLSIIGIDLAKNVIQLHGNDHHGHTRFTRKLKRKEVLAFMVSQPQSLVAIEACGGAHYWARALQAQGHEVKMIHPQYVKPFVQVNKNDARDAQAIAEAAARPAMPTVAIKSIEQQDIQAIHRVRERLVKEKTAISNELRGLLGEYGIVMAQGHKSIRKKVLDILEDAENGMSMEGRAIINDLREQWLDREERIGQYDNKLKLIAKENGVCVRLQTISGIGPVNATLLYSHTGDHNHFASGRHLSASLGLVPRQHASGGNENLLGISKQGNKHVRKQLVHGARAAYKVLLKEDNTSRLGLWVKRMEGKHPNKIIVALANKMARIVWALMKNETVYQA

SEQ ID NO: 321221 - protein, 421 aa, unidentified
MGHIKTKYTYVGIDSHSDTHTAVLLDCFFDKLGEAAFKNLPSCFPAFLEEAGRLRADGTELLFGLEDTSSYGRTLALFLTERGMRVKHVNAFLVAMERKNQTFTQKTDSVDAECAARVLLSKFDALPDAAPDSKQWALRTLVVRRAFIVKNNASLKNHLHSLLMQHYPNYRELFPEIDSKAAIAFFMRFPSPSALKGTPLKELAEFLREASDGKVGAGKHSSLRAQEILDTLQNTSVPFQEIRDESVRSTLRQIQANIQEIEQLETSIALFLEQFSCTLTSMNGIDVVSAAQMLSCIGDVKRFSTPAKLARYAGIAPVTYASGKKNLQFSNHRGNRELNSIFYLLAVRLIGSASGTVVNPFFYDYYRRKISEGKTKKQALKCVQRRLVNIVWTMLTRNEEYVNPPMFTLRKEGAVDGNALE

SEQ ID NO: 321222 - protein, 334 aa, unidentified
MKYQFVIGMDISKHSFDMAILLADSPENIFHNAFSNDENGFKDLMFFVNETMPDFDIKKALFCMEATGLYCKALLQFFHTRQANVWVENAVQIKRSLGVKRSKTDKVDSIEIAKYAFKNTELVRLWKPSGVVLEKIKQFATLRERMVVTQKRLITPINELRDAGQKQMADLLFKSIKKSITAIDADLKKIEAKIMECLKEDASLHHVFSLITSVVGIGFVTAVNLIIHTQGFNIMCDSRKLACFCGVAPFPYQSGISIKGKTKISHMANKKLKTNLHLAALSAIKCDPEIKTYYEKKVLEGKPKMSVINAVRFKLLARVVAVVNKNEAYVKKAA

SEQ ID NO: 321223 - protein, 375 aa, unidentified
MINRKVPQEEAEIRAALEEAGDFGLALVVVDQFGAFGRLVVGVAKSMDIPVAHMSPRRFRQVAETYGEDKFDEKDAFILADASRTTPRNIEFVDNRAESMAEIKVLSSRRDDIVEERTRCYNRLHDFIHQVSPPLEELFSKRKLHNDLEIRLIARYGGPIGFRRAGRARASTWAAELKYHCVDGPKKVEQVFNVLDRQTVMLPGAAVIEEQIRSIASRIIELLAEEKRLNLMIEQRAKMIPEVDLLQSIPGVGPVYAALIAVEIGDIGRFRDSNHLASYAGVAPRKEESGTSVHKRRKRKGGNRRLKNALMQSSQRSVQCDSLARAYYERKRAEGKKHLQALRALARHRVTVIFAMLNEGTFYEPPVEVDENGRG

SEQ ID NO: 321224 - protein, 331 aa, unidentified
MEQQYIGVDLHKAFFQACALRASGERAWERRFVRSEEGLAMFREQCSAATHVAVEATGPTWSFVDAIRPTGAAICVVDPRKTRLKAGFAAKTDRLDARRLADALRRESVVSVYVPPPAIRELREVCRGRYQLVRLRTRLTQMIRALLLRAGVEDAPVAQLYGTRGAAWLAQVQLPIEAERTLRRLERLLHVVHAEVVEAQAVVVTHAAADPIARALDTMVGIGPVRALTIRAEVGDIARFRRGGRELASYAGLVTRVDRSAGHCHYGRITREGSPWLRYVLVEAAVNAIKRPDGIGEWARRLARRKGPLIARVALARVLCRDIVRTWPRSA

SEQ ID NO: 321225 - protein, 383 aa, unidentified
MNQVKYGCGIDIAKEKFDACLGLFDINQGFTKVGTKQFSNTSKGYTQYMEWVKKQCKHFLPVLHLMEATGIYYENLALYLYNKQESVSVILPNKAKKYKESIGLKTKTDGVDALGLSRMVCEQVLPLWQTANPKFYELRLFTRQLESIVVQTGSVKNQLEAVSLSMYPSKQIEKLLKQQIKFFDKQKAELLQTISKIVEEDELLKRKFANILVIKGLGIQAVATIIAETNGFELFKNISQLVSYAGYDVIENQSGKHIGKTKISKKGNGKIRRCLHFPALVVVRCKVKPFVQLYERVYQTSNIKMKGYTAVQKKLLVMIYTLWKKDELFNENYQQDKISKEDEKEFSFVSASQKQKQKKVAPVKTEATQDKHPSKNRSMPSFV

SEQ ID NO: 321226 - protein, 376 aa, unidentified
MRNDSTVYVGLDVHKESITVAYAVDGGEVESLGRIGTTKTGIDRLCERLRSKARHVRVVYEAGPCGYGLYRQLVQKGFDCMVCAPSLIPRKPGERVKTDRRDAIKLVRALRADDLSAVYVPGTEDEAFRDLARAWASARDDLRQARQRLKSFLLAHGVRYIGSANWGPAHRRWLSEYSFGNEWQQLAFDEHRRTIEDRLAQCDRLEVALREAVFNWRFYPAVLGLQAMRGVQFVTAVGMLSELGDLSRFEHPRQLMAWLGVTPSEHSSGGKRRLGGITKTGNSYARKLLIEAAWSYRHPARVSRDIQCRHEGIPKALIDRAWDAQIRLCWRYRKLAARGKHVNIAAVAVARELAGFIWDIGRLAMSLAVPHREQAA

SEQ ID NO: 321227 - protein, 403 aa, unidentified
MNNVAGIDVSKGKSMVSVLRPFGEVVAKPFSIGHTGSELKELADYLKSLDGETRVVMEHTGRYYEPVARFLHEEGVFVSAVNPKLIKDYGNNTLRKVKTDKADARKIARYGLDNWAELRQHTPMDTIRMQLKTLNRQQSLYAKTKTMMKNNLIALLDQTYPGVNALFDSPVREDGSQKWVDFATAFWHVDCVRNMSLTAFAERYRKWCKRHGYNFSQSKAVEVHTGAQDLIAMLPKDALTKTMVRQAIDALNAVSASLERLKAEMQALAAQLPEYPVVMAMHGVGDSLGPQLMAERGDVARFTHRNAITAFAGVDPGADQSGTHEAKSTRVSKSGPPELRRALFLVMDCLLKTQPQDDPVYRFMDKKRAEGKPYLVYMTAGANKFLRIYYGRVKEYLASLEEN

SEQ ID NO: 321228 - protein, 407 aa, unidentified
MEVVYPQCAGLDVHQHTVVACARVGAGSAVTRDVRTFGTTTQELLALSDWLTAHGCTHVAMESTGVYWKPVWHVLEESVELILANAMHIRHIPGRKSDVNDATWIADLLAHGLIRGSFVPPAPIQELRDLTRTRKQLVREITQHTLRIQKTLETANLKLTGVLTDILGVSGRAILQALVAGETNPDRLAELARGRLKASRADLAAALHGRVTAHHRFLLQLHLAQIDALDGAVRAVEARLGDALAPFRAAVDRLITMPGVSETVARVLVAEIGVDMTRFPTAGHLVSWAGLCPRLDESAGKRHSTRTRPSNPWLKTTLVQAAWAAARKHDSYLRAQFLRLKSRRGPKKAIIAVAASMLTAAYYMLRDGVDYRDLGAAHFDRRDKATLAKRLLARLHDLGFNVELRAA

SEQ ID NO: 321229 - protein, 331 aa, unidentified
MKHKHAIGMDVSKNTLDVVCHLNAAYIQVENNQNGFKKMLSWAKRQVSRELDQTLFCFEHTGLYSRELTAFCQMQQLCFCIESPVNIKRSLGLKRGKDDKVDAREIAHYAYLRRDELKPYRLPADKVQQLQLLLTQREQLVKQRSGLISIQNEQKRVLTIKQHQVLFDVYQKTIAYLSKQIENIEAELKLIVSSDPEMKKNFRLITSIKGIGDIIAYYLLVYTDCFTRFETWRQFSCYCGIAPFDHQSGSSIKNGKHVHHIAHRKIKSLLYLAAATAVQFDQELKAYYERRIKEGKNRMYTLNAVKNKIVARVFAVITRGTPYVELYQHAA

SEQ ID NO: 321230 - protein, 417 aa, unidentified
MMRVGIDAHKKSCTTCVFQDTDVLSSSPSETFVFKTTRQGVVEFMEKIPGGAMVAIESSTTGKAISKLLSGKYEVHMIAPPERKPSIKTNKRDAERIIKEDMLGYVRRSYIPSQQIEELRLIVSKQMDVGGKISAVKNQIHALLERNLLQSEFEELSDIFGVEGLERLGSLELPKHEKLTLAMHLEELKLYASQHRQIETEIAKTAEADVDCKNLMSHPGIASFVAVAIKARTGDASRFPTKKQFCSYAGVVPKADNTGEHVSEHNRVKHGDDVLKYALTCGVNAAVHANADSAVKRFYLKHLAKGKSPQDAEVAAARKLACIVWKILTSKQRYVEEDRYLTARKMRRLSQTARRPLKHATNPEDVSTLTASLKSETDVLERYPEEMHVMSMHKRSRSKHNPSRIKGASEAGGAVTN

SEQ ID NO: 321231 - protein, 315 aa, unidentified
MNTEIINVGIDVSKLNLDTYHSSQHLQIPNSKPAIKRWLKSLPKAAKLICEATGGYEALLICLAHQAAIPVARANARQVRDFAKGKGLYAKTDRIDAELLADFGLCNNPQPLKASDPLQLELCALVKYRQSLLIQITQNTNLTETNHDKELLFLIAKTVTFLKKQVKQIETQIQFKIKNSAALNSKASRLQQIQGFGVITSASLLALMPELGTLSENQAAALAGVAPFNCDSGQHRGQRHIQGGRHQVRSTLYMAALVASRFNPILKALYLRLLARGKPKKLALTVLMRKLIILANKLLQNSQFSLVAYSLWRTT

SEQ ID NO: 321232 - protein, 440 aa, unidentified
MAKLLNSMAAGIDISSRDHYVAVPKECATKVRVFQSFTADLHRLAQWLCSLGIKTVAMESTGVYWFHLYTILLDYGLEVYLVNAKAVKHVPGRKSDISDAQWLQHLHACGLLNPCFQPDNLTRSLRCYVRERKNLIKEMSRQTQRMQKALEQMNIKLANVINDITGKTGRSIIESILAGERDYKVLVQHRDRRIKASKQVLLKSLEGNWREEQIFCLQQSYKHYQFLENRLKDCDLATEKALERLDKDPGATKSIKGNKTRKNQPDFNVTQYLYDVLGVDVTKIWGLKDITALTLLSETGPCLKQKFPTEKQFLSWLNVVPNNKITGGKMISSRVPKKKNRAGQALREAANGLWNAKNPFGDYLRKKKARSGSGHAIVGTARKIASVYYKLVTEKEEFRPDIMEGAQEKYWRKKLVSLEKAKEKIEAQLATYQLNTNLVI

SEQ ID NO: 321233 - protein, 420 aa, unidentified
MTEDIEWFVGFDWASQTHVVCLLDRNGEMVGERKVAHGGADLSELCDWLVARSGAPPARIGVAIETPHGPVVETLLERGFAVFAINPKQLDRFRDRFTVAGAKDDRRDAHVLGDSLRTDRRAFRRLSVDDPTVIELREWSRIADDLSQERTRLANRIRQQLWRYYPQMLQLADDLTAENFLALWECAPTPARAAQVDEAGLAKVLKAHRVRRIGPAEALRILRQKPLQVAAGATEAAVAHIKLAAERARLVNRQLKDAHQKLEALCARLERPTAGERENEPGQQSEQRDVTILRSLPGVGRTGLATLLVEASEPLRRRDYQVLRVLSGVAPVTRRSGKARLVTRRMACNERLREAVYHWARVAMQTDPESKRRYAALRQRGHSHGRALRTLGDRLLATACAMLRSQTLYDPGRKPVSPAA

SEQ ID NO: 321234 - protein, 365 aa, unidentified
MVMRRLGMAVTGGTRRIVGGVDTHKDLHVAAVVDEQDRVIGTRSFATTRQGYRQMLAWMRSFGELQRIGIESTGSYGAGLLRFMQQSGVVVLEVTTPDKQDRRRRGKNDDLDAQNAAHAAFAGQRTVTPRSRDGMIESLRVLMACRKTAVSARRVALQMIHNTIVCAPDDLRDQLRSMTRMQLVRTLASWRPDLTAYRDLESAYRISLKSLARRYLELHDEIADLDAMIAAIVDELAPNLVARNSIGHTGAAQLLLTAGDNPERLRSEASFASLCGVSPVPASSGKTVRHRLNRGGDRAANSALHIIAIGRLRTDQRTKDYVARRIAEGHSKLDAIRALKRYLAREVFTLITQRRKEINATRIAA

SEQ ID NO: 321235 - protein, 309 aa, unidentified
MEIIVGIDVSKDRLDVAVTSQGEAFAVGNDHAGIDDLIARLKTIGADAIALEATGGYETLAVAGLSSAGLTVLVVNPAQVRAYANAIGRRAKTDPIDAAVIAAFVLATKPEIRPLRDAETQALSELVARRRQIVQMVVAEENRLRMALAKQAQKSIKRLLTALRRELESLDADLDDHIRKSPVWRVRETLLVSVPGVGPTTARTLLAELPELGSLDRRQIASLAGLAPWTRQSGKWKGKSFIGGGRGKVGAVLFMAALVASRHNPSLKAFRDRLVAAGKPRIVAIVATMRKLLTILNAIIRDNKPWQNA

SEQ ID NO: 321236 - protein, 320 aa, unidentified
MEKEKEYVGIDVAKSSMDIAVHATEQRWSFPNDDYGISKTVSLLRKLAPVLVVMEASGGIELTLTAALASAGLPLAVVNPRQVRDFAKATGKLAKTDTLDARVMAHFAATVRPVPRPLPNAQAEKFSSILARRRQVIEMLTAEKNRFGTANKAVRQGIEAHIKWLEQELSNIDDELRQSIQRSPVWREKGNLLRSVPGVGPVLSTTLLAELPELGILNRRQIAALVGVAPLNRDSGTMRGKRTVWGGRAPVRATLYMATLVATRYNPVIRRFYQHLCIAGKAKKVAITACMRKLLVILNAMLKHRAPWCYVNAQMFGPCH

SEQ ID NO: 321237 - protein, 406 aa, unidentified
MLNAVGIDVSKGRSTVAVLQPGGVIVHKPFDVPHKSKDLHDLAQYLGALEGDTKVVMESTGRYHEPIRNVLSEAGFFVCTVNPHLIKNYGNNTIRKVKTDSADAKKIARYTLDNWAELREYTSMDTTRTQLKTLNSQFSFFMKQKTAAKTNLIALLDTTYPGVNKLFDSPVRADGSEKWVDFAYSFWHVDCVRKAGITAFTDRYKRFCKHHGYEFQENKANTIYKNSKNLIATLPKEAVYKELIQESIRQLNLLSENVEHLRKMMNELASTLPEYHTVMNMYGVGPTFGPQLMAEIGDISKFQHREALTAYAGVDPGKNDSGQEVHNSSHASKCGPSRLRHTLFQIMTTMLQNGVKENDAVSSFLFKKKAENKPYLVYMTAGANKFLRVYYGKVKECLRNQEEAEQ

SEQ ID NO: 321238 - protein, 446 aa, unidentified
MSKEKLKMDIINPNAAGIDIGSRSHFVAINQEHADVKEFGVYAQDMKALVDWLLENNVKTVAMESTGSYWQNLYAELQNSSIEVMLTNGKFTKNIKGKKTDVLDCMWIQRLHTLGLLSGSFLPDLQTEYLRTLVRHRGNLIQTTSKASKRMSQNMRLMNLRLDVVVKDIVGLTGLRIINEICNGETSGEELAKLRHGNCKKSEEEIAKALQSNNRQDYLFVLKQELKKYQDAQQLILECDAEIKKLLDEFIDQDHVKKSLYIDKKAHKRINKNTPKNIDLNLMAYQYFDGIDLYAIEGFSHGTVLTLMSELGEKGILKFQNAQHFTSWLRLAPNNKISGGRVLSSRTPKGSNRLKIALRQAANAIGNLKDTHLSNFFNRVAYRKGRSVAVSATARKLATILWNMLFKNEQYSPPTIYEYLDQKRKVLELQKQIANLDARMSKVRIA

SEQ ID NO: 321239 - protein, 342 aa, unidentified
MQITTIGLDIAKNVFQVHGIDAQGSVVVTRQLRRSRLIAFFEKLGPCLVGMEACATAHYWAREITRLGHEVRLMPPGYVKAYVKRGKNDAADAAAICEAVTRPSMRFVPVKSAEQQSALMLHRTRDLLIRQRTQLINAIRAHLAELGLVAAKGREGVRKLMALVAEESEACLPVLARFACQALAAQLVDVQNQIGALERRIHAEHRASEASRRLETIPGIGVITASALVGTLTDPGAFRSGREFAAWVGLVPRQNSTGGKERLGGISKQGDRYLRRLLVVGALAVLKQARARPDKHPWLSQLLARRPAKVVAVALANKMARTAWAVLARGESYRAPAVAVAA

SEQ ID NO: 321240 - protein, 334 aa, unidentified
MKHWIGIDVSKATLDVALLDGPGTLASESKVENTAKGLKALLVRWAKEFGLVSQEYMVCLEPTSYYSHAALEVLVELGVPTWLAHANDIKQSIGMTRGKSDRIDAIRIADYARRFHDKAHLFTADQLKMNKLKQLLSKRQHYVMRKTMHQRQIKDMNKLIDKDLRKPFTRFDKAQITALTKVIKELEGMIEDTIYAEPELSKRFELLKSVEGVGLILGAHLLALTDGFTRFTNPRQLACHAGCAPFENRSGTSVRGRTRVSHNANHNLKRLLHMSVVGLIRFPGEFRDYYDRKVAEGKHKMLVFNAMRNKLVHRVCAVIERGTPYVKRVEAIAA

SEQ ID NO: 321241 - protein, 340 aa, unidentified
MPASGPRPGQVAVQVSLAAIFVSLELSRSTWLITSLVPGGVDKMSKHSVRGGDIAGLLNHLTKLQDKAHARAGASFPIITIQEAGLDGFWVHRVLDRAGIESHVVDAASILTSRRRRRAKTDRIDGEALLRTLLAYKRGEPRVCTMVRVPSPEEEDRRRLCRERKTLVAERVAHVNRIKGLLFAQGISDYEPLRGDRRQRLEAQRTGDGRPLSPHLKAQIGRELDRLELLLEQLKAVEAERNALLEPANDAAPVAVQALAGLRGIGPEFTAVLWSECLFRSFRNRRQVAAYAGLAPTPWQSGSVQHEQGVSKSGNPRLRSTMVQLAWLWLRYQPTSELSL

SEQ ID NO: 321242 - protein, 360 aa, unidentified
MQTKVNEKLFDGQSIYVGIDCHKKNWTVTILTEEFEHKTMSQNPDPEILAAYLRRNFPGADYHAVYEAGFNGFYSCRKLRELGIDCNVVHAADVPTGNKEKIQKLDPVDSRKLARSLRSKEFRPIHVPESSMEADRALVRQRFRVMKDVTRIKSRIRSLLFQFNINIPDRFTNSQTRSWSNIYINWLKELQVGHESLRQTLDNYIRIGELQRKELLLVNRQVRILSQTNAYKDNYNLLISLPGIGFLTAMTFLTQIGDIKRFKQLDNLCDYIGLVPMMKGSGSKLYTGKLINRGRKELKIMIIEAAWDAVRMDPALMAKFNELKMRMNKNKAIIRIARKLVSRMRHVLLSQEPYRLGITE

SEQ ID NO: 321243 - protein, 391 aa, unidentified
MVCVGIDVAKDKHDCCILDSDGMVRADCFTIPNNMDGFKQLLQTIRNCTKKSDKIKVGLEATGHYSYNILGFLLDNGLPTYVINPLHTNLYRKSLSLRKTKTDRVDARTIATMLLSDVDLKSYTDIAYHNEELKSLTRYRFDKVQECAKLKQSVSRLVTILFPELEKLVPSLHIASVYALLSEYPGAKQISEIHLTKLTNLLATASKGRYGKDKAIQIRDAARTSIGSVMPAKFLELKHTIKLIQELASEIDEIEDSIQKIIDELNPPILSIPGMGVNSAAVILAEIGDFSNFSSPDKILAYAGCSPSTYQSGKLTNCYAHMEKRGSRYLRHALYNATKYVCYWNPVFAEYLAKKRAEGKHYNVALSHAMKKLVRLIYALQKSGKTYLTAA

SEQ ID NO: 321244 - protein, 428 aa, unidentified
MNYNTQNAKIASITEKTLIVGIDVGSETHYARAFDWRNYEYSKKPLEFSNTESGFLTLKAWMEDIAEKHGKTAVIPGMEPTGHYWFALGKFLQDSGMKPVHVNPHHVKKSKELDDNNPNKNDRKDPKTIAALVNEGRFSYPYIPTGIYAEIRSLSNLRFQTQEELTRIKNRIARWFSIYFPEYKDVYVDLKAVSGRMVLKAAPLPEDIVKLGAEGVNQIWRNAKLRGAGMKRAKTLVSVAEHSIGSKEAPEAARIELKNLLNDMDVYAARLEELLRSIEEKLKEIPYIDKLMAIKGIGLVTVSGFIAEVGDIGRFDNPKQLQKLAGYAIVANDSGKHNGESRISYRGRKRLRYVLYEAAISLIGKNAEFREIHEYYRGRKENPLKKMQSVVAIACKVIRVFYAILTKDVDYDAEKLIGDIRRPQMQAA

SEQ ID NO: 321245 - protein, 392 aa, unidentified
MDKVWVGVDAGKEFHWAHALDASGAELFSRRVENDEGSLSALIDEALCVAEDLVWAIDQPGGGAALFLALLWGREQEALYVPGLVVDRARDAYRGESKTDERDARLIADQARMRGDFSKLAPEEGAIAELQLLLARRRDLMVDKTRAITRLREALLSLFPSLERALDLSAKGSLVLITRYQSPGKIRRVGHKRLAAHLKRRGVKGAEELAKKALAAARTQNVELPAQEVASRICAEIATEILALKERINALDREIAGRFFERPEAPILASLPGMGPLLGAEFLVACGDLSLFESADQLAAYAGLVPAARDSGKRVGNHRRMRGGNKVLKRVFFLSAFASLRSSPHSRAFYDRKRREGKRHTQALIALARRRVNVLWAMLRDGTTFESPPLRA

SEQ ID NO: 321246 - protein, 321 aa, unidentified
MKSTQQPLNIGADIAKDEIVVACAEQSFTPRKIANSRSALLAWLNKLPQGSRIAMESTGSHHERLAELAHKLGLTVYVLNAKDVRHYAKGVGLRGKTDRIDAQLIARYLAKEHVELHPFVPPSAQQRELERLLRRRTKLVRIRAAVKQSLNGMRGFAVEVKGLLARLDALIKRIDIKMRASIEACPHSQEACARLQRIPGVGPLVGGGLLNTLQRVPFGSAAAFVAFCGWDPRPSDSGRKSGRRRLSKRGPSLLRYLLYNAAMAASRTKAWRPLYQRSLAKGLSRTEALVILARHIARTAWSIYTHKTLFDAQRISQQDLT

SEQ ID NO: 321247 - protein, 464 aa, unidentified
MGWTLGIDLACRAAHVASLAGPDGALVWSGRTFFTRPDDLERLWADVGVDAGELTVVMEPTRNAWAPVAAWFDRRGVKVVLVPTTQSADLRAYYSKHTKNDRLDSTLLARLPLLHPEGLRAHTGHGPADPLRRAAKQRSSIVKRRTAVFARIDALLELLGPGWYQELGTDYGNAAMHLLARYADPNDLIRLGPARLSRFLIRYSHGQWREPKAAALLQAARQSLALWDTDGMDFAALSADIAVEAEQALQLSEQLDTLKVRLTQLYVQADPDQIVRTAPGVGPILAATITGRLGDPHRFTSLAAVRSYSGLVPKVSQSGQAEHHGGITKAGDRTLRQAAFMAADMARRCDPQLAAKYVRLMNAGRHHDSAVCHIATVLLTRIAACLRTGQPYVIRDLDGTALTEAQGRRIVTEQHQVDPKIRAMNASTRKSQRLKHRTSRVSQKSLSASTSRPVTNQPTSRHVA

SEQ ID NO: 321248 - protein, 363 aa, unidentified
MLIIGIDYHPSFQQIAFMDQETGEYDERRLNHSDGEAERFYRELKQRRVSVRVGMEATGYSRWFERLLAELGFEIWIGDAAEISRQRVRKQKTDREDARLLLRLLRENRFPRIWVPSPENRDLRQLLWHRHRLVQMRTRIMNQLQAVAMNEGYRWKKKLFSEQGRTQLEKLSLAPWASRRRKELLELLDQLDPKIAELTTAVEQEAQQRPEVLRLMTHPGVGSITGLVYVLVIGTPDRFPCGKQIGSYTGLIPSEDSSAGRQRLGHLSKQGNALLRYLLGEAAQAAARCNPHWRRRYVYLAMRRHKNIAKAAMARKLAVRLYWMWRNGWNYSQFVEFGSHAGKLATGHGLKKSVVHLIGHPAP

SEQ ID NO: 321249 - protein, 421 aa, unidentified
MRRSWMKKTNMVKVGTLIVTVDIGMTNNHGYCTAADGRSSKTFKFENTRQGFDTLWSMVLASKATFECNEVIVGYESTGPYGEPLIHYLKQKPVTIVQVNPMHTKKMKEINDNSPLKTDSKDPRVIADIIRVGHALSVVVPEGDVAYLRRLNNVRERHVKERTALLNQLQQFVFLTFPEFTRVLKTIFSKTALYILKKYTTPASIGSANLEELGEEMRRISRSKFRTRDAEKLINFARTTVGIQEGLQGLILDIQHVLIQLEMLHGFIAAIENEMETTLKRIPYSRNLLSIKGFGIATVAGLIGEIADFTKFTTQSEITKLAGLNIYEVSSGKRRGQRRISKRGRSLLRKVLYYAAIQTVRKNGIMHDYYQKLIGRGMKKIMALVAVARKLLRIIFAIVRDHSEFITNYADQRKQVIKEAA

SEQ ID NO: 321250 - protein, 426 aa, unidentified
MAKKRMYRAESINNLEVAKLLEALRGRNVTFAMDVAKRELVGVFMEVPEKVLCSVSWKAPTETMRMVEVLSQAAGVCTLAVALEPTGTYGDAMRGLMHGLGLPVYRVSPKRASDAAEIYDGVPSQHDSKCAAIVGWLHGQGRSELWTEVSPELRNLAAVTEQMQLFSKQYHACLNRMEAKLARHFPELGEQLELNSATLLALIGKFGSPAAIASSESNARALMERVGKALLSSDKVDRVLELARTTTGASMTEGERECVKALAVETDRQRREMAAARKKVEEQALEHASVRRVSEAVGKVTAAVLYVEAGDPSTYKSAAAYTKSLGLNLKIKNSGKPADQGQLKITKRGSSTARAMLYMAVLRLIQTDPRFKAWYGRKVARSDGKYKGKALVALMRKLAKALWHVSRGGTFDSSKLFDDARLGLAA

SEQ ID NO: 321251 - protein, 388 aa, unidentified
MNYAGIDISKYKHDCFILSDFGEVINAGFSFANNAEGFRKLEQELKLCGKGNVRIGLEATGNYGINLKLFLEKIGFDFMEINPLLIKQYRKSSTLRRTKTDKLDAKTIADYIREREYRPNPKGFYDLFALKQLTRLRSRLIGIRSRYLVRMTNVLDCIFPEFKPFFGNRFSATALYILANYKTPDAIANMNSRSYDILRRKSRGAFSMDKFVTLKALAKNTVGVSHKCYIVELEFLLDLYCQIDCKIEDLEAEITQMITFRDPPTLGIRGIGPVSAASIISEFGDILRFDNPNQMLSFAGLEPGHFQSGTSEHSGHMVKRGSPHLRCTLINCCRSIRLHNEVFATYYRKKVAEGKCESVALSHMAKKLIRVIYTIETTGTAFDPEKLR

SEQ ID NO: 321252 - protein, 340 aa, unidentified
MRQLYTGIDLHSNNSYLGIIDQEDKRIYHKKLPNQKDVILSELEPFRKEVVSIAIESTFNWYWIVDCLIDVGYTVHLANPAAMQQYSGLKYLDDKHDAFWLAHMDRLGILPQGYIYPKEIRPIRDLLRKRGHLVKLRTSLINSLQGIIARNCGHSLSGAKMKQTTKNHVTPLLVDNVDLALSGEVSKQSIDYLSQQIVKIEKICQDRMKLNPQYIGLLTIPGIGKILALTIMLETGPIERFKKVGNYSSYCRKVPTSWLSNNKRKGKGNTKNGNKYLSWAFAEAAEFAKRYDDKAKAFFNRKAAKTKATVAYAALSHKLARAAYYIMKDNVEFDSNKLFA

SEQ ID NO: 321253 - protein, 421 aa, unidentified
MFELVEAMTSYHKRSCGLEPSWELPAILYGGEDMVPIVGLDVSKGTSTLQAFTDRHQPFGNLLTITHTQKGFEQLGNLLGALKQATGKEPAVVLEATGHYHCSLIAYLEREGYRHFIVNPLQSKRAKGTHLRKVKTDATDAWHLAEMYYRGDIQPHRTRTEELTELQHLTRQHEFLTHWLVQARQNARALLEQVCPAYEKVFHHVFSPTSLQVLRHLLSGNIITADMIREMTGSSRSMAWIRKKVEQIHALPSLSHSSTAQHMALLSMVEILLAGQHQLRQLEQTTQKLAMTLPEVELLKTIPGVGDKLAAVLAAEIGDATQFAEPKQLVAYAGLDPSVHRSGKFTASRNRISKRGSKRLRRALYIAVQCGLRKGMNKRLKTCYEKKRKEGKPYKVAVIACANKLLHHIHAILVKGEPYQA

SEQ ID NO: 321254 - protein, 362 aa, unidentified
MLKSITIIAFDYHAATTVAAVLLPDQRTPALHTLASDHATILRFVDRLRHHVPVVCCYEAGPCGFDLQRALTTHGVTCEVIAPALIPRRPGDRVKTDRRDAGQLAVLARAGALTAIHIPTEQEEAARDLLRCREDIRADLLRARHRLSKFLLRHGRRFTATKKAWTKRHTAWLQAQRWPLPALEQTHRAYVRAVDEAVGRLQAVETELRDLLSLEPLRARIQRLRCFRGIDDLTALTIAAELGDPRRFPTAPSLMGFIGLVPSEYSSGPKQSRGAITKTGNAHIRRVLVESAWHYRHHPFVGRALTLRQRGAPAPVVQHAWTAQHRLHRRYRRLAARGKPKQLIVTAIARELTGFLWAALTQ

SEQ ID NO: 321255 - protein, 342 aa, unidentified
MKQYVGLNVSQRETSVCVVDDAGKIVFQGKAKSDPGALTELLRKRAPGAERIGFETGAMSSWLWHELKRVGLPVVCIDARHAKAALSVRMNKSDKNDARGLAELVRVGWYREVKVKSAESQATRSMLVTRSRLVGIRRDLENQVRAMLKEYGLLFGRSIGSQFRRKALELVADGHELLPVIQPLLTIHEQVCREQEKLDRQVRRLAHGDETTRRLMTVPGVGVVTALTFRHTIVDPSRFRSAANVGAYLGLTPRRKQSGETDINGRLSRWGDRLLRTYLYEAASVLMHRTKKWSTLKAWGVRLSKRIGMKKAKVAVARKIAVLLHCLWVDGTSFEWGNQKMA

SEQ ID NO: 321256 - protein, 420 aa, unidentified
MKVFSPQDFAVLIGIDWADKKHDICEYSHTRQHYDLSVISSKPESIDDWANDLKKRYPNQRIAVGCELKKGPLIYALSKYDHLTLFPINPTTVAKYRKAFTNSGAKDDPTDAKIQAEILLQNMHKLRFLEPESPELRALAQLVENRRKLVQDRVRLTNRITATLKNYYPQVIEWFKEKHTTLFMDFIQKWPNLEAVQRARGATLTTFFHAHHVRYNETIEKRIQAIKKAHPLTNDPGVIAPNQLLVKGLIQQLKSLMEAIAEHDQEIKQRYKACIDQPIFDSFPGAGPVFAPRLLTAFGENRNRYENAAEMQRYAGVAPVLERSGKKSWTHWRYSCPKFMRQSFVEWAGESVRYSFWAKAYYEQEKAKGKPHQTIIRCLAFKWIRIIYRCWKNKKPYDESTYLNALKKRNSSLLEYAISR

SEQ ID NO: 321257 - protein, 387 aa, unidentified
MPQPNDLSRSLVALDQNSTIIAVVEMSQSSWLVGGVVPGIERQPCKKLEPSPERLLAVLHRWRDEAVRAGGNVTRIALAFEAGRDGFWLARWLAARGVEAHVIHPSSVAVSREHRRAKTDRLDTELLKRGFLGWLRGERGHCSMVRVPTLAEEDAKRPNRERECLVKERTRLVNRMKGALARLGIRNFRPTLRNAAEHLAGLYTPEGSPLPPNVAAELARDIARLGLVIGQIKQIEEARRRRLEEQPESRPHAMVRLLARVVGIGTETADMLVSEVLSRPLRDRRAVARYAGLTGAPDESGAKRREQGLAKAGNARVRRGMIPLAWRFLRFQKNSALARWYQARTADRRAGTRKTMIVALARKLLIALWRFVTTGETLEGVVLRPAG

SEQ ID NO: 321258 - protein, 322 aa, unidentified
MEAVLECCCGLDVHRDNVVACVLKGTNEQKPEKAIKTFSSLPDGLKKLRSWLEEENCRHVAMESTGVYWQPIYNVLEEAFDGTMVAMVVNARHMRNVPGKKTDMKDAEWIAQLLRSGLLDASFIPSKPVRELRELTRYRKTMVEEITAQKNRVEKFLQSTGFKLSTFCSDVFGVSGKAIMEHLAKHGSVSPSQVESLLKGRLRVKKEEIALATTGSLTELQQDFLGMLLKHLYQLESNIPEIDCKIDQVAAKFQRQIEQLDGIPGIDIVAAQAVLAEIGTDMSKFQTAAHLCSWAGLSPGNNESAGKKSPFAPPRETPTSKG

SEQ ID NO: 321259 - protein, 411 aa, unidentified
MVFVGDDWAKDHHDVELVDDNGHRLARARLPEGMDGVSRLHALIAEHAPPEWADLDPDEVAARVRVGIETDRGPWVQALVAAGYQVYPINPMSVARYRERHSTSGAKSDAGDAHVLAEIVRLDHAHHRPIAGDSPQAEAMKLVARTNQTLVWDRSRQLLRLRSTLREFFPAALRAFDDLTAPDALHLLSAAPDPDRAARLSRTEIIAGLNLAHRRSAAAKATQIQNLLRADRLGQPAPVQAAYAAIVTTQVRLITALNIEIEHLGQVVADHFGRHRDADRYLSQPGLGVVLGARLLGEFGDDTHRYTDAKARKNYAGTSPITRASGTRRVVLARYARNRRLGDAVHQWAFCSMRGSPGARGYYQTLRARGIGHQAALRQLGNRLVGILHGCLKTNTTYDEATAWPHLQPVS

SEQ ID NO: 321260 - protein, 408 aa, unidentified
MQKRENLLYVGIDLHKESHTAVMVNCWNEKLEIVVIENKPSEFKKLAEKVKRKSNHLGLEPIYGLENAYGYGRSLAVWLIEKGYIVKDINPALAYDQRKSAPMLRKNDEHDAYCVATVLINQLHTLPDAKPKDNEWTLAQLVNRRDLLVKDGIRFKNGLHEQISIAYPSYSKFFSEIDGKCAMYFWKTYPSPVHLQGKTAEDLTIEFKEISRIAKKDKAELILDCVQNDGNTFREYQESRDFITTSLVRDLEHQKEELAGLDKEIDIILLSFDYKLTSMSGIGTSIASKLIAEIGDIRRFPSADKLARFAGVAPVKFSSAGKGKEQSSRQGNRQLHGLFYFLAVTMVSKPKNGIPNHPVFYDYYMRKIGEGKTKSQALVCIMRRLVNIVYGMMKNKTEYREPIPKEEQ

SEQ ID NO: 321261 - protein, 414 aa, unidentified
MQVVYERCAGLDVHKKTVVVCRMVPDEANGWQTEIRTFGTMTDDLLRLSDWLRAGAVTQVAMESTGVYWKPVFNILESDFEVILVNAKHIKFVPGRKTDVKDAQWIAELLQHGLLKGSFIPEAPQRELRELVRYRTHLIDERTREVNRVHAVLEDANLKLSSVATDIMGVSAREMLAAIIAGKDDPAALAQLAKARMRPKIAELERALTGHIKDSHRLLLSLHLEHIDDLNAKLQRLAEEIAKLLPPFDEADLLARLDTIPGVDQYTAQVIVAELGTDMSRFATAGHAASWAGLTPGKNESAGRNRSAKTNKANRYLKAALVEAGQAAGRSRDNHLAAQFRRLAARRGKKRAAVAVAHSILVIAYHIIRDGTSYVDLGANYYDERNAELVQQRLIKRLENLGLKVTVEPLSVAA

SEQ ID NO: 321262 - protein, 392 aa, unidentified
MTYFIGIDLAKYKHDCFIMDENGEVIRDSFSFNNDKEGFNTLLNVLNSLDLNQEKRIGFESTGHYGSNLKIFLERNGYSFMEFNPLLVHRHFKSETLRRTKNDKVDARKISSYLYTREYKPNPNSSYHLNCLKSLTRTREALIKERTRHIIHMTNVLDKMFPEFKLQFGNQGLNAASAMYLLENYGSPSKMSNMTRASYDKMKSELRHTISYAKFLKIKELAKNTIGNEDEILVFELNTYLELFKELDKKILEVEDKITKEFSIMKCHIASIKGIGIITAAGILAEIESIDRFDNPGQLCAFAGIEPSENQSGTHDGGGKMVKHGSPHLRNYLMQSAGYMLIHNPVLYEYYLKKRNEGKCHTVALSHVAKRLTRIIFYLEKNDTDFNIDKMR

SEQ ID NO: 321263 - protein, 342 aa, unidentified
MNIPVRIGMDTSKSVFQLHGVDENEVVVVRRQFRRAEMIRYFERLPPVLVAIESCGSSHHWGRLLQSFGHEVKLIPPQYVKAYVKRGKNDAADAEALCEAVTRPSMRFVPVKSKERQAACMLMTVRERLVSVKSQLSNAFRSYAAEFGIVGPAGRQNVAALIKRVLEDDSLPEMARDLFRLQADEYAAVQARLAKIEAKLMKWHREDDVSRRLATIPGVGPIGSSMLSMKAPPPETFRSGRDFAAWLGLTPKDHSTGGRQRLGGITKAGDSILRSTLIVGATALLRHVRKGRHKPTPWLASLLERKPPKLVAVALANKFARIAWRLMISGGVYNQPVAAMPT

SEQ ID NO: 321264 - protein, 313 aa, unidentified
MSQNTPPTIYCGLDIAKPNLQLDLLGRAYELPNTPAGHRRLRQLLAPQATAHVVCEATGGYERPVVAALHAAAIPVSVVNPGWVRSFAKAQGIRAKTDAIDAQVLSAYGRALHPQATPERSATEQHLTELIRRRNQLTDALVAERLKATGLTLPVLQRQAKSLVRRLEKDIAQVEALLAKLRQASPELEAKTAKLQAVVGVGQITALSVLAECPELGTLNRRQVAALAGLAPHPRESGTWKGHRKTGGGRPAVRRALYMAALVAARSNRHLKAFYQRLKSAGKASKVALTAVMRKLIILLNQILKNPNFVLQN

SEQ ID NO: 321265 - protein, 401 aa, unidentified
MKTVLSVDVAKNKSMIMLMNSDGEIFIDTKEINHNLEDFEKVKEEIKEINPQNLTVFMESTGTYHLPVERYFKENGFNTLVINSLTTKNNYDTIRKTKTDKKDCYRLAKLFFVNEVEYHDLSKKDLYANLKAMTRQYFYLLQNNVSCKNRYKRLINICFPELEKIFKSTRIYDDTALNFIKEFPYAEIVKEKRIDALYNNLYKTNGRNLNFYKKLATTIKTASINSYPGVDKEHEDVKNLSYMAKIVQNNNNIINELREKMIETAKQFPYYKIINSFYGIGDTLTAEILGELGDITRFDSPKEIIAFCGLDPTIKQSGKSINVKGAISKRENKYERYILFNCSQMVVKLGASNYPEHPVYIYYQNKKAEGKHYYESLTACSTKILRMLYSMCKNNKQFLEN

SEQ ID NO: 321266 - protein, 335 aa, unidentified
MTKVMDAVSVGIDVSACTLVVALERDHQPGRQRREFPNTAAGHQVLVQWLSKSATAVQVCLEATGLYSLDLALALDRAEGIEVMVANPRAIADFAKALLQRSKTDQLDAEVMLEFVRRMPFVPWQPPKPHRLDLRALLRRITGLKLASQQEKNRLHSVSQAAEITPLVRKDIQSHLVQLERHIEKLEQQAEAIVQADPELAQQFRHLVSVRGIARVSALHILAELVVLAPDMTARQWVAHAGLDPRHHDSGTSIHKPARISRAGNRYLRAALFMPALVATQHDPNIRAFYQKLVDRGKTKMQAIVAVMRKLLHALHGMLRTDSDFVGEKFYVIPS

SEQ ID NO: 321267 - protein, 312 aa, unidentified
MEKLSYGGIDVSKDRLDVVVLPEGWFFSVSNDTAGWAELVARLRPLAVSAIGLEPSGGYERGIIRALLAAGLSVRRINPNKLRQFARARGVLAKNDRLDARLIAEYVAIMPTRVVQRDDAVERLAEIVTMRRQLCDEHVAVENQAAHLEDAMLGRLSKRRLIRLEADIRLLDKRLAEMVATNAAFAQPYELLTSMPGVGPVLAFTLIALLPELGKMSRKQIAALVGLAPYDFDSGKLRGHRSIYGGRMPIRNVLYMAALSASRYNPALKTFSNRLAHANKKSKVIIVAVMRKMITTLNAMLRDNAAWQPQSN

SEQ ID NO: 321268 - protein, 337 aa, unidentified
MKYCGIDLHSNNSVVIVSDEEDRIVFHKRLPNDLRQIAGAVEPYREELVGVVIESTYNWYWLVDGLMDAGYRVHLANTTAIKKYEGLKYSGDFADAAYLAQLLRLGLLPEGYIYPREQRRARDLARKHLQLVRYRTAQILSIENTLARQTGARLSGEAVKRLTAEQVEALGFVPDVTLALESNRAVSQVLQQRIEVLEKRLKERVSLRSEYRLLKTTPGIGEVLATTIMLETGTVARFAQVGNFSSYCRCVDSRRESNGKKKGEGNAKNGNKYLAWAFVEAANFALRCCPEAKRFYERKKRKTNTIVATKALAHKLARACYHMLREQKPFDVSRCFA

SEQ ID NO: 321269 - protein, 347 aa, unidentified
MAAISKDIIANIGIDLGKNTFHICAMNDKGTIVMRERLTRAALPKRLANIPPCLIGMEACAGAHHIGRQLVTLGHDVRLMPAKYVKPFLKGHKNDYRDAEAIAEAVQRPTMRFVSLKSDEQLDLQALHRVRSRLVGQRTAVINQIRAFLLEHGVAVRQGPGALRQALPSILARRTDVLSPRIIHLIEDLTDDWRRFDQRIADVTREVEELAKQDEHCKGLMGVPGVGPITASAMVAAIGDGAAFSKGRDFAAWLGLVPKQISTGDRTILGGISRRGNRYLRTLFIQGARSVLQRSDGWEKKSFGRWLVAASKRLHKNVLAVALANKLARIAWTVLYHARGYDAAFEA

SEQ ID NO: 321270 - protein, 397 aa, unidentified
MYIVGIDIAKRKHEAAVIDGEGAVIIKPFSFTNNCSGYNRLLAMLAKAKLPLDEVSFAMEATGHYWLALFTRLQKEGFRVQVINPVQTNSIRSFYIRQAKTDPRDALLIAEVIRFGHFSESTLHPENIYELRELCRGRHAIVSMQADVKRKVVALLDQVFPEYETAFTNMFSDTSMAILQTCPTPKELSEMPLEELCHLIEVSSHKRFRMAKAQELQALARNSFGFAMAGDVFSTMIRLYAKHLVFLKQQVQEMDRKIAEIMDTLDTLITTITGIGPTLGAYILSEIGDISRFSSAAKLAAYAGIDPTMRQSGEYNGVRNRMSKRGSPYLRHAIWLAASSAVLHDPALKLYFQKKRDEGKPYMASVGHACRKMVSIIYAVMRDNKAYTPCIPNEISA

SEQ ID NO: 321271 - protein, 341 aa, unidentified
MNIITVGIDLAKNVFAVHGVDNNGKPALVKPKVSRADLLPLIANLPPCLIGMEACSGAHHWARLFRQYGHTVKLMAPKFVAPYRMTGKKGKNDAADAAAICEAVTRPAMLFVPVKEEHQQIILCLHRTRQGFVEERTASYNRLRGLIAEFGIVLPQKVTCLRREIGAHLEDLPGYANLCVGDLLAHADELDRRIAEYDRLLAKAAREDVRSKRLMERPGIGPVTASALLASIGAGHDFDNGRQVAAWIGLVPGQYSSGGKARLGRITKAGDNYLRSLLVMGARAVLNSIGDKQDRFSRWARSLQERRGYWRAVIAIAAKNARLAWAVLKYGEDFKLAPGTI

SEQ ID NO: 321272 - protein, 389 aa, unidentified
MIYVGIDIAAAKHACCILSEDKKVIKQFTFANSASGYEKLRSALLSPAETKIGLESTGVYGNNLVEFLRRNGYTTHIFNPLLVKKSIQATTLRKTKTDKSDAKQIARYTMEHSQPDQVPSYHISELKSLSRGRFSLVRERSKAKTQAKTLLIQLFPEFSEAFSDMFGVTASAVLRSFPSARALSLCPANVLTEILSQTSRGRFGKARAEYLIGLAKDSIGTQSIALELELQMLLQQIDLFTAQIAGYEAAIKSAMEEIDSPITTIPGIGYVLGAVILSEIGDINRFSTPAKLQAYAGVDPSISDSGSSVSAPGRMVKHGSCYLRWALCQAARCVSLYDPVFATYMQSKRNEGKHYCVACSHVAKKLTRVIYSLLKNNSVYSPTYSLLSA

SEQ ID NO: 321273 - protein, 347 aa, unidentified
MTIYVGIDLHRKRSQIAALDERGTELLSRRVANEPEALKAILAELGGELQVALEATYGWEWLADLLEGEGHELHLSHPLRTKAIAAARVKTDTVDARTLAHLLRTDLLPEAYVAPRELRDLRDLLRHRVVLTRMRSALKNRLHALLARQGIQREHADLFGKSGRAFLAELPLREPARRRLASLLSLIGDFDREIELAKREIDALARHDPRVDVLCQLRGIGPYTAMLVIAEVGEIERFRSARHLCAWAGLTPTVRSSDGRARLGHISRQGSPHVRWALVEAAQKAATGGGPVRAAFERIAKRRGRNIAKVAVARRMLTLCYYGLRDGEIRCLQAPGPASARPLTAAP

SEQ ID NO: 321274 - protein, 368 aa, unidentified
MKQQTSATTETIIKGRNIIDFTGKTMWVGIDMHEKDLQVAKVLDGICLGNHRMPANGKALIEHLRTRYRGAAFKCVYESCAWGFTLQRELTAAGIECIVVHAGDVSSSDKERKRKTDKVDALKLARNLASGDLTAIHVPDKDLQKERNLIRFRKKLVGDLNRSKNRLKSLLKYQGINIPERLGKKNNWSLNFMNWIEDEAKKDILLQDTLLLMLEEIKLLRQLLLKTEKALRKLRQDKYDEQSKLLMSAPGVGRTTAMLFLLEIGDIKRFGPFDKLNDFVGFCPDTDSSGDTEHDTGITSRRHKQLRSALIEAAWTAIRIDPALMDAYQKLIKRMKGQHAIIRIARKLLRRMRAILISGIPYQKGVIV

SEQ ID NO: 321275 - protein, 455 aa, unidentified
MAKKGKKTKPIPENMLIIHPHAAGIDVGAEEHWVCVPADRDAQPVQKFSAFTCDLHRLADWLTACRITTVVMESTGVYWIPLFQILEARGFEVALVNARHVKNVPGRPKTDRFDCRWLQKLHTYGLLAPSFRPPEDICQLRSLLRHRENLIRMTVKHLQHMQKSLDQMNLHLHHVISDITGVTGMRIIRAIVAGERDPRTLAQYRDYRIKSSADTIAKALEGDYRAEHVFTLTQSLALYDFTQQQIAACDQEIERVLATLDSQVDPDEHPLPPPTTTHRQPQRNEPAFDLRTHLYRITGVDLTQVPGLQAPTIHIILAEVGLNMHKWPTDKHFASWLGLCPDNQISGGKVLSTGSRRVQNRASRALRMAAQSLRTSPSYLGAFYRRMRSKLGPAKATTATAHKLAKIIYHMLQEKTPYLERGAEHYMHKDHERKIRQLRKQAKHLGFDLVPQTSN

SEQ ID NO: 321276 - protein, 360 aa, unidentified
MTVVIGVDPHKQTHTAVAVRSETGEVVEEVTTAARAKGHEELVGWARELSGDRLWALEDVRSVSRGLERLLVARGERVVRVPPKLMAGARRGARAFGKSDSIDALAIARAALGHPDLPVALEDQEAREIKLLVDHRETLVRQRTEAQDRLRWLLHAIDPEMSVPAGALDRKVWLDRVERRLARAAQSVEMRIARDLVSRCRELTIDANELEREVALRVARYAPQLLELKGCGALIAGKLIGETAGIGRFRTDAQLARLAGVAPLDASSGQQRRHRLNRHGNRQLNTALHKLAVVQGRWDPRARAYLERRQTEGKTRLEALRCLKRLLARVVFRLLRQDPARDPERVVKVRGGKVRVPALA

SEQ ID NO: 321277 - protein, 261 aa, unidentified
MTITTVGIDLAKNVFAVHCIDQNGKAVLVKPKVSRAALSELIAGLPPCVIGMEACSGAHYWARLFRQYGHDVRLMAPKFVSPYRMAGKTGKNDAADAIAICEAVQRPHMRFVPVKDESQQAMQCLHRTRQGFIQERTATYNRLRGLISEFGVIAPQSTDALRHVVSDQKETLPVQVRLCIDDLLTHVTNIEEKIAEYDRVLSRVAKTDHRSQQLMELKGVGPTTASALVASIGNAHDFKNGRHLAAWLGLTPSQYSSGVKS

SEQ ID NO: 321278 - protein, 382 aa, unidentified
MQTIDTVNPTILLAIELSASTWLVAARVPGLEKPHLHRIDGGDTAALLALISSLRARVARRLDATIGIVCCFEAGRDGFWLHRLLTAHGVVSHVLEPTSILVNRRARRAKTDRLDAEGMLRVLAAYLRGDHQACSMVRVPTPEEEDAKRTHREREKLVQERLRIENRIEALLFTQGIRKRPSLRSWERDLAVLRTGDGREIPHHLRAELDRLRRRLVMTLELIREVEAERDQAAKTKPQDQACHKIAALCRIRGIGENFAAVLTREVFYRSFDNRRQIASYVGITPMPYQSGGMDRDRRISRAGNPRARTTMIQLAWLWLRYQPGSELAEWFRERVGTLAGRTRRIAIVAMARKLLIALWRYAETGVIPAGAEIRAETTVAA

SEQ ID NO: 321279 - protein, 404 aa, unidentified
MVVEGGCPVTTIGIDIGGRTHVVARCREGTSRADREILKVSQSRAGFAALDTWLARQSEPVTLVTMESSGHYWMPLAAHLRQRQVPVAVVNPLAAKYFAKSRLGRTKSDPADARSLAEMAMRDTPSARNPLEGAELRQAARFAMTLVTEQAKVCQRLIRLVDIGFPELGELFDDPTCRTAREVLRIAPTARAAVRRRTSTLANANAGPGHRRLGVAKAERLQAAAADSIAVPELDAEVAFEVGLLLDQYDLLERQIGDADGRVAGLLDGELARRLQTIPGVGPSITATLIAEIGDIGRFTDFDQLLAYAGVHPAERSSGRKGSNPETAWHMSKAGNSHLRAAAYRMAVVGVQHNPVIATHYARKRAAGKSKMNALGHCMRKALSLVWGVWRNGQDFDPNWRVEV

SEQ ID NO: 321280 - protein, 384 aa, unidentified
MDRTSCSVSRHTLHGALELSKKTWLLAIQFPDREQPSVYPIGGGDTEKLMAKLTAARDCWAKVSGALPTITLCYEVGYDAFWLARFLKAHGIECLVIDPGSVQVNRRGRRVKTDRVDVKMLLRTLIAWCRGERHVWSLVRVPTIDEEDLRRSHRERSRLVRERTAHINRIKGLLFAQGIRGINVKSQYKTLAVDKLITGDGHRLPPRLACEIAREIQRLAVVQEQIAEIECERDTAPTPCEATERKRLLLLQLKSIGPAISALLSREVYYRQFVNRRQVGSFLGLTPSPYSSGEEEHCQGISRAGSGPVRAIMIETAWLWTRHQPKSALTRWFVGRTAGQSTRTRKIMIVAVARKLAIALWRYVEHGLVPQGAILNPPTTGKAR

SEQ ID NO: 321281 - protein, 331 aa, unidentified
MEEVKRFVGIDVAKAALDVFIGSAGGAFSVANDEVGIRELLRQLEPADFVILEATGGLETPVASALAAAGIAVAIVNPRQVRDFARATGKLAKTDRLDAAALARFGEAVRPEARPLADEQAQALGALVTRRRQLVEMLTAEKNRRARAPKVLHRSIDEHIRWLEKRLTGFDDELGELIRNTPLWRERDEVLRSVPGVGKVLSSTLLAQLPELGMLNRKQIAALAGLAPFNRDSGSMRGSRCIWGGRAQVRRVLYMATVAGVRSNPVIKNFYSQLRARGKYPKSALTACMRKLLVILNAMLHNQTPWQTPPLTPSISPLSLRLSADTQHGCC

SEQ ID NO: 321282 - protein, 330 aa, unidentified
MNVAGIDVAHKTLALAIAAGEKMGKATEYANTASGHRTLIKVLKGAKVERVCLEATGSYHLDLALALDAAGLAIMVVNPKAAKHFAEALLSRTKTDAADAAVLAQFARSMPFEPWQRPDEQALAVRACARRIEALRHNRTQAKNQLHALNQSSSTPPVVLEDVHLSIAQYDNQIQALGRWVEALIATDAVMQQAFDLLLSVKGIASASAIQILGELLVLPADMRAKQWVALAGLDPRQSLSGTSVNKKPRLSKAGNRHLRLALFMPALCATRNEPHVKAYYRHLIDGNGLKKIQAICAVMRKLLHAIHGMLSQRQPFDGSRFYALAQTPA

SEQ ID NO: 321283 - protein, 351 aa, unidentified
MKEFIAFDCHKRYTLVEREEIKTAQMKHYRVEHAQGAIRQCLLGREPGTPVAVEATGNWYWIVDEIEQAGLKPLLVHPRKAKLMRGMINKTDKLDVHGLNQLQRAGTLPIVWIPPRELRDLRELTRTRMVLGAQRTRLKNRIQATLNKYGWVLKDYSDSFGKKARTELNLCIGRLPPQTAYVTGVLMKQLDELEGQIAEMEKRIRALAQETPEMRRLMTLPGIGWILAVVIVLEVGEILRFPSAQHLASYCGTTPRVQQSGDKTRYGRLRPDVNHYLRWAFIEAAHSICLNQRSYPDRHVTRLYQRLRQRKGHGKAVGAVARHLAEATYHVWNTGQSYRDRGLNQGRSTEV

SEQ ID NO: 321284 - protein, 355 aa, unidentified
MSQEKYIGMDVHPATISVAVMDAQGKLIMECLLETKATTILEFIQGLQGTLSLTFEEGTSAAWLHDLLKPHVDRLVVCDPRKAALLKDGNKSDRIDARKLAELLRTNQLKPVYHGEHGVRTLKELGRSYLTLTKDVTRVMNRIKALYRSWAIPCSGTTVYAPRHRAEWLAKIAEPGVRVRAERLHQQLDVLQPVRQAARHDLLSESHKHAAVKLLREIPSIGPIRAALLVALLQTPHRFRTKRQLWAYSGFAVETHDSGEYRCVRGKLQRNRERITVRGLNDNHNKDLKSLFKSAAISASTRPGPLHDFYAARIAKGMRPTMARLTLARKIVTITLTIWKKGVSFDPQQLHRQAA

SEQ ID NO: 321285 - protein, 346 aa, unidentified
MLYAGLDLSRKRVDVCLLDEDGKRIAVTAAPPDADGLHGLARRLAGHGQPIYAALESMNGARFVHDTLEEQGWHVELADAQKVKGLAPLAAKTDRIDAYVLAELARRDLVPAIWLPAPGVRAERELARFRLHLVRHRSALKARIHASLIAHGHPCPVSDLFGVRGRKLLDDFELPEAWRASTEASLRVIGHLEAEIDACERELRRQGADHPYVPLLMSAPGIGWVLAYTIAAEIGEIERFSGPKKLCGYTGLCPRVYQSGASDRRGPLAKNGPKYLRWVLIEAATHAASHPCYAAHYQATKRRLGRQRGAKVARVEVARKLAEAIWYMLARSQTFAPQGPTLPLVA

SEQ ID NO: 321286 - protein, 348 aa, unidentified
MIIIGVDFHPEFQQIASMDTATGEFQEKRLAHPAEAEKFYRSLVGQKVRMGMEASGHARWFERLVAELQFELRIGDAAEIRSKRVRKQKTDRQDAQLILRLLLEDRFPHIWVPSWENRDLRQLLWHRHRMVQARTRIMNQLQAVALNEGLRCKKKLWRERGRQQLESFRLAPWATRRRRDLLELVDRLTPTIAELSHAIEQEVEKCPAAQRLRTHPGVGSLTALAFVLIIGEVNRFRCGKQVASYLGLVPLEESSGNRRRLGHITKQGSSMMRFLLVEAAQVTVRSLPEWRSKYLHLVLRRGRKIAKVAMARRLAVHLFWMMRKEWNYQQLKKFGSHAGEPGNRHGVQ

SEQ ID NO: 321287 - protein, 506 aa, unidentified
MKVQASKPTFTIDYNPIGQYGSNICRQDIGRKRPYRSLLRQRYWAWSFTSKLITMAKVAKRKQTSKGLRLEVVNPNAAGIDISPKEMQVCVPSDRDGECNRTFGVYTEDLHYIAEWLKACCIDTVAMESTGIYWLPVFRILKESGFDVILVNASDVKNFSGRKTDASDAEWLMMLHSYGLLKPCFQPENIARTMRNLVRHRDNLIRSASREVLHLQKAMEQMNLKLDNVFSDILGKSGQSVIKAILNGERDPKVLSDLADSRCRTSKEEIEKSLQATWDEEHLFEMRQSDSLYQFYQQLIAECDAKINEIAMQYSATVDAPKTELLRSGKYNAKKNRIGFDVEKVAFELWGVNVMRIPGMSRGALLRLVGELGAGFTTKFVDVKHFVSWANLVPNNKISGGALLSSKVPKKKNPVGMIFRQAANTLKAAKNPLGNYFRHMRAKGGHLQAMVATGKKLASIFYCMVQRKVEYNEKVYCNHRKQELQNKVAYLHKRLQRMESELANCG

SEQ ID NO: 321288 - protein, 316 aa, unidentified
MTQHTPTSLSVGIDVSQATLDVGVYPTAEQWQLANDGRGISQLVDRLQQLAPDRIVLEATGGYELAALATLASAGLPVVAVNPRQVRDFARATGRLAKTDALDAQVLAQFGAAVQPPLRALPDAATRELSALLARRRQLVEMRTAESNRLLTAHERVQPSIRELVHFLDKRISELDRELRDRLRASPVWRAKENLLRSIPGVGPVLSATLLADVPELGSVGHKQLAALIGVAPLNRDSGQWRGRRSAWGGRGHVRAVLYMATTVAVRRNPVLKLLYERLLGLGKQRKVALVACMRKLLRICNAVIAHQLAWRTQPA

SEQ ID NO: 321289 - protein, 439 aa, unidentified
MAKEAIFETVHENVAGIDIGAEQIYVSPDGKEVTVFETFTSGYHACARYLKEKGIEKVAMEATGVYWIAFYFLLEELGMMVCLVNPKETKQVKGRKTDVKDCQWIQRLFTAGILRHSFIPEGKYMELRMLVRERVDIIDMGSTYVNKMQKCLELMNIKLKEVISQIHGASGIRMIKSILSGERNAANLLSLCDERIQKNKKAKVLKALEGTYNDTYLYMLGQNMELWEIHQDRIEKIDTKIAQLLDELSMNKEEVPTGKTKRIRHHAPKIQGLQSTMARLYGVDLSSISGMNDYTVLRLIGETGTDMSRFPTAKQFISWLCLSPKTHKSGKIKKNVRGTPCNPAGQIFKECAQGLMNSKFIAIGAFMRRIRGRKDSGIAIKAGARKLALAYYNALTKGMAYVEQGTKQYEEQIKRRELISLKKLAKKYNMQLIENQMAA

SEQ ID NO: 321290 - protein, 369 aa, unidentified
MTKNILFIGMDVHKESIEIAIADGANTEVRRYGKIGGTWEAMRKTLRKLVSLGKPLHFCYEAGPCGYELYRHLVSEGHDCWVVAPSLIPKKAGDKVKTDKRDAMQLAKLFRAGELTPVYVPNREDEAIRDLSRAREDTMLVQKSARQRLKSFLLRHDIRYEGKTSWTEAHLRWLADEVRLTNPAQQVVFQEYVNSVTEAAHRLARLNEQIDHFVKDWRLYPAVEALMSMRGVKMIVAVTVVSELGDLSRFDNPKQLMSFLGLTPSEYSSGQRQTRGRITKTGNGHVRRILIEAAWCYRYPAKVSREIQLRQQDIPLPIRTIAWRAQLRLTQRYQHMQRKGKPHNVTVVALARELAGFMWAIVNEVTYPR

SEQ ID NO: 321291 - protein, 316 aa, unidentified
MQSVLNLGGDVDSRFIMIACAAHSFAPHRVANARGALGAWLRSVPRGSRLGLEATGGHHELLADLAHAAGLQVFVLNPRDLRRYAQGVGRRGKTDRIDAEVIARYVAREHAELHPYTPPSKAQRALSRLIKRRAKLVAIKGALTQSLRGLPGVRQELHQVITRLERLIGQVEALMQRALQQVPAAQQAAQRIATIPGFGPLGSTYLGHSFTRIPYANSDAVIAHTGLDPRPDESGRRQGRRRLSKRGPGEMRRIVFNCAMSAAKTQLWRPYYQAQRAKGLSSTAAIIILGRKMVRVAFAVYKHDQPFNPAGLRVIT

SEQ ID NO: 321292 - protein, 339 aa, unidentified
MVAVIGLDLAKRVFQLHSVDPETGEITKYRLKRSDMISFFANRQPAVVAMEACGSSHHWARQLRDLGHEVRLIATKFVKPFVKGNKNDAADARAIWEAAQRPEMRFVSVKSQAQQAILALHSMSDGLVKARTAQLHQLRAAFYEMGIDLPEGRHWCVKRLPDAFARLEGQIPAMVVEALRDQYQLVVHLTERVDAIERKLEVFKRSDGRCQRLLQVPGVGLLTATAIVAAVGDAREFRSGREFAAWLGVVPRHSGTGGRVRILNISKRGNSYLRAMIIHCARAVMARQKKHSSWLQRLMRERPWNVAVVALANKIARTIWALLAHGRSYSPPAAAQVAS

SEQ ID NO: 321293 - protein, 402 aa, unidentified
MKKSSRMSVIHPHAAGVDIGAEFHVVAVPPDADAAPVRTFQRFTGDLHRMSGWLKTCHITTIAMESTGFYWLPAFEIPEAAGFNVILVNARDAKNVPGRKTDVNDAQWLQKLHSFGLLRASFRPEHDISVLRSYLRQRERLTEYRATHIQHMQKALMQMNVQLHHAVSDITGVTGLSIVRAIVSGERDPSVLIQYRDVRCKKTPEVLQQALTGNWQPEHLFAPEQSVAFFDFYQEKIRECEDQIETSLLQLSTGTEEPEGVLPSARHRTKQPNQLSFDVRPLLWKITGADLTQIHGFGPYLALKFVAECGTDMNRWPDASHFTSWLCLSPGNKISGGKVLSSKTRRSSSRIAAALRLAATTIGRSDTALGAFYRRLSSRIGKAKAVTATARKLAILFYNALK

SEQ ID NO: 321294 - protein, 423 aa, unidentified
MEVMHERCAGLDVHKAMIVGCVRIVAGGKVSRECREFDTTTAGLEALLAWLRERGCSHVAMEATGVYWKPVWNILSDGDFELMVANAAHIKNVPGRKTDVNDATWIADLVACGLIKASFVPDEEIQELRSLLRARKQLTREQTSHIQRIQKTLEEANIKLDSVISDILGVSGRRMIEAMIAGVRDPRKLAQLADRRIKASPKVLYDALHGRLTDHHRFMLQLYLEQYDALTAAIIKIDRAVEAAIARMDEEAAQGHATFRSLILLLCTIPGVSTLSATVILAEIGRDMSRFPTAGHLVAWAGLCPGQNESAGKRKSSRLRKGAPWLKTMLVQCAWAASRKKDSYYKAQFNRLRGKHGPKKAICAVAASMLTAIYHMLKDGAEHHDLGADHFDRRSTDIKAKRLVAQLTKLGFQVALQPLAAAA

SEQ ID NO: 321295 - protein, 321 aa, unidentified
MYIGIDVAKDTLVIAERPSGTCTTIDNTSAALRPWVKRWSVASPTLIVMEATGGYEAVAASTLATAGLPVVVINPRHARDFAKATGELAKTDTIDAALLAHFAEAVRPPVRALANAETRVLESLVSRREQLLDMLTAERQRLQQTRQQHAQATHLRRSLAQHIAYLEKHLGGITADIAAAVEASPVWAARDALLQSVPGIGPTITHQMLAQLPELGTLSRRRIAKLVGLAPFNRDSGRLRGARHIGGGRTTLRAKLFMGALSAIRCNPRLRDVYRRLVASGKPKMVALIAVARKLLTILNQIVRTNTPWNIAHDRAMLQEA

SEQ ID NO: 321296 - protein, 387 aa, unidentified
MPQPAAVLPHASPDYDRTLVLAIELSSKSWVLAAQVPGLAQVKAKRTIEPTKEALLGALASYRARAAAAGHQIERVVSIYEAGWSGFWLARWLITQGVQVHVVQPSSVLTDRRMRRAKSDGIDAELLLRTLLAWLRGEPRVCSMVPIPDQTDEDARRAVRERGELVAERVALVNRIGAVLATLGAGDYNPLLQSRRRRLNELRTGLGEPLPPHALAKIERLLARLELVLAHIAELERERNAVAETAAPDHAAKMIQQLAGLRGIGVQSATVLVREAFVRRFANGKALGAYAGLTATPYSSGGLEREQGIGKAGNRRLRSVMVELAWLWQRYQPGAAQVVWFRERVGKTGRRLRKVMVVALARKLLIALWRYVTDGVVPEGAAMKPAI

SEQ ID NO: 321297 - protein, 426 aa, unidentified
MLRSQVEKVMAINPKIMIVGVDIAKKTHWARVLNYAGLEITKPFSFHNTKEDFIRTVVKLENLKKEKGLEEIIVGMEPTGHYWKGLAWFLKQNGIPVVMVNPYHVKKAKELDDNTQTKSDRKDAFVIAKLVKDGRYSKVYLPEGVYAELRVLSNTRSQMRAKLNVVKNMLVAILDEYFPEFAKVFKNLEGKLATHALYHFPFPQQVIERGLDGMVFEFKKAVKKGACLKRAKKLLGAAEESIGVTAGTESAKIRMRSCLEEIEFLRKQMANIEIEMEKKLEATGIAQYMISFPGIGVVTAAGILGEIGDPKRFESWEQVRKYAGFNLVEDSSGDRKGKTVVSKRGRAMLRNILYQAALVMVAKNKEMKLLYHHLTDRKENPLCKKQALVVIAIKIIKVILTLVNKQQLYDAGKVLGEYRIEQIKAA

SEQ ID NO: 321298 - protein, 415 aa, unidentified
MALKIVYKICCGIDVHKTFVVACIASTDSNGVTTYEHHRFSTYTKGLKDLLQWLLKHNCKDVCMESTGKYWIPVYNVLENDCTIVLAHPKYVKAIRGKKTDKKDAKWIADLFKHDLVAGSFMPPADIRQLRDLMRYRFKLTCFMSSEKNRLQNCLTVSNIQLGNVVSDTFGKSAQAILDKLLENPADTSFDLEPLVYKSLKKKLPELRDAIDGYITPEQAGKLKVIKAHYENLESRKAELEELILALAAPYQQELAILQTAPGIRSDFTAIGIISEIGTNMEAFPSAKHLCSWAGLTPTNNESAGKKKSVRVSKAGCYIKPLLVQCANAVITSKKHPEIRNRYLRLKKRRGHKKAIIAIARMLLTALYHMLKNGENYNAELYRKSDLPPVDREITVEQAIIIARNQGYKIKSATA

SEQ ID NO: 321299 - protein, 482 aa, unidentified
MKKRNIYQNQSQELLHLFEEAGSSEKVMCVPMDYAKNDHLVMFCNGHGDILRKPFSVKNTPEGIAYIDDQVTRSCRRRGIKREHVFFGGEDANSFAKNFVSTLRSKGFVVANVNAHDAKKQRGNVQASTDRIDLMGIATMLLNCRANCCPAQFGIYRNLRTLVRHRRRLVQMLTEVKNRVHGIVDEIFPGFLNEKNSGIIPFTQSSLYLMEDRFSPKQIRRRKRQKLVEILKRFGTSKAEYTAAKLQQYAAKVLHAPVEYVDTMQLSLAQHVKHIRCLKESVVQMEKEIALNLAQTQGAFLTSVRGIGLVLAAGVTAEIGDPNAQKPLNNLASYAGIIPRVKQTGGLDGKTYTGPVAKRCNRILKDYVVKSAYHLGLHGPQDLMNDYKRRNASGQHADFGIGRRYLRMATNLMRTSQVYLPPHLRKADSTVQDRAGYYLMSWPYLREKWKKVGALEAALANNRPLGLWRQIVQELYDIKLKL

SEQ ID NO: 321300 - protein, 325 aa, unidentified
MAKRITVCAGIDTGKRKLDVAIDGSGEPLQVENTAEGHKVLVAWLQRHKVKRIGIEASGGYEQPVVAALRRKRFVVIVFQPAQLRAYAKFHLQRAKNDKIDAALIAAGTAAVKQIHPAPDPRLTPFAEHLTMIDQIGEDIMKLKNRIESCRNERIRAVWKEDIARLAKRERTELKALVAAIRQYPDLAERLELIHSVGGAGLPTAVAILVRMPEIGQLTREQVAALAGLAPYDDDSGDQVGARHIDGGRERLRRALYLAALPASFRWNPQLIALYQRLRAAGKEHKRALVACARKLLIFVNTVVARGTPWQGEPPAARTANPSTA

SEQ ID NO: 321301 - protein, 281 aa, unidentified
MEITTIGLDLAKSVFQVHGVDATGRVVVRKSLRRAQMLPFFTRLPSCLIGMEACGTSHYWARELIKLGHQVRLMPPAYVKPYVKRGKTDAADAEAICEAVTRPTMRFVAVKSPEQQAALSMHRTRDLLVKQRTQLVNMIRGLLAEFGIDIPKGLERALLMARRIVDGEAPDVPMEAAKIVSTLSRQAIDIHIRLREIDRDLLVWQRGNDVSRRLMTIPGIGPVGATALAASITDPHQFRSGRQFAAWLGLTPLQKRAAAKSGSGASPKWAINTCASCSLLA

SEQ ID NO: 321302 - protein, 402 aa, unidentified
MTYDYVIGMDACKYFHHACVLDIDGTQVLSKRINQNEQSLRALFSAFSAYDHKVLVVVDQPNNIGRLTVTVAQDIGIDVRYLPSLAMRQLSRIHAGNAKTDIRDAYIIAHAAKNLPESLRSVDRVEEAFLQLKVLNGIDEDLARSYTRLINQIRSALVGCYPQFEQALRGQIIHRKWVLHLLARYGGPTKIKRLGKAKAAAFARRYKARNPEPVLDAIFAAISEQTVTIAGAHYAEMGVAMSAKDALLKLEHRQQIEKEVIELINDIPHTQFLLSMPGIGPKTAAQILMTAGDMSDFPSAGHLASYAGLSPRTNQSGTSIMSNSLNRAGNKKLKNALWQSSFASIRSHERSRQFYERKRREGKRHNAAVVALARRRLNVLYAMMRNHEHYHDPAPSQEDLAA

SEQ ID NO: 321303 - protein, 385 aa, unidentified
MLTQGFQATAAANQDGTIYLAFELSKSRWLVARLLPGSSKISRFRLEGGDTAGLLQLLTEAREKAARLGFAKPRIVSCYEAGYDGFWLHRWLQAHGVDNRVLDPASIEVPRKARRAKTDKIDLAKLMRVQLAHVRGEPQVCSIVHVPTVAQEDAKRVSRERASLLQERISHTNRIKGLLFAQGVRDTDPLARNFLARLDELVTPDGRRLSHHLLGELRREHARLSLVVSQIATLEAEVRTAVQQAQPGTPEAKMGLLLQLKSMGPTWATLLVNEVFYRDFHNRRQLGAYLGLTGTPYNSGQSVHEQGISKAGNGRARNVALEFAWLWVRNQPNSALTRWFLNRVGEAKGAVRRIAITALARKLMIALWRYLETGLVPTGAVLRTK

SEQ ID NO: 321304 - protein, 335 aa, unidentified
MKKIYVGIDISKEKCNLCFRSGLEIVREEECSNDVKALKKAFKAVLKALGASLEEVLVCAEYTGRYIYPLTVACQELDIFLWMDDPTRIKNSMGLTRGKNDAIDAARIAEYAFRYSDKAVRYSIPDAALASMKNLLADREFLLIDRKRYQSQLTDQKKYMAPGDFKHKNSRWKKVIKSIDEQIAAIDAEIDALISADPVLVRQKELLVSIDGIGPRIAINMIAITGGFTRFQNARQFCSFAGLTPYKYDSGTSVRSKAKISKRANQTMKALLHMSAVNVATRMKSGEYKDYYERKLKEGKHIMCILNVLRAKLVHRMFSVIRRDTEYSKKYKTVC

SEQ ID NO: 321305 - protein, 326 aa, unidentified
MNEVITIGVDIAKNVFQIHAVDAAGEPVIRRQLRRRQVLPFFKKLPPCLIGIEACATSHYWAREIAAFGHEVRLMPPRYVKPYVKRNKNDAADAEAICEAVTRPNMRFVPIKTPEQQSVLMLHRSRQLFVRQRTSLINAIRAHMAEFGIVAGIGRNGVEVLLKRIAEGNDDRLPAPARECLMALAMQLELAKRQILEADRRVLAWHRSSKISKRLEAIPGVGPLIASALVASIPDPSAFRSGRDLSAWIGLVPKQHSTGGKERLGGISKAGNRYLRTLLVIGARGLHPPSLAGQAAGEALRQDRRHRPGQQDRPDRLGHDGTQREI

SEQ ID NO: 321306 - protein, 346 aa, unidentified
MVETTIIGLDVAKQIFQVHGVSAHGMVTVKRQLRRSDVLGFFGKLGRCIVGLEACGGSHFWAREIRALGHDVRLIPPAYVKPYVKRGKTDAVDAEAICEAVSRPTMRFVPIKTAECQAALMVLKTRDLLVRQRTQAINAVRGHLAELGIVAAKGLAKVGTLIAIVRDENDQRLPSAARTALKLLADQIEALTKQVDALGRQIVAEVRRDDTMRRLSTIPGIGPITAATIQALVPDPGAFTSGRHFAAWIGLTPKMHSSGGKEQLGRISKMGNPALRSLLVVGATAVLQHARRGATISPWLTALLARRPAKVAAIALANKMARIVWALLTTGGTFIRKNRAAEHVAA

SEQ ID NO: 321307 - protein, 387 aa, unidentified
MEVRVVSTPSAGADNEPVHCYVAIELSKSSWIVGFQTPLTNKTSQYQVKACDANALLELIERIRTRVARELRRPIEVMSCYEAGYDGFWLHRVLKAHGIHNHVLDPASLQVNRRARRAKTDRIDADRMVRALIRYLRGEPEACSVVRVPSVEQEDAKRLHRERRRLIAERVQHVNRIKGLCATQGIYHYAPLRKDRLARLDDLRTGDGRALPTRLKAEIARELKRLEVLLEMIATVETERDVILTSAASTHLNAGKIKILAKLKAIGPEFATTLVGEVFYREFANRRKLGSYVGLGSSPFCSGPVDRDQGISKAGNPTARSMMIELAWTWLRYQPGSALSIWFRERVGNLKGRPRRIAIVAMARKLLVALWRYLQTGLVPTGALLKA

SEQ ID NO: 321308 - protein, 422 aa, unidentified
MPDDGSVQLAAVIGIDWADEKHDVALQEAGSDRIERKVLRHTPESISEWVAELRERFSGRRVGIALETSRGPLVNALLDYDFLVLYPVNPRSLKRFREAFYPSGAKDDIPDADLLRELLLKHRERLHAWVPDDVETRALRRLVQNRRKTVELRTKLSQQLRAVLKEYFPLALSLLGDDLSSVLACDFLLNWPTLEKLQRVRPKTLRKFFYDHNSRSAEQIERRIQEIQAAKPLTTDSAIIDTGALMAQMLAAQLKALAPSIARFDKEIETRFSAHGDAALFKSLPGSGQALAPRLLTIFGSDRERFRSADEVQLVTGIAPVTERSGKRSFVHWRRRAPVFVRQSVHEFAQHSTLHCPWAKAYYQLQVSRGKGHHAAVRALAFKWLRIIWRCWKDRVSYDDALYTAALIRRGSPVGLALQRGA

SEQ ID NO: 321309 - protein, 324 aa, unidentified
MKLFIGVDVGKYTLDVCCNNKIFQVSNDQLGLEKFYLLLQEEIKNGNEIALVICEATGGYEVKLVKFVKEHNLPVLIEHANKVRNYAKSKGLLAKTDKIDARLLSEYAEIMKVKPTMLMRSDNEEKLVGLVKRREQLKIDRTKEMVRLDKELDKSVKKSIKNHIKWLEKEVSTIEELIKEIREKDKDISIKVELLTSIPTIGDITAYYLIAFLPELGSTNEAKKMAALAGIAPYVRDSGKYQGKRFIHGGRAALRSALYMAALSGITHYKDLKEFYYRLRNKGKPAKIALIAVARKLLTVLNSVMYRRTPWVKEYVPTQNVVLT

SEQ ID NO: 321310 - protein, 440 aa, unidentified
MNPEDRSRLEEFRQFRKGVRGSKEYLLVGIDVAKDKHYAFFGTATGKTLLRRLVFENNLEGFRKLLVQAEAMKVQGGLTKVVFGMEPTGNYHKPLGEHLIRCGRGVVFVSGVAAHENRKTLDGRWDTNDTRDAANVADLVSQGKCLFYEFPVGALQDLRNLLSLKRRLKRMEHGHRVRIRNHLVAKYFPELDRYYEQSEATALAIVRWCLDPSEIAGLEYKEFAGMVGSIRGRSSQERRLQAIWKVAVDSVGCEAGPVVEFEAQVMVEGLKQIRESIRQIDEKIQELCSPFPEYEFLLSIPGFGPDVSAKVLGAIGNPFRFQNRRQVLKLAGFDLSAKRSGKNSESVIPVISKKGKADLRYALYQAAFIASIRNQDFIVYYTNQLRGREREPGIKTKMRVKLAAKLLIIAWTLMKKKEPFHPSYLRAAGPSVSTGDGRER

SEQ ID NO: 321311 - protein, 375 aa, unidentified
MKKNNTVKQSLKKGAKKITKSAQESITIGIDLGDKASRYCVLNGAGEVTEEGSVPTSKKGMMQMFGSLRRCRIAMEVGPHSPWVSRLLSGLGHEVIVANARQVKLISTSSRKNDRLDAQVLARLARIDPQLLRPIQHRNEQAQIHLLEIRARAGLMEARTSLVNGARGLVKALGERLPKCDPDQLGVEQLKSLPPLLQEALRPLLQEVESLTEKIRVYDERIEQIARNDYPETQLLKQIKGVGTLIALTFVLTVGDAGRFESSRDVGCYLGLRPKQSDSGESQPQLRITKEGDTYLRTILVQGAHYIISARGPDTDLKRWGLKLAERGGKNAKKRAVVAVSRKLAVLLHRLWVTGEVYEPLRNSNARVAEKKTAA

SEQ ID NO: 321312 - protein, 396 aa, unidentified
MTTIGIDIGGQSHVVARCRDGQARADREILRVSQSRAGFTVLDAWLARQPEPVTLVTMESSGHYWMPLASHLRRHDLPVAVVNPLAAKYFARSRLARTKSDPADARSLAEMAMRDTPDARDPLAGVELRQAARFAMTLVTEQAKVCQRLIRLVELGFPELGEMFDDPTCRIAREVLRLAPTARTATRRRTSTLANANMGPGHRRLGTAKAERLQATAADSIAVPELDAEVAFEVGLLLDQYDLLERQIADADRRVAGLLDGETARRLQTIPGVGPSIVATLLAEIGDIGRFDDFDQLLAYAGIHPAERSSGTKGANPETAWHMSKAGNAHLRAAAYRMAVVGVRHNPVIAAHYARKRAAGKSKMNALGHCMRKALSIVWGVWRNGTDFDPNWGVGT

SEQ ID NO: 321313 - protein, 364 aa, unidentified
MTAAQAGRQAASSTVEVVGGVDTHKDTHTAAAVDTAGRVLGSAQFPTDAAGYRALLRWLRGFGTLLLVGVEGTGVYGAGLARSLAAQGVAMVEVDRPDRKARRWQGKSDPVDAEAAARAALARVRTGVPKQRDGRVEALRALRVARRSAVGQRADVQRQIKALIVTAPESLRAQLRKLPDRELIEVCADLRPDRADADDPGTATKIALRSLARRHRRLSVEVADLDELLGPLVAQINPGLLALKGVGAEGAGQLLVTAGENADRLTNEAAFAMLCGAAPLPASSGKTTRHRLNRGGDRAANCALWRIVITRMGTDQRTKKYVARRTTEGLAKPEIIRCLKRYVAREVFLALQSASTEKRPANAA

SEQ ID NO: 321314 - protein, 461 aa, unidentified
MPRKRKSKSKKVIAATALPILRPDVAGIDLGSTEHWVCGPQRQQDTQANVQVFGTTTPQLEQLADWLTEQGVGSVAMESTHVYWIPIYELLESRGFEVLLVNARQISHVPGRKTDMQDCQWLHLLHSCGLLRGSFRPIEAICRLRALQRQCANLVAERTRAVQWMQKALDQMNVQVHRAVSDLTGKTGMAIVRAIIDGERDPARLAELRDCRCRKSLDEIAEHLTGTWRQEHLFNLSMALRFYDEIQDMIASYETRLREEMEALQPPEREAQSMPAHPNPSKEKAIRRRGDQQLRQSLWRLSGFDLTRIDGISSGAAQVVLTEVGLDLNAFPSEKHFVSWLRLAPNCPISGGKQLRKKTKGFGATRVAGVLRMSALSLQRSKTALGAAFRRVARHKGGAVAIFATARKIATLVFRMLRFGQDYLDVGEKAYEARFHQRRLNGLKMSAKSLGYELVPDVASG

SEQ ID NO: 321315 - protein, 423 aa, unidentified
MEIMYERVAGLDVHKATIVGCVRLGTGRKVTRECRTFDTTTDGLLALLAWLVECRCSHVAMEATGVYWMPVWKILGEGDFALIVANAAHIKNVPGRKTDMNDAMWIADLLACGLIKASFVPEEDVQELRSLLRTRKQLGREQTRHVQRIQKTLAEANIQLDSVLSDIMGASGRRMIEAMIEGIRDPRKLAALADQRLKATPKQLYDALHGRLTDHHRFLLKLHLRQWDGLDATIREIDLEVAARIAHMDEEVKAGTAPFCDLIELLCTIPGVSILSARTILSEIGRELSRFPTAGHLVAWAGLCPGQNESAGKRKPARLRKGAPWLKTMLVQCAWAAKRKKDSYYKAQFFRLQSRRGPQKAICAVAASILTAIYHILKNGTEHHDLGIDHFNRRSTESHTRRLVTQLTKLGFEVQLQRTVQAA

SEQ ID NO: 321316 - protein, 356 aa, unidentified
MSTNPSVSFAHLSSRVVECEEDGLVRAVGMDVHRDFCGVAIAEAGAVRSGGRIETSPEALELFAASLARADVVALEVTGNAGEIARILRPHVGAVVVVSPHDTGISRARAKTDRLDARVLAKLLAAGELDAVWMPDEWTRAMRRRLARRDQLVRARTRAKNEIHAVLIRRLAGRPPVSDVFGVRGRRWLSELELREDERETVAGCLRHVDFLDGEVAALDGAIASEALRRPEVLRLMTVPGVSVVTASTFVAAIGDIRRFSSARKLVGYLGLDPRVRQSGPGPARHGRITKQGSASVRHVLVEAVWTAVRSPGPMRAFYERVRARRGAQVAAVATARKLASLSWCLLTREQDYSFA

SEQ ID NO: 321317 - protein, 429 aa, unidentified
MTNPQSTLEAVVWVAIDVAKDRHEALIEAPGWKSRKKFRVQNTAEEFRAFAEFLHDLGWPVRIGFEPTGNYHRALAYFLHSEGFHLELISSLALARTREAMHNSWDKNDPKDAQVILHLLKAGLTQHYHDPIVHNLNDLQELSKTHHHVSLEKTRIQHRLLTHYLPLYFPEIARYHSSSRSEWLWNLLIEFPTPRSMARLSTDEFVRKAWSLVGRKVAKERILIDIYLTAQASVGLPAEENSEAVAMLRFVLRQLLTLCQLRATIEERADDLLSSNADYQRLRRIPGIGPISALTILAEAGDLRRFSHHRQFLKFCGFDLATEQSGQFRGLSRLSKRGNARLRAVFWMAASVAVRMRENSFRAKFERYTRSDPGSADRKRKAYVAVAAKIARVTYALIRSGADYRCFHEVAVPGGRTRSARAVEAIPTS

SEQ ID NO: 321318 - protein, 415 aa, unidentified
MEKVYDICCGIDVHKKLTVACLRNGRKQEIRQTGATTRELLELADWLKSKGCQMVAMESTGSYWKPLYNILETSELAVMVVNAKHMRAVPGRKTDATDAEWIADLTQHGLLRASYIPDKAQRELRELVRYRKSLVDDRTRELNRLQKMLEGANIKLSGTVRDINGMSARNILNHIVAGKKLDEAQFDEMYRQGQIAHNLKASKSQILDDLNGVLSPLQRRVMKELLSHLDELNEHIRNLNDEIDRFMKPEEYEAAKKIQDVPGIAQTSAQAVIAVIGTDMSRFPTEKHISSWAGLCPGNNESAGKRRSGKTRKGNSLLRSTLLVCAHSAVKVKSSYFYAQFARVCAHRGSKRAYLAVAHSMLIAIYHILKDNVPFHDLGADYYNQFNKESKIRAYLKKLHALGWTEPTATAVAPV

SEQ ID NO: 321319 - protein, 347 aa, unidentified
MNFYTKQHQYYCGIDLHAKTMYLCILNQRGDIVLQRNIRTHSEVFLKTIESYREDIAVAVECMFTWYWIADLCAKENIPFVLGHALYMKAIHGGKAKNDKIDAHKIAVLLRGGMIPMAYVYPQQMRSTRDLLRRRIHLTRKRAELLTHIQNTNYQYNLPDIGKKIAYKANREGVAERFPDESVKKSIELDLKLLDYYDQLLPRLEHEISLIAKIHDADSYFRIRSIPGIGRILGLVILYEIHDIHRFPRVQDFVSYCRLVKSAKESAGKRLGTSGKKIGNVHLKWAFSEAAVLFLRRNPEARKYREKLQKKHGKAKSMTILAHKLARAIYYILKRKEVFHMNTFFEK

SEQ ID NO: 321320 - protein, 338 aa, unidentified
MNIVFLGIDLAKNVFQLCGLNQAGKPVYTKRTGRKELLQTLANIPACLIGIEASTGAFYWQREFEKLGHKVKVISPQYVKPFVRGQKNDGNDAQAIAVALMQPTMQFVPPKSPEQQDIQALHRARQRIVNRRTATVCQIRGLLLDRGIPIGSAVSRARRAIPLILEDAENGLSSRMRRTIAELYELFNDLGRRIHFFDKEIETVFRQSEACQRIARVKGIGPKTATAIVAAIGKGTEFKNGRHFAAWLGLVPRQHSSGDRQALMNMMKKGDKHLRTLFIHGARAVVRVATNNNDGHMNQWVNQLKERRGFNKTTVAVANKNARIIWSMLRNETEYQVV

SEQ ID NO: 321321 - protein, 312 aa, unidentified
MTRIICGVDVSSQKLDARIGREGRFASFENNPEGVEALAGFCREHSVALVVMEATGGYEKQPFALLWGHSLEATIVNPRNVRDFAKAMGRLEKTDRIDAGMIAWFAETKNIKPTPPQSETQGHLAALVTRLSQLTALRTSQTNQKKLIKDPTVLKSFSELLALIARQMRALEREIVGLIDSDPLWSELDKAFRSVKGVADRTVARLMAQMPEIGLVSGKAVTKLVGLAPIAKDSGKSHGKRPVRGGRSGIRATLFVVAEIVSRYDRDFAAFRDRLAAAGKAKKVIRVALAHKLLVRLNAKAREVRAKFALAA

SEQ ID NO: 321322 - protein, 337 aa, unidentified
MSSIHILGIDLGKHCFHAIAHNRCGVEVFRRKFNRNQLLIFLSKIEPTTIAFEACGGAYWLARKCGELGHQPRLIPPQYVKPYVKGNKNDFIDASAIAEAASRPTMRFVAVKSEEAQVIAAIHRVRDSYIKERTATMSRIGAILLEFGLSFPKGHAKMKSLFQWLVEQTVSLPKSLLCELTSIHEHYKYLNEQIKTQDNKLQTIVNNNESAQLLKTIPGIGDLTSTLCIADVSSPSNFTNGREMAAWLGLVPRQFSTGGKTKLLGMSKRGNKHLRTLFVHGTRAVLSRLETTGKVFGEWLVNLRATKPFNVVVVALANKLVRIAWAVLYHRQAFKAV

SEQ ID NO: 321323 - protein, 342 aa, unidentified
MYYVGLDVHWSMSVICILNCNGKLVKSVTIRGPWAKVIETLKALKHSLAICYEASCGYGHLHDQLRQIAQRVVVAHPGQLRLIFRSKKKNDRVDARKLATLLFLDQVPQVYVPSVDVRSWRSMIEFRHRLVAKRTRVKNGLRSLLRGHGIEQPTGKKLWNRKGLAWLAELAFPNAIDAVQRDMKLEELALLEKQIQRVEKELNAIVAEHPGVYLLRTIPGVGPRTSETMIAYIDDPRRFSKNKKIGGYFGLVPSEDTSVNKRLGHITRQGPSTVRRLLAEAAWQGYRRSPHIRAYFERIQRGDRQRKKIALVATAHYLARVMLAMLRSGECWRFDKQQKDAA

SEQ ID NO: 321324 - protein, 316 aa, unidentified
MSHTLYVGIDVAKDSFDVASDPSGLALSLPNDPTGRQRLLDALQNHPVALLVMEATGGYERSLVADLIGAGHKVVVANPRQVRDFARGIGQLAKTDRIDAQVLARFASMVKPKPRQESSQQAVNLAELVTRRRQLSDLMTQESNRLQMARHAKVRKSLQKVIRLLEQQIIDLDKLIRDNIDSDDGLRRKDEIVQSFKGVGPGTSAMLLSHLPELGRINRQQIAALAGLAPWDFKSGKWAGQSKIWGGRMPVRNMLYMAALSAIRSNEIIRKFYQRLESQGKKFKVAITACMRKILVILNTLVRNDCLWSPPLPKNA

SEQ ID NO: 321325 - protein, 410 aa, unidentified
MELMHRRCCGLDVHKETVVACLRLVCDGQVTTEVRTFQTTTADLLRLSEWLAANGCTHVAMEATGVYWKPVWHILDDGEFTLLLANAAHVKNVPGRKTDVNDATWLAELLAHGLLRASFVPDTQTQEMRTLLRTRKQLVREQSSHVLRVQKTLEDANIKLDSVLSDVMGKSGRAMIEALIAGETNPTKLASLADRRVKGSQDELREALRGRVTKHHRFLLRLHLNQFDALAASMATIDAQVEESLEPFRTAVELITSIPGIKNLSAHVIVSEIGIDMSRFPSAAHLISWACLCPRNDESAGKRRSNRVRKGAVWLKTTLVQCAWAAVKKKDSYLQAQFFRIRARRGQKKAILAVAASMLTAIYHMLKDGTLYQDLGRNYLDRRSTDQQKKRLVKRLADLGYAVALTPLAA

SEQ ID NO: 321326 - protein, 338 aa, unidentified
MNHAAQSFDAPASVGVDVSKAELAIAERHGEGIHPRSLANTAEAAEAFVRELVARGFCGKLLAEATGAYHWPLVLAAAEQGLDVRLINPLQSAKHRQGRVRKCKTDRVDAAVLADMALTERELPPPFRLDRAGLRLRQHLSLMASLEHSLQALTGTLRGHREAAAFAGVDPVAPIAELEATVQRLKAEHRRLQREADRLARQLDSRSSRARWSALPGITEELGALLGAVLEGQGRSGKSWVAFAGLDVSVRQSGTFVGKGKLSKRGSPYLRKRLYQAAWGAAMNHPQARAYYDMLKARGRAHREALIIIARKLVRAGFALAQNPDREVDPDRLFRLPA

SEQ ID NO: 321327 - protein, 369 aa, unidentified
MGKHSEVFVAFDVAKKKHAVAIAEGGRAGEVRFLGDVDNSPLPIERTIKRLADRYDRLHVCFEAGPTGYGLYRQVQALGHECIVVAPALIPKRAGERIKTNRRDAVTLARLHRAGELTSVWAPGPAHEAVRDLARAREAAADDLRRKRQQLLSFLLRHSRIYSGGGHWTLAYRRWLAGQKFDHAAQQIVFQEGIDAIEDALQRLRRLEKQLALIVPEWSMAPVVEAYQAMRGASFLVAVTFAAEIGDVRRFDTPRQLMSFLGLVPAESSTGDTVRRKGLTLAGNRRARRVLVEAAWTYRYPARVSETLRVRLEGLPKPVRDIAWKAQVRLCARYRRLSATGKKLPIVVAAIAREMAAFLWAIGREVAAV

SEQ ID NO: 321328 - protein, 340 aa, unidentified
MGEITTIGLDLAKNVFQVHAVDEAGSVVMRKRLRRGQVLAFFAEIPSCLVGLEACATAHHWARELIALGHEPRLMPPTYVKAYVKRNKHDVADAEAICEAVRRPSMRFVPIKTMEQQSALMMHRARDLLIRQRTMLANALRGHLAEFGLIEAQGLHKVARLIAIVMDQNDGRIPDIARQVLKVIVNQIEDTQTRIAELERQVLAWHNNNPVSQRLATIPGIGPIIATAIAATVADPSIFRSGREFAAWLGLVPRQNSTGGKARLGGISKRGDSYLRRLLVNSAHTVLLCSKQAKTDPWLTSLLSRKPRLVVAVALANKTARMAWAIMNGQDTYRRAPLAA

SEQ ID NO: 321329 - protein, 412 aa, unidentified
MLKIVYPICCGMDVHKSFVVACIATTNDHGVTTYKSKRFSTFTNDLRRCAAWLAENHCSDVCMESTGKYWIPIYNILEASCTIVLAHPKYVKAIRGKKTDKKDAKWIADIFKHDLVSGSFIPPADIRQLRDLVRYHWKLTNYTTGEKNRAQNCLTVSNIKLDDVFSDVFGKAASAITTQLLESSEPFDVTPYLTKGIKAPVEKIQAAVDGEMCAEQAEKLRIIRTHMDTLELCKLNLHSLILTIAEKYLPQLNIVTTAPGIQAFSAIGIISEIGVDMSVFPSSKHLCSWAGLAPQNNESAGKKKTTRISRAGAYIKPLLVQCALCAIRAKQFPEVRRRYLALKKRRGHKKAIIAIARMLLTAVYNMLKKNEPYDPELYCKDDRPPAHREVSVEEAVYILQRQGYLVTAPSSP

SEQ ID NO: 321330 - protein, 394 aa, unidentified
MILVGIDIGKNKHTFSIIDKGTGEILSSPSVFDNNQIGFLYLIKKLSNYARAELLIGMEDTGHYHFALLKYLLDNRYTVALINPMTTDLTRKIQGGITKNDTLDSITICDVISSNHRKKPYRITKVNRFDLYEQKQLTRHHHNLKEELNIYKNRLQKCIDIVFPEFNSLFNSKYGIVYMSVLKTFSSANAIANADIRSVRKCFEFKGQGVRISLSAEQLKTTAKFSVGIPSAAEEIQIRHLVCQIELLEKQLSEIDKRIAEFSIKNNSAILSIPGISHFSGTSILAELGDICNYQKSSQIIKFAGVAPYHYESSQFTAQHTAITKKGSRYLRKTLYQIILPVINNNEVFRTYYNKKLAEGKGHRCAQGHCVRKLLRVIYHLLTTEQQFSSELLV

SEQ ID NO: 321331 - protein, 381 aa, unidentified
MTETTRMTECNAPGATLYLAFELGSTKWVLAFTTSPAQRPRHRQVAAGDLSGLLREVLTAKVRFGLALDAPVRSCYEAGRDGFWLHRWLVAQGLDNVVVDSSSIEVNRRARRAKTDRLDAGKLVYLLMRWAQGERAVWSVVHVPTPEAEAARQLTREIATVREDRTRTRNRIQALLATQGIRRPLTRGFAAQLATLQTGDGRPLAVAWQERLAREWAQLETIEGRLTVLHAARRAQIAEGVTRVAQVARQLTRLRGVADTSAALYSAELFGTRTFSNGRQLGALTGLVPVPYRSDQRVQDQGISKAGRAELRRVSIQVAWCWLRWQPDSALAQWFTRRFATAGGRSRRIGIVAVARKLVIALWRFVEHGVIPEGANLKPAA

SEQ ID NO: 321332 - protein, 414 aa, unidentified
MEKRNKVCGVDIHKKFLIATILSRDGAKIQKRYSTDIDDLLNFRDWILESNCDCVAIESTGVYWYPVNAVLENKVELILANAHQIKHTPGRKTDSIDSEWIAEVALNNLIDPSRIFPKEERDLRRLTRTRESLVKIRSQFKNQVHQGLESCSIKLSSVLSDNFGKSGRHILDGLIQGKSIDSIIEEIPSKRVKKNEGQIRSAIRTGLDETQIFLIQSHLNTIDALTKKLDEIESEIKQRISKKKDDLKIAMSVPGIGFKAATTILAEVGNYRDFSTPDKLASWCGIVPNVYQSADKLITGSITKQGSKHIRWMLVQVAQAALKKRDSKLRKFFLRIKARKGHNVAVVALARKILCILYHLLMNQEMYQEDGVTKSRQSKVDWSSARTDPMSLQTMIEIIAKAGYEVKKIEGHGG

SEQ ID NO: 321333 - protein, 402 aa, unidentified
MRFFVGIDWASQAHAVCVLDDAGRRHWQGSVPHTAEGLTELLGRLRRFLHRGPLRVALERPSGLLVDTLVEAGVEVVPIHPNALKASRPRYSAAGGKSDPGDAFILADLLRTDGHRFRPLRAPSDDTRALRALVRGRDDLVAQRVALANQLRALLERFWPGAAALFADVDSPIALAFLSRYPTPLSAARLGEKRLAQFLGQHAYCGRRPAAALLARLRAAPASQVGEAEAEASGEVVRALIAVLTPLGAHIQQLSAAITAALPQHPDGPLVQSLPRSGAVNAAQILAELGDDRARFPTAEQFAAEGGLAPVTHASGTHHTVVFRWACNKRLRRALTPFADNSRHASPWAALVYQRARARGCRHPHAIRILARAWARILWRCWQARTPYDVGRHRAAQALAAA

SEQ ID NO: 321334 - protein, 351 aa, unidentified
MKTKDTADSKLFIGIDVHKRSWKIHTATDLFDGSTLTIPANAFALQKYVEKHFKGYEVFCCYESGCCGFSHHRLFASFGWRSIVVNPADVHRPAKAQFQKTDKIDARLLCRELKDGRLRGIHVPDIEREQLRCLFRRRNDLVKELRKVKTQIKMQLLYLGIEIPKELDTPHWSHKFRGWLKQLSFDYETMDYCLQTRLETYDFVDKQQRAVSVKLRAYCRKHYKKDYYLLRSVPGVGPIVACGIICELGDLRRFKNFKQLASYVGLIPSIHQSGENTITAGLTPRANRIMRSYLVEATWVALRFDPVMQAYYRSHQGKDVKRILVKVARKLLSRIHAIIRTETPYEIGVLN

SEQ ID NO: 321335 - protein, 407 aa, unidentified
MQGSVITLDVSKGSCHYQGFIRKNQPSTKTRILKFTKKSFAELSAYRERLAIKAGQEDIPFIFEATGVYHKPLQKYLDDHGFTYYIISPLMSARYRKLELHSNKTDPLDCANIAKVFYEYDKLRVYQRMDKEYESLRDMNRNYEDMLVHLRKYKVRFKSMLDVIFPYYQKCFKNDGIYADLPLILLKEYKHPDIIHQTSEDIMVKKLSKLCPKHQTGYIRNKVQKVKELAEDVYSGCESTDIYVELFTELIETLQKQMKECDVQLIKIIETAAKSPYFDLIRSVVGIGDNLAARILAEIGDINQFDTRNKLISYAGLDPMIRQSGKKDGIHLSVSKKGNRYLRCLLYQAASANYRLKKNDVIYRFNQKKRQQSNPLNSKAANTATAHKILVIVYGMCKNGTYYNPYE

SEQ ID NO: 321336 - protein, 368 aa, unidentified
MLYLAMDQHAKQLTVCVRNEDGGTVLRRQVSTRPEKIEAFFQQFTERDAEFMAILEVCGFNDWLVEELRKWKCREIVLIHPEKPSKKKTDRRDAQKLADLLWLNRQRLAAGQVVRGLRRVYMVTQQEREDRQLTSLRKNLGHRRIRVLNKIRRIVNRHNLIWQYPTKTFQTRAGRRWLADVQLPPIDRLEMDMLLKEWKICDEQIAQVDNELAERASRTVPDCLLNATQILMTIPGVSHYSGLTLASRIGPIQRFPRPRSLANYFGLTPGCRNSGNAQDRLGSITKQGSKTARFILGQLVVHLLKHNPRMREWYRRIKLRRGSKIGRVAVMRRITTTIWHMLTYQERYTIGGPPPRLRKDATSAAHAA

SEQ ID NO: 321337 - protein, 342 aa, unidentified
MFCGVDSHKDTLAACLVDQTGRRLAAAVFPNTPAGHHELATWLDRHGPVGRVGVEGGANLGAGLARFLADQGVDVREVPCALTVRERRRLRRPGKSDPTDALAIARICARDTDLPPARQAGLAEDLKVLSDYRDELLVSRTAEGNRLHADLAILCPGYAQVCRRLTAERSLAAAEQLLADQPSVRAQLARCRIMRLRELDGEIRQLAGQLATLVAASRTRLVDLVGIGPILAARILGEVGDVARFPDADHFAAANGTAPIPVASGRTDRHHLNRGGNRRLNRALHYVALTQATWEPRAVAYLARKQAEGKTKREALRCLKRRLSNVVFKAMLAGPKPSDLAA

SEQ ID NO: 321338 - protein, 403 aa, unidentified
MNSVGIDISKGRSTIAVMRPFGEVVISPFEVRHTGSELSKLAKQLKSLDGETRVVMEATGNYHASVAKLLHNAGLYVSVINAKLVHGYGNNELRRVKTDRKDAVKLANYGLDRWLTLPRYIPEEDTRLLLKNCYRQYRQYSKVQTVLKNNLISLLDTVFPNANRLFSSPIRGDGSEKWVDFVAEFWHCRCVSEKSERAFTSKYLRWCRKHGYNFREAKAHTIYAEASGHIGVMPKSETTKLLVEQAVAQLRATSTALAALKHEMQSLASVLPEYPVVMDLFGVGPTLGPQLIAEIGDVRRFYSKKALVAYAGLDAPPNDSGDVTGRHKSMSKIGASSLRRTLFLVMSVYLQTAPLDEPVYQFMDRKRAEGKPYRVYMMASANKFLRIYYATVKAYLESLEHTA

SEQ ID NO: 321339 - protein, 388 aa, unidentified
MNALTNATSTNTILAIDLGKYKSVACIHNQATGEVCFTSFETSRSELRRLIGKEQPMVVVIEACLLAGWVHDLCGELGVRCLVANTASEAWKFKHLKRKTDKDDALRLAQLYLLGQLPTVTLPPATVRQWRSLIATRQNLVGRRVAVQNRIRAIFVAQGLPAPRGAKAWSSTGLAGIALQAKCLGECGPDELWRGLLELALSEYRQIGELVAQAEARLDALGKQSADVILLQTTPGLGPRTAETVAAYLHDAPRFQSSKQVSAYSGLVPRQHQSGEMDRRGRITKRGPALLRKLLVECAWCMIRYNAWARGIYQRLTGGGRRRKKQAIVALARKILVRCWAMLRDRKPWHDPQTGPKPALPPSKQRRQAEAQQRRQAKQEAALTPTAT

SEQ ID NO: 321340 - protein, 401 aa, unidentified
MNAVGIDVSKGKSMVCVMRPFGEVVLEPFEVLHTAQNLHDLAEKLKALDGETRVVLEATGNYHKPVAFVLHDAGLFVSVVNPVLIHDYDNNSLRRVKTDRKDAVKIANYTLDKWTRLRQYLPEDDTRLALKNCYRQYQQAVAVRTMLKNNLISSLDLTFPDANKLFSSPAKSNGCEKWVDFIGDFWHSECVSSLSSDAFAKKYLKWCQKHGYNFTRSKSDTIYACAVNAASLPKSPTSKLLIQQQVAQLKAVSQSVAAFQQEMLRLSQQLPEFDTVMEMYGVGPSLGPQLMAEIGDVRRFSSKKSLIAFAGIEPQPNDSGKVVGNDKGISKVGSAVLRRTLFLIMTVILQTQPQDEPVFQFMNKKRSEGKPYKVYMMASANKFLRIYYARVKAVMDSKHSK

SEQ ID NO: 321341 - protein, 315 aa, unidentified
MQGDDIAVGIDVSKATFHVAVHPSAEGWTSDTTPGAIEALITRLRALAPAVVVVEATGGYERALVAQCAAAALPIAVVNPRQVRAFAQALGRTAKTDTIDAAVLAEFGVRVAPQPRPVADAETQALAALVTRRRQLLEMIGMERSRLEQAPPTGKITRDLRHHIRWLERRVDDVDDEIGTAIQASPLWRVHEDLLRSAPGIGPTTARTLLAELPELGRLDRRAIAALVGLAPFNCDSGQQRGQRHIWGGRASVRSALYMAALVASRYNPVMRAFYQRLRAAGKPGKVALVAVMRKLLTTLNAMIKHETPWKSATA

SEQ ID NO: 321342 - protein, 348 aa, unidentified
MPNYNQAHQFYGGVDLHARSMFVHVLNAKGKTVFERDLPAEPDAFLGAIKPFRKNLVVGCECMFAWYWLADLCEDKRIPFVLGHALAMKHIHGGKAKSDKIDAGKLAAMLRGGMFPLAYVYPRGKRQTRDLLRRRSFFVRQRAQLITHIVNTNSQFNLPPFPKKLSYAANRSEEIAERFTDPSTRLSINADLRLIDAYDAQIAELERHLLHSAKVDDPVTFGFLRTIPGIGPILGLILLYEIDRIERFPEAGNFLSYSRLVRCAHESAGKVKGFGGKKIGNAHLKWAFSEAACLMLRTCVPVKSWLQRQESKRGKRKALSVLEAKIGRTVYHLWRKQQAFAVKKFLHS

SEQ ID NO: 321343 - protein, 381 aa, unidentified
MPEIWAGVDIGKTHHHALVINAAGSWLLSRRIQNDEAELLVLIGDVLAISEDVLWAVDLNHGGAALLIGLLTAHDQPFAYLTGLAVHRASATYRGEAKTDAKDACVIADQARIRRNLCLLRPGDEIAVDLRTLTTRRLDVVFDRTRQINRLRAQLLELFPALERSLDLTNKGPVMLLTGYQTPAAIRRAGAKRIETWLENRKVKGAATLAHTVVEAAQAQGTALPGEKVAAAMVVRLAKGVMALDEHPHAEVIRSLPGMGPRLGAEFIAATGGDVDAFGSADRLAGFAGLASQARDSGRVSGNLRRPRRYHRGLLRTMYLSAMASLKSGPASKAYYRRKRNEGKGHKEALLSLARRRINVLWAMIRDGERYRPSLPVAGTA

SEQ ID NO: 321344 - protein, 504 aa, unidentified
MTQKNTSSKFGLLLTWPVGKIQRIQEVSNMNLKGTKKKNQVSNANIFEQQELLKKIEVVRENLTASTWHELETKGKFDKNAKLSFICDDMLILGCDVGSETHYLRAIDTRGRELSKSAFSFSNNVDGFSKAKEWAVKIAAEYDKKQIVLGLEPTGHYWFCLATWMISNGISVVQVNPYAVKQTKELEDNSQLKDDAKDPKLIANLVKDGNFGMPYLPEQLYADLRRLSMFRDQLNEDRIRSINRLHRELKIYFPEYKEALGKTEGTFSLELLKQAPFPDDLAALKEDGIRQIWHNAKLRGRGYSRAGEILEYAKASVGIREGKETGKLVVQWFVQKILELDAELALIETQINQKCLEIPHTDKVLEICGIGENTLSGMVAEMGDISRFDDVKEIQKLSGLGLVASSSGKHKGETRISHRGRKRLRYWLFQAAKSAVAHAEEFKKLHVYYTTREQNPLKKMQSLIAIACKLLRIIFTILKKGIKYDPRKMLKDIRRESRQESLAA

SEQ ID NO: 321345 - protein, 359 aa, unidentified
MASKVKKNKVNFKGKKVSIGIDMHKISWSVTALIEGDIVLAITLARPNYDSFRKVISRFEGNHVRIAYEAGPGGFDLYDKLIEDGIECIVTPPSLIPTESGSKVKTDKKDSYKLARFLESGMLKEVWVLSPEERAHRQLVRTRRQIVNHRSDVMRQIKSLLLFNSIDVPFKGTQHWRGPFMNWLLKLDLGYDPLNRSLKALVDLFNYLSAEKKRITEDVLELAKEEKYAKRVQLLESIPGIATLSAMEILVEIQDITRFKTADELAAYLGLTPSQYSSGEHIRMGHITHAGNTRARTTLVESSWILISKDPEMKRKYHRIKNKRGGKRAVVAVARNLSGRIRRMLLDHVPYELNFQKAA

SEQ ID NO: 321346 - protein, 418 aa, unidentified
MKKHSKSLQRSEPTLKRTKARGPVQRDAKEVLAEVLGKLTGKLDAPAVSTSAKENRRGNTVGPNRDRLTVGVDLGDRWSQYCILGLEGETLAEGQLRTTQEDVREFFQALTVARVVIEVGTHSAWVQDVITEWGHEVLVANPRLMEGSKRRKRKSDRIDANKLARLGRVDPQSLYPIRHRSREVRQDLVVLRARDALVSVRTELINTTRGLVKSMGTRLPRCSSPSFAEKVKDAIPVEVREALLPLVQLTETVNDCIARYDQKIEELGQKKYGHTTWLRQVKGVGPITSLAYVLTLEDPQRFSSSREVGPYLGLVPKQEDSGDSQPQLGISKTGDRMLRRLLVGSSQYMLGAFGPDTDLRRYGQRLCERGGKNAKKRAVVAVARKLAVLLHHLWVTGDVYEPLHHTGAETRTAQATAA

SEQ ID NO: 321347 - protein, 445 aa, unidentified
MHYKRLLTWIDGSSSYLSVGLDVGADFTWMSIALPNGAFIGKPFKVVHSDPRSRDLAVTKIKEAQETYSLKSRCFLESTGIYHIPLLCFLRDKGFDCSVINPIITKNSTNINIRKLHNDIFDSKKAALVGLNVSLKASIIPEDSVVDLRNLVRDYYYFKDLQSAVALKLTAELKVSFPAYAKVFSKVTTQSSLKLLSSYPLAGDMLEASKDDIVETIRSTARFGEAYALRKYDAVIAAAQDASVFGRALPSNAVRIRLYIDTYQEYQKHLDALLKALHETVERLQDTLIYDQICLLQSLRGIGFLSAVVLIAEMGDFKLFPSPKKLYAYFGLDPAVKQSGKLNGDKVHMSKRGSSLARRVLHMVALNNVKVDKGSGTPVNPVIYDYYTRKCSGKKKPVAMGAVMHKICNIIFAMLRDNKPFEIITPEEHCQRFAAEYPDKIRKAA

SEQ ID NO: 321348 - protein, 352 aa, unidentified
MGTNKEKIMTYYAALDVSLQSVCLCIVDAEGSYCFEGKFPSEVEDIARCLEGFDGEIELVGFEAGMLSQYLSYGLTAAGFNVVCLESHHVKQSLKAMRNKTDRNDARGIAQLLRTGWYQPVHIKSVESHQVRVMLSSRRVILRKCIDLENELRGLLRIFGIKLPSKLSHGAFDEVVRKPIEANPALTRALIPMLDLRGTLYSAYVKLDKEVRAMAHEDTVCRRFMTVPGVGAITALTFKAGVDDPTRFKNSRLVAAHFGLTPKRHQSGEVDYDGRISRAGDAEVRCALYVAAHVLVTRHGEWSSLKAWGVRLTRTKGHRKATIAVARKLAVILHRMWIDDTEFRWHSVNRAA

SEQ ID NO: 321349 - protein, 333 aa, unidentified
MDTATGDCGERRLEHREEAEKFYRELAARGMKVRVGMEASGQARWFERLLAELNFELWIGDATVIHAKRVRKQKTDRQDAQLILRLMLKDDFPQIWLPSWENRDLRQLLWHRHRMVQARTRIMNQLQAVAINEGLRCKKRLWRESAREQLEAFRLAPWASRRREDLLKLLDGLNPTIAELTQAIEQEVEKYPAAQRLRTHPGVGPLTALAFVLIIGRADRFQCGKQIASYLGLVPLEDSSGNGRRLGHITKQGNALLRFLLVEAAQVTARNLPEWRSHYLHLTMRRGRKIAKVAMARKLAVRLYWMMRKEWDFGKLTKFGSHAGKPGTGDGVK

SEQ ID NO: 321350 - protein, 460 aa, unidentified
MENDRDVQGSKEIAGLPVIRSEVAGIDIGSEQHWVCAPTADRSAREVATFGATTPELDRLAQWLKDREIKSIAMESTSVYWIAPHEVLEAAGFEILLVDTRQLARVPGRDKKTDAKDCEWIQRLHSCGLLRGSFRPPEMICMLRTLVRDKATLVAESADWLRRMQKSLDQMNVRVHRAVSDIDGVTGMKILRAIAGGERDPVKLAQLRDWRCHKSEEEIAKELTGHWREDHLFSLRQSLQMYDAIHQRVADYDREILRKLSELQRDDRRQQTPPKVDNPQKARAIKKRGEEPMRGALYRMTGVDLTSIDAIGVETVLVVASEYGPDLSDFPTEKQFVSHVTLAPHRPMSGGKPVKKKRRHTASTRVAAALRMAALSLRNSQTALGAYYRKIARSRGGDVAVFATARKLAIFIYRLLRWGQPYVDEGAAAFEKRYLEARIKSMKARARELGYELVESAVTA

SEQ ID NO: 321351 - protein, 414 aa, unidentified
MDVVHPRCAGLDVSKRDVKVCVRIQKPGRARATSTVTTWGAVTNRILALRDHLIAEEVTLVVMEATSDYWKPFYYLLDDGPFEIMLVNARHVKNLPGRKSDVSDAAWLAQLGAHGLVRGSFVPPEPIRQLRDLTRARTTITRQRAREIQRLEKLLEDAGIKLSAVASDITGVSGRAMLEALVAGERAPDVLADMAKRRMRSKIPELTEALTGRFSEHHAFLVRVHLDLIDHNTSAIDELTARIEVVIAPFRSARDLMVTIPGISSGVADVIIAETGADMSRFPTAGHLASWAGTCPGSNESAGRVKSTQTRPGNPYLKGALGVAALSAARSKDTYFSAKYRRITSRRGPMKALVALEHAMLIAIWNMLQTGALYTDPGGDFFSRRNPDQAKNRALDQLRRMGYAVTLQPLAVAG

SEQ ID NO: 321352 - protein, 393 aa, unidentified
MHKPRKRHKPLNDLSRSLTPFDPNRTLIAVIELSKESWLVAGIIPGVERQPLKKLEPDENDLIKLLERWRGEAEKAGHKINRIAVAFEAGRDGFWLARWLRARGIEAHVIHPASVAVSREHRRAKTDRLDTEQLKRAFLGWLRSEPVHCKMCAIPTFAEEDAKRPHRERETLVGEHTTIINRIKATLARLGIRNLNPKLKKAAELLERARTPEGETIPPNTLAELRRDMARKQFVAEQIRQIEKARLEQLEQAPKAGPNLMVLLLVRVIGIGIETADMLVKEILSRNLRDRRAVARYAGLTGSPDESGSRRREKGLARSGNARVRRGMIQLAWRFLEFQKGSALAKWFEARTENARGLRKKMIVALARKLLIALWHFVRDGVIPDGVVLRPAR

SEQ ID NO: 321353 - protein, 350 aa, unidentified
MSIVAETVEHVVGIDTHARTHTYCLVHTRTGAVVDTATFPTSKSGNARAISWIHRRSPGSVLAAVEGTSSYGAGITAALLEQGFDVAEVRPAARSAHAHAGKSDLLDAEAAARSAIGRDYNTLARPRQTGARAALRVLLASRSIIDQQRTANRNALTALLRSVDLDVDARKPLTDAQIRVIAAWRIGRGATAAAASGIARREARRLAVTVLEQTELLKDNHRQLHQLTEQLAPGLQALPGLGPVTAAIIVCAYSHHGRVRSEAAFAALGGIAPLPASSGNTSRHRLSRSGDRQLNRAFDIAVRTRMSYDPATRAYITRRRTEGRTNREIRRCLKRYVCRSVFRQLQASMA

SEQ ID NO: 321354 - protein, 450 aa, unidentified
MDKKLKKNQSLQLAVINPCCAAIDVGSMMMMVAYSDEQGNQYLLEVDAFTESLQTLATTLQQAGVTHVAMEATGVYWIVVYEILEQQGFQVTLVNAKHFKNVDAQKTDVKDCQWLHQLHANGLLRASHIAKEIYRELKSYLHERNILQKQKSDTLNRIHKLLTQMNIKVQHLISDIEGVSGMKLLRGIANGITDPVELLSLINADKLKAGKEDLIKSLQGIYKKQYVVILQNALKAYDFFKEQMRSYEILIEKVLKTMLPKDSDGNKPVIKNKTSYVRKNQYSINLKEYLKHIIGVDVIKIDGIDEISALEIISVTGLDMNKWPSAEHFVSWLTLSPRPKISGGKIIGHEKRFTNNKATQAFRMAAQSMWQNKGSLGHLYRRLSAQKGSKKANKAIARKLAVIFYHMVKNKTEYDKNKLQVNTERQRAKRISFLQKEAIKYGYVLQNAVA

SEQ ID NO: 321355 - protein, 351 aa, unidentified
MKSSSKATPVTIGLDIAKNFFQAHAVDDAGQVVLRRKLSRAEVLRFFEAQPKALVGIEACGTGHYWAREIAALGHEVKLLPPTYVKAYVKRGKTDAADAEAICEAVTRPNMHFVPIKTVDQQAALMMHRSRELLVSQRTALVNALRGHLAELGIVAAKGIQRVADLLAELVGTDDSRIPPLARSSLRCLAAQIEAVEAQIEALEALIIEWHKANEASQRLARIPGVGPITASAVVATIGDASNFTSARHLSAAWGLTPKQNSSGGKAKQGGISKAGNTYLRRLLFIGAISVIRSRKAKEAGSWLARLLERRPSKVVAIAWANKTARVIWAMLRRGEHYRPAGVVPTAIVAA

SEQ ID NO: 321356 - protein, 341 aa, unidentified
MQPYFVGLDVHKQVIAYCVKTVAGEIVAEGKIAATRAALNEWVRTLPGPWHGGMEATMFSHWIYHHLEPHAERMEMGHATTMKAISAGKKKSDKIDARTIADLLRCNLFPSCFVISPELGALRQQMRFRRLVVEETVMFKNKTAGLLMGAGVEYERRRLHGKRYFKELVKDNEWIGKEMRPLLAFNREQIETLQGMDERLIRMLERHPRLQARVKALQAIDGVGPVTGLTWALETGTPERFASIKAAMSYCGLTSALRESAGQQKRGPLSKQRNRHLQSVLIEAAKIAPMLNDKLKEVHTKAKEKGGHRNRATLAVARKLVAYLLAADRAFLAKHRERETA

SEQ ID NO: 321357 - protein, 357 aa, unidentified
MTGEKYIGLDVHQATISVAVMDSEGKVVMESILETKASTLLEFFAGLRGSLFVTFEEGTWAAWLYDLLKPHVTEVLVCNPRKIPLLKQGNKSDKIDARKLAERLRLHDLKPVYHGETGIRMLRELARSYLTVVKDLSRVMNRLKALYRSWAIPCAGRDVYYRRHRSAWLDKIPEAGTRHRAEQLYQQLDLLQHLRQQARRELLSESRKHVITAKLRKIPSLGPIRSALAVALIQTPHRFRSKRQLWTYSGLGLETRDSGEYHFVKGQPRRRKKQATIRGLNKDYNHDLKGLFKGAATRASVKPGPFQEFYQRSLAKGIKPTMVRLTLARKIAAITLTLWKKGAPATPLGWLYDSETE

SEQ ID NO: 321358 - protein, 353 aa, unidentified
MKCDKYIGFDLHQATTVVAVLDADGKVAMETIVATEAAAIIRFLKSLSGTLHITFEETTQARWMYDVVRGYVKEVIVCDPRRNKLLGEGSKADKPDARKLAELLRAGLLRAVYHGHEATRQLKELVRGYETLSADTQRMMVRIKAIYRAHGIRTAGTAVYQQKQREQWLQLLTEAGTRQRVNWLYEELDHLRPLRKQAKMAMVAEGRKHQAFRLLRTIPQLGPVRCALLVATVDTPYRFRTKRQLWAYSGLGIVTSMSAEYEIKDNRVVRSRKPLATRGLNRNCNRRLKELFISAAVAGSRREPYRSYVEGLEQKGIRTEMARLTLARKISAVALRVWKKGETFDPKKLNSKT

SEQ ID NO: 321359 - protein, 339 aa, unidentified
MRKPHCFIGLDISADTFAAAVSTENNTSVDFLGESFTNDQDGYSAFVDLLKEKQINNKNSAVCLEITGSYSEHVCYYLSSHGFPVWSEAPHKISKTFHKQTKNDRVDATQIAEYCYRYFDRFKNFEPGDAIIDKVRALLALREQMSKQSTAYKNMLHAFKRKYFQTQVANNVLKDTIKQLELSTKQIDKEINELINDNSKYGPTATALKSIPGIGMLFIANFFIVTNGFSLTVNYKNMASYIGICPHEYSSGTSVYKRPKSSGYGPKRLRKLLYLASMSVRTHNPKFHNYFERKVAEGKNKHLVLNNIANKILRIACAINETGCDYSDNYLSVHPKYLK

SEQ ID NO: 321360 - protein, 366 aa, unidentified
MKKDSIRIRNGKGDWEGKKLTIGMDLGDRTSRYCVLGEGGEVLLEASVTTTQKGLSEAFGALPACRIAIETGQHSPWVSRHLSGLGHEVIVAHAQSVRLIGESTRKDDRLDAKTLARLARIDPALLSPVRHRSAEAQAHLTRIRARAVLVGARTALVNAIRGLTKAYGERLRKCHPEQIRKELAAELSSELRTALEPLFQEVQSLTERIQHYDHEIEKIAKQHYPEVAQLQQVNGVGTLIALTYVLTVDDPHRFGKSRDLGCYIGLRPGRRNSGNSQPQLHISKEGNRYLRTLMVQGAHYILGPFGKDSDLRRWGLKLAQRGGRNAKKRAVVAVARKLSVLLHKLWVSGEVYEPLRNHREEKRAAA

SEQ ID NO: 321361 - protein, 360 aa, unidentified
MKRHRTSVGLDVHARSVVGCGLDRETGEIFQRRLTPSREEVCDWIRSLPAPAVVVYEAGPTGFGLACYLIDAGIECAVAAPSKLQRPSGDRVKTDARDARHLARLLHLGEIVAVAIPTVEQEAARDMVRARADCRGDLMTARHRVSKLLLRQGIVYYGGRAWTGKHELWLRTQRFDTPGLQQAYDAAFDAMLTALDRRDRLDREIEALAANSIFTPVVRRLGCLRGVSTLTAFGLAAEIGDWTRLSGRSIGAYLGLVRTEYSSGSTRVQGGVTKTGNSHARRLLAEAAWHHRPRYRPGQDLRRRWDAASPAARARGQAANARLHARWVRFDARKKCPVVANAAIARELAGWCWSLAVLDE

SEQ ID NO: 321362 - protein, 369 aa, unidentified
MKENNTLEATLVACARQIKEQKAAKAKRIVVGTDVHLRGYQAARKVDNAAIGAVANLRSETELLLYVEKQCEQAEEVVVVYEAGPLGYGLYRKLEARGVKCLVCAPDSSQQKRKRRKNNQIDARTLTSNLFNYLNGNEAALQLVRVPTAEQEQARLASRQHDQLVQERKRLGAEGNSLLLSQGFGSCKHWWRPKALSRLEQLLPGWLFEMLQTWVDLLRALDEKIQRAKAALTKRCSGPRPKGAGANSLVQLGSEVLDWDRYATRRKIACLAGMVPSEWSTGESQRRGSITKVGVPAIRRIITEMAWRIIQFQPQYPPVQKWQEVLGGTNRTLKKKAVVAIGRQLIVDLWRLQTGRASAQQLNLVMIGG

SEQ ID NO: 321363 - protein, 451 aa, unidentified
MAQRNRATTAIKAKSGLTLTHPNAAGIDIGSASHFCAVPPDRDDEPVREFKSFTADLERLADWLDACGVDTVAMESTGVYWIALFELLERRGFTVLLVNARHVKNVSGRKSDVLDCQWLQQLMSFGLLSGAFRPADEVCVLRSLTRQRAMILRSQARFVQHMQKALTQMNIQLANVISDVVGETGQKILRAIAAGERDGHKLAALKNSRIHASADEIAASLQGNWRAEHLFALKQALDAFDFCVTQLGQCDAEIDAQLQRLHAHDGDPAKGKKRSRARNAPKFDLRRQLFQMCGVDLTRIDGIDVTTALVVVSETGTDMSRFPSDKHFASWLGLCPGTKITGGKVMSGKTKRCANRAAQALRLAAAALRSSQSALGAYYRRLCARMDKGKAVTAAAHKLARLIYAMLTKVEEYTDAGQDYFEERYRERVLRNLTERAKKLGMQIIPATQPV

SEQ ID NO: 321364 - protein, 414 aa, unidentified
MNTPVSNVSMSGALIALDISKKHHDAKIRYPDGRTSYLRIENILEGFNRLLVLTASPHDSIIAAFEPTSVYHRNIAWWLHQQGVKCHLVSSVRCARACEMLFKTWDKNDRKDASVIMYLLEQGLSSPFYDPLANGVIDIQEISNTYHQVTLARTRCLNSLVNHYLTLYFPEAEQFLHMSRAEWFCQFLLQFPTPSCITSLNRDLFVKQAWDIVGRKQYKQQFLEHLYDISANSIALPLSDGSLAVTTFKLQLHRYVELSAQRLQLEKQAENYLQERSDYQHLRTIPGIGAVIALMIIAESGDLTRFAHYRQYLSFCGFNLSASQSGQKHSGYRLSKRGNARLRYAFWLAATVAVRTRENSFRYKYERYIRENGDKPDQKRKAMTAVATKVARVAHAIVKQAIDYKGYYEISHGT

SEQ ID NO: 321365 - protein, 388 aa, unidentified
MSQIDDLSRCLVTFDQAKSMTVVVELSEASWLVAAMVPGLVRHPLKKLDPDPDALLRLIERWRTEAVKAGQTIDRVALAYEAGRDGFWLARWLQARGIEVHVIHSTSVAVPREHRRAKTDRLDTAMLMRVFVGWLRGERGHCAMVAIPTLEEEDAKRPSRERESLVGERTRIGNRMKSTLARLGIRGFKPHLRKAPERLAALSTPEGCALPANTLEELRRDMARLAVVRGQIDEIESARLERVEHAPAEEGPNAMTRLIARIRGVGVETADMLVQEVLSRHLRDRRAVARYAGLTGSPDESGSKRREKGLAKAGNARVRRGMIQLAWRFLMFQKDSALARWYRSRTEGPKGVRKTTMIVAVARKLLIALWRMATAGIVPEGVVLRPVG

SEQ ID NO: 321366 - protein, 568 aa, unidentified
MTPRFHPSAPAPDSDFATKPRPDPPPNPDQQAAGEYRQRKARTLAKMQDKQRVRVNAMPVLRAHAAGIDAGQSSHWVCIGFTDDPDNDQQLVREYQTHTDSLRQLVGWLKENQVTSAAVESTSFYAEVLVEMLEQAGIEVFLVDPSYTKQLQGRPKTDKRDAQWIFRLHSVGLLGSAFRPQEQTRVLRNYLRHRARVVRQAVRHIHHMQMALELMNLKLRCVLDDITGSTGLKIIKAILSGVRDPHRLAALRHTQCKHSAKEMVQALDGNYKDEHLFTLKLAYESWEFHQRQLDSIDQEIAKQLEKMKRDGALPALPRRKSNPKKANSARFDVRTALYYVVGIDLTEMEGIDELTALTIVSEIGTELSKFKTVGHFCSWLGLCPNPNESGKQKRPSRTRPGVNRTAQALRMGASSLHSSHSALGAYLRRMKSRMGAPAAVTATAHKLARLVYYALKHGMPYVRKTQEEYEAQIREQRIKSLQKKARQLGFTLIENPVTTGSDTPVPVVVTEKEEPAQEPEREKVKEPEPAQKLEKKPSKGAGTKKKAEVAGAAQAKQKTKKAAAATRP

SEQ ID NO: 321367 - protein, 347 aa, unidentified
MTIVEDTRVVTGGVDTHAEVHVAAALDAVGGLLGVREFPATAAGYAGLLGWLRSLGTIALVGVEGTGSYGAGLARHLAAAGVRVVEVDRADRQDRHRQGKSDPLDAVSAARAAQSGRASGVPKGRDGAVEAIRALMVAKRSARAERTQAINQARALIVTGPDELRARFAGHRPAALVGAIAALRPRPGDVPGYATRVALRELGRRAQFLDAQLERLDELIVPLVTARAPGLLSLHGVGPDTAALLLVAAGDHPERLRSESSWAHLCGVAPIPASSGKVAGRYRLNRGGNREASQALWRIVITRMRSDPATRAYVERRTKEGLSKREIIRCLKRYVAREVYRHLRDGA

SEQ ID NO: 321368 - protein, 343 aa, unidentified
MESIHYVGLDVHKKTIAYCIKTVSGKMVRQGVVGAERKALRQWLTELPGPWMGAMEATIFAGWIYDFLRPHAVELKVAHPEMLKAITAAKKKNDRADAEKLADLLRVNLLPECTMMSEELRELRRILRYRNLVVRTATQMKNKMSGLLMEVGATYDKRRLHGRKYFNVLLERVEDVPESVKDLLRLSRGNLELFTAVQKKLTKTLREQPLIRERVERLMSIAGVGEILALTWVLEVGDPTRFSSSRDAISYCGLCSAQRESAGKEQRGPISKKRNKHLQTILIEAAKIAPHWNPQLATLHEKELGRGNRNRATLAVARKLVEYLLAVDRRGTPFVKEAPPRVA

SEQ ID NO: 321369 - protein, 496 aa, unidentified
MSAFLRRSGQNPHRWATKGMKSKKELLAKKKHIKRKSAKAKHNRVLGIHNPHAAGADIGATEIYIAVPPDRLEMNVRCFGTFTQDLRAIVQWLREYKVTSVAMESTGVYWIPLYELLEQEGFEIYLVNARHVKNVPGRKSDVQDCQWLQYLHSVGLLRGSYRPAQDICAMRAISRYRDNLLHFGAQHLQHMQAALDQMNLRLHHVIADLSGLTGMAIIEAILAGERDPRQLAKLRDPRIKASQETIAKALEGNWRVEHLFVLGQALQSWKQVQQQLGQCDQKLQELSSQLEGKIDLANSPLPPSAKYCGLEPRSKNQPNGPWREELYRHFGVDLTEVPGLSLGVVQTLFVELGADLSAFPTPRHFAAWMGLCPDNAITGGKVIRRGTRRNRQRIRLALRLAATSLHHNKTQLGECFRRLRARLGAPKAITAMAHKLARIIWHLVTHRVGYDESIFAEREEQLLRRKQRQLRNLAHSLGFTLVPNPRPAATSNAEVS

SEQ ID NO: 321370 - protein, 411 aa, unidentified
MRIYVGIDVAKDVHWASAIDQDARVLIDRSVANTQQTIEGLAADLRGLGGDLTIGLDVTGSIASFLEAVLLAEGLALVHVPGIAVNRAAHGFTGGETKSDPRDARVIADLVRTRPNLRPIRPDQDTTIAIRLLVARRRDLVQDQTRRISRMRQLLASIHPSLERALDLTAKAPLTLLTRFVTHAQIKAAGQARIAKHLRKTPGLREPQRLAEAALVAAQAQRITVPGEATVAALVQELALETLAVRNRLAQLDKELEALVARHPDGALIRSLPSLATPPSCAWRGPWPAPPGMGVILSAEFIATAGDITRFRSPDALAAAAGLAPILRQSGKASALRRAYGGDKALKRVFYQSAFCAVSTKDPTSKAFYDRKRREGHRHVQALVALARRRVTVLWAMLQHRTPFNPLHRTA

SEQ ID NO: 321371 - protein, 338 aa, unidentified
MKAYAGIDLHSSNNYIGIINEQDQRLYGKRIPNELDRVLLALEPFKKELSGVVVESTYNWYWLVDGLQEHGYKVHLANPSAIKQYEGLKHTDDKWDAFWLAHMRRLNILPEGYIYPKEDRAIRDLLRRRLLFVRHRTSHILSLQSMITRNLGIKVSGNKIKKLRGEDVDGMFNSPNLIFMAKNNIAVIQFLKKIIKDIEKNVKSQVKLRKEFAMLLTIPGIGDILGLTIMMEVDDINRFPKVGDYSSYSRCVKSERISNGKKKDQNNRKNGNKYLSWAYVEAANFMIRHSDRAHRFYQKKKAERNGIVAIKALSNKICRASYYIMRDHVPFDEDMLFR

SEQ ID NO: 321372 - protein, 404 aa, unidentified
MDLAPIYRCAVGLDVHQAQITVCVLSEGADGEVVAEVREFGGFKRDRRALAAWVAGFQPDVVVMESTGIYWKSPYAALEQAGIRALVVNARHVKRVPGRKTDIADAQWLAILARAGLLTGGFVPPANFRELRLIARQLQRLTGIRAGEKNRVHKVLTDGGIRLSVVVSDLHGQSAWAMVKALAAGETPQQVLRHASARLRATEQELRDAVDGDLSDAHRFVLAQLVDHVEDLDRRIACFRDRLLAGLAPQQRLLGALQTLPGFDELGAALLLVEIGDDMQAFGKPEKLAAWAGVCPGNHESAGKRQSGKQRKGNPYVRRLLCEAAHAVSRTRCALAEKYKALLVRRGRKRAIFALAHKLLKLVFVLIDRGDYYRDATVDYEALSVARNAPRWIKMLRKHGYLAA

SEQ ID NO: 321373 - protein, 318 aa, unidentified
MFVGIDVSKERLDVSVHGRKESWQFSRDESGLVRLVDHLRSLGESITLVVLEATGGLERDVAAGLAVAKIPAAVVNPRQVRDFARATGKLAKTDGIDAAVLAHFAEAVRPAVQVVGDELAQALEARITRRNQLIQMLVAEKNRGATLLVQRTASPAMTKSIQVHIQWLEKQIAELDDDIDKLIRNSPVWREKDDLLQSVPGVGPVTSRLLLGYVPELGALDRKKIAALIGLAPYNRDSGQGVGRRAIWGGRAEVRSALYMATMAALRCNPSLQTFYARLKAAGKAPMVALTATMRKLLITLNAMVRDGVRWTPPALRA

SEQ ID NO: 321374 - protein, 478 aa, unidentified
MIYSVGIDLHKGRHRVYCLDETAQVCDTFSFQTTPEGLATLSQRVFRDGSNPIVVFEPAGLSWLMVAAYLRSQHSRCRLVRAKGQKVAALRRYLRGPVKSDRIDAFTLAKMPFIDPERLDEVYLAPAQIHALQRLTRQRKRLEDYITARKNRIATIVDGYLPGVRQAFSHPWSVPARAFLHSRINPFAVVRDGEEALHRFLAQAKARDRGEGAESYPVYRACQNALSLVGLCQAAGLVDDDFFIDLQDEVDRELRLMEAEEAEVKALDQRIEELYRNLHPSGNLRTIPGVGEHTAPVFVANIGDPTRFPGQSEFANWTGVVPGARQSAETESKGLRMTKAGPATVRWALYQAGQIGRQWDPQLASVYYRQMVHHGKNHKQAMGAVMSHMGARIFTVLREDRPYELKDTEGKPVSKAAARALILAKYQVPEDIRQQRRRSKRRTASSSGAQEKEGMATGRIYEAARAPQPAVIKPSPTT

SEQ ID NO: 321375 - protein, 344 aa, unidentified
MKLKRIGVDLAKNVFQIHGVDSHEQARIKKQVKRKEMLHCFRQIEPCRVAMEACGGAHYWARELGKLGHEVKLIAPQFVKPYVKSGKNDANDAEAICEAASRPIMRYVEIKTAEQQAWQSLHRVRSRLIKSRTALVNEIRGLLSEFGIITVVKGVPACQRLVSAALEDGENSLPGQMRELLALLSEELEQKNVHLATLDGKIKHQCAQDERTKRLMEIEGIGPISASAIVAAVGDARQFKNGRNLAAWIGLVPKQHSSGGKERLGSITKKGDAYLRTLLIHGASAAVNACTEKTDRKSEWIRNMIARRNKNVATVALANKNARVIWAVLSRDEPYRPAASTVAA

SEQ ID NO: 321376 - protein, 401 aa, unidentified
MKVSGLDVHKDTIFCAIYDGRKYGKVNEFSTFTEHIRELACMLHTNGVKKIAMESTGIYWIPIWNILEEEGFKLMLVNPFLIKQMPGRKSDVKDAQWIAKLLHKGMLSGSMVPGKTIRQLRSYSRKYVKMQGMITQVNQEMERILEMCNIRITSLMSNNHGVSIHKVIEKIIAGQDSVEELACCIHGRTLNAKGDLVRLSLDGKVEDHHRFNLSLAYEQYQLIMKQTDSLERQMEALCDEHYAREMKLLLSIPGVGKQAAMQIISETGGDMQVFADSGKLTGWTGLRPRNDESAGKFKSKAITKGNKYLRRIMVQCAWAASRTKGSYYKSKFEQFCIRKSRKKALIAIARKLLTVVWHVLKENQPYNPRILPVYDPKKMKLKIKYHKREIEKLEKLGFSYT

SEQ ID NO: 321377 - protein, 403 aa, unidentified
MNAVGIDVSKGKSTVAIFQPGEQVILKPCDFRHTQSGIGSLIKIIRGLGGDTKVCMEHTGRYYEPVATWLSDAGIFVSAVNPTLIRSFGDDSLRAPKTDKADAKKIARYTLDRWTKLKQYGHMDETRNQLKTMNRQFGFYMDQKTAMKNNLIALLDQTYPGANAFFDSPARSDGSQKWVDFVYTYWHADCVRGKSLNAFTEHYKSWCKRKGYNFCAAKAEKIYNDSADLIAVFSKNANTKMLIHQAVEMLNLASKTVESLREEMNRLAATLPEYPVVMAMNGVGPTLGPQLMAEIGDVTRFEKRGSLTAFAGVDPGKNDSGQHSQKSVPTSKKGSPHLRKTLFLIMESLIQRAPEDDPVYAFMDKKRAQGKPYYVYMTAGANKFLRIYYGRVNEYLASLSESN

SEQ ID NO: 321378 - protein, 368 aa, unidentified
MKKQTSATTETQLKGRTMIDFNGKTIYVGIDMHKKDWQVAKVFEGMILGNYRMTGNHQNLITHLRKHYPGANFKCAYESSAWGFTLQRQLTAAGMDCIVVHAADVPGTNKERANKTDSVDALRLAMHHCKGSLQGIHVPEEAIQKQRSLIRFRKRLVGDINRSKNRLKSLMKYHGIDIPARFDKANWSALFMRWVEQQASQDLLLQDTLLLMLEEVKLLRQLLLKTERKLRIMMQSQQYKHNAELLTSAPGIGQTVSMLFLLEVGDVRRFPTFEQLNNFVGFYPGSHDSGENEQSTGISTRKHKQLRSHLVEAAWRAIRIDPALMEAYRQLTKRMDGKKAIIRIARKLLRRMRTILLTQTPYQMGVLA

SEQ ID NO: 321379 - protein, 434 aa, unidentified
MNDQNTNTTAPTPPAPPDYAAFVGLDWGDETHALSLCAAGSAVVEPATLQQTPEALADWATTLRTRFPNRKIAVAVEQARGALLAGLSQYEHIVPFPVNPKSLARFREALYPSRSKDDLVDADLLLELLVKHREHLRPWQPDTVQTRQLALLNEQRRHFVDHRTGLTNQLLSHLKAVFPQAPKLLGEDLASRLATDFLKKWPTLQAVQKVKPAVLRQFYYGHNSRSEELIALRLELAKNAVALTSDPALLAAHSLSIQTLAAQLEALRPFLQQYDQQIAELFGAHPDAPIFQSLPGAGPVLAPRLLTSLGTDRSRFSEPVALSSYSGIAPVTEKSGKTQHWVHVRWSCPKFLRQSWHEFANSSIKFSAWAALCYQEFRKKMDHHEAIRKLAYKWQRIVWRMWQNRQPYDEARYLATLQKRGHKLFATPPVKSGE

SEQ ID NO: 321380 - protein, 342 aa, unidentified
MSKINVIGLDLAKNVFQVHGINEDGDVAVRKQLKRIEVLRYFAKLPPCLVGMEACMSAHYWWREISKFGHVVRLMAPAFVKPYVRGNKNDRNDAAGICEAVQRPNMRFVAAKTPEQQAVLHLHHARQLLVQQRVALNNHLRAVLLEYGISLPVGVKILTQALPGLLEDGDNALPILTRHLLAELKTAHDALNAHIQMIENQLRAWHESNPMSLRLAQIPGIGLLTATALAATIGDIKAFKNARHLAAFLGLVPKQHSSGGKDKLLGISKRGDGYVRGLLIHGARAVMRHIQRRIKIGQASGNAWVEQCLQRMHVNKVIVALANKMARMAWAVLAHQQDYRAA

SEQ ID NO: 321381 - protein, 324 aa, unidentified
MIDAVLGIDVSKNTFDTNLGAGTKARSKSFANSPDGWHHLIAWLGEYKIGQVHACLEATGRHGLGIALALHEAGHVVSIVNPAQIRDFARTKLGRNKTDQVDAVHIREYAELFKPHPWTPPSPAMRRLCELQTIRAGTVAGLTEWKNRRGSGITDDLARSLAETTIQHFTSQLEAVDQAIAETIDNDVELSAKRDLLVSINGVGKALAGIVLAELPGPDILGSSAAAAAYAGLNPQQHQSGISVNRPVRISKIGNAVLRTALYMPALSAMRYNPAVAALVDRLKAQGRLKGKQIVIAAMRKLLVLCFGVLKTGKKFDPAMAMGK

SEQ ID NO: 321382 - protein, 389 aa, unidentified
MKIFVGIDIAKLNHFAAAISSDGEILIEPFKFTNDADGFQLLVSKLESFDKNSLIIGLESTAHYGDNLVRYLVAEFYQVCVLNPIKTCQMRKNNVRKTKTDKVDTYVIAKTLMMQDDLRFITFFDLDMMDLKALGRFRQKTIKQRTRLKIQLTTYVDQVFPEIQYFFKSGLHQNAVYALLKEAPSPKEIASMHMTHLANLLKVNSHGHFTKEQAKELRVLAQKSVGANDSAISIQITQTIQQIELLDSQLEKIEAEMTDIMKFNDSVIMTIPGIGYINGGMILGEIGDIHRFSNPNKLLAFAGLDPSVYQSGNFQAKTTRMSKRGSRVLRYALVNAAWNVVRNNATFKAYYDAKRAEGRSHYNALGHCAGKLVRVIWKMLTDEVEFNLE

SEQ ID NO: 321383 - protein, 410 aa, unidentified
MAYKVAGIDVHKKVLMVVVLDIDDPESEPPRRRFGTTTSELRNLSGWLRQQGVQQAVMESTAQYWKPVWYELEPYMKLQLAQAFSNRAPRGRKHDFRDAERLVRRLLAGELTLSFVPEPEQRTWRTMTRARVQLTEDKSRLHSQLECLLEEMRIKLSSVVSDLLGVSGYRILRALADGETDPKKLGALADDRLQCSEKQLIDALNGSPQPLHLQLLALYLDRHQMLVEQIAKLDHLIAGALKHHQEAVARLALAPGLGVDSAQQIIAEVGVDAGTFPTAGHLSAWVGTCPGRNESAEENHSSRSAKGNKYLRRILNQAAHAAVKTKGSHFQAVFRRLLPRLGYKAAIWAVAHRLCRLVWKMLHEAVPYVEQGSEPNARTKRRRARNLLRALRKLGYEVNLKPRTTACTAQ

SEQ ID NO: 321384 - protein, 397 aa, unidentified
MIAVGIDISKAKSTVAVIDSDGTVLASPFTMAHTQPEMEAFVTYLKGLGEPTTILMEYTGHYHYPVLKKLQDEGFPVCIVNPYQMKKYGDVEIHKAKTDKKDALRIAAYALEKSYKLVPYSSMEQKYEDLKFLSRQYNQRISYVAKLKVQLIALLDQTMPGITRILPLNSRNPEKCALLLFIKRFKSFDEIHRIGKARFLASYDVLAKKTSERSASSKGLSIYELAVDSITTRGEDPYIWLSQNQCVDLLSTTQNAADEIISQMRNIAETIPEYKVLRAMHGVGDRLGPIILAEIGDVHRFHSGKALNSYAGNDAPPYQSGQFESRNRHISKRGSSALRKACYEVMQALKLTKPQDDPVYLFMLKKEQEGKPFNVAKMAGVNKFLRIYYARAMELYK

SEQ ID NO: 321385 - protein, 391 aa, unidentified
MVCVGIDVAKDKHDCCILDSEGTPLVDCFTIPNNMDGFKSLLQTIQDCSQKSDKIKVGLEATGHYSYNILGFLLDNDLPVYVMNPLHTNLYRKSLSLRKTKTDRVDAKTIATMLLSDVDLKSYTDTAYHNEELKSLTRYRFDKVQERAKLKQSVSRLVTILFPELEQLVSSIHGTSIYALLREYPGAKQISEAHLTRLANILVKTSRGHYRKDKATHIRDAARTSIGSVMPAKSLELKHTIKLIQELTSEINEIEDAIRKIMDELKPPILSIPGMGFHSAAMILAEVGDFSNFNSPDKVLAYAGCSPSTYQSGKLTNCYAHMEKRGSRYLRYALYTATKYVCYWNPVFTEYLTKKQAEGKHYNVALSHATKKLVRLIYALQKSGKAYLAVT

SEQ ID NO: 321386 - protein, 351 aa, unidentified
MGEVIKLGIDVHIEKYVVVMKIDGGAPERAKRFTPEAFLDWVKQLKKRCEQLHSCYEAGPFGYSLHRRLAKMGVTNHVIRPINWDEHGKNVKTDARDATQMVLCLDGYLRGNHRSFSTVRIPSETEEQRRSTTRQRQSLIKERKRLSAKARGHVMYYGGRLQGEWWKPRRWRDLSEQLETHLLDLLSALRTIIVVVEEQIVRLEKCLEEMTEVALPKGMGSVIFQQMEREVCDWNRFETRKQVGGYTGLCPSEDTSDKRRFQGSITKHGNPRLRHMLIECVWLLIQWNPDYRGIVKWRDKLLEAKLTKASKKKIVVAIARQFAVDWWRIRTGKVTPDQLGLTMKALPATSA

SEQ ID NO: 321387 - protein, 337 aa, unidentified
MSIIRIGLDTAKHVFQLHGVDEREQPVLRRRLSRKEVEPFFAKLPPTRVGLEACGAAHYWARVLRGLGHEAVLLPPQYIKPYVKRGKNDALDAEAICEAMSRPGMRYVPVKSAEQQAALMLLGTRELLVKQRTMLINAMRGHAAEFGIVAAKGLGKVSELLQRAHGEAAGVPALALQMLDLLASQRDALDRKLKTIEARLMAWHKADPVSQCLATQPGIGPIGAVSFALKVSDPKTFRSGRHFAAWLGLTPKENATGGRSRPGRISRQGDESLRRLLVLGATTVIQFAKPGRASPWLIDLLARRPKKLAAVALANKMARILWAMMVSGELYRRPQPA

SEQ ID NO: 321388 - protein, 361 aa, unidentified
MSSSVLKHPRKSRPALHGEGVILGVDTHKDVHVAAILTITGVLLATQSFPTTRDGYAATLEWAHRFGDVNAAGIECTGSYGSALMKYLQTQNVKVFEVNQPDRALRRKAGKTDAVDAEAAARAVIAGRSLATPKTGIGAAEDLRQMRLVKSSAVKARTTAINQLKGLVVGAEPALRDQLRGLSTKALSRACALLLPSTVERMLMSELATRIHHLTEQLGRLETAMTRTVMACAPELLDRPGVGYDSAAALLIAVGDNPERMKNEAAFAALCGVSPVEFSSGKTTKRRLNRGGNRQAYAALYRIVLTRLRWDETTQNYLQHRTEQGKSKRDVIRCLKRYLARKIFTILKTLPDQHKTARSTN

SEQ ID NO: 321389 - protein, 328 aa, unidentified
MNNSNEVHDVLGIDISKAKFDVALIQGNAKIKSKVFANNPEGFAELQAWLSLQSVTNLHSCMEATSTYGNALARFLVEAGYKVSIVNPSRPKAFGKSELSRTKTDRADAKVIARFCAALKPTPWTPPALEIEQLQALVHRLDSLTAMQQQEQNRLATADPILVEAINAHIDFLKEQIEMTKKLIRLHFDQHPHLKSQRDLLTSIPGIAELTATVLLAEIRDISAFDTADQLAAFAGLTPREFSSGSSIHGKPRLSKIGNSRLRKALFMPAIVARRYNSPITAFCDRLTAKGKSKMSVIGAVMHKLLRQVFGVLKSQRSFDPNFVRISS

SEQ ID NO: 321390 - protein, 348 aa, unidentified
MDHIGIDVHKRESQIYLLAEDGEIIERRIRTEGERFAAVLGDRPRARILIEASTDSEWVARCLEALGHEVIVADPNFAPMYATRTRKVKTDRRDARALAEACLLGAYRPAHRLSDPQRHVRGRLGVRDALVHTRTRYISVIRALLRQQGYRVPSGSAGSFSDRVRSLPLPGRLLSVVAPLLAVMGHLNQQLAYSDATIEHLAVQDPRVPRLRSVPSVGPVTAAAFLAAIDDVGRFPHAHQLEAYLGLVPRESSSGDTQRRGPITKAGHSRVRWLLVQAALSILRRRPPVAEVLWTWALRIAARRGKHVAVVALARRLAGILYALLRDGTVYAPRGPAALPDSVAALHA

SEQ ID NO: 321391 - protein, 340 aa, unidentified
MNYYAGIDVSLEASSVCVIDASGKIVREAKVASEPAALIAWLGSLGLELTRIGLEAGPLSQWLYAGMREAGLVVELLETRHVRNAFKIMPVKTDRKDAHGIAELMRLGWFRPVHCKSMEAQETRAMLTARKLVQKALHEVEMSLRGVLRGFGLKVGKVAPARFEARIEELVEGHPNLAVIAASLLAVRATLRREFNGFERRLRAIARSDTRARLLMSVPGVGTIVALTYAAAIDDPARFTSSKTVGAHFGLTPTKYQSGETDRSGCISKIGDGSVRAALYESAHIIITKPIKGCTNLKSWAMRVAKRAGMKKAKVALARKLAVIMHRMLADGTTFTTQSA

SEQ ID NO: 321392 - protein, 394 aa, unidentified
MFLVGIDIGKNKHSFCIIEKETGELIVKPKFFDNNNIGFEELISSIQNLSNQDILIGMEDTGHYHFALLKFLLDKKYQVALINPVTTNLTRKLQGGITKTDKLDTLTICDVLSSNQRVKSYRITKVDRFDMYEQKQLTREHHNLKEQLNVLKNRLQKSIDIVFPEFNSLFDSKYGTVYVNILKEFGSADAVARADIRTIRKCFDTKGKGRRIALTAEKLKEAAKNSIGFPSTAEVVQIKHLINQVKLIEKQISEIDKKIEEFSISNNSPILSIPGISHFSGTSILAELGDIHNYSKPSQIIKFAGVAPITYESSQFTAQHTAITKKGSKYLRKTLYQIITPVINNNEVFKTYYQLKLSQGKSHRCAQGHCVRKLMRVIFQLLSTNTQFDPVLLF

SEQ ID NO: 321393 - protein, 297 aa, unidentified
MTNPELFVGIDVSQLRLDVALHPTGETFHVRNDEAGFELLCTRLAAVSPTLIVCEATGGMERPVVLACTLAQLPMAVVNARQVRNFARATGQLAKTDRLDALILAHFAQAVRPEVRLVPDEQIRHLEALAVRRRQIVTMLTAERNRLGATHDQVLRGHIEKLIAHLQALRKDLDRELLEAVQADPTTRHRFELLCSAPGVGPVVALTLLSALPELGMLSRGQVAGLVGVAPLNRDSGRMRGRRTTWGGRADVRTALYMATTVAVRHNPTIKAHYEQLVARGKPKMVALIACGSSWSA

SEQ ID NO: 321394 - protein, 431 aa, unidentified
MTNRLQVGIDFSQKGADVCLMFPSGQPLEPHQAFHNSSSGYAAAKQLLLTALDDYQFDGLDISGEATGFYWLPFFLQLAADPDLARHDARLFLLNPRWVHWFKKCFAQDDKCDQKDPYYIAERTRTSRPRVAWSPQMDTLPLRFYTRCRFHLVQNLAREKCYFSTYLFLKASAYRRIKPFSDVFGRTSRLVLTQEPSLDDLAALHVHDLAQQLHELSGHHLPHSLDTAHKLQRAADESFTLDSVLVVPVQRILDLTLAHIRFLEDQVQQVEAWIAAELSSQPAILQLTTIPGIGPVFSSGIGAEIGDTQRFLQGTKWDKRRKKHRPRNLRDAEDAVAKLAGLWWPRADSGDFEAEDRRLAKTGNRYLRYYLVQAADKMRQHLPDYADFYAGKYRQSSTHKHKRALVLTARKSVGLVVGLLHRNESYRSQEG

SEQ ID NO: 321395 - protein, 358 aa, unidentified
MTGSSDYESVQVFIGVDVGKDTHHAVAVNRSGKRLFDKALPNDENKLRSLISDLKQHGQILLVVDQPATIGALPVAVARSEGVLVGYLPGLSMRRIADLHAGEAKTDARDAAIIAEVGCELSMICGFDDDLAAQATQASNRIRGLLTQIHPALERVLGPWLDHSAVLDLLQRYPSPEKLASQGEKRLASQLCKLAPRLGKRLAAGITQALAEQTVVVPGTNAAVVVLPRLALQLITLRKQRDEVAMEVEQRVLTHPLYPVLTSMPGVGVRTAARLLTEVACRAFASTAHLAAYAGLAPVTRRSGSSIRGERPSRRGNKTLKRALFLSTRPDIQGLLHTQNEPGKATQPGAYRPGKAAL

SEQ ID NO: 321396 - protein, 331 aa, unidentified
MKSKCFIGIDVSKDVLDLFVQPTAFHFKTKNETTDFSNLLQICCEQCNCKVSDLFFCFENTGRYSRLLAAFFTESGILFSMVPAMEIKKSLGLKRGKSDRTDAKAIALYAWQHREELQPTKMNSALAGELRQLLTLRDKLIRHRTAYKNSISDLTDVLYEGETDFIRQLQNRMISSLNVEIRNVDERIEQLIATSDEWLPNYRLIQTVRGIGPVLAKYMIIYTENFTRINNPKSFACYAGIAPFEYSSGSSVKGRTRVHPCANKQLKSLLNTAAMCAIQLNGEYRTYYQRRTLEGKNKMSTLNIIRNKLVSRVYAVARRQTPYVDLSKFAA

SEQ ID NO: 321397 - protein, 417 aa, unidentified
MQYAPIMLAAEPANGLTCGIDWSCADHAVSIVDPRGCEVHRSTVEHDAAGLRELVALLARAGVSEVAIERPDGPVVDTLLGAGVTVVVISPNQVKNLRSRYGSAGNKDDRFDAFVLADTLRTDRTRLRPLVPDSAATLALRANCRARKDLITHRVAVANQLREHLKGVFPGPIGLFDDLDSLISLKFLTRFDCQDRADWLTPTRLGNWLKSVGYTGRTHPAILHARLTAAPRGATGAAGDKYTPITHAFLALLNTLVGQIKILDTQIAQQLAEHVDAHIFTSLPRSGTVRAAKLLAEIGDCRARFPSPEALISLAGMAPSTRQSGKTRIVGFRWSCDKNLRDAVTDFANDSRHANPWAADIYNRAIARKKKHPHAVRILARAWLYVIWHCWQNNTAYDPANHRALQALLEQHQPPAA

SEQ ID NO: 321398 - protein, 329 aa, unidentified
MTHYTAFLGIDIAKATFDVTLLLDQQRLEHRYTNDMDGFEQLQRWLKSNSATPVHACLEATGRYGDQLAAYLYEVGHSVSVINPAQIKAYGQSRLQRGKSDRLDARLIADFCRSQSPALWQPPAPEQRELRELVRRLDDLQQIKLQEFNRLQAGQTSPLVLADLHMALDNLRQRIKALSKAITAHLKAHPHLDHAYRLLRSIPGIGHLTAARLLAEIADICAFKSAKQLAAFIGLTPTEYTSGTSIHRRARISKKGNAALRAHLYWPAITAMRKNPAVAQMAQRQRQAGKPGLVIIVAAMRKLVCLAYGVLKSNRPFDPAIPLGASFAA

SEQ ID NO: 321399 - protein, 416 aa, unidentified
MERLATACCGLDVHKQTVVACLVRPSTERSSTRETRTFGTTTQALEELRAWLQAADCTHVALESTGVYWKPVYHVLEGLCSVWVVNAQHIKNVPGRKTDVRDAEWLAELLQHGLVRPSFVPDRAQRELRDLTRTRTTLIEERTALVNRLQAVLEDANIKLAGVASDVMGVSGRAILAALLAGTTDPALLADLAKGKLRRKREALQSALHGHVRAHHCLLLTLHLEHIDLLDEQIAQLSEQIADRLRPSTAVLVLLETIPGVGRRTAEVLAAEIGLDVTRFPTAGHLASWAGMCPGQHESAGKQKSGKRRAGNMALRRVLAEAAKAAARTKKKHEQTYLAGRYRSLVVRCGHRKATIAVGHTILRFVYHILATHEPYNERTLLAHDERRQARAKHRALAQLSALGYEVTLTPTAPAA

SEQ ID NO: 321400 - protein, 500 aa, unidentified
MRSGTENDAGRAPQVLAPLVEGHCQRSAPPGIGEVPEAATGRCARAPLRAPAYEHPQRYLIFAEPATTPPPPRAATEREEEEELLGMEEQTTSAGIDWAKDEHALCVVEEASGRVLLQRRFTHQEGAIEKLCRTLVGMGVERVAIERPEGVLVERVLEAGIVVIAIHPNQLKASRPRFRASGARSKSDAFDAFCLAELARTDHHRFRALVPDSEETKALKVLTRAREDLVGTRVALANQLRSELEAFWAGAAILFSEIDSSISLAFLERYPSPKDALRLGEKRLEGFLSKNRYSGGKSALELLERIRKAPKGRAGKAEIEARREAVLALVGTLKVLLERIKVLEEKIARAVRAHPDGQIFLSLFVSPNTTLTAATLVAEIGDQRGRYPTNEALAAAAGMSPVAVESGRRKVAVFRRACDKRLRRAVAILAESTRHHNRWAKEIYRRARQRGCDPAHAIRILGRAWVRVIFRMWQDGLPYDPARHGGLRRLRSAEGLTQGV

SEQ ID NO: 321401 - protein, 339 aa, unidentified
MITVKQVIGIDISKDSFDAQFAVTDEKQQQRFVALAQFRNTLPGFRKLSRWAKKMVGPSTAPLWFVMEATGVYHEHLAYYLAEQHQRVTIVLPTKMKNYVKSLDIKSKTDRLDARAIAQFGLERMLQPWQPPSTQLRTLKALVREYDAATEQLTKIKNQLHAKDHSYQPAMQTLARLRAQHKLYEAQLKAIEDEIHALVEDDDDLHARIGNVTSAQGVGFMTTVRVIAETNGFALITNAKQLTSYAGFDIRIKQSGLRSGKPSISHRGNSHLRRALFMPALAATRCNPTLRRFYLRLVRSKANKMVALVAVARKLLCLIYALWRDNVPYQRNYKPTVVS

SEQ ID NO: 321402 - protein, 372 aa, unidentified
MRFYTTQHRFYGGVDLHARTMHVCILDAAGAVVYDKNLAARPETLLRALEPFRDGLVIGVECMFAWYWLADLCVQHDIPFVLGHALYMKAIHGGKAKNDRIDAGKLARLLRGGTFPIAYAYPKGMRETRDLLRRRTYLVRKRAELMTHLQILNAQYNLAPFPKKLSFAANRTEMKVAERFSDPSVQKSAAVDVAVIDQLDVLIGELELYLVRTAKVDDVQTFHRLRSIPGVGKVLALILLYEMHDVERFASAGQFLSYARLVRCAHVSAGKKLGSGGKKIGNAHLRWAFAEAACLFLRSSERAKQWKQRVGAQRGEGKALAILAARLGRAVYHMLRKRVAFDEARFWNDVPQPTTTVSSSLSRTEEAEHAAD

SEQ ID NO: 321403 - protein, 373 aa, unidentified
MKYGVGLDMGKDQIHACVGGWNVEEGFKVIAQRRFTNTPKGWSDLTLWVDKQVKDKQIPLRIVMEVTGVYHEGVLHYLHDKGYGVCLELSKRTKKYLESIGHKSKNDKLDGQGLCRMACEREGRLWKPASKHILVIRGLLRHRKSLIDNKVQLTNQLHALTHGALKQPLIKRSVQQLIKQLDKQIKMVEQELEKMVKQDEALAERVEKIVDSVKGLGLISVLTAVAETNGFQDFSSIKQLTSYAGYDIVENTSGKFKGKTRISKQGNAHLRSAMYMPALAVIRSKVEPFYSFYIRLLKRNGALKKKAGVAVQRKILILIYTLWKNNCRFDEKHHLILAQKLKTQHFFKTSSSDLTPELHEIDHSQREPLLTGS

SEQ ID NO: 321404 - protein, 348 aa, unidentified
MDHYAGIDVSLECSSICVVDASGKIIREGKVASEPEALIAWFQVLGVGLERIGLEAGPLSQWLYRGLKEAGLAVELIETRHVRRMLEARPVKSDRNDARGIAQLMRFGWFRPVHCKSMGAQETRAILAARKLVQSKLYDIENHLRGTLRSFGLKVGKTTKRSFAGRIQELVADHPSLATIAQALLAAHAVLLREFNGFEKRARAMGRCHAQAKLLMTTPAVGPIIALTYASAVDDPTRFKSSKTVGAHFGLTPRKYQSGETEINGRISKIGDAAVREALYQAAHVMLTKPVRGCSELKSWAMRIAKRAGMRKAKVALARKLAVILHRMLADGKPFNCAATANAMAAAA

SEQ ID NO: 321405 - protein, 395 aa, unidentified
MYSSFVGIDIGKYHHQAAFIDSLGKKCSADISFDNTCEGFEMLLMSLNRFDKEQTVVGLEATGHYWLALYSFLADAGWTVKVINPIQTDAFRNIYIRKTKTDRVDSFIIAEVLRFGRYTETILPDENLSQLKELSRCRTGLAETVGSLKRKVIAILDRMFPEFAACFSDVFGASPSAVLNEYTTPEELANADIEKLVKLLERSSRGRHSVKKANELQEKARRSIGIKKGIQALTFELKLLLSQMDFINEQIGELDSFIAEIMKDFALILSIPGIGEITGGAIIGEIGDITRFGTPQKLQAFAGMDPKVTQSGQFSGTDNKISKRGSPHLRRALYISANIARIHDPIFKVHYERMLSRGKHPKQALAAVATKLLRVVHAVMTKGIPYTPAILANEK

SEQ ID NO: 321406 - protein, 339 aa, unidentified
MNITTIGIDLAKTSFSLVGSDKHGKIVLRKTLSRSKLLPFIAQCPPCMIGLEACSGAHYWAREFEKLGHQVRIIAVKFIEPYRKGGKNDNNDAEAICEATSRPNIWSVPVKSADQQAALCVHRVRQGVIRERTAWINRIRGLLAEFGIVIPKGRYAVQAAIPKILTDEDNGLPELARQIMHDLWLCIQQANDQILNYDRALARLAREDETAKRLLTIPGVGEQIATGVVASVPDPRLFKNSRQFAAWLGLVPRQYTTGGKIRLGRITKHGDKYLRMCLVHGARAVVAKLGDKQDHVSCWVRDLIERRGYLRAVVALAARNARLIWTLMVKRENYRPIKN

SEQ ID NO: 321407 - protein, 409 aa, unidentified
MRVIGLDIHRAFAEAVAWDDGRLKRLGRVDMRRHLLEAFAKKLTKEDVVVVEATGNAASVASVIAPHVKKVVIANPKQVRIIAHAKIKTDTIDASVLAQLYASGFLPEVWIPDEPTQALRRQVTRRNQIVRQRSRLKNIIQSILHSHLIPSCPHADLCGASGRAWLFHQVLPEDERLAVERHLREFDRLGEDLKVIERDLARSALKDEGVKRLMTIPGVDMIVALAIVAAIGEVGRFDRPEKLVSYLGLNPSVRQSGPGPAYHGRITKQGRGHARGMLVEAAWAAARAPGPLHAFFLRVRARRGQHVAAVATARKLAVIIWHLLSKGESYAWARPALHARKLRDLELRAGYKAERGQKGAAHAYNIKSHRDQERRWVEQAETAYARFVAGWNPRGPKRARTGATNEERQ

SEQ ID NO: 321408 - protein, 313 aa, unidentified
MKKTICGVDVSKAKLDVCIEPGHRFASFNNDTAGIAELAAFCREHAVTLVVMEASGGYERRAFVELWEKGISCALTNPRNVRRYAEAMGILEKTDRIDASVIARFAHAKNLVPTPLPSQAQQRLKALVTRLRQVTDDLTVQKQRRASMFDSTEMRSSIDEVIALLKRQSRSLEGEIASMIDDDPLWAKLAETWREVKGVAGRTVARLHAELPEIGLLSNKAIAKLAGLAPIANDSGKRKGKRSTRGGRAGVRSILFLVAAIAARYDHSLGEFRDRLLKAGKEKMVIRIALARKLLVRLNAKAREARAQYANAT

SEQ ID NO: 321409 - protein, 408 aa, unidentified
MTVVGIDVSKGKSMVAAMKPGGELVTTPYEVKHSGIELSRFALDVLCMEPDTRVVMEATGRYHEPVAALLHSEGIFVSVLNPLLIKQSGAGSLRKVKSDPKDALKIAKYGLDNWSTLREYTPMEAIRQQLKLCARQCDLYNKNIVMLTNNLISLSDKTFPGVNELFSSPEKENGHLKWVDFYRTFWHCDCINRMSPDAFEERYKKWCKRKGYHFSADAADALYAASCGLYTTLPRDNNAKLLVTVATDQLIALRENQSKLETEMLNLCKQLPEYETVMAMYGVGKSTGPHLMAELGDIRRFPHRSSIVAFAGVDPGVVGSGKMQLSSVATSKRGSPQLRKALFQVVSAYVKRKPENEAVYQFYAKKRDEGKPYYVCTTAAANKFLRIYYARVKECLNAAESATQAEEG

SEQ ID NO: 321410 - protein, 345 aa, unidentified
MEHYVGLDVSLKLIAICIVDRTGKIQREGVVHSDPEAIAAFIKSNAPHVARIGLETGATSTWLWTELNKMGLPVICIDARHAKAALKMQINKSDRNDAVGIARIMQCGWYKEVRVKDLDSHAVKALLVSRALLVKIKRDLENQIRGLLKNLGLVIGPAKMNAFALRAAELIENRPELAAAVTPLLIARVAIEQQIADLDRKVMKLARSNAQVRQFMTAPGIGPVTALCFLATIDDPTRFKRSRSVGAYVGLTTRRYASGEIDWTGRISKCGDKMLRGYLFEAANVLLTRVAKWSALKAWGVRLAKRSGLRKAKVAVARKLAVILHRMWIDGTEFRWSKETAMQTA

SEQ ID NO: 321411 - protein, 405 aa, unidentified
MNSYKIAAIDVHKSMLAVVVTDAAVEGELPFQRRKFGALGSDLKALAEWLAAQQVQEVVMESTAQYWKPVWRRLEGQCRLHLAQAHSNRARKGRKDDFRDAERLARRHLARELILSFVPDPEQRLWRTLTRSKHQLTRDRVRLHNQMEALLEDARIKLAACVTDLLGVSSRRMMEQLAQGETDPARLATLADPMLRATPEELSDALSAAPEMSTLHRQILRLFLERLELMERQMAVLDRNIAAALQLHQDAVVRLAAVPGLGADSAQQIIAEVGPQAATFSSPQELASWVGVCPGREESAEVSKSDESPKGNQTMRRVLNQAANSARKTKGSIFQSLYQRWVSRLGHNKTIWAIAHRLCRVVWIILHRGEPYIEFGNSRDPRSAAKRRKLARSKERGKAYRPIDS

SEQ ID NO: 321412 - protein, 384 aa, unidentified
MQKPNDLNQSRIVLKQDSTLIAVIEMSLSSWLVAGIVPGVERQPLKKLAVDESALVKLLNRWREEAEKAGRRIERITVAFEAGRDGFWLARWLRARGIEPHVIHASSVAVSREHRRAKTDRLDTELLKRAFLGWLRGERDHCKMVAIPTTKDEDAKRPNRERQSLVGEQTRIVNRMKAALIRLGIRGFNPKLKKAAGRLEDLRTPEGEPIPPNTLAELHRDMERRRLVSDQIRQIEKARLERMEQAPGDGPHAMVRLIARVIGVGIETADMLVHEVLSRKLRDRRAVARYAGLTGAPDESGSKRREKGLAKAGNARVRGGMIQLAWRFLLFQKDSALAQWYRTRTEGGRNRKTIIVALARKLLIALWRLVTTGEVPAGVVLRAA

SEQ ID NO: 321413 - protein, 320 aa, unidentified
MQQIALGLDISKLTIDAHFNGQNDFMRVMNNPTGIAKLMERIQSYQQQNQQIHACCEYTGVYYLPVANALHEAAIKISVVNPLSIKLYAEYKLRRTKTDKQDAKLIADYCQRENPPLWQPLSEKRKNLKALNRRIEQLNVLLNMESNRKEVSDPVIKSGIDTIINAIQNEIASCKTAIQDLIDSDKELSHNQQLLQTISGVGKTTAAWLLSVLVDIDKFENSKKLISYLGLSPVIKDSGTSVKYVKISKMGDKMVRKALYYLARAACLRSKLWRPWFEQKLKQGKHPKQIYVLMMCKIIKYAYAVIKSGQPFDENRHKPA

SEQ ID NO: 321414 - protein, 342 aa, unidentified
MKEVTTIGVDLAKNVFQLHGAAADGSVVFRKKFSRLQFARFMAGHRPCNVAMEACAGAHHWARELARQGHCVRLIAPHYVKPFIKRQKNDAADAEAIVEAALRPTMRFVEPKSAEQQARAIAFRTREQLVKQRTEVVNALRSHLYEFGYIAPEGIGYVSRLADVVEDPDAGIPDLARAICRMLFEQIAHLTDRINVLKARIADMSNAAETPRRLQTMPGVGPITALAVETFAPPMAQFRRGRDFAAWLGLVPRQHSTGGKQQLGKTSKMGQRDIRRLLITGAMAVIRWALRRGSPSGSWLARMLERKPPMVVAVALANKMARGIWAMLTRDEDYRGPKLIGA

SEQ ID NO: 321415 - protein, 320 aa, unidentified
MASRESLFIGIDVSKQTLDVAFGADPHAPRETIPSTDEGVQLLVTRLQRLQPTLIVLEATGGLERMVFAQLLQAGVPTARVQPRRVRALAHAEGRQAKTDRLDARLLARFAERVRPPHHQATDEQRASLRDLLVRRAQVIPMRTAEINRLTAAAPNLRPGIQQHIDWLDQEIRALEQERDNEAERTDEVRRKRELRESVPGIGAITALNLLLRLPELGTINRTEAAAVVGVAPYANQSGAQHKPRHISGGRRDVRSVLYMATLAATRRRLVRRAFDQRLCQAGKPRKVAIVAAMRKLLTILGAILRQQKPWDPAVHTSAP

SEQ ID NO: 321416 - protein, 356 aa, unidentified
MAKGITAKVEITIGLDVSDRFTEAYAIDADGEWIESWRMPTKQGAVREGLSRYPGARVVLEVGCHSPWISRQLKQEGYEVIVANPRRVRLIAESDKKSDRFDAEQLARLGRLDPELLSPIVHRAERAQRDRVLLLARDGLVRSRTQLINQVRGFAKSLGLRLPSSSAEAFPKRVRAAVGEDLFPGLDGMLRMIEQLTREIRSMDQQVERLCQERYPETGVLRQIAGVGALTALAFVLTLEDPHRFAKSRNVGAYLGLRPRQRDSGGQRPQLRITKAGDRMLRRLLVTAAHYILGPFGPDTDLRRFGLRLSERGGKAAKKRAAVAVARKLAVLLHRLWITGEVYQALGYGRTEERAA

SEQ ID NO: 321417 - protein, 396 aa, unidentified
MHKEKHCAVVIDCWMERIGEVNFENKPSKFPAFVEDIRKICGTKEFVFGLEDTRGYGRNLASYLTGRKFEVKHVNPAYTNAVRLSNPIVYKDDSYDAYCVARVLRDMMDTLQDAKHEDIYWAIRQLVKRREIIVKYNVMNKNQLHSQLSYSYPSYKKFFSQIDGKSALCFWENYPSPVHVWNSTPEKIYETIKAVHRAFKIERVYAIIDMIKKDGNTQKGYQEERDSIVKNIVKDIKNNQELLKDIDEQLSKLLPQTGYKLQTMPGIDLITEAKIVSEIGDINRFPDSDKLARFMGLAPVHFSSAGKGKDERCRNGNRELNAVFHFLAIQMVAVSPSGKPRHPVFREYFEQKVKEGKNKPQALICIARTLVRLIYGMMKTKTEYRPYEKKEKEGTN

SEQ ID NO: 321418 - protein, 347 aa, unidentified
MRIVPHSCAVYGVDLGKTTFHIAGADQHGRPILRIKLRRDALLQFFATASPARVGMEACPGAHWLARKLIAFGHDVKLIPAQFVKPYLKSNKNDTLDAEAIAEAVTRPTMRFVPVKRHEQLDMQALHRVRAQFVHQRTAIVSQFRCFLLEYGIAIHTGIGTFRRDATRILADDSNDLTPTMRQLLTDLWSDFLRIDERVITLSGQIEASAKHDDVVQRLTTIPGIGPLGASALCAAIGNGKQFRSGRDLAAWIGLVPRQHTTGGKPTLLGISKRGNTYLRRLLVLGAQSCLMHLDRSKDRLGRWLDTLESRMHHNKVVIALANKLARVAWVVLTRPGALYEKTDPRF

SEQ ID NO: 321419 - protein, 467 aa, unidentified
MSPRSGKPFRTSEQREDLTLTHRHAAGIDVHAAVHFVSVSAADVPPGFINPDAKLPAGVRKFGAYTGDLEAIAAWLKDCGVKTVAMESTGVYWIPLYDRLATQGFEVLLVDPRQTKHAPGRPKSDVLDCQWIRRLHSYGLLTASFRPSDEIVRWRGYQRQREMLIRYAAQHVQHMQKVLEEMNVKLPEVVSDIVGQTGMKIIKDIVRGERDPWKLAKHRHETCQKTEAEIASALFGNWRAEHLFALQQALQLYEFYQRQLRECDGQIEDCLRSMKDKSAGRALPVSLRKRKPERNGPQFGARSLLFRMSGVDLTQIEGISETTALVLLSEIGLDVSKFPHEKNFVSWLGLCPQHRGSAGKIFKRRTRRGANRAARALRMAAQGCHQAKNALGAFYRRIQGRAGGAKAIVATARKIAERVYRLLKYGQEYVRESEQRYEEAYRQRVAKSLARKAASLGYKLVPETMTP

SEQ ID NO: 321420 - protein, 454 aa, unidentified
MAKTKKKKIKNEVQPLHVMQPNSAGIDIGAAEIYVAVPGDRSDKTVRRFDTFTDDLHKAAKWLKQCGIKSIAMESTGVYWIPVFQIMDAYGFDVILVNARHVKNVPGRKTDVQDCQWLQYLHSVGLLRGSFRPAQDICAVRSLLRHRDNLVKAASSHVQHMQKSLTQMNLQIHNVISDITGVTGLAIIDAILAGQRDPDKLAELRDPRIKADKKTIAKSLTGDYRREHLFTLKQALQSYRNYRQLIIDCDKEIEVHLNEFDSRVDIDQSRLDPPSSKKTKKKPNANQPDFDLKTHMFRLLGTDLSRIDGVNDLTAHVFFTEVGPDLSAFKNASHFCAWLGLCPHNKISGGKVLSSRTRAGSNRLAQALRMAANSLWSSKSYLGEYFRRMRARHGAPKAITATAHKLARIIYHLVKNQKAFDETIFADHEQEHQRRLQKRVANQAKSLGFKLVPA

SEQ ID NO: 321421 - protein, 332 aa, unidentified
MNNFYFIGVDVSKKKLDFCVMFEDKVIHEEVVANQQDSVQALITQLKKDYGIDNTQMLICAERTGQYTYPLMCACEIDNCNLWLEDPANIKYSSGVQRGKNDKVDAKRIAIYAARFKDKVQYYKRPDKEIEQLKQLEAERSLYVVDLAKYKAQVEDQKEYMPEKLYNDKAVRLKKLIEGLEEVIGSIKNEMRKIIESNNLLSTQYELLQSVDGVGPVVALNMIVITEAFTRFDNARQFNCFAGLAPFQYMSGSSQRSKARVSHRADKSIKSLLHLAAVSVIGKKTGEMRQYYLRKVEQGKNKMSVINAVRAKIVARIFAVINKNEKYTPFFA

SEQ ID NO: 321422 - protein, 334 aa, unidentified
MENIALIGIDLGKNSFHIHCQDRRGKAVYRKKFTRPKLIEFLATCPATTIAMEACGGSHFMARKLEELGHSPKLISPQFVRPFVKSNKNDFVDAEAICEVASRPSMRFVQPRTESQQAMRALHRVRESLVQDKVKTTNQMHAFLLEFGISVPRGAAVISRLSTILEDNSLPLYLSQLLLKLQQHYHYLVEQIKDLESQLKRKLDEDEVGQRLLSIPCVGTLTASTISTEIGDGKQYASSRDFAAATGLVPRQYSTGGRTTLLGISKRGNKKIRTLLVQCARVFIQKLEHQSGKLADWVRDLLCRKSNFVVTCALANKLARIAWALTARQQTYVA

SEQ ID NO: 321423 - protein, 340 aa, unidentified
MKITTIGIDLAKNVFQLHGVDAHGEAILKKQLKRDQMAAFFANLPSCLIGMEACSSAHYWARKLQGFGHTVKLMAPQFVKPYVKTNKHDAADAEAICEAVTRPTMRFVPIKNVEQQAVLALHRVRQGLVKARTAQANQIRGLLSEFGLILPQGIAYLYQRVPVLLDEANEELPGAFRELVQRLLGHLKELDRQVGELEVQIQTWHRSNALSRKLEKIPGIGPITASALVASIGDAKNFANGRQLAAWLGLVPKQHSSGGKTNLQGISKRGDTYLRTLLIHGARAVIRCAERKRDAQAWLHRLIGRRNKNVAAVALANKNARIVWALLAREREFRSDYVAA

SEQ ID NO: 321424 - protein, 409 aa, unidentified
MNENGKRYIGLDVHKHYLIALGVDEELQVVLPARRVELAHLEAWMQKTLRKQDAVVLEMTTNTWQLYDELVEYAGSVMVVHPPHVALITRSQVMNDKIAASILARLLAKGLLVGIWVPPQEVRELRGLVAQRQKMVRLATQAKNRLHAVIQRHHLKPPAGNPFAKSKNGWWQALPLGKLEKMNLQSDLETLQFAEKQEERLEEELTGLAAENEALGRLLHISGFGVITAVTVYAAIGDIRRFAEAKKLVGYAGLGTRVHDSGLTMRTGKITKAGRRDLRTVLIEAANVAANNHPHWKAELARLEPRLGRNKAIVAIARKLLIAVWHVLQGKTDKYAEPETIAQKMLKFAYQIGKENRPQRQTAAQFARVRLDALGLGRELISISWGSKKPIPLPPSSLKTERSDVPNTK

SEQ ID NO: 321425 - protein, 423 aa, unidentified
MMKLKYSICCGLDVHKNVIVATIVTTNKDGISEYKQKSFSTINSDIQRFHNWLIENNCNHVCMESTGKYWIPIFNYLENDIDVCLTYPKYVKAIKGKKTDKKDSKWIADLYKFDLVRCSFIPPKDFRQLRELSRYRFKLVCMKSSEKNRIQNCMTVSNVGIASVLSDPFGKTATEIISYLLEHTADSMDEKAVRKFIKKGAKSKSDEIIEAIKGYTIETDQAKKLELARGHLEYLDDMITQTEVELYVRIKPYYEFVEFVSTMPGMTELSSTIVLAETGVDMDIFDDAKHLCSWCGLSPANNESAGKKKSVRIAKAGAYLKPMMVQCALAAIKNKKQPYFAIKYGRIKKRRGHKKAIIAIARMMMVCIYHMVSEKKPFTPADYEELMKPQNHVERVVLNENNVFAYLESLGYDSSKLVKRNDN

SEQ ID NO: 321426 - protein, 342 aa, unidentified
MEYYVGLDVSLKQTSICVVDQAGLVVREGVVDSDPEAISVYVTSRAPNAVRIGLETGPTSTWLWTELKRLGLPVICIDARHAKAVLKMQINKSDRNDAIGIARIMQTGWFKEVHVKDIDSHSVRALLASRALLVKIKRDLENHVRGLLKNLGLVIGRAKFNVFAVRAEELIEGRPELVAAIRPLLEARSAVEQQVSELDRKVMKLARHDTQVRRFMTAPGVGPITALAFKATIDDPTRFARSRSVGAYVGLTSRRHASGEVDWSGRISKCGDAMLRSYLFEAAGVLLTRVPKWSAVKAWGVRLAKRNGLRKAKVAVARKLAVILHRMWIDGTEFNWSKEIAA

SEQ ID NO: 321427 - protein, 408 aa, unidentified
MTIVGIDVSKGKSMVAAMKPGGELVAAPYEVRHSDIELSRLALNVLCMEPDTRVVMEATGRYHEPVAALLHSEGIFVSILNPLLIKQSGAGSLRKVKSDPKDALKIAKYGLDNWSTLREYTPMEAIRQQLKLCARQCDLYNKSIVMLTNNLISLSDKTFPGVNELFSSPEKADGHLKWVDSYRTFWHCDCINRMSPDTFGERYKKWCKRKGYHFSADAADALYAASCGLYTTLPRDNNARLLVTVAADQLIALRENQSKLEAEMLNFCKQLPEYETVMAMYGVGKSTGPHLMAELGDVRRFLHRSSIVAFAGVDPGVVGSGKMQLSSVATSKRGSPQLRKALFQVVSTYVKCKPENEAVYQFYTKKRDEGKPFFVCTTAAANKFLRIYYARVKECLNAAESATQVEEG

SEQ ID NO: 321428 - protein, 404 aa, unidentified
MDLAPIYRCAVGLDVHQAQITVCVLSEGADGEVVAEVREFGGFKRDRRALAAWVAGFQPDVVVMESTGIYWKSPYAALEQAGIRALVVNARHVKRVPGRKTDIADAQWLAILARAGLLTGGFVPPANFRELRLIARQLQRLTGIRAGEKNRVHKVLTDGGIRLSVVVSDLHGQSAWAMVKALAAGETPQQVLRHASARLRATEQELRDAVDGDLSDAHRFVLAQLVDHVEDLDRRIACFRDRLLAGLAPQQGLLGALQTLPGFDELGAALLLVEIGDDMQAFGKPEKLAAWAGVCPGNHESAGKRQSGKQRKGNPYVRRLLCEAAHAVSRTRCALAEKYKALLVRRGRKRAIFALAHKLLKLVFVLIDRGDYYRDATVDYEALSVARNAPRWIKMLRKHGYLAA

SEQ ID NO: 321429 - protein, 300 aa, unidentified
MHKYNQIFGVDISKDVFDVVNSKGAYYQFSNDLIGFKAFAKKLTKETLVVMEATGYYHYCLAQYLYQQGYLVSVVNPLSVKRFIQMKLSKIKTDKSDAKAICEYGQFNEVPLYTAKDKSQAECLQLIRLIDIYLKQSTAIKNKLHGEKTLGIPSKVVYHSLNRSLKSIKKEIGVLENRLNALVKDHQQKQLTLLKSIPGMGTKTAIMLIVMTDGFNRFENSKQLCSYAGITPTIRHSGSSVRGKSRISKMGNQKMRNILFLCSFSACKYNKGCKDLYERIVSKGKSKKLALIAVSNKLLK

SEQ ID NO: 321430 - protein, 347 aa, unidentified
MTTMPPAITGGVDTHLDVHVAAALDPTGALLGVEKFDTTPAGYTQLLDWLRSFGELERVGVEGTGSYGAGLTRHLHAHDVSVVEVDRPNRQRRRRRGKSDPQDAITAARAAQSGDAHGEAKTRDGNVESMRVLRVARSSARRSRTQCWNQMRSIISTAPEPIRAELRHLNVYRLIERASAYRPGQRRDVASLTKLSLRLLARRAAALEAEVAELDAILEQLVHDTAPELIARPGIGTDCASALLVAAGDNPERLRSEATFAHLCGVAPIQASSSKHDRHRLNPGRRPPSQLGAVAHRHHRHGLRPAHPPLHRAAHQGRPLQEGSLPMPQALHRPRGLQLPTPSRTHP

SEQ ID NO: 321431 - protein, 440 aa, unidentified
MRKREEEVVVFPNAAGIDVGASSHWVAVPRHASDEPVREFGAMTDDLKALADWLLECGVDTVALESTGVYWIPLYDVLERRGLTVWLVDARQMKYVPGRKSDVQDCQWLQKLMSLGLLRAAWRPREEVCVVRAVVRQREVLLVEQSSWVQRMQKALVQMNIQLTEVLTDVMGMTGQAIIRDIVAGQRDPAVLAKHRNQRVKASAASVQRALTGTWREEHVFVLEQALAMYDSLAQRLTECDAKLQALLAPLGRHDVKLAGPAKRAGKNTPGFDLRTALARWAGVDLTRINGLAVTSVLTVLSEIGPDLSRFANVKHFCSWLGLCPGTKISGGKVLSARTRRSTNRVRQALKLATMSLSRNGSALGAFYRRLCARMDKPRANTAVAHKLARMIYFMLTRGEQFVDRGQQHYEEHQRQRSIAALRRRAALLGFAITPTAAAA

SEQ ID NO: 321432 - protein, 347 aa, unidentified
MNYYAGIDVSLEASSVCVMDASGKIIREAKVLSEPENLIGWFRDLGLEMTRIGLEAGPLSQWLYAAMKEEGLAVELLETRHVHDAFKAMPVKSDRNDARGIAQLMRLGWFRPVHCKSMPAQEVRALLTARKLVQSKLFDIEMSLRGILRGFGLKIGRTTPNRFGLRVEELVAGHPTLEIIGKALLAAHEVLLREFNGFEKRVRQQARQDKRVRLVMSAPGVGPIVGLTYVAAIDDPARFKSSKQVGPHFGLTPKRYQSGETDYSGRVSKIGDASVRTALYEAANVILTKPLKGATALKSWGMKLAKRAGMAKAKVALARKLGVILHRMWVDGRKFADKGISPMPVTA

SEQ ID NO: 321433 - protein, 342 aa, unidentified
MYYIGVDVHKKTISYCVKDVSGRIQQQGTIPATRAELDSWMKTLPESWTVAMEATIFTGWIYDHLLPHAAQVKVAHPVMLRAIAAAKKKNDRIDAGKIADCLRCDFLPECHMASTEIRDRRRTLRYRHLLVRQMVQMKNRISGLLLETGVSHNRQRLHKVKYFRELLENNKEVDESIRPLLRLSRETIVRLQKTDYALVSSLERDPLLAERLKNLRTVPGVGPITALTWALEIGDVSRFRSVKQAISYCGLCGDEKSSADKVLRTPISKQRNKHIQRVLVEAAKLGPKQSHELALVYEKEKQKGHANRATLAVARKMVAYLLAVDREGRAFVPAEERSSTAA

SEQ ID NO: 321434 - protein, 410 aa, unidentified
MEIILGCCAGLDVHKDSVEACVRRTSAGGKVEHEIRHWGTTTRELVEMSDWLSSLRVTHVAMESTGVYWKPIFNILEERFEILLANAHHLKNVPGRKTDIKDCQWIAQLLQHGLLRGSFIPPRPQRELRDLTRQRTQLVDEASRISNRIQKVLEDANVKLGSVASNVVGASGRLMLEAIVVGQDDPAQLADLAKRRLRAKIPQLEQALYGKLTEHHRWMLGLLLDQLKATEQFIARLDERIAELTRPQLPVLEKLDAIPGVDRRVAEVLLAEIGPDVTPFPTDAHLASWAGICPGNNESAGKKRSGKTTKGSRWLRQALVQAAWAASHKKDSYFQARARNLMHRRGRKRGLVAVAHSLLTVIYHMLKEGTVYRDLGSQFLDRMRVKHLVRFHVRRLQSLGLQVNLTPEAA

SEQ ID NO: 321435 - protein, 350 aa, unidentified
MFIIGCDFHSRFQQIAMLDPSTGEVLERRLEHENGEAQKFYASLPGPARVGMEATFNAQWFERILQEHNHELWIGDAAEIRAAMVRKQKTDSRDALHILDLLLTNRFPRIWVPSPAERDLRQMLRHRHKLVRIRTSVKNQLHALAIGQGLCRRKKLWAKVGRKELESLVLAPWASRRREELLQLLDQLDPWIDKLDVAVTEAAESCPQAVCLMKQAGVGPVTALAFVLTIGPVSRFANSKKVVSYLGLNPSEASSAGRQRLGAISKQGNSMMRYLLIEAAQTASRLDPELRRDYQRLKFRRGSGVAKVAIARKLTVRLYWKLREAAQPLPSARMQGSPVSPVVGESLSPN

SEQ ID NO: 321436 - protein, 334 aa, unidentified
MSNRVLYVGIDVHEKESQLAVLEKEGALLMEERMPTKELGKFLSSLPGEKHVAVESVGFIHPIYAKLSSIEDCTVSVANPSRLRLISGSGTKNDRNDAKVLGDLLRTNYLPLAHMRDEETREKLFVVNDRVTYGLRRGELRGTMRWLLKRRGIEVEKPFSDEGRKRLKELKLQEIEISLDELQLVESTVEKLDHQIVDIVSKDARAKLLDTLPGVAPYTALFLACVLDDIDRFPDSKHACAYLGLVPWLDESADVTHLGHITKKGDKWLRRNLVECARAAVRKDPHLSEFYTRLKHKRGERKALIAVARKLVSYAYWMLKRNQTYEELQPWNLT

SEQ ID NO: 321437 - protein, 347 aa, unidentified
MQVTTIGLDIAKNVFQVHAIDTAEKVVVRKQLRRSQVVEFFKALPACLVGMEACATAHYWARELTKLGHRVRLMPAKDVKAYVKRNKNDAADAEAICEAVRRPTMRFVQVKSAEQQGRLMLHRTRDLLMRQRTQLINALRAHLAELGIVAAQGNAGLKELLKIIAGERDARLPVDAHASLVVLAAGLHAVQTMIGSIDKRIMIEHRSNEASKRLRSIPGIGIVGASAIVATVADPMAFRSGRDFAAWIGLVPRQDSTGGKQKLGPISKQGDRYVRRILVVGAHAVLRYAKQNPEKYSWLTQLLARRPFKVVAVALANKMARVAWALLAKGGTYYRARALVTVVTAAA

SEQ ID NO: 321438 - protein, 351 aa, unidentified
MLIIGVDYHPSFQQMAFLDQETGECGERRLNHSDGEAEKYFRDLKQRGVSVRVGLEATGYSRWFERLLAELGFEVWIGDAAEIKKKRVRKQKTDREDARLLLRLLLENRFPRIWVPSPENRDVRQLLWHRHRLVQMRTRIMNQLQAVAMNEGYRWKKKLFSEQGRALLEKLSLAPWANRRRKELLELLDQLNPKIAELTAAVEQEANQRPDVLRLMTHPGVGAITGLAYVQVIGTPDRFPCGKQIGSYIGLIPCEDSSAGKQRLGHLSKQGNALLRYLLGEAAQAATRCNPDWRRRYVHLAMRRHKNIAKAAMARKLAVQLYWMWRNGWDYSQLVSFGSNAGKLATGHGVN

SEQ ID NO: 321439 - protein, 395 aa, unidentified
MDNAEPKVWVGVDAGKEVHWAHVLDVSGTQVLSRRVENDEADLSLLIDEALALSEEPLWAVDQPGGSAALLLALLWERAQRVLYLPGLAVERVREAYPGESKTDARDAYVIADQARMRSNLARLAPGEDALAEMQLLLARRRDLVADRTRCVNRLRDVLLSLFPALERAMDLNAKGALILVRHYQTPGAIRRVGQRRLAAFLKNRGVKGAEEIASKAITAAKAQSVSLPAENVAATICAELANEALALKESVAALDGELEKRFFARPEARILASLPGMGPVLGSEFLVSVGDLSAFSSADQLAAYAGLVPAAQDSGKRVGNHRRMRGGNKVLKRVFYQSAFASLRSSPHSRAFYDRKRGEGKKHTQALIALARRRVNVLWAMLRDRATFEARSAA

SEQ ID NO: 321440 - protein, 340 aa, unidentified
MKRLYAGFDLHSSSSYLGIMDEEGKRFLGRKLPNDPEAILKALRPHAKRIAGVAVESTYNWYWLVDLLMEHGYKTHLANPSAMRQYKGCKHKDDRHDAFWLAEMLRLGILPEGYIYPKQTRGVRDLLRKRGHLVQLRTSLIISLQHMVTRTCAVKVSVNDVKRVREDRVLCLLEGDDDVLLSGAVSKGAIDYLGKQIRKIERAVEGKVKLAPEYGFVLTVPGVGTILALTIMLETGPVSRFPTVGDYVSYCRKVSSEWVSNEKRKGKGNQKNGNRYLAWAYSEAAELARRFDAKSKAYYQRKMSKTDRMVAHQALSHKLARAAYYIMRDQVPFEPEKLFG

SEQ ID NO: 321441 - protein, 347 aa, unidentified
MNKNWFIGIDVSKKTLDASIFVADVVINKFPHTQVRNDKEGFKELLRWLKEQGVRPQDALIGLEFTGYYSDALEQFLTSKKLCYAMLPTTVVKHYQRGARDKNDKIDSAKIADYLFRFHDTECIKLRVLPSKAMQDLKALKSERKFYVRHRTDCENRQKVAKSRDEQKNLQKIIDLYDKEIERIEQKMADVVTSDEEIHLTYMRLMSIPGIGPVNAINTIANTQNFTAFETARQYAKYVGVAPSEHSSGTSVRWRGRPSPHADLQAKADLSMAAMRAVEFSFEMSVFYEQKLGNRPDDKDVKRKALNAVKFKLIRQMFSVAKQHRNFKPLEQTQIQAEIHNTDQRVN

SEQ ID NO: 321442 - protein, 320 aa, unidentified
MDATAAAAAEPLYVGIDVSKDRLDIAVHPTGEAFAVARDAAGIDALAARLAPLGVAIVALEATGGYETVVAASLSAAGLPVVVINPAQIRAFAQALGKRAKTDPIDAAVIARFAAMTRPPVRPLPDEATQRLADLVGRRRQIIAMMVAERQRLARTTAPRLRRSMERLLAALQRELSEVETEIDQEVRGSPAWREKEDLLASVPGVGPVIARTLIAELPELGQVGRHAIAALAGLAPWTRQSGEWKGRSFIGGGRASVRTVLYMGAVTAANHNPELRAFRQSLLDRGKPKKVALIAVARKLLTILNAIARSGEPWRTATA

SEQ ID NO: 321443 - protein, 521 aa, unidentified
MSRPRANRSAKTRKAFLLQKPTGQFTPRVQAVGPEHFGIVAIDCAKARSRYLLADFYGRTLLEPTTLAHTAGDFHNAIARIRQSLQQHDLRDVVVAIERTGEYHQPVQRAFRQARFETRLVHPFTAKQYRQPADPGNKTDDTDLAAIFRATTQGFGLCEPTWPDTYVTLQLLRRHRRDLVSKNTILCCQIREVLHAAMPGYAECFDRLWAAPTALMLARHTTSAQAVRQAGRQGLQQIAADAHIPCQRGTLDKILAWAQQAPPGHDQSLHLRHILNVLDDDRRQKTQQILELERSLAHLVVATPYALLLRIPGINIVSIADLAGELGPIPLYLNANAITGRAGLMPCRYQSDRVDCANGPLQRRGHRRLRAVLMQCASNLVQYNHHFKARAQLWKHAGKDPRWIRVKVAKIFSRLVFASVAGRHVFPHPCCQPRHYILGKLLTFHQEHHTPPDQMRQDLEAAIEFLPASARADEAQPLHELLDEQAKRRRGPQPLASVIPLVLARLGLTAVQSTGCESAGP

SEQ ID NO: 321444 - protein, 363 aa, unidentified
MQTVRTIGFDIAKSVFQVHGVDAGGQVIIRRQLKRRQVLAFFQKLPPCLVGIEACASSHHWSRELQALGHTVRLMPPAYVKPYVKRQKNDMADAEAICEAVTRANMRFVPTKTPEQQSCLMLHRTRHMFIRQQTAVVNSIRAHLAEFGIVAPVGRKGVTELLHVVADPNDKRVPEVARACLTALGAQLLSLKEQILEFDRLIMDWYRSNQTSKRLHCIPGVGPMLATALVASVVDPRTFRSGRNFSAWIGLVPKQHSSGGKDRLGSISKQGDRYLRSLFVAGALAVIRYAKIHGTGHRPWLTALLARRPRPISSLPSISGPPRRSASRLTHRSNQQLHLSLVSAKLIFQIPVDPTWYACRPQH

SEQ ID NO: 321445 - protein, 445 aa, unidentified
MTNAMPAAKSEPEWAAFVAIDWADQKHYWKLVPAGSQQQEQGELQNTPEAVETWATGLQQRFCGRPIAVCLEQARGALVYMLAKYSHLVLFPVHPTTAARYRETFCTSGAKDDPNDTAFLLDLLLRHRERLRPLQPDTGETRLLQFLVEERRRTVNERTRQSNRLTDCLKQYFPQILVWFDGVDSPVVGDLLERWPSLDTLRRAHPGTLRQFFQKHNCRSAERNQERIDAIYAAVPATNDAAVLEAGTLTARGLVALLRTLRDNIAGLDRRIEQLVLAHPDGVLFASLPGAGAVLVPRLIVAMGTRRERYDSAFEVQCYSGIAPVKESSGKTSWVHFRRTCPTFLRQTFHEFALHSIGQSEWAKAYYQHLREDQNKTHHAAVRSLAYKWIRIIFRCWKDGKPYDEEIYLQSLRRRGSLIVGALGLPTGAGWQTVAGFQKLSENNA

SEQ ID NO: 321446 - protein, 429 aa, unidentified
MNYNTQNAKIASITEKTLIIGIDVGSETHYARAFSRRNYEYSKKPFAFSNDEAGFAAFKEWMDDIVEKHGMEVIIPGMEPTGHYWLNLGAYLQEQGMKPVHVNPQHVKKSKELDDNNPSKNDRKDPKTIAGLVNEGRFSYPYIPTGIYAEIRNLSNLRIQTQEEITRIKNRMARWFSIYFPEIKDVYRNPDAVSGLMVIKQAPLPCDIRELGVEGVNKIWRDARLKGVGIKRATTLVTAAEHSIGNTEAPRSARKEIRNLLNDYETYKNRMDELMQEIKETLSEIPYIDKLMEINGIGTKTVSCFIAEVGDIGRFDNPKQVQKLAGYAIVADSSGKHNGESRISHRGRKRLRYALYEAAISVIGKNKEFKEIHSYYRTREKNPLKKMQSVIAVACKLIRIFYTILTKGVDYDSQKMLNDIVRPEIQLAA

SEQ ID NO: 321447 - protein, 354 aa, unidentified
MLIIGCDFHTRYQQIAMAREETGELLVERRLDHASGEAHAFYRSLQSSQEPVRVGIEATGPIHWFERLLADLGHELWIGDSAKIRASEVRKQKTDERDAALILDLLLAKRFPRIWVPTPAQRDLRQLLWHRHKLVSMRTMLGNQLHALAMSQGLCRKKKLFTKKGRVELVSLGLAPWASRRREELLKLLDQLEPPIAELDRAVLEEAKHHADAVRLMTHPGIGPVTALAFVLAIGPITRFRRSKKIASYLGLNPSEESSGGRRRLGAISKQGNTMVRWLLIETVHHAVRQDPELRQDYQRLKFRRGHAVAKVAIARKLAVRMYWMLRSGADYAQLVRRQGSPRGTLAGASPSLA

SEQ ID NO: 321448 - protein, 425 aa, unidentified
MNCKQNERINQVKESTLVVGIDIGSTTQYARAFDWRGIELGKVFKFSNSREGFDSFKRWMQWLQDKYKKSDVIVGIEPTGHYWFDLGAYLEDGGILLVMVNPYAVKQTKELDDNSQSKNDCKDPKVIAKLVIEGRYSAPYTPDGVYADLRVLTNNRKRIIRELTQIKNRFARWFAIYFPEFRDVFKDYEKEGSMIVLRNACTPEAIVKLGPDGINQLWRNAKLRAVGLKRATTLCETAKRSIGLKKGMTAAEFEMKMLLQDYDYKIAQLEIIMEEIESLCKKIPESEQLLAIKGIGLITVAGFLAEVGDVRRFESPRQIQKLAGLSLRENSSGKHKGQTTISKRGRSKLRAVLFNAAIPLIATNPEFRALHDYYTNRANNPLKKKQSVIAISCKLIRVFFAILTKGVSYNPNKMMSDIHRQPLVA

SEQ ID NO: 321449 - protein, 375 aa, unidentified
MKIVGCDFHPSWQQVAVFAPETGEVAELKLLNGDGEAERFYRELEAPALIGIEACGNSQWFIELAERLGHVVWVGDAAQIRASYVRKQKTDRRDAGHILKLLMESRFPRLWTPTAAQRDLRQLLIHRHKLVEIRTRVKNGLQHLALNRGFPKQSSRLCGVRGRAYMEKLPLAGWTARRREDLLKLLAELDKHLGELDDAVQRAADEHPQARLLMTQPGVGPITSLAFVLTIGDVSRFKHSNQVASYLGLIPREHSAGGKQRLGSISKQGNRFMRQLLVESVQTVNRLDEEFRKQYAARCHHKAKGVAKVAAARKLAVRLYWMLRQNVGYPEIAHIESSPRVALRGEVGVPGKRTLLAGVNESHLATVNGRSRIQQ

SEQ ID NO: 321450 - protein, 373 aa, unidentified
MEHNITIVGLDAHKNSIEIVTAETAGNQEVRHYGKIGGDMTSLDKAIRKLRSVRSNGEELRFVYEAGPCGYEIYRHLTKQGFQCVVVAPSMIPKKSGNRIKNDRRDAENLARLERAGELTKVYVPREEDEAMRDLTRAREDAVKAQRAARQLLGAFLLRHGHRYPGKQSWTPAHMRWLSDITMPHPAQQITLQEYIHAIAESTGRVTRLTDQIQKLLPEWHMEPVVKALQALRGVAPVVATTSIAEIGDMNRFERPRQLMTYLGLIPSEHSSGESIKRGGITKTGNGHVRRAIIEAAQAYSFPARVSRHLLKRQEGLPQSVREIAWKAQVRLCGRFRRLMARGKQRNKVVTAIARELAGFMWAIAKEVQVPGV

SEQ ID NO: 321451 - protein, 345 aa, unidentified
MTIIRIGLETIIRIGLDTSKHVFQLHGVDASEQPILRRQLGRKEAEKLFAKLPPTRIGLEACGTAHHWARVLRGLGHEVVLMPPQYIKPYVKRGKNDAIDAAAICEAMSRPSMRFVPIKSAEQQAALMLLRVRDLFVKQRTMVINAMRGHAAEFGVTAAKGPVRMAELLQRAHTEEAGVPVLALEMLSVLASQLDALDIKLSKLEAELMAWHKQDPVSQCLATQPGIGPIGAVSFSLKVTDPKGFHSGRHFAAWIGLTPKEHSTGGRQRPGRISRQGDETLRRLLVLGAMARIRFADAGNASPWLLSLLARRPKKLVAVALANKMARTLWAMMVSGEVYRHPQEA

SEQ ID NO: 321452 - protein, 350 aa, unidentified
MIIIGADYHPSFQQIAFVDTNTGEVQERRLEHPEEAEKFYRALGAQGSSVRIGMEASGHARWFERLLSELKFELWIGDAAKIHAKRVRKQKTDRQDAELILKLMLKDDFPQIWMPSGENRDLRQLLWHRHRMVQARTRIMNQLQAVALNEGLLCKKRLWREAGRKQLESFPLAPWASRRRQDLLQLLDRLTPTIAELTQAIEREVEKCPEARQLQTHPGVGPLTALAFVLILGKADRFQCGKQIASYLGLVPMEDSSGNRRRLGHITKQGNSLMRFLLVEAAQVTVRSDPEWRSKYFHLALRRGRKIAKVAMARRLAVRMYWMLRKGWDYEQLNKFGSHAGQPGHRHGVQ

SEQ ID NO: 321453 - protein, 319 aa, unidentified
MATLGIDVSKKTFDATLIDDTGKEHHRQFKNNEKGFNKLESWLNKHNVTELHVCMEATNIYWEKLADFLYKKGYQVSVVNPSRIKGFAVSQLQRNKNDKLDSKVIATFCATIKPKLWIPPTDEQRKLRAMSRHLDNLKKGKTQHTNRLETCTDPVVQSSLQLMIDTFDKQIIDIEQQIQKLIDQYPDLKEQQELLMSIKGIGATTAIKLMAEMYDLGEYTSAPAAAADAGLTPSQHQSGTSIYRRPKLSKVGKASVRAALYWPAITAMKHNPIIRDLKERLQAKGKNKKVIIGAAMRKLLHIAYGVLKNKTPFDPAYAN

SEQ ID NO: 321454 - protein, 372 aa, unidentified
MQQNSKVFVGLDTSKLKISVAVAEDGRQGEVRFLGDIDNTPETVRRLVHKLASRHGELLFCYEAGPTGYGLQRQIAALGHECAVIAPSLIPKRPGERVKTNRRDALTLARLHRAGELTAIWVPDPGHEAVRELVRAREAAMADLREKRQQLQSFLLRHGRIFSGRKPWTQAHTRWLSNLAFEHPAQYLVLREYRQAIEDAEARLERLTQQVAEVVSTWSMAPVVEAYQALRGVAFLTAVTFVAEIGDVRRFESPRQLMAYLGLVPCESSTGEQVRRGGITKAGNPRVRRVLIEGAWTYRFPARMSRLLQERQEGLPKTVQAIAWKAQVRLCARYRRLMAAGKRHTVVTTAIAREMAAFLWAIGREIQPRSAT

SEQ ID NO: 321455 - protein, 368 aa, unidentified
MNPLFVGIDVSSKNNVAYLMKPDGSKHSSFSVQNNLGGAKLLSERIVSALGSMQLSDVVIGLEATSIYGDSLVYALREDGRLGQFQRKIHVLNPKQVRKFKEAYPDLPKNDWVDAFVIADHLRFGRIAREVYMDDYRYKALQTLTRARFEVIQNLTREKQRFANYLFLKCSGMAQDKDIANSSSTTIALMERFETVDDLANSDLEELTAFVTETGRGRFADPAATAKAVRAAAKGSYRLPKTVNDTVNQAMSVSIASMRALKEQVKVLDKAIDQQFEIIPNTLTSIPGIGKVYSAGIIAEIGDIHRFDSQASVAKFAGLVWHKNQSGEFEAEHSRMIKSGNRYLRYYLLEAANSVRRCDSECFTPNTL

SEQ ID NO: 321456 - protein, 308 aa, unidentified
MTTIHTGLDIAKLNLQLHLVGRMHDLPNTAAGHRRLHKLLAAQPGAHVICEATGGYERDVVAALHEACVPVSVLNPARVRHFARATGQRAKTDHIDAALLTAYGKALQPKPTAPRTEQEQQLAELIRRRVQVLEILVAQRQQAERLSLPALRRQAQSLVRRLERDLEQIEVQLRALRTQVATLDERVQKLEAITGVGTITALGVLAELPELGTLNRRQAAALAGLAPHPRESGQWHGRRSIGGGRAPVRRALYMAALVAARSNRQLKEFYQRLRAAGKPAKVALTAVMRKLIVLMNHTLKHLNFVPQN

SEQ ID NO: 321457 - protein, 453 aa, unidentified
MAQRNRSISLKPGKSRSALTITHPNAAGIDIGSASHFVAVPPDRCDEPVREFASFTADLHALADWLSACAVDTVAMESTGVYWIPLYELLESRGFTVLLVNARHVKNVSGRKSDVLDCQWLQQLMTYGLLSGAFRPTDAVCILRSLWRQRAMLLRSQGRHVQQMQKALTQMNIQLANVISDVVGTTGQKIVRAILAGERDGQTLAALKNGRIQASQDEIARSLQGNWRPEHLFALKQALAAFDFIGTQLAECDVQIQAQLQSLQAHDGEPAKGKRRPRSRNAPKFDLRAQLFKMCGVDLTRIDGIDVTTALSVISETGADMSRFPTVRNFTSWLGLCPGTRITGGKVLSGKTKRVVNRAAQALRLAAAALRSSKSALGAYFRRLCSRMDKPKAVTAAAHKLARLIYTMLTKGEQYTDQGQDYYEERYRQRVLYNLAQRANKMGMKLVAVEQTA

SEQ ID NO: 321458 - protein, 411 aa, unidentified
MNRVVGLDVAKGESQVQAFLDKKQPYKKSFKVAHTLEGLAILLDFIREVENVSGGRPPIVLESTGHYHTPVVQFFEDIGYLLIIVNPLISYRAKSSSLRKVKTDVIDARHLCELYYKEDLEPYKQRGIQLLNLRNLTRQHENITGLFVQTKLQFQAILDQVFPEYRGVFGDLHSYVSLLTLQTFPTSQKILDTGEETVAKKIKELCKSRSQKWADSQAEKLMAAAAQNPFQKNLYHSLTLSLDMYINMLLEYKKHLSKLEDEIDTLAKGIEECKIIQSIPGIGEKIAATIISEIGEIDRFNHPKKLVAFAGIDPSVFESGTFKGTINRITKRGSSRLRHALYMAVKCAIRDCRKKKTTDEIIPRNKRLREFYDKKREEGKPFKVAVIACANKFLHWIYALLKSKSTFQDLA

SEQ ID NO: 321459 - protein, 421 aa, unidentified
MRRSWMKKTNMVKVGTLIVTVDIGMTNNHGYCTAADGRSSKTFKFENTRQGFDTLWSMVLASKATFECNEVIVGYESTGPYGEPLIHYLKQKPVTIVQVNPMHTKKMKEINDNSPLKTDSKDPRVIADIIRVGHALSVVVPEGDVAYLRRLNNVRERHVKERTALLNQLQQFVFLTFPEFTRVLKTIFSKTALYILKKYTTPARIGSANLEELGEEMRRISRSKFRTRDAEKLINFARTTVGIQEGLQGLILDIQHVLIQLEMLHGFIAAIENEMETTLKRIPYSRNLLSIKGFGIATVAGLIGEIADFTKFTTQSEITKLAGLNIYEVSSGKRRGQRRISKRGRSLLRKVLYYAAIQTVRKNGIMHDYYQKLIGRGMKKIMALVAVARKLLRIIFAIVRDHSEFITNYADQRKQVIKEAA

SEQ ID NO: 321460 - protein, 421 aa, unidentified
MKNSAARKLKQVPAEYLVVGIDPHKKKHAAVAITEDLMVRVRFKFANSRAGFEQALESARAEMIKSSCRGVIFAIETGGHFWRNFAYFLEERGIPFRLISQLTLKRMRDGRDLNRRKNDFRDAEMAAGVFRTGDFTETKLTQGVYAALRSTHSAYYRLVKERTRIINLLKGLLDGLFPEFTQVFKDPCGRTALVVLSTCPSPAAIANLNEEVFVAAIRTERQGRLMVRKLKALHEAARTSIGIKPGADAVAMEVSLLVSRYHLIEQQVDRLVESLIRLVDKTEEGKYLLSIPGINYLSTAGLLAELGPLKSYHDAKQLIKMAGTNPIEAESGGKRLGKTPMSKKGRPRLRYSAWSAVIPLFRHNPDFRAWAKRLRERPAHANPLNGKEVVGAALNRLLRLVYVLVKKQEFYRSPQIVLAVN

SEQ ID NO: 321461 - protein, 434 aa, unidentified
MNSNTKLEAITEKTLIIGIDVAKDSHVARVIDSRGTELCGRMVFENSREGFCLFTTGIEALKSQHSMDDIIIGLEPTGVYDHTLIAFLKNNDYNVVYVLGMQVKRAKELEDNSPSKNDYKDAKVIASLVRSGYYRKIRTFTDEITELKEATRLAYQLTKKITRTKCQIRDCLTEYFPEFTTAFVSVFKDPGRIGGPAASKTAVATLRMFPLPDQINALTAEEIVFAWRNAGVMRGIGIKKALELKRLAMDTIGLKSTESVRVKIKSLMDEYNLLTNQEQEIWHRIRALIDGNADFQVIVGIPHVSIKMAAYLLAEVGNFRDFSHPQQLVRLAGLSLKECSSGKNRGTSEVTKRGRPALRRTLYFIVLEQLKQGAPEWLLLHKYYTTRKNRPLKKMQSVIALCCKFLRVVWSMLNNGTPYDPEMLVRNIAYKKAA

SEQ ID NO: 321462 - protein, 356 aa, unidentified
MSYDVKYIGMDVHKEAIVIAVLNESGKRVIESVIETKASSILQFLHGLRGELHVTWEEGTWAAWLYDVLQPQVQHIVVCNPRRNALLKEGSKSDKVDARKLADLLRTGMLRPVYHGENGLRTLRELGRSYRTISKDLTRVMNRLKALYRGWGIACAGTQVYAARCREEWLSKIPQAGVRRRAELLYQQLDGLQALRREVRPEFLAESRKHKAAKLLRQIPCIGPIRAARLIALMQTPHRFRSKRQLWTYSGLGIETHDSAQYRFVRGQLQLSKKPQQLRGLNRNHNHEMKEIFKSAATRASCGRGPFYDFYAALLAKGMKPEMARLTLARKIAAITLTLWKKEERFDVEQLKTQAA

SEQ ID NO: 321463 - protein, 472 aa, unidentified
MYHVGIDIHSKQSSLCVINRNGECIKRATVRGGTREVCQALAEFEGDLHIAFEASLGYGRWFEALSKIAKRVTVAHPGQLRLIFRSKKKNDRNDAETLARLAAVDALPAVHVPQLDVRHWRKLITSRQKAVSARTRIKNGIRALFREEGIATPRTLWIGKGRAWLNAYRFDDEMQQLDLDEFLLSLAEAEARVDRITARLDQIARAHPGVALLQTIPGIGPRTAEAVVAWIDKPHRFVKNNRIGAYFGLVPSQDASADRNRLGRITCDGPSAVRHLLVEASWQAIRRSPAVRARFERIMRDDPLRKKKALVATAHHLARVMLAMLKSGEVWRDEMGDDLQPAKRARSSRRRSSRKQIARRASKRTNDQAQTETSAEDSTQRSTKQTATRSTKQTATRSTQQPATRSTQQPATRSTQQPAMRSTQQPAMRSTKQPATRSTKQPATRSTTRPTKRPATRPKSPKENHQNKQTRV

SEQ ID NO: 321464 - protein, 327 aa, unidentified
MFLCIIDQSGKICFEKNMKSNPDEFLSAIEPFRNDIVVCVECLFTWYWLADLCAAEKIPFVLGHALYMKAIHGGKAKNDRIDANKIAVLLRGGMIPQAYVYPPEMRSTRDVLRRRLYLVRKRGQLLAHIQNTNHQYNLPAIAAKLTYKTNREGFTDRFEDPSVRKSMDIDLELVAHLDRMIRDLELFITQQAKKHDADMFHRLRSIPGIGKILALTILYEIHDIARFPRVQDFASYSRLVKCAKESGGKKLGTSGKKIGNVHLKWAFSEAAVLFLRNNSSGQKLLSRLAQKHGKGKALSILAHKLGRAAYYLMANKRSFNMDKFLAA

SEQ ID NO: 321465 - protein, 361 aa, unidentified
MKRSSKYVGLDVHQATTVSTVRDDAGRVLARTVVPTEAEALREFFRGMRGPIHVALEEGTQAQWLHDLLVPVVHRVVVCDRRGKSRQGNKGDQPDADELSDLLRCGRLRAVYHETGDRAMLKELARTYANLVEDSTRVMQRLKALFRARGIRTSGRSVYQREQRADWLRQLPDAGVRFRATVLYQELELLQELRPNAKAAMLTEARRDSAWRVLRTIPYLGPVRVAMLLATVQTPWRFRTKRNLWAYAGLAVVTHTTAEYELDGQRRVRRRRRAPLTRGLNRNHNRVMKDVFKAAATAAATRVGPLQDWYHGLLTRGMREELARVTLARKLAAITLHLWKRGERFDPTQLTVQAVHAHQAR

SEQ ID NO: 321466 - protein, 390 aa, unidentified
MGKPKQRKPNDLSRSLAALDVDHTLIAVVEMSLSSWLVAGIVPGVERQPLKKLKTDACALLELLHRWRTEAVRAGHKITRVAVAFEAGRDGFWLARWLKAHGIEAHVIHASSIAVSREHRRAKTDRLDTDLLKRSFWGWLRGERDHCKTVAIPTLEEEDAKRPNRERESLVGEQSRLVNRMKATLVRLGIRGFNPKLKRAAGDLEALRTPEGAPIPPNTLAELKRDMERRRFICDQIRKIEQARIERLQRAPNTGPNAMVRLLARVIGIGVETAELLVHEVLLRNMRDRRAVARYGGLTGSPDRSGIISREKGIARSGNARVRRGMVQLAWRFLLFQKDSALAQWYRHRTENAPRSRKTMIVALARKLLIALWRLAREGVIPEGIIMRPA

SEQ ID NO: 321467 - protein, 310 aa, unidentified
MTDTIGIDISKTTLDIYRISDGKRARFGNDASGLKAMRKWLGAAPLRVVYEATGRYHRDLEAALAAFGHHNVKVNPARARRFAQATGQGAKTDRVDAEMLARMGTVLGLEATPVKTDELHEIKELHVARVALIKDRTACRNRIGMARNKIVLAQLRARLRQIDTQIAQIDRELRSRIKADPGLARRYEILTSIPGVGPVAAIALIIEMPELGAMSSKEAASLAGLAPITRQSGTWKGKARIGGGRTALRCMLFMPAVIATRFNAPLQQVHRTFIAAGKPWKVAITAVMRKLIVLANALIRDDRKWAEINP

SEQ ID NO: 321468 - protein, 381 aa, unidentified
MEVLHERCAGMDISKRDAKVCVRAPGARPGTYGKRITVHGAMQRDIAELRDHLLAQQVTLVVLEATGDYWKPFYYGLEDVLNVMLVNARHAKNLPGRKTDISDAQWLAELGAHGLVRGSFVPPWPIRQLRDLTRQRTLLTGQRSREIQQLEKLIESTGIKYTSITTRSLGVSGRLFLEALVAGERKPTSLAELAKGRLRTKTEQLRAAFEGSFTTHHANLTRLHLDRIDLLNAHIQTLTELIGALIDEHSLGWARDLLATIPGISETGAENILAETGVDMTCFDTPAHLASWAGVCPGQHESAGKSRQVRARPGNAHLKGALGIAAMAAARTNGSFFQHRYKRLAARRGPTRALVAIEHSLLIAIWHILTRGEPYRTSQAA

SEQ ID NO: 321469 - protein, 344 aa, unidentified
MNYCAGLDVSLRSTHICVIDDDGELLAEGKTDSEVADIIAFLDELEVGITEVGIEAGTLTQYLTYGLQFAGYEVVCMEARQVKAALSAMRNKTDKNDARGIAQLLRSGWYSRVHVKSIESHQVRALLSSRKAVLTKCIDLEQEIRGLFKVFGIKLPPRLGHGSFDPKVRPLIEADETLSHSLLPVLDARLVLYHTYRELENRVRNLAKNDPVCQLLMTAPGVGPITALTFKSGVDDPERFKRSRTVAAHFGLTPRRFQSGEIDFDGHISKAGDANVRSTLYVAANSMLTRSSKWSPLKAWGVKLAETRGHKKAVIAVARKLAVILHRRWIDDTQFRWSTEAARS

SEQ ID NO: 321470 - protein, 391 aa, unidentified
MIYVGIDVAKDKHDCFITNSDGEVLFKPFTISNNREGFENLFQRIESVSDDFTKVKVGLEATGHYSYNLLGFLLDKGLTTYVINPLHTNLYRKSLSLRKTKTDKVDSRTIATMIMSDMNLKSYSDTSYHNEELKSLTRYRFDKVKERAKLKSSVSRLVCILFPELEKLVPTLHMASVYALLFEFPSADAVANSHLTRLSNLLAESSKGRYGKDTAVMFREAARSSIGSHMPAKSLELKHTIKLIHELDAEIEEIENEIKSIMDEIHSPILTIPGISYRMGAMIIAEIGDFSRFDSPDKILAYAGMSPSTYQSGQLDNCYSHMEKRGSRYLRYALYNATKYVCHWDESFAVYLAKKRAEGKHYNVALSHATKKLVRTIYAMEKSGQPYQSAS

SEQ ID NO: 321471 - protein, 442 aa, unidentified
MRLLNANANEHPLRIKLSTHIRTRIIMEPQRNKVCGIDVHKRFLIATTLSRDGKKDTQRFSVTLEDLLKFRDWVIENGCEQVAIESTGIYWHPVHAVLEGKIDLIVANAYKIKHTPGRKTDVSDSEWIAELCLNGMIEPSRIFPKDDRELRRLTRAREGYVKQMTQEKNKIHQSLDSACIKLASVISDIFGKSGMYLLNCVLEGRDIDEIIEGIPSGRLKKKADQIKESIKSRLEISQIILIRGSLSLMRSIQERIDELDGEISARIQYRKNDLAIAMSIPGTGFVSATAILAEIGNYTDFKKPEQLAAWCGLVPSLYQSAEKTILGGITKQGSKHIRRMLIQVAYAISRTKDSKLKKFFLRIQAKKGSKVAAVALARKVLCILHHLLMNQEMYLEDRDKKNMRQKPLTPSSPIEMPIQEMIDCIVRAGYVVTKSDSIGGFG

SEQ ID NO: 321472 - protein, 428 aa, unidentified
MTVRDCTSAKDFLQFKKEIRSSRRHLIVGIDIAKDDHRSFFGTAYGKTLLRRFTFKNDIEGFRKLLERVELIEQKHGLSEVVFGMEPTANYHKPLGDYLIRCGHRVVLVSGVAVKRNRELLDGRWDKNDTKDSANVADLISQGKCLFYDYAPVLIRELRNLLSLKRRLKKQEHGFRIRIRNCLLAQYFPELDRYYSKWEREILSVVRWCLDPSVIAGLEYDQFVQLVCPGSKSLGQQGRLDWIWKKAVDSIGCTAGEAAEFEAQVLVDELRHIRGVIKETEDKIKDVCKRCPEYDYLLTIPGFGPDVSSKVLAAIGDPFRFHSASQVLKMAGMDLNAERSGKSSDAAVPIISKKGSGHLRYALYQAAFVASCRHKQFKKYYANILTGREKEKGIKTKMRVKLAAKLLVIAWTLMKKREPFIPEYLQIG

SEQ ID NO: 321473 - protein, 331 aa, unidentified
MKSFKTVVGIDVAKDTLAISIFDGTTHQIKELGYTKRIIRKELITPFKKVKESIVFVMESTGIYHTRLAYWLVAEGLNISVVNPLIIKRYSQMHLMRIKTDSADAKLIAEYGYEYQHKLSFFRTKNESQIAVDNLVKAIDDLLLQRTMSNNQYLALKKQAKYSKEALDSYKRHLKFIKDEIKRLEKTLQTLLENEFNQEYELLRSIPGIGLKVSAMIIAVFNGFKNFESAKQACSFAGIAPSPYESGTSVKGRGSISKRGNTFARKILYMGALVATIHNPLIRQQYQKLVESGKSKMVAMVAAANKLLRQAFGVLKSGKPFDLNYVKEYNV

SEQ ID NO: 321474 - protein, 321 aa, unidentified
MYKYSEIFGVDISKDVFDVVNSKGDYYQFSNDLKGFKAFTKKLTKETLVVMEATGYYHYCLAQYLYEQGYLVSVVNPLSVKRFIQMKLSKIKTDKSDAKAICEYGSFNEVPLYTAKDESQAECLQLIRLMDIYLKQRTMMKNKIHGEKTLGIPSKSVYRSLNRSLKSIKKEIGLLEDRLNLLVKDHQQKQLTLLKSIPGMGVKTALMLIIMTDGFNRFENSKQLCSYAGITPTIRHSGSSVRGKSRISKMGNQKMRNLLFLCSFSACKYNKGCKAIYERIVSKGKSKKLALIAVSNKLLKQAFAIAKSGLPYDENFVSVLK

SEQ ID NO: 321475 - protein, 405 aa, unidentified
MNAVGIDVSKGKSTVTIRKPGDVVLMSPCDIPHTQSAINDLIKQIKSLEGETKVCMEHTGRYYEPVATWLSDAGIFVSAVNPILIRDFGDDSLRTPKTDKADSKKIARYTLDRWAKLKQYGIMDKTRNQLKTMNRQFGFYMAQKTAMKNNLIALIDQTYPGANDFFDSPARNDGSQKWVDFIHTYWHVDCVHSKSLNAFTEHYQNWCKRKNYNFSAEKAAKIYQISSDLIAVFPKNDITKMLIWQAVALLNTASKTVESLRSKMNELASTLPEYPVVMDMNGVGATLGPQLIAEIGDVSRFTHREALTAFAGVDPGKNDSGKHIQNSVRTSKKGSPYLRKTLFQIMDSLIKRSPVDDPVYAFMDKKRSEGKPYYVYMTAGANKFLRIYYGRVREYLSNLSNNETI

SEQ ID NO: 321476 - protein, 390 aa, unidentified
MIYVGIDVAKDKHDCCILGPDTEELFPVFTIRNNSDGYGELFHKIESVSKDKSQIKIGLEATGHYSYNILGSLLDHGYHTFVINPLHTNLYRKGQSLRKTKTDKVDARSIAEMLVTDKTLKPYTGTSYHSEELKSLTRYRFELVKERAKMKTSVSRLVNILFPELESLVPTLHMNSVYRLLQELPGAYFIASSNLTHLKALLADASKGHYGREKAIEIRETAKSSIGSLMPAKSMELRQTIRRIDTLTSDIKEVEQSIQKIMDECGSPITTIPGIKYRMGAMILAEIGDFARFSNADQVLAYAGLSPSTYQSGQLISSYARMEKRGSKYLRYALFNAAIYVSGWDERFRLYLSKKRAEGKHYYVAISHVVKKLVRTIFRMEITHTSYQPL

SEQ ID NO: 321477 - protein, 359 aa, unidentified
MQRNKISFKGQKIYIGIDVHAKTWEVCVLTESGYKERHPQQASAKTLFDFLKKHFPDGEYHAVYESGFSGFSTYYALKEYGINCVVTHAADVPTTQYEEVMKTDKVDAAKLARSLRAGDIRPIYIREKENIDDRSVIRIRKTIQKQLSGYKARVKHLLHCNGVEIPEQFARPGTHWSRTFIKWLKEDVVLLSSSRLSLDLLVKQVETIRQTLLDATKSIRRLAQTDRYRNNYELLMSIPGIGVSVAMCILTEIYDVKRFRNENQFASYLGLIPTCHNSGEKTASGEKTFRGNKHLGPMIIEAAWIAIYRDYGLGMAYARYKQSMKPQEAIVKIARKMSNIIFSVLKNSRKYEPYRWDKE

SEQ ID NO: 321478 - protein, 345 aa, unidentified
MTQYKRIGIDTSKAVFTLHGINREDRPVLRINLRRAQMKPFFAKLPPTEIAMEACGGAHYWARELTMLGHKVHLIPPQYVKPYVKRGKNDRNDAEAICEAAGRPGMHFVPVKSVTQQAQGMVLKVRETLVGQRTLLINTLRGHTAEFGVIAGKGISKVGPLSAAVEQEADIPPEAKDMVVLLAQQIADLDSKIKEIDVKLAAAHKANAVSQRLATIPGVGPITALTLAIEIDPAAFESGRHLAAWAGLTPKEKSTGGKQRMGEISRAGNERLRVLLVAGATSVINAATKPGSKQMTDWLRALLQRKPRKLAAVALANKMARVAWALMMRGEVYRRPCGATGAAAA

SEQ ID NO: 321479 - protein, 351 aa, unidentified
MVVVGVDAHKRTHTLVAIDDAGRKLSEKTVAATPEGHLEAVEWAQRWPERQFALEDCRHVTRRLESDLLAVGEAVVRVPTRLMAGARKGGRELGKSDPIDALAVARAAQRESDLPVARLDGEARQVRLLVDHRDELVRERTRIQSRLRWHLHELFPGLEIPPKSLHRRHVLAELEARLADVTGTVAMIARELLVRCRELTVRANELEREIAVLARRLGPTLLALPGCGVLSAAKIIGEVAGAERFRSRATFARWNGTAPVPVWSGNNTRFRLSRGGNRQVNAALHRIAITQWRGVGDQGRTYVDRRMAGGATKTEALRLLRRRLSDEVLRRLLADERRLEAASFDGLLIAA

SEQ ID NO: 321480 - protein, 322 aa, unidentified
MSPNTSKTMIKKSAAVYAGLDIAKATLQLHLQDRQHVLPNSAEGHRKLVRLLRAVPAAQVVCEATGGYERTVVAALHAAALPVSVLNPAQVRHFALAQGCRAKNDPLDAAVLTDCGAALHPKPTPIPNAVLAELRALVQWRNHLKDQLCAASNQGEHATLPYVKKQQAKLVKHLSTQMAQVEAQLTKALAQSPETQTQVQRLAQLDGVRTLTAVSVLSQMPELGQLNRGAAAALAGLAPWTRQSGPWEGQRHIGGGRAAVRRALYMSAVVLARLTETPLGKFYQRLRAAGKPAKVALTAVMRKLLLQMNQALKPAQDELQPV

SEQ ID NO: 321481 - protein, 337 aa, unidentified
MKYSAIDLHSNNSVVVVSDERDRVLVRRRLPNDAATILAVLAAYRDELVGVVVESTYNWYWLVDALQVAGYRVHLANTAAIKRYEGLKHSGDEDDAAYLAQLLRLEILPSGYICPPAARAVRDLARKRMQLVRSRTAQILCVENMLSRETGTGMCGRAVQRLTANEVEGFGFNEDVGRAMCANVAVIKTLNREIAKLEQRLQQCVRLRPEFRLLTSTPGIGQTLATLIMLEVGSIERFAAVGNFASYARCVDSARLSNGKKKGQGNVRNGNAYLAWAFVEAANFARRYCVEARRFYERKKARTNGVVATKALAHKLARACYHMLKEQQPFDVKRCFA

SEQ ID NO: 321482 - protein, 377 aa, unidentified
MSLGGYIMQVTFGIDVSKSTSTVCELIGESKNELTITNNRPGFIQLLHELTAFSKHPQIIFEATGVYSRRLQAFLEDYGYEYVVINPLKAKKEMNMGLRYNKTDKTDAYHLALIQRLYRHPVNQSESQTYKQLNALSRFYDQLTSDLVIAKNRLHQALQSTFPEIENLFSSAKGKNYWQIVVRYPHCDLVRREDKKQLINWLMSLKGIAFKHALRTADKLIELAYQAYPVVSCSSIEVEQVQYYAHRLLNLSDQRENLIARMVKLAKSLPNHDLENLESIPGFAQTTAVRVLAELGDLRRFSNPNKINAFIGIDPGRYQSGEMDSNLSITKHGNAVARKLLYRAIGQIDNAAKTNPCHIADYYESKKLSSQTKGSKR

SEQ ID NO: 321483 - protein, 338 aa, unidentified
MIVIGVDVHKQSVTAVAIDQVGQMLDEKTVPVGSDELVGWASAHGGERRWAVEDCRQLTRWLERQLLGRGEDVVRVPPKLMAPERRAGRARGKSDPIDALAVARAALRESELSRPRPDEAVFRDLKLLVDHRDDLVDERRRTQQRLRWHLHQLDPTFAVPLRMLGRASHLERVGRWLARQEQELQVRLARELVNRIRSLTRAITELDRELEQRAAQTAPALLELPGCGAVTAAKLLAEIGPIDRFKSDAQLARHSGVAPLEASSGRIQRHRLDRGGNRQLNSALYRIAITQARYHPGARAYLERKQAEGKSRREAIRCLKRLLVRVVFNTLKTSPALT

SEQ ID NO: 321484 - protein, 412 aa, unidentified
MELLHRRCCGLDVHKETVVACLRLVSNGKVTTEVRTFQTTTAELLRLSEWLATNDCTHVAMEATGVYWKPVWHILDDGEFELVLANAAHVKNVPGRKTDVNDAMWLAELLAHGLIRASFVPDTQTQEMRNLLRTRKQLVREQSSHVLRVQKTLEDANIKLDSVLSDVMGKSGRAMIEALIVGETNPVKLAGLADRRVKASPEELREALRGRVTKHHRFLLRLHLNQIDALDAAMATLDAQVEANLGPFRTAVDLIMSVPGIKNLGAQAIVSEIGIDMSRFPSDAHLISWAGICPRNDESAGKRRSNRLRKGAPWLKTTLVQCAWAAVKKKNSYLQAQFYRIKARRGPNKAIMAVAASILTAIYHMLKDGTMYQDLGRDHFDRRSTDQQKKSLIKRLADLGYAVEIKPLAATA

SEQ ID NO: 321485 - protein, 367 aa, unidentified
MKQQTSATTETSIKGRNIIDFTGKTICVGIDTHEKDYQVAKVINGVCLGNHRMKASPQELIEHLRSHYPGAAFKCVYESCAWGFNLQRQLQQAGIECIVVHAADVATTDKEKRRKTDKVDALKLARDLESNHLKAIHVPDEDLQKERNLIRFRKRLKGDLNRSKNRLKSLLKYQGINIPAQFGKACWSHKFMNWIEEEAKEDILLQDTLLLMLEEVKQLRQLLLKTEKKLQELMKCRYQQKAELLMSAPGIGRTLAMLFLLEIGDINRFKGFDPLNDLIGFCPDTDSSGDTERDRGITTRRHKQLRSGLLQAAWRAIRIDPALLEAYQQLTKRMKPHQAIIRIARKLLRRMRAVLISGIPYQKGVIA

SEQ ID NO: 321486 - protein, 337 aa, unidentified
MNFVGIDLHKKTITLCVVDKERTVVDRKRFFCSEPERITGFFEGLGPFQAVVEATASYEWLVSLLEPLADRVMLAHPKKLRIIAESTRKSDKLDAQVLAEFLALDMIPQAYRPTPRQRAHRVLVRHRHYISRRLTSVRNKIRRILADYNADREDLFTRIGLTYLGKVEVSNAHRFVLDQLRAEWEVYTAQLLAVDKRLRASAKDAPSREAEARAVLDTIPGVGPVTIDVVISELGDIRRFGSQKKVCAYAGLAPGGRESAGHRKELGITKEGSKLLRWVLVEAAWRLVRRTNRWGSIFEALKNRRGKKKAITAIARRLLCVMVSMLQRGQSYRPAMV

SEQ ID NO: 321487 - protein, 348 aa, unidentified
MRTYKGQHAYYCGIDLHARSLYLHVLDGAGTTRLERDIPASPAPFLDAIEPYRDGLVVGCECMFAWYWLADLCERERIPFVLGHALAMKAIHGGKAKNDRLDAATLAGLLKGGFFPMAYVYPKVKRDTRDLLRRRSFFVRQRAQLIAHVQNTNSQYNLPPFDKKLTYKGNRTAALADRFDHPSTRLSITTDLNLVASYDTQIAALERHLVNSARVDDPVTFGFLRTVPGIGPILGLVTLYEVDQITRFPEVGNFLSYARLVACTHESAGKVKGVGGRKIGNAHLKWAFSEAASLMLRSFAPARAWMQRQSRKRGAKKAHAILEAKIGRAVYHLWNKQVAFDPKKFLAS

SEQ ID NO: 321488 - protein, 341 aa, unidentified
MKITTVGIDLAKNVFQVHGVNEHGKGVLKKQLKRQQVMEFFANLPACLIGMEACGGAHHWARKLQALGHTVKLMAPQFVKPYVKTNKNDAADAEAICEAVARPNMRFVMIKNAEQQAVLALHRVRQGFVKARTAQSNQIRGLLAEFGLIVPQGIAHVTGRVPELLEDASNDLPGSFRLLVQRLLDQLKEVDRQVSEIEAQVVAWHRGDDLSSKLAKVPGIGPITASALVATVGEAKNFGNGRQLAAWLGLVPKQNSSGGKNVLLGISKRGDTYLRTLLIHGARAVINAAQRRKVPIDGWLGAMVQRRHKNVAAVALANKNARIVWALLRHGREFKADYAAA

SEQ ID NO: 321489 - protein, 349 aa, unidentified
MSMVCGLDLHRGQITFDALEVESGEVWRGRLWQPDRARFRRWLTEELGPRAHDGAVAVAVEGCTGWRYVAEEIIAAGFEAHVAEPADTQAARGRKKHAKTDRSDAKLLRELLQSGDLPESWIPPEAVLEWRERVRLYKTLLDQRRMWIQRIHAELFQHGVSLPEGQIASDQTRDWLAGDTVQLSPAARQRVAVGYDMVDATQAVVAPLRTDVERFGRRQPACKALAAAHFGIGPLTAVVVWTELGDCRRFSRSAQVVRHTGLDVTVDSSDRHRSGGRLSRQGPETLRWALFEAGMCASRATSPDRAYYQAVKQAHDGKLAAICMARKLARRCYHTLRQMDPEVVYTVPA

SEQ ID NO: 321490 - protein, 424 aa, unidentified
MPAGKDITMHYQKVLKMPESIPYLSAGFDVGADFTWMSIMLPNGILTGKPFKIIHSDPQSRELAISKIKEAQEMYSLESRCFLESTGIYHIPLLCFLRDKGFDCAVINPIITKNSTNMNVRKLHNDKFDSKKAAKVGLDASLKASIVPDDAIIDLRNLVRDYYYFKDLQSAIVLKLHAELKVSFPAYLNVFSKVTTQTSLKLLEAYPLAADMLAAPKDELVEIIRSTARFGETYALARYDAICTAAKDAAVFGRALPSNALRIRLYIKMYREYQAHLDSILEELHQAVGKLKGTPDYDRISFIQTLRGVGFLSAVVLIAEMGSFDLFSSPKKLYAYFGLDPGVNDSGKFHGDRVHMSKRGSSLARRILHMVAINNLKVDKATKTPVNPVIYDYYTRKCASKKKERCCRGRHAQNLQHHFRYAPG

SEQ ID NO: 321491 - protein, 366 aa, unidentified
MKKNSTVGKNRNEIFKQPKLTIGLDLGDRWSFYCVLKEAGQVLLEQKLPTTPEAMKQTFGKIPRSLMALETGTHSPWVSRLLSELGHEVIVAHAQKVQLITKSNRKDDRHDARTLARLARIDPALLGPVRHRSAQAQLHLTVIRARAELVSARTALVNAARGLVKSYGQRLPKCGTYQVSRELAAALSTELREVLEPLLKEIESLNERVKEYDERMEKLAKQVYPEVSLLKQVKGVGTQIALTYVLTIEDPYRFAKSRQVGCFLGLRPGRRNSGESEPQKGISKEGDRYLRTMMVQGAHYILGPFGEDSDLRRWGRKLAERGGKNAKKRAVVAVARKLAVLLHRLWVGGEVYEPLRNSQKALREVA

SEQ ID NO: 321492 - protein, 456 aa, unidentified
MGKGKRTAGMEEAHPFTGMRRVNEKAAGVDIGAVEIVVCVAGDETTQVVKAFGNYTVDLQNIGKWLKAYGVKTVAMESTGVYWIPLFEELEGQGFECLLISSRSLRRVAGRKSDIEDAQWIQTLHSYGLLESSFRPQAELIALRTLLRHRNQLVEHRSPHILHMQKALLQMNVQLSQAVSDITGVTGQTILRAIVAGERDPQALAAMRETGCKKSAEEIGRALTGSWREEHLFILKQSLEMFDFYTRQIEACDAEIERVYGMTRPDWEVGEVKPVSRRKRNSHSKNRPPNPEGIRKHLKRISGVDLSVVDGFGVSLAQTVIMEVGTDMSKFPSEKHFCSWLGLAPKHEISGGKVLKNKTLKTKNRAGQAFRMAAQSVKQADCVFGVTYRRLKARLGPAQATVATAHAIARVVYRMLKYKIEYETISVEEYEQKYQAQQLKYMSKRAAKLGYQLVPA

SEQ ID NO: 321493 - protein, 392 aa, unidentified
MVVSVGIDVAKDKHDCFIQSSEGEVLADVFSISNNMDGFHTLLEKIQACTAPQDKIKVGLEATGHYSYNLLGFLLDNGLATYVLNPLRTNLYRKSLSLRKTKTDRVDARTIAAMLLSDAGLKPYTDTAYHNEELKSLTRYRFDKVKERAKLKSSVSRLVCILFPELEKLVPSLHMASVYALLEEFPGAKQVAGAHLTRLKSLLENASKGRYKRDMAVSIRDTARMSIGSRMPAKSLELQHTIRLIRELDAEIHEIEAEIETMMDEIRSPIMTIPGIGCRMGAMILAEAGDLSRFDSPDKLLAYAGMSPSTYQSGQLKNCYPHMEKRGSRYLRYALFNATKYVCLWDPTFAAYLAKKRAEGKHYNVAISHAAKKLVRLIFAMEKSRQPYCSAA

SEQ ID NO: 321494 - protein, 346 aa, unidentified
MMIIGCDFHPSWQQIAWLDTATGETEEQKLVHASGEAKKFYRQLAAPVLIGMETTGNSQWFVELAEDLGHEIWVGDAAQIRASYVRKQKTDKRDAAHILKLMVEGRFPRLWTPDREQRDLRQLVVHRHKLVEIRSRVKNELQHLSLNKGMQKKRTLWSQAGQKLLRELVLKPWAACRREDLLGLLAMLNQQIGKLDAAVQHAADGHPQAQLLMTQPGVGPNTALAYVLTVGDVSRFPRGKQVASYLGLIPREHSSGGHQMLGSISKQGNRLLRSLLVEAAQIAVRFDPGMKKEYLHRCHQKPKGVAKVAAARKLAVRLYWMLRTQVAYPEIVRIESSPRVALVGAS

SEQ ID NO: 321495 - protein, 365 aa, unidentified
MKKISTAAARRIGKIEGQRLTAGLDLGDRSSWYCVLDAAGEVLLERKLATTPKAMKEVFGGMPRSRIGLETGMHSPWVSRLLSALEHEVIVAHARNVRLIGESRRKEDRFDARTRARRARMDPDLLGPVQPRSRKAQADLTVIRARLVRARTSLIHTARGLTKSYGGRLRGCSPRKGNRELAEGLSLELQSALQPLRNEIESLSERIREYHERVQQIAQESYPEVARREQGKGVGTLIALTDVLTLEDPRRFRKSRDGGCYLGLRPGRRNSGQSEPQLHISKEGDPYRRTLMVQSAHHILGPFGADSDLRRWGLKLAERGGKNGKKRAVVAVARKLAILLHRLWVSGEVYEPLRNRHQVVLPAAA

SEQ ID NO: 321496 - protein, 312 aa, unidentified
MCTLGIDVSKNKIDLCLLTAGPGGKKKHKVLTNEPAVARKVVDWLNAQKCVPESVTVVLEATGIYHENLAYGLHEAGVSVCMANPCRVREFAHGMDILNKNDAVDAFVLACYGELKSPAVWVPPSPEVRKRALLRQRDALREDVQRTVNRLEKANSTSTPQEVIRSLERTKSWLNEELARIEKLITDHTDNDPGLKADLDLLKSIKGVKDQVGREMLALLKDGTFKSASQVAAYLGLTPVEKTSGSSVRGRPHMSKTGPSGVRAKLYVAALTASRWNKQAKAIYERLVAKGKAKKAALGAVMRKLVIYALAC

SEQ ID NO: 321497 - protein, 424 aa, unidentified
MNFKMQNKQNQLIERITDQHLIVGVDIAQHVHVARAVNFRGIVVGKPLSFENNEEGFTKLLNWIKELKHIKNLDTTIVGMEPTGHYWINLSKWLVKQNMDVVTVNPHHVKRNKENRDNTQSKSDKKDALVIADMVKNGYYAFVRSTSESFEKLRVLMANRDVIVKRLVSSINQINRWVDVVFPELRQVFKDVSCKGAIATLRLFPTPAELCSLQPQDIVTGWKSCMKRHSGHKKARSLLVLAKRSIGTKQALDAYKLHLGQLLEEYDLASSQLERVTQEVTNVLEQIPFVKQILAIKGISEISLAGILGEAGDLSGFAHGNALLRHAGLHLAEASSGKWKGQIVLSKRGRSRLRRYLFLATVSLVMNNPEFKALHSNNVKVKKIKKMKSIMKLCGKLARVLVGIARNGSAYKPEMIFPLEQLAA

SEQ ID NO: 321498 - protein, 347 aa, unidentified
MKDVTVFAIDLAKVVFHGHGADAAGRRCFRKKVNASKLLALLAELPPCVVAMEACASAHFWAREAQRLGHTPKIIAPQHVKPYVTGNKNDWADAEAIAEAATRPKTRFVAVKSALHLDVQHLHRVRERLVHNRTQLVNQMRGFLLEQGIAVAKSVETLRAFVDGALADSAGVNLTAMMRQTLSELRDELSELDKRVQSASARIERFAACSDDCQRLMAIPGIGPVTATALWSATPDARSFKSGRHFSALLGLTPRHEGSGGVNRILGISKRGDRYVRSLLVHGARASLIWIDKRDDRVARWAQGLKESKGWNKAAVALANKNARIAWAILRWGSTYDAAHQPQKRVA

SEQ ID NO: 321499 - protein, 428 aa, unidentified
MKFKQSEAQNQRVERITPSHLIVEIDMEKETHVAQVTNYRGIVLTNRHLSFSNTIEGFEKLQRWMEGIQQKHRLSQVIIGMEPTGHYWWNLANWLTHKGLQVVLVNPATTKRNKENRDNCQLKSDPKDALVIADVVSRGYYYDHTKQTHVFQRLRTLMSDREFWVANSVRLQNRIIRWLDIRFPEYSSVFKDWTVKRSMATLKEFPAPVDLANRSVPEIIAIWKKHMQRAGGTTGTQKAAELIAQAKRSVGDVTALAVAKLDLARLISEYERITEMLADIEKQLHVMLGEIPMAIQMRSIKGLGPIFVAAILAGAGDLRLYAHGRQLLRKAGLNLAESTSGKRKGQIVVSKRGDSSLRKYLYLATIQLIGINPVFQELHRHNVQVKHMKKQQSVFKLVGKVARILIGMVQRVETFSPEKASHLVSQAA

SEQ ID NO: 321500 - protein, 320 aa, unidentified
MMAQNDLVVVGIDVAKDKVDACIRRFTLRQTFPNTAQGRRKLVAWLREYQVGKAVMEASGGYEREWRNVLHNAGIEVRIVDPRRVRSFALSAGRLAKNDPIDAEMIAWFAETFSQAPGQIPDAAREELAALVKARKVLIDGKIRLQAQDEHAAPEPARKAYARVLKSLAAEIDKLEAAISAKVKATPEFAERAEIIESVPGLAQATSAILIAGMPELGQVSDKVAAALIGVAPYDDDSGKRRGERCIKGGRRWVRNGIYMPCLGAATQCNPVLKAFYQRLLAKGKEPMVALVACMRKLIIILNTMLARRQKWNPGRHATA

SEQ ID NO: 321501 - protein, 346 aa, unidentified
MKLSACGIDLAKSVFQIHGVDLHGKPCLRKQLRRAELLMFFVKLEPCLIGMEACGSAHYWARKLSEMGHTVKLMAPQFVKPYVKTNKNDAADAEAICEAVTRPNMRFVAVKTEQQQALLAVHRARQGFVKARTAQANQIRGLLAEFGIVLPQGLCNLGPKLASLSDDATGQLPGSFCKLLQRLAENLKELDCQVGELEKEIQLWHAQNEASRRLAEIPGIGPITASALVASIGDVRCFKNGRQLAAWMGLVPRQHSSGGKQVLLGISKRGDGYLRALLIHGARAVLRHAEHKVETATSWLGHLLSRRHKNIAAVALANKNARRAWALLMHDERRFRADYVPAGAGT

SEQ ID NO: 321502 - protein, 317 aa, unidentified
MDAYLGIDIAKRKFDVALLVGAKFKSKVCSNDAAGFAALTAWLKVHGGGPVHVCMEATGTYGVALAEYLYDQGHRISIVNPAQIKAFGQSLLTRNKTDASDAKLIARFAASHHPPPWQPPPLEVKLLQALVRRLAALQEMQQQEQNRLATADPLVQAAIARHLQFLAAEIDATRRQIHDHIDHHPGLKQKQRLLDTIPGIGEATIAQILAFIGEPTAFASARQLAAFVGLSPRQQQSGTAVQRPAHISKTGSAALRRALYMPAVVACRYNPIIKAFCTRLKAAGKPSLVIVVAAMRKLLHIVYGVLKSRQPFNPRLT

SEQ ID NO: 321503 - protein, 334 aa, unidentified
MLYAGIDIHKRIFRAVVLDPDSGELSESRFEPSRERLGDWASEWQGKLAAVAIEATTGWRWVARELQARGFEVHLVDPGRASALRGRRRQPKTDRLDARWLALLLARQLLSECEAWLPPAEIQRLRDRTRLRKALAGERTGWAQRLHALLAHEGWPCSRGRLLTREGRRWVAALALDPHVRARVDVIVAVIAALEEQLELVETELRRYARGDQRCRALETLFGVGPILACHLLAEIGDVRRFQRPRQLVRASGLDPTVIESAESKRRGRLAKQGSRHLRWALVEAANHSHRHSSPDHELYDRTVRRCGRGRARLTVARKIARRSYHVLLEAEAA

SEQ ID NO: 321504 - protein, 318 aa, unidentified
MKTKTNQNINVGVDTGKFQLDIYIRPLDIYFTVENNEKGIKEAVKTIKKYKPERIVIEATGRLEMPFILACANAKLPFTIANPVHVKRFAGALGQRAKTDKLDAQLIAHYSEAIKPALSKLKPDTMQAMSDLVTRRNQLLNMQTMEKNRLQIMPKELAMTIKPVLTLFKNQILKIEEKIVKLIDSCPEYQAKNMILQSMTGIGKIAAASIISNLPELGYINSKQASALIGVAPMNRESGRFKGQRKIQGGRPQVRTVLYMAMMSAMQSNPVFKATYQRLLEAGKPKKVAIIACIRKMIVILNSMLRDGVMWEAPKVNN

SEQ ID NO: 321505 - protein, 352 aa, unidentified
MPYDYHVGVDYHKAYTHLVVQDAGGQTVRSGRVKNDPRALAGFLSPYLENSHAVMEATRNWTVMYDWLDELCDDVVLAHPAKVKAIAEAKIKTDKIDATILAHLLRADLVPVAYVPGEAARTLRQALRERMFYVRLRTMVKNRVVTIFDRYPEQTKPLREVTDLFGKAGRCHLALLSVSEVDRIEIDRSVAFIDDINGHIKASEATIRAFSKGNADVKRLKTIPGLGEFFARLVAAEIDDIGRFRSAAKLACYAGLVPSTYSSGGKTFHGRIIKAGNKWLRWAFVEAVAPAVAADPVLKFDYERLKASKGTNRAKVAVARKLLTIAYQVLRDQRDYERRDPCMRSSNESRLS

SEQ ID NO: 321506 - protein, 349 aa, unidentified
MLADQLDYVVGVDTHLDEHVLAVVAAPTGAVVARQTVRANARGYQAALRFAGEAANGTRAWAVEGTGSYGAGLARYLAGRGESVLELSRTPRSERRLRGKDDSLDAIRTARAALASETHALPRSGEQREALRLLLIARRGAVDVRREALVQLRSVIVTAPDPLREQLRGLPVGRLLERCRRLRRSSSARPDELATRLVLRSLARRIEVASSEATEHEREILAHVRALAPQLLDEPGVGPIVAAQLLVAWSHRGRVRSEAAFARLAGVAPVPASSGQTSRQRLSRGGDRQLNRALHTVVLHRRQHDPQTKDYIARRTAEGKSRREATRLLKRYLARRLYRLLENREPLLA

SEQ ID NO: 321507 - protein, 409 aa, unidentified
MQVMYERCAGLDVHKKTVVACVVTPDGQETRTFSTMTVDLLGLSDWLLVCGCTHVAMESTGDYWKPVFNMLEGTFEVLLVNAQHVKAVPGRKTDVKDAAWLAELLQHGLLRASFIPPVAQRELRDLTRYRSTFIRERTTLVNRVQKLLEDANIKLAAVASDIMGVSGRAMLAALLAGHADPHALADLAKGRLRSKRDQLAKALDGRVKPHHRFVLTELLCQIDSLDETIARFDTQIQEISTPFEAAIGLLDTIPGVARPTAEMIVAEIGTDMSRFPSADHLASWAGVSPGNHESAGKRTSGKTRKGNRFLRTVLVQAAHAAARTKSTYLSAQYRRLAARRGKKRAIMAVAHSLLIMAYYMIQRQEPYREAGADFFDRLQPEDTTRRLVKRLEHLGYCVTLQSSSTDSIT

SEQ ID NO: 321508 - protein, 493 aa, unidentified
MIEIPAVIERCAGIDIGKREVAVAIITGPADQDGEVQTRVFGTTVPALEKLREWLVQTGCTSVAMESTGSYWIPVRNILESAVRIVLVCPRKHKPEPGDKTDFRDAKNLAHLHRHGLLEGSFLPRREVVELRDLTRRRKKLPGNLAAEKNRIQKVLETANVKIGSVASDVFGVSGQAMISVLLSGKVATAEQIAELSKRRLRQRIPELTEALERHHMNDHHRWLIRQSVEHAVLLDRQMEELEAKIAEKLQPFQREYELLQSIPGVKTTTAASILAEIGPDMTQFPSSKHLTSGAGICPGNNRSAGKSKRGRIKKASKFLMAALVQAGWAASRKQGSLFQRRFHRWMRRLGERKANIAIARSVLETVYAILRDGQPYREPDPRAMHETERAKLVRHHAGRLRRLGADEKLIAELVQQIASPVTPVAERTDTSPTLIRRACPAKVCRGALGFRARQTRKQEYSVEKDPSAGALRQRRPATKNKSKSKTTTAKPD

SEQ ID NO: 321509 - protein, 422 aa, unidentified
MNEDVYYERCAGIDVHKKFLVVCLRIGRKTELRKIGTLTHELRDMVAWLKANGCQMSAMESSGSYWKPVYNIFEQEGLPVMVCNAYHIKNVPGRKTDVNDAQWIAKCLSQGMLNPSFVPEREQRELRDMTRFRKSQIEERSRNINRLQKFLEGANIKMGDWLSDVEGKSATQLLELVIGKPDFTLEDVSARMHGKMKASAEELFRSLEGYMTPIQREFFAHIMSIVREQTSQIEKTDAMIKRSLNDNYKAAVAALDAIPGIGEISAEQIVAETGVDMSHFKTQHSLSKWAGVCPGNNESAGKRKTGKTSPGNKTLKSTLTQSAKAAKRNKNSFFSAQYNRLVSHRGKNRATMAVAHSIMIAVYFVLSGHEFKDLGADYYMQFNREKKINSHFKQLSKLGVSIPDDVLREAFLSVPEPRAQSA

SEQ ID NO: 321510 - protein, 420 aa, unidentified
MKAKKKKKLDLIGDDTLIVGIDVGKKKHHARFINVRGYEIGKVFSFSNNRDGMEKIIAKIEKAKKQNSLTKAIIGLEPSGHYWKAAAHYLSSSGYKLALVNPYHIKKTKEIDDNYQTKTDTKDCLLIAKLVRDGDFFDPNLANGVYAELRRMYRLRLKVKKALAREKTRLKILLDEYFPEYEDLFCDILGVTSEYILRKYFLPKFVAKENILSLTGKIKMLSKGRIGAGKVLKLIEYAKDSIGITIGLDAALLEKTYILKEAKNLKSKLAYMNRKLKYYLDKIEYSKYILSIPGVGIVTAAGFLGEIGDISKYTSAKEIIKLAGLNLVEISSGMKRGKKKISKRGNSILRCILYQCAIVAISRNSEIKRYFSYQTETKNKMKMVVAVQCKLARIMFALLKYKKYYNPDKVLKSVVAEAVA

SEQ ID NO: 321511 - protein, 340 aa, unidentified
MDDATLRSEHHFFALGIDVGKDSLELALLTPQNELRKKSVRNSASGFKVLMNWLNRWAGPVEGDPASPGVRACLEASGGYEEAAALFLHEQGVYVSVVNPRQTKSYAGVRLQRSKTDPADAALLARYCQREEPPAWEPPTEAERRLRQLTRGLQSLKDERDRTRNKRNRAENETVTAALDAVLDTLSDQIGTLERRIETYVAQNAELKRQTDLLVTIPGIGSQTAATVLAELGDVTRFESARAVAAFAGLTPSHHSSGTSVRRRTRLSKLGNWRLRKALFFPAMVAMRHNEVVRTFAGRLLDRGKAKMAVVGASMRKLLHICYGVLRNGQAFNPSLHIAS

SEQ ID NO: 321512 - protein, 371 aa, unidentified
MKSIIYIGMDVHKKTYSLCALLKETGEIIGETKIPADVSLIIKFIENAKKSVDSDDVQIKTGYEAGCLGYSLYWQLAEKGIECDILAPSTMHRSAKNKVVKNDRRDAKNIAANLANGTYKSVHVPTDEDVEIKEYIRMMHDFKIELKKVKQHINAFLLRFGHQYPDKSKWVPAHIKWLKELELSDMHREILDEYLSQLEILSEKIERFKHRLEELSQKETYNEKIGQLRCIKGIDTIAAMTMHAETSDFDRFPTANAFASYCGLTPGEDSSGDSYHRLGITKQGNSMIRTTLVEAAQVLVRGTIGKKGKKVKSKQKDQDVKVIDYADKAVIRLQKKYHRMIFRGVKRNIAITAVARELACFVWGIETGHIS

SEQ ID NO: 321513 - protein, 396 aa, unidentified
MISVGIDVSKGKSTVCIMKPCGEILESPFDIGHTADELDSLISLIKSFDEEIRVVMEDTGHYHLPVATYLSSHNIFVCCVNALRMKKFCSQSIRRAKTDKIDSIKIAAFGITYWNELVKAYPSDVIYDELKFLARQYYQVTGMLVKSKVNFSNLLDQVMPKINDVLSNQGGNHKLTEFVSRYIHFQNILDMGERKFTSDYCKWAKKKGYRLNERKAAEIYAIAQNGIPTLPNSQSVKIAVSEAVKLIHSIEESRNTILAQMQDLCNTLPEYSVVKEMDCIGDTLAPRIIAEIGDVRRFKNKHSLIAYAGIDAPPYQSGAFHASERHISKRGNSYLRKTGYEIMQSLIKHKPADNAVYDFIQKKRSEGKCGKEAMIAGLNKFLRVYYGKVMEFYSEH

SEQ ID NO: 321514 - protein, 315 aa, unidentified
MAMPVSVAKPIVGVDVAKDELVIYHAETDRLEAIPNTKAAIKKWLKELPAPVDVAIEATNIYHQEFADLAYAQGCVIYMIGGYELSHYRKGVKVRAKTDALDARLLARYLNNEGHQLHPWTPPSPLYCRLISLFRRRAALVQARVSLKQSWSNEPLLKKAFENQIKAMQRLEILLEKTIQTQLEAAGLGAQLKRCMKVEGIGLLNGARLLTSFQRGDFRNADAFIAFLGLDLRISDSGKKKGRRCLSKRGDPEARRLMHNAAMSARRTAAWKGFYEALRARGLSTTEALVALARKLARVVFALLKNQSEYLPKGI

SEQ ID NO: 321515 - protein, 342 aa, unidentified
MNIPVRIGMDTSKSVFQLHGVDENEVVVVRRQFRRAEMIRYFERLPPVLVAIESCGSSHHWGRLLQSFGHEVKLIPPQYVKAYVKRGKNDAADAEALCEAVTRPSMRFVPVKSKERQAACMLMTVRERLVSVKSQLSNAFRSYAAEFGIVGPAGRQNVAALIKRVLEDDSLPEMARDLFRFQADEYAAVEARLAKIEAKLMKWHREDDICRRIATIPGIGPIGSSMLSMKAPPPETFRSGRDFAAWLGLTPKDHSTGGRQRLGGITKVGDSVLRSTLIVGATALLRHIHKGRHKPTPWLASLLERKPPKLVAVALANKCARIAWRLMISGGVYNQPVAAMPT

SEQ ID NO: 321516 - protein, 391 aa, unidentified
MIYVGIDVAKDKHDCFITKSDGEVLFKAFTITNNLDGFNELHQKITSVMDDVTNVKVGLEATGHYSYNLLGYLIDKGLPTYVINPLHTNLYRKSLSLRQTKTDKVDARTIASMLMSDVNLKSYSDISYHNEELKSLTRYRFDKVKERAKLKTSVSRLVCILFPELEKLVPTLHITSVYALLSEFPGAKHIATAHLTRLTNLLSEASKGRYGKDTAITFRDAARASIGSNMPAKSLELKHTIKLIQELDSEIDEIENEIKITMDEINSPILSIPGINYRMGAMIIAEIGDFNRFDSPDKILAYAGFSPSTYQSGQLDGAYAHMEKRGSRYLRYALYNATKYVCHWDPTFAAYLAKKRAEGKHYNVAISHTVKKLVRVIYHLEKTKQQYIKAA

SEQ ID NO: 321517 - protein, 392 aa, unidentified
MEPVLDSCAGMDVHEKKVDVCIAHGPLEKSPKFEIRTFSTMTSDLEDLKSWLKKYNVTTIGMESTGVYWKPIFNIMEGEFTIVLANAQRLKAIPRKKTDIMDCKRIAKLLRYGLLPNSFIPPREIRELRDLNRTRRKLVGMMTSEKNRLTKVLESSNIKLSSVVSKISGVSSMAMIRSLLEKDRLSKEEISQLAKGSLKKKVDLLEKALDGKLTDHHRFLLKMHMENLDHLARQIAKIDEQIERKMIPFQKESNLIQSIPGISKVSASAILAEIGTDMSQFPDEAHLSSWAGVCPGNNESAGKKKSGKTQKGNSFLKGTLAEAAWAASKVKRSTYNAFYQNIVRRRARRELLLLWHIECSWTSTVFSKLEHLIKIQAPRKLMNERRREKNGR

SEQ ID NO: 321518 - protein, 350 aa, unidentified
MVVVGADVHKHSHTFVAVDDVGRKLGEKTVRAITAGHAEAVMWARERFGAEIVWAVEDCRHLSARLERDLMGFGQSVVRVPPKLMAQTRASARTRGKSDPIDALSVARAYLREPDLPVAFHDERSRELKLLVDRREVLVAQRTATINRLRWRVHELDPERAPKAASLDLAKHRRILGAWLQTLPGLVAELARDELAEISRLTEQINALAKRIGERVRPGAQALLAIPGCGELTAAKLLGETAGVARFKSEAAFARHSGVAPIPVWSGNTAGRMRMTRSGNRQLNAALHRIAVTQIRLDGPGQSYYRKRIDAGDSTTEALRCLKRRLARIVFSHLHTDQQQHSQPRQTAAA

SEQ ID NO: 321519 - protein, 388 aa, unidentified
MFFLGIDIGKNTHVASLLDEKAKIIFKAYSFANTLDAAEALLVQLEPYKDSLEIGMEATGHYWLSLYSFLTEHKFIVHVLNPIQTDGWRKGIEIRKRKTDVIDSVLIADLIRYGNFLETSLADEDILSLRNLSRFRVYLVNSVSDLKRKAIAVLDQIFPEYASVFSNVFGQTSKELLKSLSLPSDYENLSATKIEEVLSNITQKKKASKTISTLSDKASRSFGISFCKDSFAFQLKLIIEQICFIEEQIASVELEIDQLMSKLGTNIKTIPGVGSVIGAVILGEIGDIERFDNPSKLVAYAGLDASVSQSGEYEASSGKLSKRGSPYLRKALYMAAQRAEFCDPVFHAYYEKKRNEGKHHLVATNAVARKLCHTIYAILKKDVPYEVQ

SEQ ID NO: 321520 - protein, 349 aa, unidentified
MYTKRITVDLAKNVFQLAVFDVAGKIVDRKRLNRIAFHTFLTKLSEPTELIVEACGTAHYWGRTLQRMGHEVTLLHAGYVKPYRRRNKTDKNDCDAIFEASRANDIRPIPVKTELQQHTQHLHSIRELYKGNLIQRINLLRSIYREQGFDCPEGKEKFLKVAFAIADEPVMRPLKNHINTLLAEISDFIQLIKDCEKTDKIINANNPIIQRLDDVSGVGFLIASAMVSAIGSPERFKNGRMLSAFIGMTPREFSSGSKRKLGKISLAGNTYLRTILIHGARSALLAARRCAINTPEKLTRLQQWAVQLSERTSFNKATVALANKLVRICWSVWMHERRFDGNYRPQTSA

SEQ ID NO: 321521 - protein, 318 aa, unidentified
MYYIAFDVSKKVLCGFDGEKELAFDNKKGLKALKSYLKKKYKDLNDLVIVFEATGVYSNYLKEFCADNNLKVYIINPKRSSNFSKAIGNRSKTDKIDTKQTIYEYRKIIGPKDIKVPKIDKVAQTLSAYLTSYKFTVKKRVSISNHLEALERNTSSLKLVALLKGELKRTKKTEEKIKAKIEEYIKKDSQLKEDYKRQMTIPGVGKASAICLLTLFNKYKDTNQAQITALVGLDPTKRESGTSVKGKMKISKNGDRMIRGTLYFPLLSAIRFNKKIKALYDRLLANHKPKQVALIAAMRKLILISHAIYKNKTVYSAV

SEQ ID NO: 321522 - protein, 346 aa, unidentified
MEKTTTDLDAVATVGLDLAKHVFQVHAVDATGRVLVTRALRRKDVQAFFERLSPCLVGMEACGSAHHWARQLMSLGHHVRMMPPAYVKAYVRRQKNDAADAAAICEAVARPSMRFVPVRSIENQAALMHHKVRELLVAQRTQLLNALRSHLAEIGIIAAQGPNNARALALLVVEGNDMIPAVVRSALLPVVRRLNELDAEIVESDRAILALARADDTARRLMTVPGIGPVTASALAASIQDISAFSGPREFAAFLGLTPRQSSSGGKERLGRVSKMGNRYLRKLLVVGAHAVLFHRRRCSDALRSWADRLMETKPFKLVAVATANKLARIAFALMRDEAHYAGAPA

SEQ ID NO: 321523 - protein, 419 aa, unidentified
MEVLVECCAGIDIGKDEVVACVRTPRPGGRGRRKQTRTFSSFTGSLEVMADWFTAEGVTEIAMEATGSYWKPVWYVLEDRAFAVKLVNAHHVKILPGRKSDVLDAEWLAELLEHGLLRGSFVPPPAIRQLRDLTRYRKRLIQAHTSECQRIQKTLEDAGIKLDSVASDVLGVSGRAMLAALVAGERDPDVLAELAKGRLRRKIPALRQALRGRFTDHHALLIGLCLDHTAHLEAAIARLDERVDTLFATHTSETGLPFVHARDRLDTISGVGKRAAETIIAEVGVDMTRFPTAAHLSSWAGLAPGNNITGGKRGSGKTTKGDVWLIDILTQCAWAAARTRDTYLSAQFWRLARRIGKKKAAVAVAHSILVICWHLLTHDCDYDDLGGDWFTRRNTDRQRDRLIKQLTGLGYYVTLDKIA

SEQ ID NO: 321524 - protein, 337 aa, unidentified
MKVTLIGIDLAKSIFQVCGVNQAGKRVFNRQVRRARLMECLLQHPDATMAMEACSGSNYWGRELQQRGYKVMLIPPQHVKPFVKGNKNDRNDAFAITEAARRPDLKCVEPRTLLQTEMIQVHRLLERMIRQRTALINQLRGFLSEHGIVVSRGRERLSAVMPELLEDADNGLGPSSRKLFQTMYEEWQQMNQAIGRVEQELEAHAKADEPAQRLMQMRGVGVKISTAMIAQVGNGHGYKSGRHYSANLGLIPRERSSGGVQKLGGITKRGNRYLRRLLIQGAWSVVRYADRNDDRLSRWARQLVERRGKHKAVVAVANKMARIMWSMLYHRTEYRAN

SEQ ID NO: 321525 - protein, 405 aa, unidentified
MNMNAVGIDVSKGKSMVAILRPYGEIISKPFEVKHTVSGIRSLIEQIQSIDGESRIVMEHTGRYYEPLVRELSKADLFVSAINPKLIKDFGDNSLRKVKSDKADAVKIARYTLDSWTELRQYSLMDEIRNQLKTMNRQFDFYMKHKTAMKNNLISILDQTYPGANTYFDSPAREDGSQKWVDFSATYWHVDCVRKLSLNAFIDHYQKWCKRRKYNFSRSKAVEIYEASKELVSILPKDDLTKLIIKQAVEQLNTASQTVEQLRTMMNEAASKLPEYPVVMAMKGVGPSLGPQLMAEIGDVTRFTHKGAVTAFAGVDPGVNDSGDYSQKSVHASKHGSPVLRKTLFQVMDILIKTKPDDDPVYLFMDKKRAQGKPYYVYMTAGANKFLRVYYGKVKEYLSTLPQSN

SEQ ID NO: 321526 - protein, 418 aa, unidentified
MSYRVAAIDIHKKVWMVVVASANSEVKDPAGEALELEARRFGTGSAERAHVVGWLRERDVKEVVMESTAQYWKPVWMDLEPHFGKLHLAQAHSHRAPRGRKNDFGDAKRLARRLLAGELLLSFVPAAAQRTWRTLTRSKHQLVRDRVRLPNQMEALLEEMRIKLSSVISDLLGVSGRRILSALSAGERDPAKLAEWGDERLKCSREELSDSLNGAPPPTQLAVLNLFLERLDLLDRQIESLDRLAAGELSQHQDAVTRVAELPGFGADSAQQIIAEVGTDAETFPSAAAFRSWAGVCPGSNISAEQNHSSRAAKGNRFVRRILTQAAQAAVRKKGGHLQSVFRRRLPKLGYNGAIWAIAHRLARLVWKILHDGVRYREPGEETHPKAKQRRAQKLTQALRRLGYVVTLTPIPETQAAG

SEQ ID NO: 321527 - protein, 341 aa, unidentified
MTEIIRIGVDIAKNVFEVHGVNAQEQVVVRRSLRRNQVLAWFGKLPACLIGMEACGTATHWARELTGLGHTVRLIPPAYAKAYVRRNKNDPADARAICEAVSRPSMRFVPIKTVEQQGEAVTHKARQLLIKQQTMTQNSLRGLMAEFGIVVPQGPQHISKLLVILADPEDPRIPAVARTALNAMADLLAALEQQVETLDKTIRAQVRANPTARRLDTIPGFGPILSGAIAAIVADPRHFDSGRDFAASLGLVPRQDGTGGKVKLGPISKRGNGYLRRLLVNGATAVLNGKNARNDAWRAKLLDSKPKKLAAVALANKMARIAWAVMTRQETYRPRAVAAAA

SEQ ID NO: 321528 - protein, 418 aa, unidentified
MNTLASFEFTAFIGIDWADTKHDICIQPAGSEEREFDRIAHQPQIIEQWAHEVHKRFGGPIAVILELSKGPIVSALQKHDFFVLFPVNPLMLAKYRQAFKPSRAKDDPTDAELAVDLVLRHRDRFKPLRPQSVEMRTLAHLVEKRRRLVEDRKRFSNRLISTLKAYYPQAIEWFSHKETFVFPAFITRWPTLKQVKRARRSTLERFFREHRVRRPNLIEARIQAIQEATALTDDPGVINPCTLEALALAEQLRTTLELIKQFDKTIAQLAPTMPDYTLFASLPGAGIVFTPRLLAAFGEDRDRFKNAAEVQQYSAVAPVTERSGKKSWVHWRWQCPTFVRQTFVEWAAKTIHSSFWASAYYHQQRQKGASHQMAVRALAFKWIRILYRCWQSRTPYNETTYLQALQRRGSNLVPQQIA

SEQ ID NO: 321529 - protein, 375 aa, unidentified
MSKIRFLGLDVHADTIAAAVAEPDGEVRPLGMIPNRLESIRKLIAKLGPAKELKACYEAGPCGYVLYWQLTALGVACQVIAPSLVPTKAGDRVKTDRRDAAKLARSYRAGDLTPVWVPDAAHEALRDLVRAREDARQDQLRARHRLNKFLLRHDRRPPEAVKKSWTLKYMTWIKEQVHFDQPALEATLLDYVHEVTHMAERIERLEKAIDVAIEKAPAEMRAVIEALQVLRGVAKITAVSIVAEVGRLSRFQKATQLMGYSGLVSSEFSSGNRIQRGGITKTGNAHLRRVIVEAAWAYQRRPWVGGALLKRQQGLDQELKDLGWKAQWRLYHRYCKLTARGKNKNQTVTAVGRELLGFIWAIGVRTEARFAARTA

SEQ ID NO: 321530 - protein, 353 aa, unidentified
MKTQSSSNYIGIDLGDRRHAICVLSAEGKILKEQSVINSRRSLEKLSATYPGAVMVMEVGMHSPWTSRYLEALGHRVIVANPRKTRAIWTNDRKDDKKDARMLAKLARSDESLLHPIRHSTEESQQDLLQIKLRDNLVRQRVDVISAVRFTLKGLGIATRSPNTNCFAKHARKVLSEDHADVLALVEPSLHVIDAMTEQIRALDKAIEAMARDKYPETEYLTQIVGVGTITSLTFILTIGDPTRFKRARDVAAYLGLVPRRDQSGQSDPQLRITKAGDAYLRRLLVSAAQYILGPFGPDCHLRRKGLKLAERGGPRAKKKAVVAVARKLAVLMLFLWRDEQIYRPKYRARRAA

SEQ ID NO: 321531 - protein, 322 aa, unidentified
MGKHTTICAGIDTGKRKLDVAIEGRSEQLQVENTSEGHEALSAWLRQHRVNRIGIEASGGYEQPVVAELRRKRFVVVVFQPAQVRAYAKFHLQRAKNDRIDAALIAACTAAVRKIHAAPDPRLLRFAEQLTMIDQIGEDIARLKNRIESCRNAGINQLWHEDIARLEQREKVALKALVVSIRKHPDLAERLALINSVAGIGLPTAVAILVRLPEIGQITREQAVALAGLAPYDDDSGDQIGVRHIEGGRKRLRRALYTASLAASFRWNPQLIQLYQRLTAAGKEHKRALVACARKMLVFANTVVARGTPWCGEPPMRSSSVS

SEQ ID NO: 321532 - protein, 318 aa, unidentified
MNTNTLQNINVGVDTGKSQLDIYIRPLDIYFTVPNTDKGITDAIKTIKKHKPQRVVIEATGRLEMPLILACDKAKLPYVIANPLRIKRFAEAIGQRAKNDRLDAELIAHYAERVQPELTKLKSENIRLMSDLVTRRNQLLTMQTMERNRRQILPKNISSTITPILTALKNQLEKVEAKIAKLIESSPEYQAKSAILQSMPGVGKVLAASLISNVPELGFITNKQASSLIGVAPITRESGRFKGKRMIKGGRPQVRTVMYMAMMSAIQCNPVFKATYERLLAAGKPKKVAIVACMRKMVVTLNSMLRDGAMWDKDSVKS

SEQ ID NO: 321533 - protein, 363 aa, unidentified
MDNRITWVGMDVHKESIVVTAVPHDSDRATAWFEIPNTDTGVHRLVRRLREMSEVRCAYEAGPCGYELRRFLASQEIPCDVVAPSLIPKKAGDRVKTDRRDSEKLARLHRMGELTPFRVPTPAQEALRDLVRTREDAKEDALRRRHRLLKFLLRQGRRYEGKSWTQAHWNWIRSQKFTDDNAQVVFIEYLAALEQELERIQRLNAKIEEESRHPEIAGAVSRLRTLRGVDTVTAMTLVSELVDFSRFNTAHELMSFAGLVTSEYSSGGKERRGRITKTGNAHVRRVLVEAAWHYRHAPTGTGIPLRKRREGQPPDVLEIARRAELRLCRKYRKMTAKGKNSRLTVVSVARELAGFVWAIGRSR

SEQ ID NO: 321534 - protein, 343 aa, unidentified
MKQEDVYYVGLDIHKKIIAFCVKKSDGTIVRQGTTPATRADLRNWQQSLKRPWIGAMEATLFTGWIYDTLKPFARDLKVANPMMLRAIAASKKKNDRVDAQKIADALRADLLPECYMAPTEIRDLRRELRFRNFIVRLATSLKNKTSGLLMECGVEYNKQKLHGKRYFRNLLGNLEEVPKSVIKMLSFDRHIIDIIDTTQKHILKTLEETPLLKDRVRRLMTIQGVGIVLALTWALEIGEPGRFRSIRKAISYCGLCSAEHSSASKSKRGPISKQRNGHLQWVLIEAAKIAVRYNPQLAEVYEKELKRGNKNSATLAVARKLVAYLLYVDKSGKEFKLRGDEV

SEQ ID NO: 321535 - protein, 358 aa, unidentified
MSIVAHLYSFFIGVDTHARNHVYSIVTNTGILVETRSFPTTSAGIKRALTWAGRRTSGDLDTLWVVEGAASYGAVLTGHIAAAGYPVVEAGRMDAKARHGVGKSDELDSRRIAASVLPLDADQLRWPRHGEGVRQALRVLLAARDAMTTERTRMINSLTALVRTIDLGIDARKSLTSDQVDEIAKWRTRNEDVDLSTAREEAIRLAKRVLVLNDDLQTNHDRLTELVEASPAAPLLDEPGIGPFSAAVCFTAWSHPGRVRNEAAFAALAGVNPIPASSGNTRRHRLNRGGDRQLNRALHTVVMNRMVHDERTRNYVARHYGEEPTKKSKREIKRNLKRYLARRVYKILNALDTVPQPA

SEQ ID NO: 321536 - protein, 316 aa, unidentified
MLYVGIDVAKNKHDVTALNVPGKTVLKPLTFSNNKAGFELLDLSLRQLNQDCLIALEDTGHYAFNLLNFLHEQGYKVYTYTPLLIKEFAKSLSLRKTKTDKKDAHGIALKLLSDPNREQFQHDNRQVELKILARHIHRLKKKQSDWKVQYTRCLDIIFPELDKIVGKHSEYTYQLLTCYPNPQKRLEAGFDKLIEIKRLTASKIQDILSVAPRSIGTTSPAREFEIIENIKHYKRLIDKAETCVNDLMAEFNSVITTVTGIGNRLGAVILAEIQNIHAFDNPAQLQAFAGLDSSIYQSGQIDLAGRMVKRGSPHLR

SEQ ID NO: 321537 - protein, 376 aa, unidentified
MEKDIRHVGFDVDSERIAVAVAEPGGEVRSLGMIPYTAESVRRLVKKLGPASRLRICYEAGPHGYGLYWQLVGLGVHCDVVAPTLVPVKAGDRVKTNRRDAEKLARCYRSGDLTPVWVPDAAHEALRDLVRAREAAKKDQLRARHRLGKFLLRRGLRAAAGVKNWTSKHLLWVRTLRFEMPAQEATFLDYLHEVEHAAERVSRLEKAIDQVVVDLPQEMKALVAGLQALRGVKQITAVTYVAELGPLSRFERPKQLMGYSGMVSSENSTGDRIRRGAITKTGNAHVRRVSGEAAWAYQFRPAMSPTLKKRQEGLSEEVKEIAWNAQHRLCKRYRHFLAKGKVKQQVVTAVGRELLGFIWAIGMQVEKEQQLRRRAA

SEQ ID NO: 321538 - protein, 341 aa, unidentified
MQDVTMVGIDLGKNTFHLHGQDRRGKAVFRKKLGRRQLVEFFATFHACTVVMEACAGAHHMARLLTTFGHQVKLISPQFVRPFVKSNKNDFVDAEAICEAASRPTMRFVTAKTESQQTLSALHRLRESFVRDRTRTINQMHGLLLEFGVSLPVGKASVARLPAFLTEHSLPPRLIAILQRLHEHYKYLDSEVGHIEKEINTQLADDELGQRLLTIPGIGPVTASVLAAEMGDGKQYRCGRDFAASVGLVPRQYSTGGKATLLGISRRGDKNIRRLLVTCARAYMLRLEGRTGHLADWVRAMLTRRHSNVVACALANKLARTAWSLAAHGTAYCAGLTVASD

SEQ ID NO: 321539 - protein, 370 aa, unidentified
MKKHSSSTGKRALGKVSSMTARMTIGIDLGDRTSRYAIVDGQGELVNEGAIATTRRAITKALATMPCCRIALEVGTHSPWVSRLITSLGHEVFVANTRQLAAITKSSRKSDRVDARMLARLARVDPQLLRPIRHRGEQTQGHLMKIRVRAALVEMRTAAINSARGLAKAVGERLPDCDADQMNRTRMKELPQWLSRTIEPLLAEAERLTGEIRECDRAIEQIARNEYPETKRLQQIWGIGTLIALTFVLTVEEPGRFVRSRDVGCYVGLRPERSQSGESDPELGITKEGDRYLRKLLVEGAHRILWRAAPDTDLKRWGQKLAARGGKNAKKRAIVAVARKLAILLHRLWVTGEAYEPLRNSKQKALKKAA

SEQ ID NO: 321540 - protein, 356 aa, unidentified
MHGLKHQKEKRSMEHFAGLDVSVNETSVCIVDETGKIVREVKVASEPGALLTVLNSGAHHFKRIGLEAGPLSQWLYSALGEANLPVICVETRHMRAVLQAQINKTDRNDARGIAQMMRAGLYRPVHVKTLRSQKLRMLLTHRKLLQSKAIAVENDLRGTLRNFGLKVGIVGKLRFETRIRELVENLPDLAILVEPLLLVRRVLREQIAVLHRRLLVIVRDDDVCRRLMTVPGVGPVVALTFRATLDVPARFRNSRAVGAALGLTPCKYQSGESDRTSGISRCGDEMMRVMLYEAAQVMLVRSTRWSWLKAWAMQIARRRGMKKAIVALARRLAVILHRIWVDGTEFRWSRQEAAAA

SEQ ID NO: 321541 - protein, 345 aa, unidentified
MDQISRIGMDTSKHIFQLHGVDAAEAPVLRKKLRRKEMVAFFEKLAPTVIAIEACGASHHWARLLQSVGHSVKLIPPQLVKPYVKRAKNDAADAEALCEAMSRPTMRFVPVKTAEQQAALMLVGVRDRLIRNRTQLSNAIRGYAAEFGLTSAKGMAHLVPLLERIQADQSLPVLARELFAIQAEEYTELQTQIDEIDVKLAAWHRADECSRRLAKIPGVGPIGAVLLRMKTPDPELFRSGRQFAAWIGLTPKDHSTAGKVRLGVITRAGDEGLRSVLVVGATSVILQVRRGGRASPWLAELLKRKSPKLAAVALANKMARIAWKLMLTGETYTAKSAPAALAAAV

SEQ ID NO: 321542 - protein, 419 aa, unidentified
MSFKIFRKNCCGLDVHKTWIYACIGITDTHGRTEYKQARFSSFTKGLQELAEWLAKYSCTEVCMESSGKYWIPVFNVLEESCYVVLAHPKYTKPQKGNKTDRKDAKWICDLFMCDMIKPSFIPPPDIRHLRDLLRFRTKLTNQITGMKNRALNCLTVSNLKLDDVFSDVFGKSSRSIIQQILDHPGETFDVTPFVDRRCKHPIEEIQAAVDGAISHEQATKLKICLDFIGEQQKRIAELDTEIFRLAKPHTAVLDFIRTVPGFSKDPLTTIRLMSEIGPDMSVFRTSKHLVSWAGCCPRNDQSAQKVKSTRISRAGSYLKPLLVQIANALLKSKEHPEFKERYRRIKARRGHKKAIIAVCRMLLTAIWNVLSKLEPYSAKGYLADKHTEHSVVISKSEGLALLRKRGYIFRDEIADTGS

SEQ ID NO: 321543 - protein, 344 aa, unidentified
MANRSKPEVQVFAGIDVSARELSVAVRCGTEDREAVTTFGNNAAGHKALLAYLLRGNGRARVCLEASGNYSLDLALTLQAHRQVEVSVVNPRRARRFAESLGERSKTDPVDAGVLCEYAARMPWVAWQPPSSLALRLRAITRAIEALGVMHTQEKNREHALATSQALPAMVIQEMRRHQRYLEHRMERLRREALRLIARDRELDRRFCLMLTVPGIGETSALQILGELVVLSNTLDARQWVAFSGIDPSQFTSGTSVQKRPRISRGGSRHLRRALYMPALVALRREPHLRAFYQRLLSRGKARLQAVVAVMRKLLHALFAMFRSNQSYDGSKLCPIELTTKLAA

SEQ ID NO: 321544 - protein, 458 aa, unidentified
MKLYLGCDVSKGYADWVILSEKKQAVLESFQLDDTYEGHCKLYAMLEAYIDKYPGLEIYAAVESTGGYENNWFCTLKSYQKVFNLKVARINPLGVNFNRRAGMKRNVTDAISALSIAEYMINHPENVTYDQDDQWKSLCRHWNFVEMQKHQRVQTINQLETILYSANPTLMRFKKDNFPSWLLELIILCPTEEKLAKIKPEKLAKIPYLTLERAKELVTEAKQSIASATDKNAEILVSQIALQIKALDQNIKSQMQLIEQELTCPEIDVLKSFVGINTVSAIGLLLEIGIIDRFPTVKGFSCYFGLHPKFKQSGDKVIGIRMSKQGSKNMRKILFNIAKGAITYNPLIKEVYEKKVSHGMSKMAAIGVCMHKILRIIYGMLKNKQTYNPLIDKQNCERSKDKQQEKQQQDNANIDKSRRYQEFDVKAPISRKQTKKRKEHDLSQCEITSQSAGSTCSS

SEQ ID NO: 321545 - protein, 344 aa, unidentified
MKITTIGLDLSKSVFQVHGVDENGALVLTKRLHRKQMEPFFAKLPSCLIGIEACGTAHHWARVLVRFGHEVKLMPPAYVKAYVKRGKTDAADAEAICEAVRRPTMRFVPIKSPEQQSILMVHRARSLVVRQRTMAANALRAHLAEFGRVANPGVRNLLKLVRSVFDETEENRMLPDLARAALAVLVRRLVELEEELQTLDRTLLAWHKENEASRRLATVPGIGIVTATAIAATIDDPQRFRSGRQFAAWLGLVPKPHSSGNKVHLGGISKQGDRYLRRLLVVGATAVIRHCRDKDTPMAAWLREPLANKPMRVVSVALANKLARIAWALLSRQDVYRPYRRAQA

SEQ ID NO: 321546 - protein, 427 aa, unidentified
MSLPTDLSRSPVPFEQESTLVAAAGEETALLPRSNAKECPMSLPNDLSRSLVPFEQESTLVAVIELSQASWLIAGVVPGVERQPLKKIEPDEEALLRLLHRWRDEAIQKGRTITRIAVALEAGRDGFWLARWLRKHGIEAHVIHSGSVAVSREHRRAKTDRLDTAMLIRVFLGWLRGERGHCAMVAVPSIEEEDAKRPSRERENLVGERTRIINRLKAVLARLGIRGFNPKLRKAPQRLDSLRTPEGFPIPPNTLDEMRRDFARLALLREQIKAIEQARLERLQQAPQTGPNAMIRMLASIPGVGLETADMLVQEVLSRNLRDRRAVGRFVGLTGAPDESGAKRREKGLSKAGNARVRRGMIQLAWRFVRFHKDSALAVWFRSRTEGPSGGRKTKMIVALARKLIIALWRMVNTGEVPHGVVLRQPA

SEQ ID NO: 321547 - protein, 323 aa, unidentified
MQGKVSPERSAATGVYVGIDVCKGWLDVYLHPIGQGFRVANDRIGLKRLKRELALHEVALVVVEATGKFHRLVQRHLHAAGLAVAVTNPLRSRLFCEAIGQLAKTDAIDARLLAIMAESLNPRATPPPPEIVEELQEIVRARAAAVEDRTALLNQKAAARVGLLKSELARRIAAIERCLVRLEKAIQAIIARDAMLARRFKILLSIPGIGPIAAVGMLAGLAEMGARSGKEIAMLSGLAPVACDSGETNGQRRIRGGRSHVRTAISFAALSASRYNPDLARVYRRLIAAGKKPKVALIAVMRKLVVLANTLVRQDRLWQPNPA

SEQ ID NO: 321548 - protein, 314 aa, unidentified
MIITLRCVGIDVSKPMLDIFDDAIGTPERIANAPQPIAQQVARWRNNDVFVVFEATGVYDRALADALRQAGIRYARVNPARARDFARASGRLAKTDAIDARMLAAFARAMTPAAEPPPEPARNILAFLAKRRDQLVHMRAQEKNRRSEAHDPAMAEHIAVHIDFLSREIEAIEARIKAFIKAEPQICEQARLLRSAPGIGPVACMQLIAQMPELGHAGPKQVAALAGLAPLNVDSGSHRGKRAIGGGRKRVRDALYMAALNAVRRDPNIKTFYQRLRTAGKPAKLALIAVARKLLTILNAMLRDQKIYAVPSTA

SEQ ID NO: 321549 - protein, 344 aa, unidentified
MQISILGIDIGKNSCSVVGVDERGAVVVRRTMRRQTLIEFVEKLPTCVIAMEACCGAHHLGRLFIASGHEIRLMSPEYVRPYVKAQKNDDRDAEGIAEAASRPTMRFVELKSKEQLDIQTLHRVRSRLVAERTTLINQMRAILLERGLIFAAGRCKFERAVDTLLEEQASGLSERVHRLVAELRDEWKVLDTKIAVLNAEFLSLARDNLAARRLTTIPGIGALNATALIAAIGNASGFDRARDLGAWLGLVPRQFTTGGKPRLLGITKRGNVYLRTLLVHGARAAMPTLSRSDTPLGQWLRGLLSRGMHRNVVIVALANKLARIAWAVLRKDCPFERAYGATAA

SEQ ID NO: 321550 - protein, 449 aa, unidentified
MKELSLEIFNPHCAGIDVGSRFHQVAIGQKKEHVKRFGIYTEDHRLLIEWFKEKGITNVAMESTGSYWQALFDALQNAGFEVILVNGNQIKNVKGKKTDVLDCMWIQKLHSLGLLSASFLPNSELQKLRTYYNHRQYLVAQTSRYSNKMQKAMRLMNIRLDVALNDIMGKSGRNIVQAILSGERDPRKLSLLADYRVKKSKEEIAKSLEGNWREDLLYELKECLFLYDVYSNKIRECDQHINEKISSLSNQYPEVNINKKKKKPASKFSPEFDIEGIAQRYFGVNLFEIPGVSHNTVLCFLTHMGHDIYKFPTNKHFCSWLRLSPDNKISGGKILSSRTPKGKNKVALALRQAANSVGNQKNHPMVSFFRKVAFKKGRGAAVTATARKLAVIFYNMVTKKEGYKPFDHQNQSETFKTKQIQKIKMKLSAMKLEAEELKNLFQACSLSIT

SEQ ID NO: 321551 - protein, 340 aa, unidentified
MRQLYVASDLHGNNNLLGIIDGEGKRIFKTKLPNDPLLINDVLKPFKEEIMGIVVESTYNWYWLVDALMEEGYRVHLANPAAIQQYSGLKHADDKHDAFWLAEMLRLGILPEGYIYPREERPVRDLLRKRGHLVRLRTSLIISLENIISRNLGRKLPVNEVKGLRKDRVTPLFEGKEDLALAGRVSKETIDFLTHQIRQIEGVVEKRIQLKEAYGYLLTIHGVGKILGLTIMLETGPIGRFETVGDYTSYCRKVPSQWISNGKRKGSGNRKNGNKYLSWAYAEASDFARRLHPESRAYYNRKMQKSNPAVAHSALSHKLARAAYYIMRDQVAFCPEKLFG

SEQ ID NO: 321552 - protein, 354 aa, unidentified
MSNKYIGMDVHQASTVIVVLNEAGKTIMETILETKTGTLLDFIQGLRGRLQVTFEEGTYAAWLYDVLTPYVERVVVCDPRKNKLLPSGHKSDKVDARKLAEWLRQGQLVAVYHGNRTLRGLKELVRSYLCLVQDVTRVMNRLKALYRGRGISCGGRAVYRLRQRDSWLALLSEPGVQQRAALLYQQLDVLQALRQTARQALLTESRKQAAFPILRQIPGLGPIRAGVVLALVQTPHRFRTKRQFWAYLGLAVVTSSSAEYRIVQGRVQKSGKPVSTRGLNPNYNRALKDVFKAAATGVSQREGPFKTLYACWLDRGLAPELARLSLARKLAALTLTLWKKGARYHPEQVTQQAA

SEQ ID NO: 321553 - protein, 389 aa, unidentified
MIYVGIDIAAAKHACCILSENKKVIKQFTFANSASGYEKLRSALLSPAETKIGLESTGVYGNNLVEFLRRNGYTTHIFNPLLVKKSIQATTLRKTKTDKSDAKQIARYTMEHSQPDQVPSYHISELKSLSRGRFSLVRERSKAKTQAKTLLIQLFPEFSEVFSDMFGVTASAVLRSFPSARALSLCPANVLAEILSQTSRGRFGKARAEYLIGLAKDSIGTQSFALELELQMLLQQIDLFTAQIAGYEAAIKSVMEKIDSPITTIPGIGYVLGAVILSEIGDINRFSTPAKLQAYAGVDPSISDSGSSVSAPGRMVKHGSCYLRWALCQAARCVSLYDPVFAAYMQSKRNEGKHYCVACSHVAKKLTRVIYSLLKNNSVYSPTYSLLSA

SEQ ID NO: 321554 - protein, 333 aa, unidentified
MPKEPEFFCKAGKEKQPMSKKKNFIGIDVSKALLEVAAHNSDYRFRCPNKESAFAELIAELVVLRPKLIVLEATGGLEIPVTAALYAAGLPVVVVNPRQVRDFAKALGQLAKTDKLDATVLAHFAAAIRPALRPVKNAAALELDALAARRRQLVEMLAAEKTRLSTTATAPMRQEVRKHIEWLQERLENIDSQLRDRIKDSPVWRETDDLLQSVPGIGPVTALSLVANLPELGELNRHEVAKLVGIAPLNRDSGTLRGKRHIYGGRSHVRTALYMATVTAVRCNPVIKEFYQQLIKRHKPAKVALVACMRKLLTIVNVMIKTQTRWRVAQKSA

SEQ ID NO: 321555 - protein, 406 aa, unidentified
MEGPIITVDVSKGSCHYQPFIENGHPMRKPKQLSATIDGFQKLGQTIKDLEAKTEREDIPVIFEATGVYHRPLQKYLEDHRIRYYIISPLLSATYRKTDLHSNKTDALDCAHIAKAYYCEKELRQYQAQPQEYKRLYQLSRIYESELVHLRKRKVSLRSMLDIIYPRIDKTFKGNQNLYDPIPMEILKRYPHPSLLLSHREDTIVKTVGHRTGHLKGYTERIVHKIYEKAKECYSGCDIDDIEVVKLPSLIENVQEQKKKCNSLLKEMIEIARICPYFAPIVSIVGIGENLAARIIAELRDVNRFDNRAAIVAYAGLNPKIQQSGDIDGLHLKISKKGNKHLRCLLYLGAQCNYRLRKEDPLYEFTKKKRQQTQCPLSSKAAYTASAHKLLVIIYSLCKNGTLYHS

SEQ ID NO: 321556 - protein, 406 aa, unidentified
MERVYPRCAGLDVHKGSVFACARVDGRESVETFGTSSRELLRLGDWLASLGVTDVAMESTGVFWKPVWNLLEGRLGVMLVNARHVKQVPGRKTDVKDCQCIAQLLAHGLLQPSFVPERPQRELRDLCRQRTQLLGDRARVVNRVHKTLEDANVKLASVATDVTGKSGRAILDAIVEGKLSPEQMAELVHRRMAAKKPALREALAGRVTPHHRFMLRQLLDQVDHLDRQVESFDARVEEVMTPLEREAVKRLDEVPGFDVRTGQNVVAEVGTDMTRFPSEHHLASWAGLCPGNNESAGKRRGGRTRKANRWLKAALTQAAWGAGRTRRSYFSAQHRRLTTRRGVKRATVAVAHSLLGVTYHLLSDLSKPYVDLGHDYLQKRPDPAARAERMIRQLENLGYTVTRPAA

SEQ ID NO: 321557 - protein, 340 aa, unidentified
MNATTYGLDVAKRVFQLYWVDAHTGEIVNRRFGREELIGFLAKRAAGRVALEACGSGHWWARKIRALGHEVVLLHAKFIRPFVQTNKTDAADARAIWTAVQQPEMRTVAAKTEDQQAMLALHRMRALLVKFRTMQVNQLRGLLYEFGATFRAGRVAGLGEIRARMAELEDALPAVLFGSLQDQLKRIDGLEHGIDQLEMRIGAWQKQEAACRAIAAVPGIGRLTATALVATIGDAKTFKSGREFASFLGLVPRQSGTGGRVRLGSISKRGDPYLRTLLIHGARSAMYHAKVPTPWQRELQARRPANVAAVAMAHKMARTAWAILAHGRPYQKDYVSVKPA

SEQ ID NO: 321558 - protein, 328 aa, unidentified
MLIIGCDYHPSVQQIAWADTETGECGEKRLMHSDGEAERFYRELKQKGVQVRVGMEATGHSRWFERLLAELGFELWVGDPAEISVRRVRKQRNDRRDAEHILKLLMEDRFPKIWTPSPENRDVRQLLLHRHRLVGMRTRVMNQLQAIAMNEGMRRKKGLWSKKGRARLESFSLAPWASRRRQELLELLDRLRPMIDELSKAIEQEAERRTEVRLLMTHPGVGSITALAFVLIIGTPERFHCGRQIASYLGLIPCEDSSAVSSGAASRTLDCTVALARKLAVRLYWMWRKGQDYQQVKKFGSHAGQLETPNGVKSITVKLIEHPAPSIA

SEQ ID NO: 321559 - protein, 355 aa, unidentified
MDNRKYIGMDVHKEAIAIAVLNAAGKLVMESIIETKANTILEFLKGLRGELHLTFEEGTWASWLYDLLQPHVKRVVVCNPRRNALLKEGSKSDRVDARKLAELLYTKMLRPVYHRDNGMRAVKELARSYVTISKDQARVMTRVKALYRSWGIACSGKQIYTVRHRASWLGKIKEPSVRRRAEFYYQQLDGLRSVRRQVRRELLAESEKHKASKLLRQIPSIGPIRAALLLALVQTPHRFRTKRQLWTYSGFGIETHDSSEYRYVAGQLERSKKPQQVRGLNRNYNHDLKNLFKSAATNAMAKSGPLQEFYLALVKRGIRPEMARLTVARKIAAITLAIWKKGVSFDAEHLKQQTA

SEQ ID NO: 321560 - protein, 365 aa, unidentified
MFYSGIDLHRDNCFITTVDDSGEIVKQERLRNCPEIILAYFASLPSPHKAVVECTAGWYWLDDLLEAHGIELILAHAKYLKAISYAKVKTDKVDSQTLATLLHLGFIPQAHKIRRDLRDLRDVMRARLRLVQKRTSCCVSIHNLGRKLNCSNQLAIEKHSLPQDLPEAYRLHLRNLFEQVDLLDTQILDLEHFLQPVLIPNEDIQRLVWIPGMGKVTAFTVYLEADGIERFRSHKHFVSYCRLVPGARNSNTTIRHKSGCKDGNKYLKIAFTDMAVHAIQYFPEYRHLYQKILRRSNEPIARTVVAKELARIVYFMLKNKTDYRGLKGQPISHQKATQYPRLKRRPVATPGKPVRLTDALLASCA

SEQ ID NO: 321561 - protein, 343 aa, unidentified
MEAYAGKQFVGIDLHRRRRVIVRTTEAGEVLESVRIVNDVQRLASVMARAGGCPEVVLEATYGWYWAVDALQAGGANVHLAHPLGVKAFEYRRVKNDFRDAQDLADLLRMGRLPEAWIAPPPTRELRELVRHRAKLVGLRSHCKAEVHAVLAKCGVQVLMSDLFGLAGTELLDRLDLPAPYAARIASLRRLLDDVDFEITVFAGIIRGRMAQEPGYTAVQKIPGIGPTLGAVLVAEIGDITRFASASKLTCWAGLTPKHHESDTHVRRGRITKQGSRLVRWAAIESVKTISKASEVGVLRERVADRRGRNIGSVAAARRQLELVFYALRDGHVRALEHLPRVA

SEQ ID NO: 321562 - protein, 355 aa, unidentified
MTSTKYIGLDVHKESISIAVLNSAGKVVMECVIETKASTILQFIHGLGGDVHLTFEEGTWAGWLYDLLKPHVTELVVCNPRKNALLKEGSKSDRIDAHKLAELLYMSKLSSVYHGEHGLRMLKELSRSYLTITKDLGRVMNRLKALYRGWAIPCAGTQVYAPHHRSEWLAKIHEAGVRRRAELYYLQLDALRLVRQQARKELLAEARKHRATKLLRQIPGIGPLRAAHLVALMQTPHRFRTKRQLWTYSGLGLETHDSAQYRVVEGQLQRSKKPVTLRGLNDNHNHDLKDIFKGAAMRASTAAGPLRDFYEALLAKGRKPTMARLTLARKIAAITLIVWKKEVRFDANYLKQQAA

SEQ ID NO: 321563 - protein, 422 aa, unidentified
MKNSLRQKLDVVGAGTLIVGVDIAKNVQWARFCDHTGREFGKALRFENTTEGFGSLVERIEKLRLAKALFRVVVGVESTGHYQKTLVHYLTRNGYTVVLVNPHHTKRAKELDDNSQTKHDQKDALTIARLVKDGRFYECYQPDGCWAELRVLVATRLDVKHQENACKNRIHMVLDEYFPEFASVFKKPLTGKTSLHLLKTCPFPIDVLALGVDGVLVQIKQAVKKTVGRKKAEQLVVAARASVGVNYGIMAARLRIQILLAEYELYQLRLAEIEVAMERELEKTGLKERLLGIPGIGVVSLAGFLGETGDLSRFTNGQQIIRLAGYNLTENSSGKRTSKSGISKRGRKILRCVLYKMALVMVAKNPEMKRIYEHLKNRATNPLKRKQALVAIACRIAKMIFSIANHGEHYMPERVAGTLRAA

SEQ ID NO: 321564 - protein, 482 aa, unidentified
MKKRNIYQNQSQELLTLFEEAGNSAKVMCVPIDYAKTDHVVMFCNGHGGIVRKPFSVKNSPLGVDYLTDQVIRSCKSRGISKRHVFFGGEDVGSFAANFVTTLRSQGWLVAGVNAHDAKKQRANLQASTDRLDLMGIASMLLNRRANSCPAQSGIYWNLRTVVRHRQKLVKLTTEVRNRIHGVVDRLFPGYLDEEKSGISPFSKSSLWLMQARFSTPQIRRRKRSTLIKGLRKLGAKNPELTAAKLQQYAAQVLKPPQEYIATLQFSLAQHVKHFSCLQDNIDHLEKEMAVGLAQTQGAFLTSFRGIGMVLASGVTSEIGNPYEQAPLNNLVSYTGIIPRVKQTGGPQSQSYSGKVAKRCNRILKNYVVQSASHLGLHGPQELMADYKRREAAGQHADFGMGRRFLRIAMCLMRTSQIYLPPRLREPEAKLQERADYYLMNWPSLHEKWRKSGALEIAFDKNMPLGQWRNIVQQLYKIKLAL

SEQ ID NO: 321565 - protein, 385 aa, unidentified
MQDHKPEDQTAIRTDLGAIFVSLELSRSTWLVTSLSPGGGEKMSKHSVPGGDISGLLMLFSRLTERARKRAGEEFPIIAIQEAGLDGFWIHRTLEQEGIESHIVDAASIMTSRRRRRAKTDRIDGEALLRALMAYKRGEPRVCAMVRVPTPEDEDRRRISRERNVLIAERVAHVNRIKGLLFSQGIRYEPLRRDRRARLEELRTGDGRVLPEHMKRQISRELDRLELLLAQIKAVEAERNTMLAKTNEANLAPAKMLMGFKGIGAEFAMTLWSEGLFRHFDNRRQVGAYAGFAPTPWQSGMTDREQGIAKSGNPRLRTTMIQLAWLWLRHQPDSLLSHWFQERVAGKGRRIRKIMITALARKLLVALWKYVTAGVVIERAVMKTA

SEQ ID NO: 321566 - protein, 315 aa, unidentified
MNAIKYIGMDVHLATISIAVLDVNGKLTMEVTIATQSSALLDFIRGLSGTLNVTFEEGTAAQWLYTLLEPHVAKVVVCDPRQNPRRLGEKKSDRLDARKLAEGLRLGTLKPVYHGNALGPALKEASRSYRTLVSDTTRVMSRLKALYRARGIRCAGSRVYSPRFRDQWLQQLREPGVRGRAERLYKQLDLLLPLRQEARAALLSESRKHPAQKILRSIPTLGPVRVALLLALLQTPYRFRGKRQLWTYAGLALVTRTTADYQVLDGQVTRSRKPALVLGLNANHNHFLKALFKDAAVTALTRPGPFRDFYTTRVV

SEQ ID NO: 321567 - protein, 438 aa, unidentified
MSNKVIFNLDELFISVGIDVGSDFSWMSIALPNQQFVGKPYKILHNSIDSLTTAVSKIKEAEELYSLESRIFLESTGIYHYPLFCYLRDKGFNCSVINPIITKNSTNINIRKVHNDRFDSKKAALVGLKPDLKVSLMPSDLALNCRNLCREYYDLMDNRSAYVNKLQGELRMAFPQYLGIFSKVTINTSLTLLETYTSPSAFLEADKQEIIDIIKSTARFGLTYAQNKYNAIIQAATDANQFGYIIDSNIKRIRLYISFIRKYDEEINSILESLHELVDANEDSDFVKQIHLIETFKGACFLSAVSIMGEIGDFSSFSKPKQLFAYFGLDPAVKQSGKFEGTKVQMSKRGSAIARRVIHTLTLQSISISRNGKAKNPVLREYYIKKCDSKPKLVAMGAVSHKVCNMIFAILRDNKPFKIIAPQEHIKQYNAAKCDIAA

SEQ ID NO: 321568 - protein, 401 aa, unidentified
MKKNTTAKRNQKAVPKRHENQIRHMAAKQRLTIGLDLGDRNSRYCILDEAGEVVSEGQLPTTKTGFRALFEKMPSSRVALEVGTHSPWCSRHLAGMGHEVIVANPHKVKLITQSTRKNDRIDAEQLARLARVDPKLLSPIRHRGEEAQGDLAVIRARAELVEARTGLINCARGLVKPMGERLKKCDADQVGETLLGGLSDQVGRVVGPLLKSVEGLNEQIAEYDRRIEAVAQRYPEVELLTQVYGVGILIALTFVLTIEDAERFAHSRDVGAYLGLVPKQRDSGDSQPQLGISKSGDRLMRSLLVQGAHCILRKGAPDSDLRAWGMARLESGDNQVQQPSGGKKAKQQKSGSKRGKRRTIVAVARKLAVLLHRLWVTGEVYDPLYNRKAMQAGQGQAKVAA

SEQ ID NO: 321569 - protein, 325 aa, unidentified
MFYLGIDVSKNKFEMALIPSSDEPQTLKRKVLANGPEGFDKLHAWLSRRAEGEVHTCMEATGTYYEDLATFLVNSGIKVSVVNPALIANFAKSSNTRNKTDSVDALVIADYCRSKRPKLWTPPSSEAKELTELVRRLAALERAKQGEENRLSSGVSSAAVASSIKQSIEFLSQQIKELESLIKDHIDSHPTLREDRDLLVTIPGIGEKTAAVILGELPDTANFNNAKQAAAYAGLSPREYRSGSSVRGRTRLCKVGNSRLRCALYFPAVVACIHNPVVKALYQRLLHAGKSKMCALGAAMRKLLHIAFGVLRRRQPFLAVGDTPA

SEQ ID NO: 321570 - protein, 466 aa, unidentified
MVRQKRHKKVIELVEGEGRRKSGVIMGVDVHKSVLAYCIGSEIRILKEGTVPNGKEGIQELIRLCQRYQARSVGMESTAQYHFKLLYALLQAHIPVLVANPRQTKETQGKKTDKFDARRIYIAHRDGRLKPSVISPEEFMHLRKAMRHLLQLINEQTKIKQRLHQLFHQKEFHLLKKFPNLLKSQWGLQVMHRFLDEEIRPVVVRLYPRKNSPEKIDLITHELIQLKFKLDEIEQITLRTDMTQLIMLNNLTNQLRLVYVKMAESNEPFRAIMKLLLSIPGIGPDTAAVILAEIVDISYFPNPAKLVKWAGLAPRVFQSGHRKRITGKIHKGGNKYLRRALTLACQNIHAKGDASNQLWNFIKSKYQNPKRDAFWRAICAAARKLLIIIWYMLNRNQPWQWQAVSEEVLKQLHARIQRKIRGFQSKIRKYQKTQEMLVQGMNQIMESSLYRGQNPKILLKVLLRSV

SEQ ID NO: 321571 - protein, 372 aa, unidentified
MTQSNILFIGMDVHKDSIVISLADDDRTEVRRYGSIGGTLDDFKKTLRKLVATGKSLFFCYEAGPTGYNLYRYITSQGHQCIVVAPSLIPKKSGDKIKTDKRDADNLTRLLRSGDLTAVYVPNEEDEAIRDLSRAREDAVLVFKSAKQRLKSFLLRHNIRFDGSANWSEKHLHWLAESVNMPYPAQKVVYQEYLNSVTEANDRVKRFDKEILFHTKQWRLYPIVQSLMALRGVRMVVAVTMIAELGDLTRFENPKQLMCFLGLTPSEHSTGDRKKKGAITKTGNQHARRVLVEAGWSYRFHAKVSKEMQKRQDGTSLKVRDIAWKAQLRLTKRFRMMANNGKPRNVIVVAMAREIAAFMWAIAQEVPIAPRQ

SEQ ID NO: 321572 - protein, 343 aa, unidentified
MKLSRVGVDLAKNVYQLHGVDRHGKTVWKRRLRRGQWLQALLQKAEPGCVIGMEACTGAHHWARALQSRGYTVRLIAPQFVKPYVKSNKNDANDAEAICEAMSRPTMRFVTVKSVEQQDIQATHRVRTELREQRTAKANQIRGLVAEYGLVAPQTLLALRRAIPCWLEDADNGLTDYFRSLLHGLWGDLVALDDRMTELDKQIKKLADSNEVTRRLQQLRGVGPLVATALVATVGTGEQFKKGKQMAAALGLTPRQCSSGDKQRLLGISKRGDVYLRTMLIHGARAVVSQAKHRDDRLSQWVTSIAKRKHPNVAAVALANKTARMAWAMLRNDANYDPDFAFS

SEQ ID NO: 321573 - protein, 393 aa, unidentified
MTAARTSKTITKTGVLYLAFELGETDWKLAFTIGLGQKPRLRSMPGRDLSRLQAEIAKAKKRFGLAADAAVKSCYEAGRDGFWLHRHLTASGVDNSVVDSASIEVNRRQRRAKTDRLDATKLLGLLLRYHGGERKVWSVVRVPSVSDEDARQLHRELQELKDERTEHINRIKGLLASQGLAAPEVNKQLPAWLSEVRTWDGAPLPPELHQRLLREMERWELLNRQIKELEDERRKRIRCDDIPHVDKVRALLDLWGIGFNGAWLLVYELFAWRQFANRKQVGSCVGLTPTPYQSGNSRREQGISKSGNRRLRRLLVELAWCWLRWQPDSELSRWYERRFGTGNGRSRKVGVVAVARKLLIALWKYLEHGEIPAGARLANWQKKVRRCGRDVAA

SEQ ID NO: 321574 - protein, 340 aa, unidentified
MNITTVGLDLAKSVSHFVGCNQAGKIVKKKMLSRKDILSFFAQLPNCLVGLEACSSAHYWTRELEKLGHKVKQIPPQFVKAFVRGNKNDYNDALAIAEAVVKPEMRFTRPKTQEQQDIQAIHVMRKKCDSDRTANTNEIRGLLAEYGIVISKGIQNVYKRLPELFERGCDNGLSELFKELLEQHYRKLEELQKHLDFYTQKIKVLSKTKECVKLQSIPGYGPIVASAFYQHVGNGSGFKNGRCVSASIGLVPKQNSSGGKDKLLGISKRGDGYLRTMLVHGARAVVRVNGDKDTPLANWIRRLVAERGHNKAVIALANKMARMGWAILKNDCNYQANYAA

SEQ ID NO: 321575 - protein, 342 aa, unidentified
METTTVGIDLAKSVFVAHGVDQRGKVALRKSLKRDQVLPFFANLPPCLIGMEACGSAHYWARKLQELGHTVKLMAPQFVKPYVKTNKNDAADAEAICEAVARPNMRFVPIKNAEQQAVLSVHRARQGFVKARTAQANQIRGLLAEFGIVIPQGIRHIAKQLPDIIEDADNGLPGVFRDLIDRLGTQLKDLDQQVDELDAQIQAWHRASEASRRLAEIPGIGPITASALVATVGDATNFENGRQMAAWLGLVPKQHSSGGKQTLLGISKRGDSYVRTLLIHGARAVIRVADRKANHPDSWLGKLLGRRNKNIAAVALANKNARIVWAILTQDRRYDAEYATAA

SEQ ID NO: 321576 - protein, 385 aa, unidentified
MKNKATPTLHDNGQPNAALAGGNSGARQIFKLGLDVDLNNAVTAIQCGAGEIKRGQSFSRARLLGWVRTQVNAGHTVHTVYEACGFGYTLHHELVGAGAHSLVTTPMRHTAQRRRKNDRMDARELCVRLARWLDGHRDELKPIRIPSSEEQQRRELGRQREFFKRELRRLENHGRALRIEFEHETLPSGWAGPRKWTRLSLQCSSFVREQLEPIVTQIRTCRAQLVKLSAALEARVAEQMIPTGLGSLTLALLDGEVCNWHRFKHRKAIGSYTGCCPSEYSTGGVQRFGPIDRQGNKHVRVLLVEAVWRLLKWQPGWHARQKYLARLKHGSSLKKKIAVALARQLAIDLWRWRTGRATAAELGWTLKNAMEETTSLLKEVPPAHH

SEQ ID NO: 321577 - protein, 428 aa, unidentified
MNEEDHIRLKEFRQFRKEIRGSAEYLIVGIDVAKDKHHAFLGTATGKTLFKRLVFENDLEGFRKLLVQAEAMKVQEGLKKVVFGLEPTGNYHKPLGEHLMRCGQEVVLVSGVAAHENRKTVDGRWDSNDTRDAANVADLISQGKCLFYEFPVEGLQDLRNLLSLKRRLKRQEHGYRVRIRNHLVAKYFPELDRYFEQSEKTSLAVVRWCLDPSVIAGLEYPKFVEMVSSGPRRLSQENRLQAIWKMAVDSVGCEVGPAVAFEVQVMVEGLKQIREGIQDIDEKIYEVCSQFPEYEFLLSIPGFGPDISAKVLGAMGDPFRFQNGKQVLKMAGLDLSAERSGKTSPSAVPVISKKGKADLRYALYQAAFVASTRNQAFIVYYTNKLRGREREPGIKTKMRVKLSAKLLIIAWTLMKKKELFNPDYLVIE

SEQ ID NO: 321578 - protein, 348 aa, unidentified
MEHIGIDVHKNQSQICALTSDGELIEKRINTERGRFATVFGSRPRARILIEASTESEWVARCLENLGHEVIVADPNYAPMYGHRTRRIKTDRRDARALAEACRNGIYRPAHRTSDGRRHLRGRLAVREALVRTRARYISLIRTLLRREGLRVRSGNAEKFVERVAEVDVPDLLQHEIKPLLAVMDHLDTQIALADRQMAVLANEDGEIRRLCTAPGVGPVTATSLVATLDTAERFRGAHQVEAYLGLVPREMSSGEKQRKGRITKSGNNRTRWLLVEAAWVLLVRVKQARAQPLQAWALRIAARRGKRVAVVALARRLAGILYAMMRDGTEFDAGRFVTAADRTSVTA

SEQ ID NO: 321579 - protein, 341 aa, unidentified
MLIIGCDYHPSVQQITWVDTATGECGERRLTHCAEAEQFYRDLKQKGVRVRVGMEATGHSRWFERLLAELELELWIGDPAQIRAKQVRKQKNDRRDAEHVLKLMLEDHFPRLWVPTPENRDVRQLVLHRHRLVQMRTRVMNQLHAIAMNEGVRRKRGLWTQQGRAQLEALSLPGWTSRRRQELLELLDRFNPTIEELTEAIEHEAQRRPEVERLQTHPGVGPITALAYVLVLGTPERFACGKQVGSYLGLIPCEDSSADRWRLGHISKQGNALLRYLLVQSALSAAHVEEEWRRKYVHLSMRRHHAIAKIAMARKLAVRLFWMWRRGWDYEQLKKFGSHVG

SEQ ID NO: 321580 - protein, 412 aa, unidentified
MNPVIGLDVSKGESQIQAFLDKGKPYRKSFSITHDLKGLGCLLEFLQDVEKAAGGHQPSVVLESTGHYHIPVIQFLEEQNYVYIIVNPLISHRAKSSSLRKVKTDAIDAYHLCELFYKEELEPYKKRGVQLLNLRNLTRQQESIAEISAKTKIQLHSLIDQVFPEYRGVFGSLYSKVSLLTLLEFPTSKAVLSVSEKELTDKIASLCMSRSESWAKEKAQKLREAALRDPFQNNLYDSHFFNLEILVKIVLQYQEHLTNIANEIDALASEIEEYEILQSIPGVGEKIATTIISEIGEIDRFNGAKKLVAFAGIDPSVYSSGKFTASVNRITKRGSCRLRHALYMAVQSGIRDSRKKKTTDEIIPRNRRLREFYDKKREEGKPFRVAIIACVNKLLHWIYALLKSRNSFQDIA

SEQ ID NO: 321581 - protein, 370 aa, unidentified
METLIRKEPSMTTYYIGADVHSNSTELAVEKNKRIVARYNLPTSIPALSNVLDGLKGKIYLALEEGPMAGWLYRNLSSKVEQLIVCDPRRNKLIDSDGDKDDKIDAAKLACLLRGNYLRPIYHTDDVSRTELKHWVSLYQDRVRDAVRNINKIRARCRMHGVSIPRMVVRNPSARAEWLSKLNNPPLAGQLEMLWIGYDATSRQVRIARRRLSMLGAKHTIIKFWGELPGVGLVRATTLFAFLDTPWRFRKKNKLWKYCGVGLQRTTSGTDKKGRPKPARLQLPWAVNRILKCAALGAATSAINQKKNLFKDYYERMLADGILPSNARHAAARKLLTAMWAMWKTNSRFNEKLCRNPDNEKVTALPGLPL

SEQ ID NO: 321582 - protein, 357 aa, unidentified
MLSMGDSAPRKGADAMTFVGCDLHTRMQQVAVLDTGTGEVSEHRLPHDGLTVEEFYAALPQPVTIGIESTGSAVWFHTLMQRLGHTLLVGDAAKIRAMVVRKTKTDRRDALHILDLLRHDRFPTIWVPDPATRDLRALRTHRMRLVCIRTMVKNGLHAIALNSRLTCGSKLLRQAGLVQLQALALPPHTAQRRDQSLELLAGLTTQIRVLDDAITTAAGGHPEAPRLMTHPGVGALTALTTIVVLGPTSRFHDSKHVVSYVGLAPALNASADKYHLGHITKQGSPLLRFVLGQAAAHAARMDPDLKRTYGALVHRRGRPKAKVAVARKLLVRLFIMLRDRIDYDEFRRRGRPAPAAA

SEQ ID NO: 321583 - protein, 407 aa, unidentified
MEVVHPQCAGLDVHQHTVVACARVGAGSSVTHEVRTFATTTQELLALSDWLTAHGCTHVAMESTGVYWKPVWHVLEGSVELVLANAMHIRNIPGRKSDVNDATWIADLLAHGLLRGSFVPPAPIQELRDLTRTRKQLVREITQHTLRIQKTLETANLKLTGVLTDILGVSGRAILQALVAGETNPDRLAELARGRLKASRADLVAALHGRVTAHHRFLLQLHLAQIEALEGAVREVEARLGDALTPFRAAVDRLITMPGVSETVARVLVAEIGVDMTRFPTAGHLVSWAGLCPRLDESAGKRHSTRTRPSNPWLKTTLVQAAWAAARKHDSYLRAQFLRLKSRRGPKKAIIAVAASMLTAAYYMLRDGVDYRDLGAAHFDRRDKATLAKRLLARLHDLGFNVELRAA

SEQ ID NO: 321584 - protein, 349 aa, unidentified
MTEQRRSYAGECVYVGVDVHKETYTVTCVCHKQIVKTATVQAEPASLAASLRRWFPGATLASAYEAGFSAFVLHRALTTAGITNIVVNPASIAVAANDKVKTDRRDSKRLAVDLADGRLRGIYVPTEEEELARLLPRTRAQLVEHRATLARQIKAKLHQFGLIAPSSRRMLSHRYLREIESWTLPPELRASLKLLAEQWRFVTRQLIEMRRLLREQATAQAVIDKVYRSVPGIGEVVARTLATELGDMTRFANERALFSYTGLTPSEYSSGASVQRGHISRQGSSRVRHLLVETAWRALPYDAVLQTMFERIAATRGKKRAIVAIARRLIGRMRACFRQGTLYAVGTLA

SEQ ID NO: 321585 - protein, 540 aa, unidentified
MAKRSRGGKRFVTTMHKPDGVIQPRVQRVGPEHFGIVCIDCAKARFKWMLCDFYGKVLIPPTTVEHNRPELAFALAQLQAARQEHDLRDLIVAIERTGRYHHVPQRLFADNGNEVRLVHPFTSKQYRQATDPGVKTDDTDLAAIHRATINGCALALAPIPPLYQELQLLIRQRRDWVRKASLLCCQIREYLHSAYPGYVACFATPWHSDVMLALVHRFESADAMRQAGSEGLADALRQQQVRFKQATLENVLAWARQAPPADAAAMLQRRIALALEGDRQRKALEIQAFERDIASHLVRTPYVLLLSFPGVNVVSAADFAGEMGPIENYLSAKAITGRAGLYPSRYQSDRVDRANGSLVRCANHLLRGAIMTIADNLISCNHYFHLMSDRWKAMGRDPRTNHVRVACRFCRIAYQMVAGRQVFHHPGMQHRHYILDKLNTFHREHGTDIAQAMADLLAAVEQLPKSAHADEAKPLLDERARLEAGRRRGPQLLGDILPIVLARLGIGAIQSNPSGEEDPIPPQPAERTENAFEPIGANPT

SEQ ID NO: 321586 - protein, 418 aa, unidentified
MDVVYERCAGLDVHKKTVTACRIYPDAQGHKTKDIRTFTTMTQDLLKLADWLAQAGCTHAGMESTGDYWKPVFNILEAGFKVLLINAQHIKNVPGRKTDVGDAEWIADLLQHGLLRASFIPPQAQRDLRDLTRYRMNLVQERSMVVQWLQKVLESANIKLAAVATDVLGVSGRAMLQALVEGSPDAAAMADLAKGRMREKRAALEQALTGRVRPHHRVLIADHLIHIDFLDERIDFITQQITKHIDEHFPNDEEALRLLDTIPGVGRNTAEMLLAEIGPDMSRFPSANRLASWAGLAPGNNESAGKKRSARTRRGNRNLRTGLLQAAHAAVRKGKSYLAAQYHRLATRRGKKKAAVAVAHSILVSAYYILSRREPYHDLGPAYFDELKREATVRRLTQRIQNLGYLVIVRPTPATADV

SEQ ID NO: 321587 - protein, 356 aa, unidentified
MTKIAHFEPARVIVGVDTHKDEHVAVAIDQLGVRLGEHRIPTTPAGYRDLDRWAGGLGGVVAFGVEGTGSYGAGLSRFLARCDRRVVEVSRPDRSLRRRLGKSDSIDAESAARSVLAGTATGTPKSGAGNVEMIRALSIARGSAVKARKQASNQINSLVVTADAGLRDLLIGLSTGRLVKRCSNLRPGRVTTDVSATKFTLRSLARRCQDLTAEVRMLDAELKRLTEETAPGLTGAYCIGPNTAAALLITAGDNPERMKSEAAFAALCGVSPVPASSGKTTRYRLNRGGDRRANAALHQIVIVRLRHDARTRAYMERRTKEGKGKMEVIRCLKRSVAREVFKILRNLEQQKRKNAA

SEQ ID NO: 321588 - protein, 422 aa, unidentified
MTIAHSTTATVLVAIDISKHRHEVLIGNPGKKRRRRLTITNTLEDFQRLATTLASYDLPVRIGFEATGNYHRALAHHLGQAGFELKLVSSVGLARTREALHNSWDKNDPKDAQVILHMLEIGAVQFFHDPLVTGTADIQELSKTHEIVSRSKTELWHRILTHYLTHYLPLYFPEAERFHRSSRTDWFLAFLEKYPSPHMITVMSREAFIADAWQVVGRKVSKERLLSDIYATAVGSVGLPVHSDSDAIRMFRLVLAEGRSLIRQRDVIEARAVELLSDLPDYQLLTTIPGIGPINAMTILAEAGDLRRFRHHRQFLKFCGMDLATVQSGMFRGQSRISKYGNARLRRTLWMAGQTAVLKRTNSFRDKFERYISKDRHNAHLRRKAYTAIAAKMARTVHAVVKHGAPYRPFFEGVSPGGRTSL

SEQ ID NO: 321589 - protein, 338 aa, unidentified
MKTTTFGVDLAKRVFQIHWVDMETGEVGRLKLKRVQVRPFFANRAPAIVAMEACGSAHHWARQLVALGHEVRLIAPHFVRPFVKRNKTDAADAQAIWEAAQRPEMRFVAVKSEAQQSVLTLHRVREQLMKMRQMQINQMHGLLYEFGAGVPAGRRSMADAARALTELADTLPAMVIETLREQLQRIEALTHDMAAIERRLALWRRENEAARRLMAIPGVGLLSATAAIATIGQASTFHSGREFAAFLGLVPRQSGTGGRVKLLGISKRGDVYLRTLLIHGARSVLTHGKHLSEALQCLLARRPFNVAVVALANKMARTIWALLAHGRTYQSGYAAHAA

SEQ ID NO: 321590 - protein, 472 aa, unidentified
MSKGSGNGTTRGDRKRNARRERLRALLPRDGAVVGIDLAEDKQALAVIDHDVRVLARKTVRVKAFRLGEVLDWAVAQARAKGFTAVTVACEPTGPRWMQVQRLCAGRGLPLVCIQPLVSHIAREQQDYTTHKTDESDCVMIARLAVELHCYVPEELDETWGYLRQLGRRRAQLITAETASMHRIGDFLPVAWPTVLGTCVQPLKSVTWLAALQLVTSRCGGQPGGLAVMGEEAFTATVRGAVAGWGGKKAWGTISRRIFAALTDTEGVVAWSRRGLLRRVADELADLQRIRAQLRAAEADMAGALDELGLSRLSEIPALSAVGAAAILAETGDLHRYDGSSSVVKHAGLSPSGNASGGFLGDAHISRRGRPGLRLAVWRAVWPMLQFNPVMAAKYQAMTQAADAAAEQAGGTRSASAAAAARARRARARVACAAALLRWIYFMVVHGTSWDAAAAAGQTAGRRAARHPAEAA

SEQ ID NO: 321591 - protein, 355 aa, unidentified
MRVVAGVDCHKNSHTAVFLDAVGKVIDRITFSTTAEGYEQALTVGHRLGCHEWGLEGAGCYGYAFSVFARAQGATVSEVPGILTKRHRRHGSRRGKSDETDAQAIAEVVLREADRLPCFHPSVLHRALRLRYDRRDRLVRERTRAVNRLRMSAVVIGVVELPRDLTSQKAARWVANLAIEFREEVKPHAAASAIVDDLQDAAEDVLRLTEKIRAAERQLKVLTAEIGSELMAVHGVSSVVAAGLIGHAGDVRNYRNAGAFAAKCGAAPVPCSSGRRVAVRVNRGGDRQLNRLLHIIALAQVASKAHPGRQYYERKRTEGKAHPAAMRCLKRQLATVVYGRLSVVQDRLLADDAAA

SEQ ID NO: 321592 - protein, 338 aa, unidentified
MAILTVGIDLAKNVFAVHGINEVGKPELVRPAVAREKLHGLIAALPPCVIGMEACSGAHHWARLFTASGHTVRLIAPKFVTPYRMSGRRGKNDAADAAAICEAVQRPHMRFVPVKNLAQQSQLMLHRARQGFVEQRTATLNRIRGLLSEFGIVLPLKAATVRRRACECLEDLPGWANTVVGDLLSEVSHLDERVMQYDQHIRQEARADTRAKRLMQLGGVGETTATCLLAMIGNGHEFNCGRQFAAWLGLVPGQYSSGGKARLGRITKAGDPYLRSLLVMGARAVLAAAKNKTDSVSRWALAVQERRGYWKAVVAIAAKNARMAWAVLRRGEDFALPA

SEQ ID NO: 321593 - protein, 433 aa, unidentified
MRIIGLDIHRAFAEAVAWEDGRLRRLGRVDMRRDLLAAFAAKLSPNDVGVIEATGNATSAAAVVAPHVKKVGIGNPKQVRIIAYAKIKTTIDADVLAQLYASGFLPEVWIADEPTQALRRQVTRRNQIVRQRSRLKTVIQSILHSHLIPSCPHADLCGAKGRTWLIEQVVPQDERLAIDRHLREFDRLGEDLQVIERDLARSALEDEGVKRLMTIPGVDITVALAMKAAIGDVSRFDDPQKLVTYLGLNPSVRQSGQVRPTMGGSPSRAVVMRAACSSRRPGRPLVLPDRCEPSPCGVRARRRQHVAAVATARKLSVVIWHLLMKGESYAWARPSLHAKKLARCGTQGREQGCARPKGSRARLQHKEPPGRRAPLGGAGRGRLCTPRRRLEPTRSEEGRHGCRKRGATIEAARQGSHLGPCSSPRGRPCATGE

SEQ ID NO: 321594 - protein, 419 aa, unidentified
MQSFNTFTSDLVRLADWLTRCRITSVAMEATGVYWIPVYEILDARGFDVSLVNAHHVKNVPGRKSDVSDCEWLRELQIVGLLRGSFRPTDAMVALRGYVRHRQTLVESAGIYIQRMQKALVQMNVQLPVVVSDITGVTGLRIVRDIVAGQHDPARLADHRDHRCRASKAEIMAALTGNYRAEHLFVLKQNLELFDMCQAQLAACDRAIEAHIHGMTATVAPPTTPLPAPRKTRTPRTRDNTPRFDLRTPLHHLTHGVDLTQIDGFAPYTALALLSEIGTDMSRWPTEKHFTSWLTVAPKNRISGGRLLSSRTQPSANRAAKILRLTAMSLGRTQTALGAFYRRLAARVGKPHAITATARKLAILVYRALKGELVYRDPGADTYDAQQRSRLLRHLRRRAATLGFELVDRHTGEILALST

SEQ ID NO: 321595 - protein, 320 aa, unidentified
MLSFCGIDVSKDHLDVMMLPQQQCWSVHNDPRGWTELVERLRSFSISAIGLEASGGYERGVMRALLAAGMSVRQINPFKLRQFAKASGVLAKNDRLDARMIASFVAIMPTRPAQRRAPAIERLSEMEAVRRQLSNQKVAAENASRLLEDAMLQRLCRRRIARLAADIDLLDRHLLEVVAADPALADRYRLLTSMPGVGPTLACTLLALLPELGRLSRKQVAALVGVAPYDFDSGKLKGMRCIWGGRAPVRQVLYMAAMSASNWNPVLKAFHNRLKAAGKLPKVVTVAVMRKMITMLNAMVRDDVVWADLLRGRHTVSTAR

SEQ ID NO: 321596 - protein, 419 aa, unidentified
MKIVHPICCGVDVHKRVIVATIATTCNNNITTYITESFTTVNADLFRFRDWLKERGCYDVCMESTGKYWIPVFNVLEDAGMKVLLTHPKYVRAIKGKKTDKKDSKWIADVFKFDMVRASFIPPKDIRALRELARYRYKLVAARTAERNRFQNCMTVSNISLANVLSDPFGKTATDIMNLVLTSSVFTEAACVELIHMSAKKKTELILASIRDCHIESDQRFKMREVNAHMDYLNQAITRTEAELFVRIQPYYNVVEHLSAYLPGISQLSAALIIAEIGADMSVFESSKHLASWAGLTPANNESAGKKKSVRISKAGHFLKPLLITCALSAIKSKKEPYFAVKYQRIKQRRGHKKAIIAIARMLLTSIYHMIMTGEVFSPCDYKEYQRPTSAKSVISDEIAIAFLAGRGYDVSTLVKKAV

SEQ ID NO: 321597 - protein, 356 aa, unidentified
MRIIGCDLHTRQQTIAMLDEHTGELVEKQLNHEGEEVRQFYSALPRPVLVGIEATGSMFWFLRLLEELAIDFRVGHPAKIRAAEPRKQKNDRRDARLLLRLLVENRFPAIWMPSPRLRDLQVLLRHRHRLVRIRTRVQLGLQALALSHGLRRGSSLWTPGGQHQLRALPLARHAAAQRETLLTLYPQLQHSIDCLDRQIETQVNERPQARRLMTHPGVGPITALATEVFLGDPRRFANSKAVASYIGMIPQEKSSGGRQRFGKLSKQGNALLRFLWGQAAMQAVRRDPELLRFYRRKLVEKGLGKAIVAAACKLGIRLWIMLRDEIDYTEFCRRGNLLRQCGAAYAGMPEGDSGPR

SEQ ID NO: 321598 - protein, 401 aa, unidentified
MDMRTIIGLDVSSKTATTSVAVDHQLKYNGKINLDAIGFNSLRTIIESYGQPEVVFEATGQYSRRLEKYLLDQKLQYHLLNPLVAKKRLDDGSRLRKDDIHDAQKLALTEFEKHPEPFQPRLSAPVYRELSDLSRYYDQETEDIKRERNRLHRIIQLVFPSVDEELKLDQPSALGALKRFPHPQMLKGLSLDEITQDILDLSLKGIGKIRAKALATHLWRARDRSYPAVDADSLVIKQLQARINNIFRLSDERDEIISDMVGLAETLPEYEILYSIPAIGKNTAVRLIAELGDIRRFEKRSQINSFIGIDLVQIESGNYAAQRRITKHGNPHARKLLYWTVVNMVNSTAKPNHIQDYYAKRQGTTSRRKPLLVSCMDRLIKTILYLIKTNQLYSYELAGPM

SEQ ID NO: 321599 - protein, 356 aa, unidentified
MAGRKIAGVDLGDRDSFICILDDASGEVLERATIPTNGEAFGQYFARHAPMLVALETGTHSPWASRAVTDAGHEVIVANARQLPLIYGAKHKSDERDPEKLARVARMDVRLLAPVQHRGREQQQALNAIRSRHALVRSRTLLINAARGMVKASGGRLPKCAADAFCKVAWPFVPSELGLSLHPVFESIGTLSHQIRALEDEIDRLARETYPQAQLLTQVAGVGNLTALAFLLTIGDPQRFGDSRMVGPYLGLAPGRHQSGDRERPTRITKAGDEHLRWLLVQSANHILRRDAPDTDLKRHGQKLAKSGSKISRRIAKVAVARKLAVLLHALLTSGEVYEPLRNTHARRRRQPLISA

SEQ ID NO: 321600 - protein, 382 aa, unidentified
MYGEEPVMKEKVRFLGLDVHAETIAVAVAEPDGEVRSLGTIANREESIRKLIKKLGSADQLRACYEAGPTGYVLYWQLTQLGVECVVVAPTLVPTKAGDRVKTDRRDALKLARSHRSNDLTAVWIPDGDSEALRDLVRTREAAKQDQLRARHRLSKFLLRMGRRPAVGMKAWTEPYMAWVRQVQFERPAQQATLEDYLHEVDHMAARIKRLEQGITEVVKLASPQIQEVVKGLQALRGIAEISAVTIVAELGNIARFDTPRQLMGYSGVVPSEDSSGKRKRQGSITKTGNAHLRRIVVEAAWSYRHRPAVGPRLRKRQEGVPEPIKEIAWKAQVRLSKRYARLAAAGKDQRKIVTAVGRELLGFIWAIGTRAEATVKQQMAA

SEQ ID NO: 321601 - protein, 344 aa, unidentified
MEGYAGKQFVGIDLHRRRSVIVRTTGTGELLECVRILNDVDRLAAVMARAGEAPEVVLEATYGWYWAADALAAQGAVVHLAHPLGVKAFEYRRVKNDERDAADLADLLRMGRLPEAWIAPPATRELRELVRHRAKLVALRSHCKAEVHAVLANSGIQVVMTDLFGLAGTELLDGLALPAPSAARIASLRRLLDGIDFEIDLFAGLVRGRLARDGGYAAVQTIPGIGPTLGAVLVAEIGDITRFTAPEQLTCWAGLTPKHHESDTHVHRGSITKQGSRLVRWAVIESVQILPKTSHVGQIRDRIGAKRGRNIGTVAAARRQLQYVFYALRDGHVRALGTRSPQAA

SEQ ID NO: 321602 - protein, 415 aa, unidentified
MQVVAGLRAEVFVGIDWASEDHVVCIVDDAGRTQTTFSITHSKEGFRRLVARLAALGEPNRVPVAVERPDGRLVDRLLEAGHPVVPVSPNAIKAWREGEVVSGAKSDPGDAEVIAEYLRLRAHRLAVVEPFSSETRALRAVVRARDDLVRQRVRIHNQLEACLDAFWPGAKVVFADVTSDIALAFLERYPTPGMARVLGDKRMQAFMTKHGYCGRRSPAELLGRLRAAPDGIGEGPEAEARRDAVLGYVGVVRALNASIKALTRSVAAHLGEHPDSEIFTSLPRSGQVNAAQMLAEWGDCREAYDGPEAIAALAGAAPVTKRSGKHKAVSFRWACNTRFRWAITTFADNSRHESPWAAAIYQAAIDRGCDHPHAVRILARAWIRVIYRCWVDRTPYDAARHGGAKRLELGRKEVA

SEQ ID NO: 321603 - protein, 367 aa, unidentified
MSKAETGRLCVGVDLHKTQFTICALNEDGEYLLEKQHPTKEEGYREFAREMHRFEEQGCSIELAVETTGNARFFKNRMESEYFAVKVVNTNRFKVITMSTKKTDANDAATLAYYLMKDMLPEAHLCSQTSEEIRRLLKTRSVLVQSMVKIKNQIHGMMLGYGIETKAAQLQSKRKRQELINDLEDHNFSAYTAPSLKVMLKILDDLSAEIKGIEKLLEEMVASNEDVALLMTVPGIGINTATVIAAYTAELERFDGNYKKFASYVGIIPSVHNSNETTHYGRITKHGPQELRTAFVQAALGMIRLTNVSSEWRIIKEYQRRKGDKGSGRAIIALARKITRIVFVMLSKREGFKPELMRCEQEIQQTA

SEQ ID NO: 321604 - protein, 431 aa, unidentified
MAVPPDRSPEPVRRFGTFTADLDVLADWLLDCGVTTVAMESTGVYWIPLFELLEARGVQVFLIDPRQAKRAPGRPKTDRLDGQWLQRLHAYGLLAAAFRPADQVCVLRSYLRHRQMLLTYGAHHIQHMHKALQQMHLKLSQVVSDLTGVTGMAILRAIIAGERDPLTLAQLRHPHCQHSEDEIAKALQGPWRAEHLFALQQAIELSHFYHQQLTVCDQLLQAHLGTCADQSDGQPLPPKPRRHKKANEPRFDARTPLYRLAGVDLTTIEGIEEGTALVILSEIGTDMSRWPSVKHFCSWLGLSPQHKISGGKVLSRHVRPGAHRVAVAMRLAARTVQQARTALGAFYRRMRSRLGAPKAITATAHKLARLVYSLLKHGSAYVKQGLEAYESQYRERTVKAVARQAKALGYTLVELAVPATPGNDAVAPATP

SEQ ID NO: 321605 - protein, 340 aa, unidentified
MHKSSTEVFLCCGIDVSAAQLVVAREGESGRWLQRSFPNRASGHQTLIRWLQKSGGRVRVCLEATGRYSLDLALALHTALGIEVAVLNPKVVHAFAATLCRSKSDPADAQVLAEYARRMPFQPWHPPGAAALELRNLTRHISALTQQHTQARNRLHALSASTTGSRWVQQDLKRSLRDLQRRMEKMRRAALALIAQDAELRPRFARLLSMPGIAEISALSLLGELALLAPGLTVRQWVAHSGLDPAHYDSGSSVHKRARISRAGNRYLRRALYMPALVAARRDPHLRAFYQVLLARHKAKLQALMAVARKMLHAIFGMFRGGTDYDGSRLFPTPELAVAA

SEQ ID NO: 321606 - protein, 378 aa, unidentified
MTTMTSAPPVSHCTHEETSAAFGDPPSPRVGVIGGVDTHRDQHVAAALDSLGRLLGIEYFDADTSGHRALLAWLESFGPVLMIGIEGTGAYGLGLARHLATATTADLIEVDRPDRRTRRLKGKSDPVDAEAAARAAWSGAHTGTPKARDGRIEALRNLRVARRSAVQQRADVVRQIKALIVTAEDDLRHRLRHLDTPTLVRTCAALRPDPAHIAEPLHATKAALRSLARRHRHLSEEITDLEALIHPLVEQINPALMAINGIGHDCAGQLLVTAGANPERIHTEAAFAMLVGTAPVPASSGQTHRTRLNRGGDRQANAAIHRVLLSRMRWHKPTKTYLARRVNQRDLSKREAARILKRYITREIYPALINPHHGLDHP

SEQ ID NO: 321607 - protein, 372 aa, unidentified
MFFVGIDVAKRKHEAVVIDDKGRIVQKSFSFPNSLSGYNSLISCVKRITSTRKDIVFGMESTSHYWLALYSHLIKDGYTAHVINPIQSDAFRGLFIRQTKTDPIDAVIIAEVIRFGKYSSTHFPQHKILALREMCRNRLYMVDAISDLKRKTIALIDQVFPEYDQLFSDTFLVSSIEVLYRYPTPKKLLHIRRDTLTNLLIKTSGGHFGSAKADEIIHAAKNTFGIDDPYDVYADLIKTFIKQIKFIQKNVSEIDQKITAIMDEIASPITSIPGIGATLGAVILSEIGDISRFKSADKLAAFAGIDPSLKQSGDYSSIRNHMSKRGSPYLRRALWMACIPATQVDPMFRAYYLKKRSEGKSHMKTMGHVAKK

SEQ ID NO: 321608 - protein, 320 aa, unidentified
MEEKLNYVGIDVAKDSMEVALHECTECWHYSNDKAGIARLIKRLKKLSAHLIVLEATGGYEVSLAAALQSEGLPVAVVNPRHIRDFARSVGILAKTDVLDAKVIARYAATVQPAPRALPPEEARRLDSIMMRRREVFAMRTAEKNRLHQANPTVKERIKAHITWLEQELNDLDRELQQMIESNPEWKEKNDIIQSVPGAGPNLAITILSEFPELGQLNRQQTAALSGVAPFNRDSGKMRGKRSIWGGRSVVRTAAYMSTISAIRCNPLLKSFYTRLIEAGKLRKVAIVACMRKLLCILNAMLKTHTTWDCRLHQLMGPCH

SEQ ID NO: 321609 - protein, 422 aa, unidentified
MLEETQDHEEIIERVAALDIGKAELVACVRVPSPQTPGRRAQEITTYSTMTRSLLRLADRLRELGVTRVVMEATSDYWKPVFYLLEAQGLDPWLVNARDVKHLPGRPKTDKLDSVWLCKVAERQMLRPSFVPPPEIRQLRDLTRYRADLVAVRTAEKQRVEKLLEDAQIKLSTVVSDIFGVSGREMLAALIAGESDPKALAQLARTRMRVKIPQLEEAFIGHFTHHHRFLMRTMLARVDQTGADIAAVETRIEELITPFVHAVEQLDEIPGIGVTAAHVILAEIGPDMTRFPTAAHLCSWARFAPGIQESAGKKKGRGSTGHGNRYLAAALGEAAVTAGRTDTFLGERYRRIARRRGKKKAIVAVGRSILVIVWHLLADPGARFHDLGPEFYDTRIGPDRKKRNHIRQLEALGYKVTLEPAA

SEQ ID NO: 321610 - protein, 401 aa, unidentified
MSLTVGIDWGSEVHAVCVLDERGETIDRFESKHTREGLERLLKRLAKQGDPKELPIAVERPSGLLIDTLVDAGHPVVPIHPNVVKASRPRYAAVNRKSDPGDAYLLADLLRTDGHRFHRLRPLSNEVKALRALVRGRDDLVAERVALANQLRALLESYWPGAVAIFADIDSPIALAFVKRYPTPHSAARLGVKRLGSFLARHAYCGRRRPEELLDRLRSAPTGLASDTEAEAKRHVALALVAALESVVASIRTLSSEIEHAVAQLPEGKVVMSFPRAGRINAAQIVAELGDDPERFPTEASLAAQAGVAPVTYASGKRRGVGFRWAANKRLRAALTTWAGNSRFSSPWAKDIYTRARQRGCDHPHAVRILARAWVRVLWRCWRDGTTYDPSRHGAAKRLAT

SEQ ID NO: 321611 - protein, 339 aa, unidentified
MSKQPSFAQGLVFCGIDVSAKTLAVSVLQQDQPLRQRELANTAGGHKALITWLRKAKATVRVSLEATGVYSLDLALALDAAEGIELSVLNPRRVHQFAQTLRRSKTDAADALVLAEYSKRMPFVAWRRPSQRALELRAVSRHLATLTEERARLHNRLHAAESSLATPRCVREDLKRSLAGIDKRILRLRKAAVALIERDGEMQRKFRHLTGITGIAETSAVHLLGELTTLAPEMTARQWVAHSGLDPAHRHSGTSVNLPSRMSRHGNSQLRRALFMPALAGARFDPHMRAFYTLLQQRRKSKMQALMAVARKLLHAIYGIFKTNTPYEGSKLFPQLKVA

SEQ ID NO: 321612 - protein, 327 aa, unidentified
MFYIGVDWADQKHDAVAIDDGGHQLGSIRVAHTPDGLTRLENWLSSLPGKPSKEQTACIIETTHGLLITFLLERGWPVYPVNPRTVDRSRPASGAKTDLIDAHLLAKTGRANFPELHRLTPDSESIAELKGLTRDQDGLIQMQTRLVNQLTACLKDYYPVALTLFAKLQPRSTLRFLQTYPTLQAAQAASVEQIAQVLELAGHTRAKHVALTVFDRLHQPGLQANPVTTRIKSRLALALIAQLLPLLEQIATYDQEIERLFLSHPDHEILQSLPGAGKRLAPRMLAEVGDDASRYESAASLQALGGTSPVVFQSGRYSKPHRRLGWS

SEQ ID NO: 321613 - protein, 384 aa, unidentified
MFKHNILFIGLDTHKVATEVAYIEDQRGAEAIHLGRILSNKQSIKKLVRQMESKYPHATLHFVYEAGPCGYWIYRYITSLNHCCYVIAPSLIPKKPRDKIKTDERDALKLAKLLKSEDLTPIYVPEPEDEAVRDLSRLRQTAMEDLKDAKYQLKAFLLRNNILCKTKDNWSLKHLRWLTELILPTPCQQIVLQEAIQTISERTNPLKRLDNELEHNVKKWRYYPVVKAIQAMRGVKLLVATGVIAELGDLTRFDHPRKLMSYLGLVPSEHSSGSKRHLGAITKCGNGRARRLLVDGAHGYRYEANISKEMQLRQEGLSKEIIDIAWQAQLRLCRRYQKFMHRGKHRNVVVTAIAREMIAYIWAILREVVLSPVNKKLRIARMPS

SEQ ID NO: 321614 - protein, 354 aa, unidentified
MSQNSNSSIVVVGIDIGKNSFHVVGLDQRGAIVLRQKWSRGQVEARLANMPPCLIGMEACVGAHHLSRRLKALGHDARLMPARYVRPYSKGQKNDFRDAEAIGEAVQRPTMKFVATKTADQLDLQALHRVRERLVSQRTGIINQIRAFLLERGIAVRQGLRFLRAELPRILAAPPDVLSPRMVRVIEDLAGDWRRLDERIESLSGEIEAVARQDAGCERLMSVPGIGPIISSAMVAAIGTGDVFSKGRDFAAWLGLVPKQISTGDRTILGKISKRGNRYLRVLFVQAAWVVLIKPKSWERHGLKPWIEAAKRRLHRNVLAIALANKLARIAWSVLAHGRNFEVRKIDEAAAQSV

SEQ ID NO: 321615 - protein, 403 aa, unidentified
MYKYFLGIDISKDSFDFCFTDETEKVLYKDHYQMDMTDFTKLSDYLSPFSKDEILIVMEATGIYHLTLLSYLLEQGLNVSVVNPLFIHSFTKSMTIRKTKTDSKDAHIISIFAKRNYATIRLSSASDIETIKPIVREKEKLTNQISAIKTDIKSLVNQLFPEMLKNTNIFLKSSLNLLLQAPSKRIIRNLKEKKIASYLSCDTKRGAKPKVDAKEILLMAKNSIGINNQSLEKILVSKIKQLDFLQTQLDEFNETIEQFVDEHHHDDMDLLTSIGGVGKPSAASFLTELGDINNFATYKQLTAFIGTDPTIYQSGTSVNVKGSISKRGNSHLRRVLWHMARAATVWNETLKAYYDKKRSEGKTFKQSVIAVANKLIRIIFSMLKNNTKFDSNFSNLAIKSASI

SEQ ID NO: 321616 - protein, 432 aa, unidentified
MTAPPYDLVIGLDRSDKKADLCLINTRTGERRTVVIATAPEALWEWQAQLRQQHPSARVGLCLEQPAVHLISFLEAYEWITLHPINPITLQKYREAFVTSRAKDDTKDAEYMADLLLTHQEKLPAWAPQDSATRAVQQLVAHRRAVVDERTGLTNRLIALLKQYYPQALALCGEDLWRPLATSFLLKWPSLPAVQKVKPATLKQFYYLQGSRSTKLLDQRLALVAKAVAVTDETAVIASFVLRVQLLCRQLQLVQRSVAEFDRQIAAAYAAHPDRAIFASLPGAGPVFQPRLLASLGAQRERFDSAASLQCYTGVAPVTKKSGGSCHIHRRYLCPKFQRQSFHEYAGESILWSRWAAAFYLQQRTKGCAHHTAVRALAFKWQRVIWRCWQDRKPYDERIYEAALRKSGSPIVTLFDKVELGKSPWKNPAKKN

SEQ ID NO: 321617 - protein, 410 aa, unidentified
MEAIIERCCGLDVHQAWVTACLLVGLANQRPRKVIRQFRTFTADLEALRAWLESEHCTHVAMESTGVYWKPVYAVLEGSFELIVGNAQHIKNVPGRKTDVKDSEWIAELLRHGLIAKSFVPPAPIRELRELVRYRRKLVESRSAERNRLLKLLESANIKLSSVVSDVFGVSGMDMLHALLQGQQTPTEMAQLARGCMRRKIAELELALHGKLQDHHRTLLHLQLRRLQQVDRDIAEVDDHLDHALAAYREPHQRLMQIPGVDRVVAAVLIAELGTDMRVFHSAGHLAAWAGVCPGNNQSGGKPKPTRARQGNILLKTTLVEAATGAAHTHGSYLGDKFHRLRARRGYKRAALAIAHKILVAAYYMLAQAADYRDLGDTYLDQRGHRAITGNLVRRLERLGYRVRLEPKAA

SEQ ID NO: 321618 - protein, 309 aa, unidentified
MNTCIGIDVAKDSLAVCTWPGQQHLTFANTPEGHAQLIQSLRGQRVDHLLLEATGGYERRVRTALLRAGHPVTRINPQRARAFALAMGTIAKTDRIDAAQLARMAQVLVPSPAARCEPEREALRELVKRREQLVGQRDDERRRLKQAELSVVREDMIDNIAQLQRRIGVLDRRIVEQSRILDDALGQRLQAVPGIGPVTRASLMAYLPELGTLDRRQVAALAGLAPYNVDSGRWSGKRAIRGGRAALRRVLYMACLSVIRTQADFKCRYQALRQRGKCAKVAITACMRVLLVRLNAIVRDNTEWRMQML

SEQ ID NO: 321619 - protein, 429 aa, unidentified
MTRISAGVDVSKNRSTVCIIDQDGKFIMRPFLVWHSTEELDFLADTLKRLNGEVRVIMESTSVYQYPIALHLKEKGIFISIVNAYEMKKFANTDFRGGKTDKKDSRTIASYGISYWDKLVEWQIPKDTYFNLDLLNRTYMNAKKHRQIILQELQHYIDCAMPGMDKELHSLNLNTKKDFMLDFVEKFWHRDEIVNMTEAEFTEVFTAWAKEKGYRPVEGKAAKIYAIAKSCIPYYPANPTVKTILQCIVDKLSGVNRTLVTIVTQMIEEAKKLPEYQIVREMPGVGDPLAARFFGSAGDIRRFKNSKALVAYAGIDSPPDESGDFSSTHRHITKKGSKVFRDTGYEIMMALRAQKRTWEKVRKNPEVYDYMLKKEAEGKPRKVAKIAALNKFLRIVYARIKELYDNMALAERAKAKTRSKTKAKTKATA

SEQ ID NO: 321620 - protein, 346 aa, unidentified
MENIALDVHKHYTWARVENPQGQPLYASRLAHGRGCIKHFVQRWTPGSPVAVETVGNWYWVVDEIEAGGGKPQLVNARLAKLMIGNVNKSDKLDAKGLNMLQRAGTLPTVWIPPSGVRDARELPRTRMVFSRQRTQLKNRVHATLSKYGYVVDEVSDAFGKRGRQIIEELSSKLPPHTKRALDHVLDQLDEVMENLKAIEADMIKVFAPCPQTTWLESLPGVAKILTVVIWTEIGSIERFNRAEQLASYSGLVAREHSSGGKFHYGAVRRDVNVYLKWAFVEAAGSAIQNRDRCGYQHISQLYQRIKPRRGHNRAKVAVARHLAEASFWMLKKGEPYREPRLSTQR

SEQ ID NO: 321621 - protein, 411 aa, unidentified
METIVDRCAFLDVHRDTVMACARTSDGSGGRREEVSQFGATTSQLLLLADWLVERRITLVGMEATGVYWKPVHWVLEDAVDEVWVINARHMRNVPGRKTDVADSQWGAQLLEHGLVRPSFIPPKPFRQLRDLTRYRRVVIEERGRESQRLHKVLEDAGIKLSSVTSKVLTKSGRDMIDALIAGQRDPAVLAEMAQRRMRSKIPQLHDALAGRFDEHHALMCKAMLARIDQADVTINELGDAIDALLDPYEAAVTLLVTIPGVARRTAQVILAEIGADMSRFPTAGHLASWAGMCPGNNESAGKHRSGTTRHGSKWLRIALIEAAHAAARTKNTYLAAQYARLKAKRGPSRASVAVGHSILVIAWNLLSTGETYNDLGGDYFENRRNSPARQRRLVAQLEAMGHHVTLAPAA

SEQ ID NO: 321622 - protein, 344 aa, unidentified
MLKSNIIGIDLAKNVFQVCVISKDGELMSNKVVSRQKLKEILAKSHPAVVGIEGCGSSHYWGRFAEQFNHDVRIISPKKVKGFLQGQKTDANDALAIANAAMQVGLKYSKPKNEEQQILQSLEASRVYLSRNVTSLGNHIRAMLYEYGIVSAKGAAGLRKVVMETLDEQHPLPANLLSTLHHLWAHYQSLKEEFTIQEKAKNALVRQLEPCKSLMALEGVAEVCAGMLYSTLGNGKQFKNGREASAFVGLTPKQHSSGGKVFMMGIDKKGGIKELRAALYQGAISIVTKLPEEPKTAKQKWLIQLLQRVGIKRTCIALANKTVRTAWAMLRYENQYEQQLLIKN

SEQ ID NO: 321623 - protein, 366 aa, unidentified
MSTATRSLRVATASTLTIGLDVGDRFTSVCVLDAAGTVTETARVRTTPVALEQRLRTGPRGRVVLETGTHSPWLSRLATACGHEVIVAQARRLQLISQNLSKSDEVDAETLARVGRLDPTLLAPVQHRTAEAQAQLAVLRARDAVVRTRTLLINHVRGAVKTAGSRVPSCSAASFARKAGPALPAALVPALAPLVEQIQALTTQIGAFDRAIECVAATMYPVTAQLQRVRGVGALTALCYVLVLEDPARFRTSRDAGAYLGLRPRRSQSGACDRQLHITKTGDALLRKLVIQSGQYILGPFGGDCDLRRWGLGLAGRGGHAAKKRAVVAVARKLAVLLHHLWSTGVVYEPLHQAMRPVIQSQPTAA

SEQ ID NO: 321624 - protein, 345 aa, unidentified
MKHYAGLDVSLKETSICIVDEAGSICREMKAPSHPEDLARVLQDPTWRLARIGLEAGPLSQWLFSGLAHAGLPVVCIETRHTKAFLKAQVNKSDRNDARGIAQMMRVNLFRPVHVKTVTSQQRRALLTARKLLQEKAIAIENDIRGLLRNFGLKVGVIGPVGFDARIRELVDGRPELADIAASLLVARQTLREEVSRLHRKVLAIAREDGACRRLMAVPGVGPVVAVAFTSTIDVPARFRHSKAVGAALGLTPVLKESGESKRIGCVSLCGDGMMRTLLYEAAQVMLTRVKKWSWLKAWAMNIAKRGSLRKAIVALARRLAVTMHRMWSDGTEFRWTRDDAAACV

SEQ ID NO: 321625 - protein, 344 aa, unidentified
MSEVTTIGLDIAKHVFHAHGADGSGRGIFSKRISRGKLLDFFAAQPSCTVALEACGGAHHWARQLIQLGHEVRLIPPAYVKPFVKRQKNDAIDAEAICEAAQRPSMRFVAVKSEQQQAAGLVFRTRDLLVRQRTQLINAIRGHLTEYGWIAPKGPSHVAMLADLIEEEEMVNSLPEAAYAMFRLMLDLLAGLNSKIADLDREIARRAREDEVSRRLMTIPGIGPISATAIAALAPPAETFAKGRDFAAWLGLTPLQRSTGGKQKLGATSKMGERTLRRLLIIGSSAVVQQASKRGAPKGSWLEQMLARKPRMLVTVALANKMARIVWALLVKQENYRAPVAAKA

SEQ ID NO: 321626 - protein, 402 aa, unidentified
MEKYAGIDIAKKVHWMCVTDGEGRFLMEPRPYDNDAEGLSRMVADLDLYGGDIAVGMESTGCYWRSCYKVLAEGGYPVSVINPVKTCSERKQGNLGRAKTDRVDCLVVADTLRKQGVPPTPSPDADAAQLRDLCRFRRTVSESLSRAKIQATALLDQVWPEYPRLFGNLFCGASLAVLRRFAVGDMGADGLASDLLSASRNRYGAAKAVEVLDSLRETCGVPATDALLLQLRLLLDQLDFCAAQIAEIDAGADALLDAVAPTLPTVPGIGRATAAQIAAEVGDVARFRDAKALVAYAGLDPTRRQSGGFDPDRNRISKRGSAHLRRSLYIAAQASLRTDCEFRDFYDRLRGRGYSHRYAVCAVARKMLCVCWALMRSGEDYSRDRHRAREKAPEGASPVDAG

SEQ ID NO: 321627 - protein, 338 aa, unidentified
MNLSRIGLDLAKQVFQVHGVDRHEHVVCRRQLKRAQVRDFFRQLPPCLVAMEACGSAHYWARELRELGHTVRLIAPQFVKPYVKGDKHDAHDAEAICEAASRPSMRYVPVKSAEQQAVQSVHRVRSRLVRARPALCNEVRGLLGEFGLIATRRGRAATMALLETVTATEPASLPAPMGELLRELKDELQTLEARIARLERQIQAHVRGDARIQRLLAVDGIGPISASAVAASAGDARQFRTGRQFAAWLGLVPRQHSTGGQQRLGNISKRGDTYLRTLLIHGARAVVRCCANKTDARSRWLQGLLQRRPANVVAVALANKNARILWALLSRETCYRPG

SEQ ID NO: 321628 - protein, 389 aa, unidentified
MQASTVNTPITDRISTIFSAIELSQKTWLVTIHSPDKDKISRHKVQGGDHASLLALIDRVRDRAARTLGAVPAVASCYEAGYDGFWLHRLLMAAGITNYVFDPSSIAVDQRARRVKTDRIDGEKMLRTLMAYLRGEPRVVRIVRVPTPEQEDARRDTRERHRLTKEQTAHTNRIKALLRLHGFAVGNPRRRDWLIWLAAQRDWQGQAVPPRILTEIEHEHARLMLVRKQLEALAQAPAAADLTPAAAEMARRSELLLRLKSLGPAFATTLTQEVFYKDFHNRREVASYFGLAPSPWQSGGTDRDQGISKAGNPRARCSAVELSWLWLRHQPDSELSQWFRQRTLNASKRTKRIAIVALARKLMVALWRYLTTGLVPAGAMLKVSGGAMI

SEQ ID NO: 321629 - protein, 400 aa, unidentified
MSGLKGSFDGFVGIDVSKDKFDACGITGDEAKLFQFSATMDRKGFEKLKGHLAAVSISSVLIGMESTASYHVNLFSYLVSEGYRVLLINPLLISNYVKMQLRKTKTDKKDAVVIAQFLLTNGDTLIQRATPSLISDLRDLSRQRESLVDEMTALKIEIKQLLNITFPELEHMAGIFTKSILKLLQQYPSAFALRDADLGQLSRMLIADSYGHKREAFAAELIKAAHSSIGSKSPAKDMILKQKIALLLHLEDALQEITGMLIEMSRKLMEEDINIMTSIKGIGDKTAANFLIEMGGDINQYERSGKIIAMAGLDPAVYQSGKHEGKGRITKRGNRHLRRIIWLMTTKVIQYTDIFNVYYLKRRKEGLPYKMAVLATAHKLIRVIYAMLTQRTTFCPQLNS

SEQ ID NO: 321630 - protein, 343 aa, unidentified
MTLYIGVDIHARQQTVSYLDTEDGTLGQQELHHERDDVRAFYSQFSGEVIIGIEACGYTNWFEELVEGLGHKLLVGDAAEIRRLARRRQKNDRRDADLLLDLLLHHEFPALYRYPPESRELLRQLRYRHKLVKLRTIVANTLHALAINCGLSLRAQLLTRNGRKQLAGLRLSAIGQQQREELVSLADELTNRILKVEQWLKEQAKSDARVQRLQTHPGVGLLTSLCLVHTLGDLGRFPSTRKVAAYVGFDPVEHSSAERKVYGGISKAGSRLLRYLLVEAGQTACKHDEQLQQFYRRLVPRRGKARAKVAVARKLLIRCFIMGRAEIDYAEFLRRGQNHKETE

SEQ ID NO: 321631 - protein, 386 aa, unidentified
MKLLYRRCAGIDVHKKSVSVCVRLRVTGKQEVETEEAVFGTWTKDLERLRVWLRQRKVKQVAMESTGVYWIPVWNVLEGGKHPLTLTLVNPAVVHALQGRKTDRIDARRIAEYLQYGLLRGSFIPPRPIRQLREMTRMRVHVQQDRNRIINRIGRLPETVNIKLSSFASNIAGKSGRRMLDLLAHGTRSPEVLADKAIGRLRAKIPDLILALDGRPDPHFRWMLTRLLHRLDELDAEVSAIDARLTELMAPHEELLKRLCTIPGIDRTTGRALIAEIGDDATQFPDAAHLASWAGLCPGNAESAGKRFSGRTRKGDRYLRRTLAQSAWAAARTKNCFLAALFFRIARRRGLKKAAVAVAHRILTIAWTMMKENVDYRERGGDFFDR

SEQ ID NO: 321632 - protein, 355 aa, unidentified
MASITLLGIDLAKDVFQLHGLDELGRPQLKRTLRRRALVQFVAKLPACTIAMEACSSSHHFSRKFQQFGHEVKIISPQFVKPFVQGNKNDAADAEAICEAASRRKMRFVATKSVVQQDIQCLHRVRKRLVHNRTALTNEIRSIVGEFGIVFAKKRSALVEGIKGLLNGSCPREELSSEGLTLLQDLYSELLELEQRIENCELKLKKISSQPQCQRLFKVGGLGLLSVTALAVALADPGQFKNGRNFAAGLGLVPRHQGTGGKNRILGISKRGDMDLRTLLIHGARAKLRGINAKCRAERKLDPLEDWAYRLCQRQGYNKATVALANKNARIAWSISAHKTEFESHQAVASLKKGA

SEQ ID NO: 321633 - protein, 408 aa, unidentified
MNAVGIDVSKGKSMVAALRPMGEVALLPQEFLHTEIGLEQMAYAIIALGEDTRVVMEATGRYHEPVAAALYEYGIYVCVLNPLFIKQSGGGSIRKVKTDKADAMKIAKYGLDNWVDLREYTPMDTVRQQLKLCSRQYNLYMKTVVSLQNNLISLADKTFPGVNELFSSPERADGHQKWVDFVMTFWHCDCVCRVSEKAFTERYQKWCKRKGYHFSAEKALDVYAGSCGHFTTLPKNDNTKLLITTAAQQLLAGKMTLAALRAEMTRLAKQLPEYDTVRAMYGVGETTAAQLMAEIGDVRRFPRRSSIVGFAGVDPAVDQSGKHEAKSTPTTKRGSPHLRKTLYQIVCTYLKRSPVDEPVYQFLDKKRSEGKPYFVYMTAAQNKFLRIYYARVKECLEAFDAQQNSAQG

SEQ ID NO: 321634 - protein, 387 aa, unidentified
MAQLVPLPADSLPTNCANVYVAVELSRSNWIVAVHAPALGDKVSSHQLAGGDVAHLLSVIDRVCRQVAHTGHAEPIAYCCYEAGYDGFWLHRLLLAHGIRNFVLDAASLLVDRRAKRAKTDHLDARSLLRALIGLSQGDTYGCRAVRVPTVDEEDARRLHRERQRLVRERTGHINRIKALLSAQGIRALRITDKTWLNRLGRLRTGDGRPLPAQLRAEIARQWRRLMLLEEMRRQVEAERDGLLRGNTGADQSVGNIQRLAKLKGIGPEFATIFAREVFYRHFSNRRQVGSYLGLAPCPYNSGSSRRDQGISKAGNPRARTAAIEMAWMWLRYQPNSALSQWYRNRVGTMEGRIRRILIVGLARKLVIALWRYVSTGLVPTGAIIET

SEQ ID NO: 321635 - protein, 364 aa, unidentified
MSESRTVTIGLDVHAASVRLAAVRAEELLEERTLPYEHQAVERAVRRWPRVRCCYEAGPTGFGLYRHLVARGIDCDVVAPGLVPQRPGDRIKTDPRDARKLAQLHAAGLLSPIHVPTPELEAARDLIRAREDARIERMRARHRLSKLLLRNDRRMPTTCWGVPRRHWLGQQRFEEAPRQAAFDDYLHALDLVDARIAMLERGIAALAADPAFAELVGRLRCLRGIDTLTALGIAAEVGDFSRFASAEEFMSFVGLVPSERSSGERRRQGSITKTGNAHIRRLLVEAAWSAGRRPQVGERLARRQHGQDPLVRARAWRCQQRLYRRWRRMTARGKPRQKIVVACARELAGFVWAIATEQPLRAEG

SEQ ID NO: 321636 - protein, 362 aa, unidentified
MDNLTHVALDVHKEQTAVAVLRPGDHEPDQRVIASTPEAYRKLVSRVGTDQVVVCYEAGPCGYDPHRVFTDLGVRCEVIAPSLIPRRSGDRVKTDRLDARNLARLHRAGELTVIRVPSELEEAVRDLVRVREDIREDRRVAIVRTKAFLLRRGIHAPKGWNIHHTEWARGLRFTQPAAQEAFDALLGAVQTRDVQLRSLDQRIGEWSLREPLAQPVARLRALRGIDTLSAATLAAEVCDFRAFGSAPSFMAFTGLVPSEHSSGARTRRGAITKSGNAHVRRILVEAAWSYRHHPAVGVELRRRQQDQPQAVIAHSWVAQHRLHAKYHRVAACHGPNVATVAVARELAGFIWALMTEHYATEG

SEQ ID NO: 321637 - protein, 408 aa, unidentified
MYNAVGIDASKLKSTITIIQPAGVVIRKPFDVLHTSDELNTLVTYLKSLVGETRAVIECTGRYHEPVVKSLSEAGIFISAVNPKLIKGQKQNTLRKVKSDPADARKIAKYALDNWAELREYSSMDTTREQLKTLNSQFTFFMKQKVAAKTNLISLLDNTYPGVNKLFDSSTRDDGSEKWVDYAYSFWHVDCVRKIGLKAFTERYEAFCKKHHYNYQKNKPALLFEESKQLVAVFPKEKSYKLLIQQSIQQLRLASEHIEIIRREMNELASTLPEYETVMSMYGVGETYGPQLIAEIGDVSRFTHREAITAFAGVDPGVNESGQFKQRSNRASKNGSTRLRKTLFQVMSTYLQNKPVNEPVYQFLDRKRAEGKPYLVYMTAGANKFLRIYYGKVKECLRNLEQSQIEES

SEQ ID NO: 321638 - protein, 339 aa, unidentified
MQITAIGLDLAKNVFHVHGITQDGVMGLSRSLRRGQLLSFFEGLGPCLVGMEACGASHYWARELTRLGHDVRLIAPIYVKPYVKRGKSDAADAEAICEAVTRPTMRFVEVKSPEQQAILSLHRARSLIVRQRTQTINTLRGLLAEFGIVFAQGVGQAVRFAKRVAQGEAPDLPPVALDTILDLSEQLLSLHGRVLWYGRKLTQAAKSEPRIALLQTIPGIGPITASAIVASIGSAEQFRSGRDFAAWLGLTPINRSTGGKERLGRISKMGDRYIRNLMVVGMTSRMKQIKSAPERFDPWFADLLERKPAKLAAVAMANKTARIIWAVLTRNEPYRVRTA

SEQ ID NO: 321639 - protein, 373 aa, unidentified
MPRYSTAFGMDVHLRSTTVCALDAETGETVTRRFRGNPWGEVAEWMSGFPGPSLAAYESGYLGFAPQRELSGLGVDCVVAAVSKVPRSAADFSSKNDRNDAARMAKAILSHDISPVWVPSPEIEGLRDLAGAHDAATARLAAAKQRLLAFLARRGYAYGGTTPAGNPRRYWTYDFLRWLDKVRPADDGGIRALAALRSEVEAAAETRDDLLAEYRAAVAAGPLSAEVEALQSIKGCGFALAAAFASEVGDFSRFRSGRQVTSYFGLAPKQRSSADSVRLGGISGAGNALVRRLAVEGSWSYVQASHQPKLMPKGSGVPLEVRMHGRKGSERLLRRREEMLARGMPQAKANAATAAELVRWLWALGAMCREATE

SEQ ID NO: 321640 - protein, 341 aa, unidentified
MNTSKTVVGIDIAKRVFQLHWLDPETGEIVSRQLKREQFLAHFANRAPCLIGMEACGGAQHWARQLVAMGHQVKLMPAKAVRPFVGGNKSDVHDARAIWTAVQQPDVKAVAIKTEEQQAILALHRMRQQLVKFRTAQINGLRGLLSEYGEVMPQGKAGVKNGIAEALQRLADRLPATVIDTLREQWGRIGQLDEQIGQIERRLKVWQQEDQDCQRLVRIPGVGLLIATAAVAMMGDAKTFESGREFAAWLGLVPRQTGTGGRLRLLGISKRGDTYLRTLLIHGARSVLTHAKEPDPWITALRQRRPLNVAVVALANKMARTIWALLAHERTYQKGFASQAA

SEQ ID NO: 321641 - protein, 390 aa, unidentified
MELPMQKLNDLSRSLIALEPAGTLIAVIEMSLSSWLVAGIVPGVERQPLKKLAVDESALLKLLHRWREEAEKAGRRIERIVVAFEAGRDGFWLARWLKAHSIEAHVIHAASVAVSREHRRAKTDRLDTELLKRAFLGWLRGERDHCKVVAIPTLKDEDAKRPNRERESLVGEQSRIVNRMKAALIRLGIRGFNPKLKRAAGRLDSLRTPEGEPIPPNTLAELRRDMERRRFVSNQIRQIEEARLERFEQTPNDGPHAMVRLLARVVGVGIETADMLVHEVLSRNMRDRRAIARYAGLTGSPDESGRKRREKGLARSGNGRVRRGMVQLAWRFLTYQKESALAQWFRARTENALRARKPMIVALARKLLIALWRLVWQGVVPDGVVLRPAQ

SEQ ID NO: 321642 - protein, 340 aa, unidentified
MEKASMIGLDIAKNVFEVHGRNAAGEVVLRRSLKRSQVEKFFAKLAPAVIGLEACGSAHYWARVLGKLGHEVRLMPPAYVKPFVKRNKSDTIDAAACCTAMRQPDMRFVPVKTVEQQAALSLHRSRDLLVSQRTQLGNALRALLSEFGIVAGKGKAGLARLMDELRAGTLDLPVDAVAAAMALAGQRAALDAAADALERRITAQAKADEKACMLKTAPGVGPLSAHATLATMPDPSLFKSGRDFAAWLGLAPRLNGTGGKTRTGRITKQGNQPLRRLLVLGATAWLRQVRARPEKASPWLRGMLARRPAKVVAVAQAARTARILWAMLSHNQPYRAPAIG

SEQ ID NO: 321643 - protein, 468 aa, unidentified
MAKRPDPASRRPPHPLTPKSQPALPKPQPALTVKNPSAAGIDVHDGVHWVAVPPDRDPEPVRPFGAFTVDLEAIADWFTKCGVDTVAMESTGVYWIPLYELLERRGFRVYLVDARAVAKVDGRPKTDIHDCQWIQRLHSYGLLEKAFRPQDDIVVLRGFVRQRQTLISYASQHIQHMQKALVLMNLKLTLVVSDIVGKTGMAIIKAILAGERDPVELSKWRDERCKHNQEEIAKALVGNWREEHLLALRQAVELYEFYHCKITECDQAIAAYLSRLPNRAGDRPMEKRPAKRKNKDNEPMFDARKRLYEMLGVDLTAIDGISVGVALTIASELGCDVSAFRNEKAFSNWLGLAPNHKITGGKIKSRKTRPGANRIATGLRMAAASLLRTPTALGAFGRRMRSNVGSPKAITAIAHKLAKLVYRMLKYGEDYVRQGAEEYEAKYQERRLDGLRRTAAALGFRLEPQAAQ

SEQ ID NO: 321644 - protein, 376 aa, unidentified
MTQTDVQYPTIHLAIELSRSAWLVAARLPGVEKPSLHRIEGGDTAALLALAAALRARAAARLGTPVRVACCFEAGRDGFWLHRLLTAEGIAAYVLEPTSILVNRRARRAKTDRLDALGMLRVLAAYLGGDRQACSMVRVPTPEEEDAKRPHREREELVRERVRLENRIAALLATQGVRERPSLRSWERDLAALRTGDGRPLPPHLRAELDRLRRRLVLTLGLIREVEAERDAALAAGPRDAAGRKIAALCRLRGVGANFAAVLTREVFYRAFANRRQLAGYVGLTPVPHQSGEADRDRRISRAGNARARTTLIQLAWLWLRYQPDSAPARWFRDRVGALRGRTRRIAIVAMARKLLVALWRYVETGLVPEGVEVAA

SEQ ID NO: 321645 - protein, 316 aa, unidentified
MSELVYVGIDIAKNSFEVAVTGELQTLNLANDEAGHAQLCQWLAPLAPRLILMEATGGYEQDLALALAGAGLRVSVVNPRQARDFARCVGKLAKTDRIDAQALRSFASMLDAQGHQPRALADDERRELTALVVRRRQLVAMLVSERQRLGVAHRKAKPSILAIMDAIAAQLHDVDDELKAHVQTHHADLAKLLTSVKGVGPTTACTLLAQLPELGQLNRKQITALVGLASMNRDSGTLRGQRHIFGGRADVRRVLYVAALVGTRFNPVLKAFYAKLLAAGKAKKVALVACMHKLLVILNAIARTRSPWRDDFAERL

SEQ ID NO: 321646 - protein, 420 aa, unidentified
MPKTSSYMPQNLTRMNPGAAAIDIGSTMHMAAVNPDCAEMPIRSFGTFTHDLHDLAAWFRSCGVTSVAMESTGVYWIPAYEILEQHGFEVILVNARYAKNVPGRKTDVSDAAWLRQLHSYGLLRGSFRPNAQVATLRAYLRQRERLVEYAAAHIQHMQKALMEMNLQLHHVVSDITGVTGMKIIRAIVSGERNPDVLASLRDVRCHSSVETIRASLIGNDRDEHIFALSQSLELYDFYQAKMLECDRKLEASIASMTAELEPPLAPLPKVRTKTKQTNAPSFDVRAALYGLTGTDLTQIHGLGSSLALKLIGECGTDLRAWPSAKHFTSWLCLAPGNKISGGKVLSSRTRRSSSRAAALLRLAATTIGRSDTARCVLPTAGGAHRKAKSSDGDGSKDCRAFLQYPASWDGLPRSRRCGLR

SEQ ID NO: 321647 - protein, 411 aa, unidentified
MEAAVITAVGIDVSKSKSTVAVRRPGGEIALRPFEVHHTNSDLKKLASTLKKLGGDIRIVMEHTSTYWRPIALTLKEAGFFVSVVNAMLIHDFSDNTIRKLKTDRADALKIANYALTFWDTLPLFNNEEETRLLLKMQSRANERITATATALRNGLIALADQTFPGVNIAFDPNTKNANGHEKWVDFFLRYRHKDCVCQYSMEAFTESYRGWYKRKNYKFRTDTAHKIYLLAQEGVATLPKCESTKMLITQACKSLNAVCEAKQSTQLEMQRLAAMLPEYEVVMQMEGAGSITGPALMAEIGDVRRFKNKKALVAFAGIDAPPFQSGAFESKSRHVSKRGSPHLRRTIFIVSNIILTRSNPENAVYCFMDKKRSEGKHYCVYTVAGSAKFLRVYYARVTEFLRSQPSSDAC

SEQ ID NO: 321648 - protein, 312 aa, unidentified
MDATVIAGIDVSKDRLDVHVLPDGMSFSVTRDDEGIAALVARLAPLQPAAIGLEASGGFETLVVAGLAAAGLPVVVVDPARVRAFAKALGQRAKTDPIDAAVIARFVAAMKPVIRPLPDAQTRDLADLLARRRQIVAMIGAERQRRTKATARIVKSIDRLVAALGKELAGLDHAIDKTVKGRPDWVEKEDLLASVPGIGKTIARTLIAELPELGKLDRRQVAALTGLAPFTRQSGQWRGKSFIGGGRADVRAVLFMGALVAARRNKTLKAFRDKLVAAGKPKIVAIIATARKLVTMLNAILRDSQPWREQTA

SEQ ID NO: 321649 - protein, 348 aa, unidentified
MRRYIGVDLHKNTFTVCYLSKKSQELKSFKVSKVDIEAFKATLSKSDEVAVESTGNTGYFVREIKRAVKVVRIINPTQFKIISHSVKKTDEKDAEIIAKYLSKGLVPEVRMKSKEDAQLSSLIGTRDKFVKLRTMLKNKIHNILNANGIVTKKELFSSKKGLERVLDNDLDQASLFELRIVITEIKNLNKSISEIDNELKDRGRKLKGHKNLISIKGIGDISSTILLNTIGDINDFAGDHKLAAYIGIVPRVQVSNETSHYGRITKMGNKFARTALVQSTLIAIRYNPYLRAFYMKLKAKKGSGKAIIATARKLLTIIYRTLKNDWVFEDFSNFKLMPVKKVYHLSPA

SEQ ID NO: 321650 - protein, 464 aa, unidentified
MSRYVGLDVHRMTIEACMIDETGRVLRRASLACTREAIDAFARSQLMPSDRVALEATTNTWSVADILRPHVAAVVIGNPLRTRIIAEARIKTDKVDAEVLAQLLRCDFLPSVWQPDPAIRQLRELSGHRAAVVRQQTRLKNRIHSILAQRLIHPPVADVFRKQGRQWLEGLALDPADRLVIDSHMELLAHLEAEEAKLTLELAKISYPREDVRLIMTLPGVGAAVAQAVIGALGDWSRFRDADHAASYLGLVPSVRQSADHCHHGSVTKAGNSHARWLLTQASQQVARHPGPLGVFFRRLARRKHRNVAVVATARKLVTVAYYMLKHREPYRYALPERTQFKLSALRVDATGERRPKSKVGRAMEPQPPGRRLRRTPDLNSVYRTEGLPPVVVEPAAPGEQRVVNTCGGVQLLRRIHQPRIRYSYRKAKPGLTAAQCAASLILPTKTEPERERGIPASFSGSSG

SEQ ID NO: 321651 - protein, 442 aa, unidentified
MYLPDWKWIPIRKGLLLMSNKVIFNLDELFISVGIDVGADFSWMSIALPNQQFVGKPYKILHNSIDSLTTAVSKIKEAEELYSLESRIFLESTGIYHYPLFCYLRDKGFNCSVINPIITKNSTNINIRKVHNDRFDSKKAALVGLKPDLKVSLMPSDLALNCRNLCREYYDLMDNRSAYVNKLQGELRMAFPQYLGIFSKVTINTSLTLLETYTSPSAFLKADKQEIIDIIKSTARFGLTYAQNKYNAIIQAATDANQFGYIIDSNIKRIRLYISFIRKYDEEINSILESLHELVDANEDADFVKQIHLIETFKGAGFLSAVSIMGEIGDFSAFSKPKQLFAYFGLDPSVKQSGKFEGTKVQMSKRGSAIARRVIHTLTLQSISISRNREAKNPVLREYYLKKCDSKPKLVAMGAVSHKVCNMIFAIPVSYTHLTLPTTSRV

SEQ ID NO: 321652 - protein, 343 aa, unidentified
MQITTIGLDLAKRVFQVHGVDASGNVVIRRRLQRAEVAAFFGDLPPCLVGIEACATAHYWARLIGGSGHQVHLIPPAYVKPYVRRNKTDAADAEAICEAISRPSMRFVAVKSAQQQAGLLHHRARDLLVRQRTMLINAIRGHLGEFGIIAPAGRHRVTDLIKVLQGTVDADLPALAREALQILFAELSALEVRIKAIEAAIVREHRSNAVSRRLATIPGIGPITASAIAGTIVDHLTFRSGRELAAWIGLVPRQHSSGGKQKIGRVSKQGDRYLRRLLTIGATAVMRRLTGKTDGLSLWVRALLDRRPFRLVSLALANKMARIAWAVMVRSEPYRTALTIATA

SEQ ID NO: 321653 - protein, 417 aa, unidentified
MKVFYLGVDVSKKKLDLCLRSNGKDILYDVIPNDLSSIKSWLTRTFEKFFLSEDSLVVCAEHTGQYTYPLVCATKSIGVYLCLEDAAKIKYCHGIPRGKNDKIDACRIAMYAERYNDCLQPYTASELIIQKLKNLSTERSMLVADRAKYQSQLKDQVDYMEHSIYIAKCNRVEGIINTFTDYIAQIDLEIKELINQAPVIAHQMDLLMSVDGVGERVALKMIMETDAFTSFTDPRKFCCHAGVVPFVYVSGSSQRSKNRVSNRADKSIKHLLHMAALSVSQVKNSPLKKYYDRKVEEGKNKMSVLNAVRAKLVTIMFAVIRTDAFFFEKLSKFACVIHKNRGGSTRPDERDFSYLSTAFTNIFHRSSHLYALMRSNIIVCIYGIGYNFFQLFKAVICTVKKPPILDRVIHPFSQSIM

SEQ ID NO: 321654 - protein, 412 aa, unidentified
MDTMYRCCAGLDVHKETVAACVRRVDTAGRIDKEIRTFGTTTGELVKLLDWLVARGVEAAAMESTGVFWKPIWNILEGSIKVILVNARHIKNVPGRKTDVKDCDWIAQLLQHGLLRASFVPERPQRDLRDLTRQRSQLTAEQSRVANRIHKTLEDANIKLGSVATDILGVSGREMIRALIAGQDDPNALADLARRRLRAKLPQLREALRGRLSDHHRFMLSQLMDHLAYLDRQIAAFDQRIEELMRPFQEAIRRLSTIPGVAARTAQNVLAEIGTDMSRFPTDQHLASWAAMCPGNRESAGKRKSGHTNHGNRWLRTALAQAAWAASHTKNTYLSAQYRRLAGRRGKKRAIVALGHTMLVMMYHMLRGGEDYQELGHDYLDKLQPHRLTRYLVKRLESLGHEVTLSPAAPAA

SEQ ID NO: 321655 - protein, 359 aa, unidentified
MTTQSTTTSCCVGIDVAKATLDVALGETAPVWQAANAPDGIAAVVRRVQAVQASLVVLEATGGLERPLAVALAQAAVPVAIVNPRQARDFARATGQLAKTDTIDARLLARFGAVMRPAPRDLKPALTQRLSVLVARRTDLVGMLTAEQNRLHSLPADLRAEVAEHVAWLRKRRDAVDAQLAALIASQPAWREQAARLQSVPGVGPVLTATLLADLPELGQLSRQQLAKLVGVAPLNRDSGTRQGTRRCWGGRRSVRTALYMSTLVATQHNPVIRAYYQRLVAAGKLKKVALVACMRKLLTILSALVRTRSHWDPQYRQPLTTPTQHNRTDQVRPSAVPSRVGPAQSSTAPAHAAEVAVT

SEQ ID NO: 321656 - protein, 400 aa, unidentified
MRVVFGIDVSKASSEVAILVNGEKVHGYTISNDALGFARLLGDLRTVHKPEIIFEATGVYSRRLQAFLDEHGYAYTRLNPLEAKKQLDSLRVRKTDQIDAEKLAQSQFVLNRKTTYVQEEVYQNLRDLSRFYQNLTEDIVRAKNRLHKVLQVTFPELENILSTPTGEQYWNLVIAFPCKDFVLELSKDKLSESIRQSTSKRISDKRVAYLAEKLIALANQSYCAVKKTSPMLEEVRYYTKELLRLSEQRQAVLDEMVELAQPLPEYDILLSIPGIAETTATSIIGELGDIRRFQSANQINAFIGIDLRHYESGNFLAKEHITKRGNPYARKILFRCIHNIASASHTNPCHIADFYEKRKRQSQTTSTKPHTIASIHRLIRTMYYLIMHNKLYDYASTQNR

SEQ ID NO: 321657 - protein, 491 aa, unidentified
MNSIFQRSNPAIEKLFAEAGSPKKVMCVPIDYAKRQHTALVCNGEGMQLRGTFNIHNTAEGVDFLEDIIKGLCKKHSIRKPHVFFGGEDCTAFCYNFIHALLERHYLGIGINAYEGAEARQNQLASTDKLDLLGIASVLINKKRGRTLSTEYGQARLMRELTHQRDSLVKAHTASAYRTHHWVDQLMPGFLDAKQSGLEPFCDASLWLMSQNFSPRQLLARKSDVLAERLRLFMLQQTDAKVVQLKALARGTLPPPAGLTETLQDNLAREVRLYQHLRDTLHEINRQIARRLAATPGAMLTTVPGIGLVLASGLYAEIGEPARQRNLASLAAYAGIVSRLKQTGGPDNPARALGRSRRACVPLKRRILDIALSIGQYGAEELKADYRRREEAHQDVRFTMGRRMLRICAHLVQCQDFFLPPSLLGNTDSETRKTYYARIWDPILIKWRNAGAIQQAFADGAPLEQWRTMLNELYHLNLSKLSPQYERLRDR

SEQ ID NO: 321658 - protein, 384 aa, unidentified
MNNLPPAGTHDDAVRCVLAIELSKKSWIVAVNTSLSDKVSRHTLKPCDVKELLDLCERIRTRVARETKKRMEIVSCYEAGYDGFWLHRLLEAHGIRNYVIDPASLQVDRRARRAKTDHVDVERLLRSLMAYLRGEPKVWSVVRVPSVAEEDDRRLHRERGRLINERIQHVNRIKGLLAIHGIYDYQPLRRDRMQQLERFRTADGRTLPPRLKAEILRELQRLELAIGMIKTIEAERDAIASAKTETEHTSEKKIQDLAKIKCIGPEFANTLVGEVFYRSFDNRKQLASYVGLTPAHFQSGAMCHDQGISKAGNAKARTVMIELAWLWLRHQPDSPLSIWFRDRVGKLKGRIRRITVVAVARKLLIALWRYLETGLVPEGAALKV

SEQ ID NO: 321659 - protein, 337 aa, unidentified
MKPIIHTTTSPSFFLGIDVGKKDLFCHIIGPDQAYSERFDNSPAGIKLLIKWLQKLAKLAHFSVCLEQTGHYGDSIADALYKLQIGSLHLVNPHRIKAYGMQKLRRNKSDTADAKLIARFLSAEHADLRPWKPQSSAQKRITKLSRHADSLTQDAARLKTRLSAEPEKTVATSLKRTIEFLKKEIRATRKEIITTIKSDASILGNFKLLLTIPGIGTIAAQTVIAELPNLPEFEDARQLAAWAGLTPSHFQSGTSGKTQTPITKIGSVHLRRGLFMPAMTARMNNPLLKAFGDRLKENGKKPKQIIIAIMRKLLHQIYGILKSGQPYNPEKRGYVGA

SEQ ID NO: 321660 - protein, 416 aa, unidentified
MQVLHARCAGLDVHKDTVVAAVRLAENGEVQTEVRTFDTTTPGLLALSDWLAEHGCTHVAMEATGVYWRPVWHILSDGDFNLILANAAHVKNVPGRKTDVADALWLADLLAHGLIRASFVPDPATQEMRALLRTRKQLTREAASHVQRLQKTLEDANIKLASVLTNIMGASGRDILEALIGGETDPEQLLTLLRRGVKAPAEKVKAALQGRVTERHRFLLRLHLCQIDALDAAITDIDKEVNRELDPFRQAVRQLRTIPGISDLTAQVIVSEIGINMTRFPTAGHLISWAGLCPRNDESAGKRRSNRLRKGAPWLKTTLVQCAWAATHKKASYLRAQFQRLTQKRGPKKAICAVAASILTAAYHMLRDGTLYQDLGPDHFQRDSPEAHAARLARQIARLGFNCTITPASSEEVVSV

SEQ ID NO: 321661 - protein, 392 aa, unidentified
MRFVGIDIGAERHSVAIVDDGGRVVSKSVSFEEGAAGYRRLGELLGSPADCLIAMEATGHYWKNLFASLAAEGFQIVLLNPLRTRRFAEEELQRTKTDKVDAVSIARFAAQKRPTATTLHGPAIEELKQLVRLREQSVQHLGDRVRHLHKAIDLTFPEFTRHVRGLDTELATAILLRYPTAKALRTISVRKLAGLCYDGRRGIGDDLARALIEAAKISVGHFSSEPYQLQVRYACEDIVSLRTRVRGLETDIELRLNTHEVGKLLTTIPGVSTLTAARIIAETGDPARFRSAAAFASYIGAVPRLHQSGKKRYSGKPAIPLGNARLRRDLWMPVLVGIRLNPWLRTYYLRLRAAGKRPKVAIIAAMHKLLIAIYSVAKHRTPFVLQLPATLT

SEQ ID NO: 321662 - protein, 343 aa, unidentified
MKVTTVGIDLAKQVFQIHGVDEHGKAIIKKQLRRAQMAEFFINLPPCLIGMEACGSSHYWARKLQGMGHTVRLMAPQYVKPYVKTNKNDAADAEAICEAVGRPNMRFVPVKNIEQQSILAVHRVRQSFVQARTAQANQIRGLLGEFGLVLPQGIHHIAQKVPELLEDASNELPGSFRLLILRLLDQFKELGRQVQELECQIVQWHHEHEDSKRLEQIPGIGPITASALVASLGDVKSFHNGRQLAAWLGLVPRQHSSGGKQTLLGISKRGDTYLRTLLIHGARAVVQVAERNPEHSPTCHWASKVLRRRNKNIAAVALANKNARVAWALLAHGRQYQTDYVPA

SEQ ID NO: 321663 - protein, 362 aa, unidentified
MTFFIGVDLHKTQFTVHVRTEERSETLNQIRQYKTDDKGYADFMTRIKAYKEIGAVVKIGVESTGNTRFFKHEVEKAGAEVTVINTLKFKVITESAKKTDKHDACTISEFLSKDMLPESYLCSKETENMRRLLKSRERLVRSIVGQKNEVHALLVSMGLKDESRSLQSKKGRQRVLDVLESNNDNVLEAQSVQLMFEIIRQMEESVKIIEKQLTELTKDDQMVNRLLSIRGCGKITAWTIRAYTEDMGRFASAKKYAAFCGLVPWVSDSNESIRHGKITKRGPQELRVSFVQLVMGIRRCKDTACWRLMQRYEYMKTHKGSGKSIIAAARKLAEIVWAMLSNKEDFDCEKMKGTYNRMNLAV

SEQ ID NO: 321664 - protein, 450 aa, unidentified
MAKKSDKRDRRMPVMRPHAAGMDIGAEEIYVAVPDDRDEDPVRCFSTFTCGLRGLADWLQKCGIETVAMESTGVYWIPVFQILESRGFEVFLVNAHYLKSVPGRKSDVSDCQWIQYLHSVGLLQGSFRPPEEICAVRTLWRHRQSLLQMAAEHILHMQKSLSQMNVQIHHVLSDITGLSGMTILDAILAGERDCLKLAQLCQPSVKCPREKVAQALEGDYRPEHLFTLKQSVAGYRYYQKQIAELDHEIQQLMRAVVSAPDVQDHIPDRTKRTRYQRQGNDPAFDLRAELYRIAGVDLTDIPGVSAITAQVILTEIGPDVSRFRNASAFASWLGLCPEKRVSGGKVLSCKTRKVKSRAATALRLGAHSLCRAKDYFGEFFRRMRAKLGTAQATTATAHKIARVLYHVMRTREPYAETIFHKCDEQARRRAEQRLRKQAAQLGFQVIPQAS

SEQ ID NO: 321665 - protein, 325 aa, unidentified
MEAKKLCCGIDVSHTKLDVCYQNNLGEMFYLQVGNNNQGFAKIIEHTGTGYHFVMEATGVYYIRLAFYLHSRGCVLSVVNAMAIKRYIQMHLERNKTDKKDAGWICRYAIEQHPAYWQMPDSAYFESKQLYNTIREFTEQIKRFNNQLHSLRLLPVPSKDTIKSLEKVIVSMEKEIKQLEQKLQLLLEQWQPAQLKNVSSVKGIGKRAAAMLIVFTQGFKHTQNHRQLISFAGLAPTQYSSGSSIQGKPRIYKRGGKNLRDVLYMCSMNAMKTNPACKALYDRLRTNGKTGKQALVAVMNKLLKQVFAVVKNNSLYQPNYCSAKP

SEQ ID NO: 321666 - protein, 432 aa, unidentified
MVSAAVGGVVSEQGQADVEIVARVAALDIGKAELVCCVRTPGPAGSRRRVQEVRTFSTMTRSLTVLADWLAGLGVTRVVMEATSDYWKPPFYLLEAAGFEQVWLVNARDVKHLPGRPKTDKLDAVWLCKVAERGMLRPSFVPPEPIRRLRDLTRYRVDLVGERNREKNRVEKLLEDAGIKLSVVASDIFGVSGRAMLAALIAGERDPQTLAQLARSRMRTKLPELREAFTGRFTDHHGFLLARMLAHIDAIDADIAVIEGRIEQLIAPFAQAVARLDEIPGIGVTAARAVIAEIGLDMSRFPTAGHLTSWAKFAPGVNESAGRSKGNGATGHGNRYLARVLGEAAVGAARTDTFLGERYRRIARRRGKKKAVVAVGRSILVIIWHLLGDETTTFTDLGSTYYDTRGGTQRAIRNHVHALHALGYQVDLRPAA

SEQ ID NO: 321667 - protein, 349 aa, unidentified
MSEPYAGRQIVGIDLHRRRSVLVRMTEAGERLETVRISNDPEYLREVMTRAGEAPEVVLEACYGWYWAADTLAELGATVHLAHPLGVKMFSYRRLKNDERDAADLADLLRMGRLPEAWIAPPATRELRGWVRHRAKLVGLRSNLKCQVHGILANAGITVPMSDLFGASGQRLLATADLATASRSRIDSLQRMITALDFEVELFAKLVAGRLRTHPGYQAIQLIPGVGPILAAVFVAEIGDITRFRRPEQLASWAGLTPKHHESDTTVHRGRITKQGSRLVRWAAIEAVQRLPGHTRIGQVRDRVAARRGRNIGVVAAARELTELVFYGLRDHHVHALAVHSPARTPLPA

SEQ ID NO: 321668 - protein, 344 aa, unidentified
MTYYAGLDVSLRTVNICVIDDQGDFFAETKLCSDVQDIISYLDDLSIEIESVGLEAGTLTQYLTYGLQAAGFEAICMEARQVKAALSAMRNKTDKHDARGIAQILRSGWYSRVHIKSMQSHHIRMLLSSRKAVLSKCIDLENEVRGLFKIFGIKLPPKLAHGAFDAAVRGIIETDAALSHALLPLLDARLVLYHTFRVLDNRTRHLAHDDPVCVRLMSVPGVGFITALTFKAGVDDPLRFKRSRTVGAHFGLTPRRFQSGEMDNPGRISRCGDSDVRCTLYTAANALLTRSSRWSPLKAWGMKLAKTRGHRRAVIAVARKLAVILHRVWIDDTQFRWGTEGARS

SEQ ID NO: 321669 - protein, 315 aa, unidentified
MAMLVAQTKPVVGVDVAKNELVIYQDQSDRLEAIPNNKASISKWLRTLAGTVSIAVEATNTYHVLFADMAYEAGCTIYMIDGYQLSHYRKGVNVRAKTDALDARLLARYLKKEADELHPWVPPCPLYRQLLSLFRRRAALVQARTGLVQSWSNEPLLKTAFAAQINSMKRLEALVEKKIKDVLQRAELMGQVSRCMKVEGIGFLTAARLVTTFQRGEFSNANAFIAFLGLDLRVSKSGQSDGPRRLTKRGDPEARRLLHNAAMSGSRTAAWKPFYEEQRKRGFSTTQALVMLARKMARVVFALLKTQSEYRSKAA

SEQ ID NO: 321670 - protein, 343 aa, unidentified
MDHFAGLDVSVKETSVCIVDDTGKIVREVKVASEPEALLAALKNPAYHFTRIGLEAGPLSQWLFSALAEAELPVVCVETRHMQAVLKAQINKTDRNDARGIAQMMRVGLYRPVHVKTLRSQKLRMLLTHRKLLQSKAIAIENDLRGTLRNFGLKVGMVGNVKFEARIKELVESIPDLAELVEPLLIVRRAVREQIVVLHRRLLAIVRDDEVCRRLMTTPGVGPVVALTYRATVDVPARFRKSKAVGAVFGLTCSKYQSGEIDRSGRISRCGDEMMRVMLYEAAQSMLRSKKWSWLKAWAMQIARRRGMKKAIVALARRLAVIMHRIWVDGTEFRWTREQAVAA

SEQ ID NO: 321671 - protein, 406 aa, unidentified
MFYLGIDVALNTHRLVILDANGERVSNGISFQNSAVDFQKILVNLKELSINSDNSISGLEATGNNWENLYCFLTSNGFKTIVLNPHQTNKFREALRKKAKTDDIDAFVIAGLLRSNEFASSYIPEDKIQTLRELTKLRYEFIKDRKNYQRQTLALLNIIFPEYRKTALKNPFAIASIAIFKAFPTAKHLSKTLPKHIEKIVRSIKGNNFNIKEIENLISIAKTSVYSGRCHESRALTLNILLTQVENFDKSIQQIEEQINQILSPESNDDMNNFPGSNLLTIPGVGPKTLAAILSCTGESGQAFPDGVKLIGHIGFFPQIYESGETKRANKLSNKGPAYLRHALYVASVACIKHNLQLRNLYHTKISQGKKPKQALICVAKKLAHICLSMLHSGQNYNPARVFSYV

SEQ ID NO: 321672 - protein, 264 aa, unidentified
MPDYSYFCGIDLAKNHFSLHAVDQNGKVLLHKSVTRSKLLTTIANMPLMRIGVEACGGAHYWARTLNKLGHDARIMAVKYVVPYRTKGKNDLNDAVAICEAVQRPSTRFVPIKSPEQQAILSVHRIREHWVRERTALMNRIRALLSEFGLIIPVGRSSLLKHVPLMLEDTENELPHLARTVIADAYHHLGELNQRIADTEQVCDSFAKVSTNVQRVLKVRGIGPQTATAILASIGNGSQFDQSRDFSAWPGLIPKQYSTGGSLA

SEQ ID NO: 321673 - protein, 344 aa, unidentified
MELFTLGIDLGKTTFHLVGMNQRGEVVLRKRFSRAQLLHFTANLKVELIGMEACGGSHFLGRALREQGHEVRLIPAQYVKPYVKTNKNDYIDAEAIAEAVGRPTMRFVPVKSDDQLDLQSLHRVRERWVMRRTAVVNQIRGLLLERGTTLRKGRRYVDEALPGILTGGSSKLSGAVLVLLAELKKELEQLAEKIDSADNSIEKIARENEACRRLVKMPGVGPVTATAIIATIGNGAAFRKGRDFAAWLGVVPEEHSTGGKQTLWKIPKRGNQYLRRLFVQGARAVMQHRTKQSSGLSAWLAQLMARTHQNIAIVALANKLARMAWAVLAKNEVYRPPLLAGNAI

SEQ ID NO: 321674 - protein, 355 aa, unidentified
MDSKKYIGMDVHQASTSIAVSDATGKLVMECVVETKASTILEFLRGLRGSLWVTFEEGTSAGWLYDLLKPHVAQVIVCNPRKNALLKAGNKNDRVDARKLSDLLRAGLLTPVYHGESGVRTLRELTRSYLTITTDLTRVMNRIKAVYRSWAIPCRGQEVYSPRRRAIWLEKIQEPGVRRRAEKLYQQLDALVRIRRETRSELLAESKKHAAHQLLLQIPRLGPIRVSLLIALIQTPHRFRTKRQLWAYSGLALQTRSSGEYRYMGGQLKHSGKLPALRGLNVNHNHDLKSVFKSAATRAGTSKDPFVIFYQNLLAKGIQPQMARLTLARKIAAIVLNVWKKGEHFDPAQLNQHAA

SEQ ID NO: 321675 - protein, 407 aa, unidentified
MQIIHERCCGLDVHQKTITACIITPKEKVIRTFGAMTNEILELVDWIKEHQCTHVAMESTGVYWKPIYNLLELSEINAMVVNAQHIKAVPGRKTDVKDAEWIADLLKYGLLKGSYIPSREQRELRELVRYRKSLVEERSREVNRLQKILEGCNIKLSSVVSDITGVSARSMIEAIISNINDPKLLSKLAKGRLQSKKENLEQALHGLVGPHQRKMLAAQLDHIDFLDGKIKELDQEVEERLRPFEEELELLDTIPGVGRRSAEVILAEIGTDMDRFPSDAHLASWAGMSPGSNESAGKRKSGKTTKGNKHLRSTLVQCARAAARSKQTYLSAQYHRIAARRGGNRAAVAVGHSILVIAYHILKNRQPYHDLGANYFDERKSAAVLKSSVKRIEALGYKVIVEEKIAS

SEQ ID NO: 321676 - protein, 397 aa, unidentified
MYIVGIDIAKRKHEAAVIDGEGAVIIKPFSFTNNCSGYNRLLAMLTKAKLPLDEVSFAMEATGHYWLALFTRLQKEGFRVQVINPVQTNSIRSFYIRQAKTDPRDALLIAEVIRFGHFSESTLHPENIYELRELCRGRHAIVSMQADVKRKVVALLDQVFPEYETAFTNLLGDTSMAILQTCPTPKELSEMPLEELCHLIEVSSRKRFRMVKAQELQELARNSFGFAMAGDVFSTMIRLYAKHLVFLKQQVQEMDRKIAEIMDTLDTPITTITGIGPTLGAYILSEIGDISRFSSAAKLTAYAGIDPTMRQSGEYNGVRNRMSKRGSPYLRHAIWLAASSAVLHDPALKLYFQKKRDEGKPYMASVGHACRKMVSIIYAVMRDNKAYTPYIPNEISA

SEQ ID NO: 321677 - protein, 342 aa, unidentified
MQISTIGLDIAKNVFQVHGIDANETVVVRKRLRRSQVLAFFKALPPCLIGMEACATAHYWARELTKLGHRVRLMPAKDVKAYVKRNKNDAADAEAICEAVRRPTMRFVQVKSAEQQGQLMQHRTRDLLMRQRTQSINALRAHLAELGIVAAQGDKGVKELLSIVADEKDARLPIDARASVIVLAAQLQAVQTLIGSIEKRIKTQHRSNEASKRLETIPGIGVIGASAIAATVADPTVFRSGRNFAAWIGLVPRQDSTGGKQKLGPISKQGDRYLRRILVVGAHSVLRRAKQNPEKYLWLTQLLARRPFKVVAVALANKMARMAWALLAHGGTYRAPVLAAAA

SEQ ID NO: 321678 - protein, 272 aa, unidentified
MTSFVGVDLHRNNFTYCIRENGEEKKIGKCEISELKGFASLLGKDTAMAVEATGNTFMFCRFLKAHVGRLVVVNPSQFKVISTSTKKTDKHDAKILAEFLEKDMLPEVRMKDDLQAKISSLTQTREKLVQLRTVLKNKVNNLLAANFIVLKREELSTETGLRKALSFHFDPITDTELFVVVEQIRSLNQSIEKLDKTIEDHGSKMDGFKNLKSIKGIGSKGAATLLSTIGNIHDFRSSKQLAAYIGIVPRVSNSNDTVCHGRITKNLSLIHI

SEQ ID NO: 321679 - protein, 425 aa, unidentified
MHSISNKKINQVTDQTLVVGMDIAKKKHYACFVDERGRVLKKPFPVLQSKEGLEWLYQCIVEAMKEFGKTEVIVGIEPTGHYWLNLAYFLDEKGIPLVMTNPMHVKRSKELDDNLPTKHDAKDALVIARLVKDGRFSYPRILKGVEAELRVGATFRSKLVEEQGAVRNQMIRWIDRWFPEFTQVFPSFGKMALAVLEYTPFPSDLAGKELEEVLALYRQSEGLQSPQRPKAKKLIELAQHSIGVTEGQQMARIEIATLVRRYRQLEKEIEALTEQLIELVQTSVEYEWLKTVPGLGDATIVELLSEIGSFSHYQDPRQLIKLAGLTLREHSSGQHKGQKRISKRGRRRLRALLFRVMMPMIRHNEAFRQLHDYYTTRPDNPLRKKQSIVVLCGKLLKVLHAVCTKHQAFDAKRMMQDIFGLETAA

SEQ ID NO: 321680 - protein, 340 aa, unidentified
MNANSNFFIGIDVSKPFFDASLMAVINHQKQDIETARFDNTAAGLKAFAKWLKTFKVAMDQNTLVVVENTGIYHRLIWSFCNDKGLSLHIGNAAHIKWSFGIARGKNDKIDSIRLCKYAYKEADELRASPGLNPVLMQLKDLFTSRTRLLSQVNSNKQYIKELKNVNDPTVQKLLEQAYQIAIQGLLQSIINIETLISKIIAENADLKNNYELLITVPGIGHLTAVYLICCTTNFSVKITGKQLACYAGVVPFENTSGISIKGRNRIHHMANKELKKLFHLSALAVIQYYPEFRTYYNRKKEEGKHPMSILNAIRNKIALRVAAVINHQKPYVNNNLIAA

SEQ ID NO: 321681 - protein, 445 aa, unidentified
MSERTIAREAPGIRATHDSATMHATQRKHMNTWHQLTHYAGFDWARDHHDLVIVDPQGQIVAEFRIPHTLAGWQDFRQKVSAYPALGIVIETNQGAAIDQLLQIDLTVYPIHPVAAQRYRERKAPSGNKIDRLDAWSMADALRLDGRQWKALQPLDPLTQQLRLLCRDEISLIEQPTALINQLQQALSEYYPAALEAFEDWTRPSTWKFVIEFPTPQILLKRKRSRWEKFLHKHKLWRPDTAEKPLETFARAQAFCGSSAVPAAKSLLAVSLARLLGLLQGQLDEYRTQIEKLFEQHPDSGLFGSLPGAARFLAPRLLGEITADPERFDEPQALQCLAGTSPVSYQSGQIHKVQVRHQCHKLLRHVVHLWADCARHAAPWAQTYYQKKRQEGMSHACALRCLGQRLLKILWKIIQTRSPYNADVHTKNQLAHGSWVLQLMSPKPA

SEQ ID NO: 321682 - protein, 285 aa, unidentified
MVEQAVVGIDVSKAKLDVAIWPGGEQFTVSNDRHGLGELLRRLSPLAPGRVVLEATGKLEQLAVSELAAAGLPVVVINPAQVRHYAKARGKWAKTDPIDARLIAEFARDLEPELRPLPDAETQALAALCQRRKQLLEMERMENNRLQRAPRANQKSIKAMLRFLRRQIEQVEKQIEDSIRSSPLWQAKRELLESIPAIGNVNSSTLLARLPELGQFTRQKICALVGVAPYDDDSGQWHGRRHIAGGRAGVRRVLYMATLSAVRVTRRYGPITNACSAAPSSQRQP

SEQ ID NO: 321683 - protein, 376 aa, unidentified
MKEFSKYVGLDTHKETIAVSVADAVGGKARYFGEVANRPAAIKNLLQRLSPEGEVVSYCYEAGPCGYGIYRQITELGHDCMVVAPSLIPRRPGDRVKTDRRDSEALARLHRAGELTAVWVPDEEQEAMRDLTRARADMKHLQRQSKQRLNAFLLRHGWHYISGKSKWTQAHWRWLEQVKFARPVQQIVLQEYIDTIHTLGGRVVALETEMSSAVQAWSLWPVVEALMALRGCRLITAMTVMAELGDISRFDTPRQLMAFLGLVPSESSSGPNRRRGGITKTGNGHVRRLLIEAAWCYRFPARKSAPLQRRAEKTSTAVQAIAWKAQKRLCARFRYLDQRGMRRVKISTAIARELSGFMWAIACEVMASPKNTVEQH

SEQ ID NO: 321684 - protein, 352 aa, unidentified
MKRYYGCDAHKKYSVFAFMDEEGNKGPSLRVNNERDQFSYFLDTLPPGSPIAVETVGNWYWMVDEMEQAGHKPKLTNAGKAKLMMGQINKTDKLDAKGLALLLRNGTLPSVWIPPGELRDQRELPRMRMAFVRVRTMLKNRIHATLSKHAIEIKEVSDIFGVRGRALMKSRLSELPPQTRRSVEAQLELMDQVEEHIRVCEKQIEEVVKRTPAMKLLTTLPGVGSVLAVVIAMEVGEIKRFPRAENLASYSGTVPRIKESGGRIRFGKVRPDVNRYLKWALIEAANIIVLNQARWPGRHVVQLYRRIRQRRGHAKAVVAVARHLAEATYWMLMRNEEYKEPKKNEPVSSTRK

SEQ ID NO: 321685 - protein, 362 aa, unidentified
MNRNTGMSAGQIIGTLNGLQVMGLDIAKHVCQLHTVDMGTGEIANVQIKRAKVLEYFVNKPKSLIAMEACGGAHHWARELTALGHSVRLLHAKIVRPFVSGNKTDATDARAIWLAVQQPGVKFVGIKTATQQATLTLHRQRELLMKMRTMQTNALRGLLYEFGATFAQGRKALFKDVEQALEELSTQLPQMVRDSLREQVGRIKEMGDAMLAIEKRLALQLKADPHMQRIAQIPGVGLLTATAAIATMGQASAFKSGREFCAWLGLVPKQTGTGGKVRLGGISKRGDTYVRTLLIHGARSVLAHTKEPSPWLEQIKERRPANVVIVAQAAKMARTIWAVTAKEQSYQRGFQSVRPSAAMHAA

SEQ ID NO: 321686 - protein, 401 aa, unidentified
MTATHVHQFTAPTLNLYLAFELSWGEWKLAFTTGHGQAPRYRTIPARDLMRLREEIARAKRRFKLPADAPVVSCYEAGRDGFWLHRYLLSQGIHNLVVDSSSIEVNRRQRRAKSDRLDAFKLLSMLLRYQGGERKVWSVVRVPDVAAEDGRQLHRELMELKDERTSHINGIKGLLASQGVALADVDQDFSEELSKFKLWDNAAVPADLQARLRRAWERWQFVDRQVKDLENERKRRIRCDQTPHVEQVRRFLGMTGLGVNGAWLLVHEFFSWRQIENRRQLGGLVGLTPTPYQSGESRREQGISKAGNRHMRKLLVELAWGWLRLQPDSALSHWFGRRFAWGNKRSRKIGIVAVARKLLIALWRYLEHGEIPAGAQLCSWRPKVNLREPKELTAKEAALSP

SEQ ID NO: 321687 - protein, 350 aa, unidentified
MKIVGCDFHPSYQQVAVFDTLTGEVEERKLIHADGQAEQFYQELEAPALIGIESVGNAQWFVRLVESLGHQLWIGDAAKIRASYVRKQKTDRRDAGHILKLLLENRFPRIWVPNQQQRDLRQLLLHRHKLVGVRTRLKTELQHLALNLGIQKKRQLWSVRGRAELEKLPLEGWTKHRRQDLLALLRVVEPQIEELNKAAAEAAAASPQARLLMSQPGVGPLTALAFVLTIGEVARFARSKQLASYLGLIPSEHSSGSKRRLGSISKQGNVFLRTLLVEAAQSAVRHDPLFRKEYKHRCHHKPKGVAKVAAARKLAVRLYWMLKTSKPYPEVLHLEGSPRHPVAAKVSPSC

SEQ ID NO: 321688 - protein, 322 aa, unidentified
MVDKVTEAAVVGGVDTHKDLHVAAVVDQNNKVLGTQYFSTTRQGYRQMLAWMTSFGTLKRIGVECTGTYGSGLLRYFQNAGLEVLEVTAPDRMERRKRGKSDTIDAECAAHAAFSGIRTVTPKTRDGMIESLRVLKTCRKTAISARRVALQIIHSNIISAPDELREQLRNMTRMQLIRTLGSWRPDASEYRNVTNVYRISLKSLARRYLELHDEIADLDVMIAAIVDELAPELIKRNAIGYESASQLLITAGDNPQRLRSESGFAALCGVSPVPVSSGKTNRYRLNRGGDRAANSALHIIAIGRLRTDAKTKEYVARRVAEY

SEQ ID NO: 321689 - protein, 394 aa, unidentified
MLNSGMERITDIGTLLSRFQENEEETMVTRFHGIDRHKKYSTVSVLDRDGHETRFLRSCQMEAYLGELGPEDAVVMEASCGSFYWAGRVEATGATCYILDPMRFRIITDSWNKTDRQDARNMAKALWVFLVTGEFGIPTVYKPSETIRTLRRLFASYTLLNRQIRMLKNTIQAMLAEDGVVLCSADRSRLFKGKESVIDILAGHHLSEVIVEALQIQVDLLCTIAESKERLGRRIVEASAPLDKQIQLLITIPGITPLTASAFLADVGDVHRFPSLRRMNAYLGLVPRCHDSGGKSRPGHITRESRKLSRTILTQSIYQTVKGTPGWERDYEKLKTRRGSGRARIAMIRRLCGVMRRMLIQGKQFHWLKEELYRRKLVEYQKTLEERKKEQDAA

SEQ ID NO: 321690 - protein, 316 aa, unidentified
MDYLGVDVGKYDLRVALMLSGEKFRSRKLANTPEGHEQLLGWLEGKAGDTVHVCLEATGSYGEQLAERLHDAGYTVSMANPARVKAFACSEGVRSKTDAVDARVLARFCQAHRPEPWTPLPPQLRELRALVRRLDALKQMQQQEHNRLAEAHPRVAPQIQGHLAYLEQQIEAAEQAIRDHIDDDPDLRHKAHLLRSIPGVSETTAAWLLGEVRFELYDGARQLAAHSGLTPSHRQSGVSLNGRARISRQGNARLRKALFMPALAAIRCNPVIRAFAQRLRRRGKHGSAVVAAAMRKLLHIIFGVIKNNTVFNAQIA

SEQ ID NO: 321691 - protein, 399 aa, unidentified
MRLAYSEGLGFFCERIDIRKISLESSAVEKIGNSEFQQKAPNYYNFDVIISISLSDEMTIKATTKAVIKYLEAIKKKHREEILFACGYEAGPTGYGLCRGLQKAGYGCVVMAPTTMSNPDGKRRVKTDRIDARAIARILAYKSYSQVHLPSEEMEALKEYTRARDAKKRMFKKAKQELLSFLLRNGKSYPESGNYWTEKFFKWVKTVQFSEKWMQEAFNEYLAEVYSLKHKIELMDAKIKEIAGLEIIKDKVDKLVCFSGIDVTTAVETAVEIHDFTRFATAAQFVSYLGLCPGEDSSGKTKNMLPLTKAGNKRVRALFCESAKAIKRTNPYGQKSKRILERQKNASPEIVAYADKATKRIRTKMKHLEERGKNYNVSSAAGARELACFVWGMMNGKIA

SEQ ID NO: 321692 - protein, 355 aa, unidentified
MKQGKQLDFSGQNIFVGMDVHKNSWKICIRNEEMELRTFSQQPSVKTLSNHLKENYPSATYKVVYEAGFCGFGYQREFTAVGIDCIIVHPADVPTSDKDKHRKSDTVDCRKLSKTLCNGDLTGIFIPGVEQQDDRGIIRVYQQMVKDQTRFKNRIKGWLAFQGIIIPDEDVYKHWSNNFIGWLKAVPLTPSARISLDILIQGYLQVRAMVLTATKQVRVLSQQERYLKMIKLIRSVPGIGEITALLIITEIGDIARFQTLDQLCDYTGFVPTIHGSGDKETVLGLTHRGHHQMREKLIEASWTAVRLDPAMTMAFNEYCKRMKKNRAIIKIAKKLLNRIRYVLKNQKEYVTAVVQ

SEQ ID NO: 321693 - protein, 401 aa, unidentified
MKRFSGGIDIGSEYHHIIIMDEEEKVLYDQKIRHNISEFHRVVKGLKVIEKKRRGRISFAIEGKNGYSSPFDRILIENGFTLYNVDNLKLKQFRNVFGSEWKNDQRDARMLAKMLKLREHLETEREKAFLVVEKSSLINEKLKILSRHQQTLIDEKVRLQNRLRKKLLEISPEILELGDLASKKLLRFLIKYPDIKKYKKLSLKSLIKIDMIGNKRATLMLEGLRSISIVEELADIYKTIILSYARRLLELKEEIKDIDKELEALGEESREVKRLRSITGVGVKLSSRLMGEVGDINRFGNESQLAVYCGVACIDDDSGKKKNTKAVYKANKICKATIIEIAGCTIRYNSESMTYYTKKRAEGKEHNHALRCLARQLIKVIFKMLKEDRNYIVKEEMKKAA

SEQ ID NO: 321694 - protein, 352 aa, unidentified
MAQNDLVVAGIDVAKDKVDVCIRALSLRRTFASTAEGRRELASWLRRQKVGKAVMEASGGYERDWAKALRDAKIEVRIVDPKRVRSFAQSAGRLAKNDTIDAEMIAWFAETFDEARGQAYDATREQLHQMVSARQALKDMQAKLENQGEHAMPAAIQRMHARILKTISVELVKLEAAISAMIQATPHFAELAEIIESVPGIGRTTSAALIAAMPELGRANNKIVAALLGVAPYDDDSGRRRGERHIKGGRRRTRNVFYMACLGAATQHNPVLKAFYDRLVAKGKEKKVALIACMRKLISILNIMIERRQKWDARTGERMGSRPPAAGGGGARSASLEPSRSQVYVKNTVAPR

SEQ ID NO: 321695 - protein, 367 aa, unidentified
MEPYYVGLDVHSRQSAFVIQDAAGCRVAQGEIPTTRAAFAAWRAHHQLPAGTPVALETGTVAFFVARQLAILELRPVVVDAYEVRLKAHRPTQKSDRRDAAELCEGVRRGMYRSIVHVPDAAVVRLRAILARRRHFVRVQTAQVSAVKALLRAAGLGALSRSLGSEVGWAKVLTAVADHTELATYVGQHRALWRCAGEQVAALDGALAAVERASFAAPMRCLQTIPGVGPIVAATALAVFGDIGRFVGPKHAASYAGLVPTTYQSGDRDAHGRITKRGAPELRAMLCQAAHHASRPTHPLHPYFAALCARRGYKLAVVAVAHRLCRIMVAMLRHEAEFDVTKLAVERGPFARQRVCLYRRKPAARQT

SEQ ID NO: 321696 - protein, 340 aa, unidentified
MVTNFVGIDVSKSKFDLALIKGQDKDHVIQGVFDNTLKGIKSMSNFLEKEHKVQLSETIFCMEFTGVYGYPLTDFFVKKDCHVWIEMPVNIIRSLGLQRGKNDRVDAHRIALYAYKNRDDVKLWKPQREAILKLRDLLALRDRLITAQKSLQMPINEKISMGDKKGAEILRKGCKKSMSSLENEIGQIDKNLDDIIKEDPQLKELFQLATSVPGIGKLTALFMICFTNEFSMYTNPKQLACYCGVAPFEHSSGSSVRGRTRVSHMANKVLKRMLHMGAMSVISRDPELRNYYQRKVAQGKNKMLVINAVRNKLIHRLCAVIKRGYGYQSEIIFKERLVLS

SEQ ID NO: 321697 - protein, 380 aa, unidentified
MPEAVIGLDVGKSSHWACVATRDGEVLLSAPVANREDDLDSLFGRFPDALVVVDQSRNIGALALARARAAGMSAAYLPGLAAHGAARLFAGDAKTDERDAMVIAKTALGIPDALLPVGDPGPTIAAARALAAQRNFLTCENTRNKNRLRSILLESCPAFEALVDLSDGPQLRLMASLGGAWSVADAGPRRAAALTRGAARGKIEALVRSTTSSTRPDASVVAAEDRAVKLLARRISENSAEIEAITAEISALLEGDDTYRCLLTVPGIGPKTASELAISIDIEDFPSHDRLASYCGLAPRNRQSGTSISSVTASRQGNKRLKNLLIFSCNCLTRTEGRWGDYYARCRERGMPHGKALKALARKRLKVIYAVMRDRVPYAA

SEQ ID NO: 321698 - protein, 340 aa, unidentified
MNKINTIAIDLAKNVFQICILSPDHKVIKNKQVSRAQLPTTLMKQDKSIVVMEACYSSHYWARLFADMGHDVRIIPAQHVKPFVRGNKNDHNDALAVAEASLRPNISFVPLKTIEQQDIQALHRIRDKLISRRTSIVNQTRGLLSEYGIIMPKGLSGFTKHIALLLDPADTRLTSRIKCQLAEVKEEYDNLSRRRLSIQKELDEYVLENELCQRLMTIPGIGIINATALFAAIGNASQFANPRELSVWLGVTPKQHASGGKSSMGRMSKRGNQYLRKQLIHGARTLIHRTKGKNDKLSVWIKQLVERRGVNKGAVAIANRLARIAWILLHRNEAYKAVPA

SEQ ID NO: 321699 - protein, 310 aa, unidentified
MQDTIGIDISKDTFDIYRLSDRRHEQFGSDKAGLAALRRWIGKAPVRIVYEATGRYHRDLEAVLGAAGHDLVKVNPTRARRFAQAVSQGAKTDRVDAAMLARMGAVLELDAKPVRSETMHEIRELHIARRALNKDRTACRNRLEAARNKVVLAQLRARLRQVDSQLEQIDTELARLIAEDPALARRQEILCSIPGIGAVTAVAMIVEMPELGMMEPKEAASLSGLAPITRESGKWKGRSKIGGGRRGVRNALYMPALVAIRHNLHLAETYRKLVDAGKPAKLAIAAIMRKLVILANALIRDDRTWTKTAP

SEQ ID NO: 321700 - protein, 346 aa, unidentified
MKPSTIGLDIAKSVFHLHGVDASGAVVLRKRLRRRELVAFFAKLEPSLIGIEACGGGHHWARELAALGHEVRLLSPADVKPYVRRNKNDAIDAAAICEAVSRPSMRFVPVKSASQQAALVPHRVRDLLVRQRTMLINTLRSLMAEFGVVAPRGRGHLGALAARLEEPEAASPSNPAIPAAARPLLLELVAAITALSERIARAEKAIVAAVRKDPLGRRLMTVPGVGPITASAVLATVGDPGRFRNGRHFAAWLGLVAKQSSTGGRPKLGRISKMGDRYLRRLLVLGATARLRCVGREQSPLAAWTRALLARRPARLVTVALANKTARILWAVMARGEPYRPEAAAA

SEQ ID NO: 321701 - protein, 384 aa, unidentified
MSAKHKVADPLEPERHRCARVEMSSNHSRGRGSTMNITTYGLDLAKQVFQVHWVDPDTGEIRRLALLRSEVSAFFAQRPPGVVAMEACGSAHHWGRVLRGLGHEVRLLAAQFVRPFVKTNKTDAADAEAIWEASQRPGMRQVALKTEEQQAVLSLHRIRQQSIKVRTMQAHQVRGLLYEFGVVVPKGWRALLAQAVPILADDRRCAVPELLRGQLLTQLQGLRALTTRITELECQIGSWQRRESECRRIAAVPGVGKLTATAVIATVGDARAYRSGREFAAWLGIVPRQSGTGGRVKLLGISKRGDPYLRTLLIHGARTELARQSRANRQLDPWLKGLLSRRPKNVVIVALANKMARTIWALLAYGREFDRCWSRASMPAPALS

SEQ ID NO: 321702 - protein, 407 aa, unidentified
MPKFVLSCDVAKGKSTFGLFGFEDGSLKTIKRPRNYEHNLDGLMAMYNDFELKDREDVLVMMESTLVYQTPLVVFFKSHGLENVVVENPLLIARKSFGLTKTKTDNLDCFRIADYAFRQQWEKPVQVSKEQQEARTLSRYIDSLLSQATVVQNKIRLYLVAVFPEIEKIAGKSLFSAGFLNLLKTCPHPQTISRKTIDGIVTAMAGNTKRCASYQELARKIKEVSKTSLSSVKEDSAECLILADIVSFYQSLSDRIRTMRQKLSELVRNHSLYSVLTSFKGIGDGIASSLTAELWDIEKYSNDKKLFASTGMAPGKEESGASINKDLSIGKKGNAHVRKWLFVAVQSIITQASMGRGDERIYAYYEKKHNNDKKHYYAAVVACCHKLLKQVYHRYMVLLKTNELIVY

SEQ ID NO: 321703 - protein, 354 aa, unidentified
MFYVGMDIHKYFSQVAVVDESGEVIQRRRLNHTPGEEVSNYFNQFPKDTQVIMEPTCGWGWLSDDISDLGLEVILAHPSNVRLIAESRIKTDKVDALALAQLQRTGFLPQAYLAPKEVRQLRDLFRCRCGLVRLRTILKLQIHALLDRLGIFHRFSDLFGKTGRAFLDNLQVESPYRENLDRQLRVIDLLTKEIGQIEKVIQKRVQKDPQAKSLTTIPGIGFILAYLITSEIGEISRFRSAKKLASYCGLVPSVKQSGGFARYGHLTNTGNTLLRWGFIEAAQVAICYNPELKTWADKIRRKKGAGVAIGAVARKLVNIVYQLLTQKRDYMPRKIKINRSSRPARPLVAPPLAG

SEQ ID NO: 321704 - protein, 413 aa, unidentified
MDAIVERCAGLDVHLDTVVACVLYGKLDIKPKKEVKTFSTTTKGLLELLDFINQKECTHVAMESTGIYWKPVWNILESGAFELIVANAKKIKNVPGRKTDVKDAEWIASLLRGGLIEKSFVPPERIRDLRDLTRLRKELLGEVNRNKNRIHKVLQDANIKISSVLSDVFGETGKSILNQIIGNQCITEEFIYSLYEGRGKSKLKSTPMEMYEALNGKIRGHHVILLGMHNSNIVFLEKQINELEKEIDILLQKERDSLELLETIPGISKISASSIIAEIGTSMDVFKTEKHISSWAGLCPKNNESAGKKKRSGIKSGNNWLRSMLCECAWSATKKKDSRFKNKYWSMVPRMGRKKALIAIANMMLRLIYHLLKTKSTYKELEIQYFIDKDKRREDRIIKELKSKGYLVEKDSL

SEQ ID NO: 321705 - protein, 338 aa, unidentified
MKYKRIAIDTSKHVFTLHGVDEQERPVLRRELRRGQVEAFFGKQDATEVVLEACGGSHHWGRLFSRLGHRVRLIPPQYVKPFVKRAKNDRNDAEAISEAASRPCMRSVVVKTVDQQADGIILKHREMLVSQRTQAINALRGHAAEFGVVAAKGTVKVAALLTELAADGAIPATARAMFEQMGAHIETLDQRVAAVDSELAALHKANPVSQLLAEIPGVGPLGAITMVLTVEPGNFASARHFAAWLGLTPKEHSTGGKQRMGKISKAGNERLRQLLFVGAMSVIRFAKPGGKSASAWLLQLLERKPRKLAAVALANKMARIIWAMMARGEAYRRQPVAA

SEQ ID NO: 321706 - protein, 397 aa, unidentified
MVNVGIDLHKTQFTTCVRSGSGEEFGKYPTTEAGYQLFLREASEWQERGEEVRVGVESTGNTRYFKSRMEAEGIGVTVINTLKMKVVNESVKKTDKHDAATIAEFLEKDMLPESRLCSRESEQLRRLLKARGMLVKANVGIKNQIHALLTAEGLTDVKGSLQSKRGRKRILDTLKQWENGLVAQPLFETIERLEENVKSIEKQLRDLVKGDRVVELLLTIPGCGEIGAWTIRAWTDDIKRFSSSKKYCAYTGLVPWVQNSNETVHHGKITKRGPKELRTAFVQVVMGLRRMKVKTLRWRLMQRYDMMKQSKGSGKAIIATARKMAVIIWHMLTEEAEFELAKMVDRKLAKKAEVMSRTTGPAKEAVPVEPEKRPEAARTETKRVKISALPVKRKKVC

SEQ ID NO: 321707 - protein, 325 aa, unidentified
MYVITDQEDQQLFQRRLPNQLPVVLESLEPYRPRRKVVVVESTYNWYWLVDGLLDRKYPVVLANPGAIDQYDGIKEADDLTDAAFLARLARLGILPTGYLYPKEDRPVRDLLRRRSLVVRQRTSMILSLQNMALRQTGQNFGWRALRRLSDQERAEVLGDHDCLAFVTTEQLDLIELLSEKIKRFEAKVLEHAQLRPAYECLLTLPGVGVILALTILLETGDIGRFATVGDYTSYRRCVRATHTSNGKSKGKNNGKNGNASLAWAFVEAVHPALRTCPPARSFHDTKVAKRNGALATKALAAKWSKAAYYMIKRQEPFDLARVFG

SEQ ID NO: 321708 - protein, 483 aa, unidentified
MTMAMANDANTDDSSCRCNKCYCYYIGGDVSKGYCNFVIMDQDRKIIENDFQLDDTPKGHQKLLSILTDIRTKSPDALIFAGFESTGGYENNWYQLLWKLKDTINLQVTRLNPLGVKHHKIANLNRMDNDEISAQQIADYLISHPNVPVYNYEDTFASIRRQWKFIRLLKKQKAQLKQQLESMVYEAHPQMLKYWDEQLSEWFLQVLINYPTAKELAIVTVKKLSAIPYLTEDKARQLIQDARISVASATKPWMGHCIKSLAQQILVQKKTIMQLEKEMLESYSSPEINILTSFKGIGSFSAFGLMIEIGSIERYRSVKNLASHFGVNPVFKASGDKVLIARMSKKGRKEPRWILYNVALSAIVHNEMIRELYEGYLKRGKAKMSAVGIIMHKILRIIYGMLKHRTNYDPEIDKVNRNREVSKKCDIDKDMTKPKTDKSRRYQSYDNDAPISKRQSKKREEAVDLKESIEAPNERTLRSKRRE

SEQ ID NO: 321709 - protein, 338 aa, unidentified
MQTGQTAQTYTLFVGVDIAATTAAVVIQRPGAKASQSFIIDQTPEGYTSLLHTLQRTGHAPCQVLVVMEATGSYWMSLAARLVHEGFGVSVINPAQAHHFAKALLKRAKTDVIDAQTLAQLAMVLQPEPWTPPPQIYYALQQRLAQRDDLLNLRQQVRNQLHALVQHPEVIPEVRARMDRLLATFEAQLTEVEREIAAALTQDSAWAAAATRLQSIKGVGWVTAAWTLVTTLNLTRCGTVDALTAYAGVAPMPRQSGSRVWHRPSIGHTGNGRLRTAFYMATLSAAQHNPVIKAFYTRLREVGKPEKVARCAAARKLLHIAWAVVKKDQQFDPYYARG

SEQ ID NO: 321710 - protein, 351 aa, unidentified
MNATRQAVVGVDTAKSVLQVYTVEQETGEVINKPIKRAQFLQWFANRASCLVGMEACGGSQHWARQLQKLGHEVKLMSGKMVKGFVCGNKNDAADARAIYMAAKQPEVRSVAVKTEGQQAVLAMHRIRQQLVKVRTAQINEMRGLLCEYGEVFGLGRKAVDTGIKGALARLAERLPGPLIDTLRDQWNELARLDDRIARIEASLLAWMRQERGASAISAIPGVGLLTATAAVAAMGDAKAFRSGREFAAWIGLVPGQTGSGGKVRLLGISKRGDRYLRTLLIHGARAVLRHAKTASSWLQQLSQRRPTNVVIVAMANKIARTIWAVLAHNRAYDKGHVSMRPQAAATWPAS

SEQ ID NO: 321711 - protein, 383 aa, unidentified
MRSVALDLAVKKISYCEVEVGQVVARRTVTSLSSLKELLGPECLPARIAIEACREAWHVHAELTRWGNEVLLVDTTRVRQLGVGEHGRKTDRIDAEILAKAVEKGSLPKAHLLSKPRQQLRLELSVRRTLVETRSQYVTTIRGLARTHGVRLPSCDTNAFVSHLRKAKLDQNLQELIEPMSQVLEKVDADLARAEMRLQSIVEKDSKIQLLMTVPNVSVVVAAVFVSVIDDAHRFRNAHQVGAYLGLVPSEKSSGEHRRLGSITKKGNSYARTTLMQASWGLIRLGRSDDPLQQWAKAVAHRRGKFIAAVALARRLAGILWAMWRDDTVYDAARVGFCSAAGLKRQAQETKFRATAMQSAAKKARQRARPHERKLEHLKEMNL

SEQ ID NO: 321712 - protein, 407 aa, unidentified
MEVLYPRCAGLDVHAGSVTACARIATGAQVTYEHRTVPTTTRGLLELVEWLTGHSCTHVAMEATGVYWKPVWHVLEEHVTLVLANAMHIRNVPGRKSDMNDATWIADLLAHGLIRSSVVPPAPIQELRDLTRTRRQLVHEVARHVLRIQKTLEDANLKLTQVMSDIVGVSGRAILNALIAGESDPERLADLTRGRLKAPRADLVDALHGRMTDHHRFMIQVHLGQIDALESAVAAIEAHIGNALGPFRAAVSLLTTIPGISETTARVLIAEIGTDMGRFPSVGHLISWAGFCPRLDESAGKRRSTRTRQSTPWLKPTLVNAAWAATHKKAGYLRAQFLRIKTRRGAKKAILAVASSMLTAAYFMLRDGVEYHDLGAHHFEQRDKEQLTTRLLQRLRDLGVAVEVKAA

SEQ ID NO: 321713 - protein, 349 aa, unidentified
MSQKLSSAIAVIGIDIGTNSFHIVGHDQRGAIVLRQKWSRSQVEARFANMPPCLIGMEACVGAHHLSRKLQSYGHDARLMPAKYVRPYSKGQKNDFRDAEAIAEAVQRPTMKFVATKTADQLDLQALHRVRERLVSQRTGIINQIRAFLLERGVAVRQGLRFLRTELPLILATRSDVLSPRMMRIIEDLASDWRRLDERIEGLSNQIEDVAHEDPACERLMTVPGIGPIISSAMVAAIGNGAVFTKGRDFGAWLGLVPKQISTGDRTILGPISRRGNRYLRALFVQAAWVVLIRIKDWDRYGLKAWIDAAKKRLHHNVLAIALANKLARIAWAVLRKERAFECMKTRPV

SEQ ID NO: 321714 - protein, 349 aa, unidentified
MRFYTKTHQHYCGIDLHARTMYVCILNATGEILVHRNIRTDQTRFLALIEPYREDLVVSVECIFTWYWIADVCAREQIAFVLGHALYMKAIHGGKAKNDKLDSHKIALLLKGGMLPQAYAYPAAMRATRDLLRRRLHLARQRAHLIAHIQNTVHQYNLPALGVRLGKPTERDGVAACFPDPVVRRMMQLDLDLIAYYDQQLAELEWQLVKQAKGHDAQMYHLLSSVRGIGKILTLVLIYEIQDIQRFPTCGQFLSYARLVRCPKESAGKIVGKSNKKIGNSYLRWAFGEAAVLFLKGNPEAQRWIEKQASRHGKGKALAILAKKLGQTVYAMLTKKRCFDEAKFMAHLQ

SEQ ID NO: 321715 - protein, 404 aa, unidentified
MTGTDTEAAAEPVVIGGVDSHADTLHVAVVTDRGGQLADAEFSTTPAGYTAALAFVAAHGVVAAIGVEGTSSYGSGFTRAAHQTGLTVIEVNRPDKAERRRIGKSDPIDAYAAARAVVSGRATSAPKGDAVSGIRALHNAGRSAIKARTAALNQIGHILISAPNAIRTKYEVLQGDKRIAALTRLRVGNDLALAPVLTSLRTLAMRVQSLTAEHDALTAELDVLVTRLNPGLRAAYGVGPDTATQLLITAGDNPARLRSEASFAALCGVAPVPASSGKTNRHRLSRGGDRAANAALHRIALVRMRRDQRTRDYVARQTDAGRTKKEILRLLKRAIAREVFRLLTTTVEVPEIADLRPARQAKNITLTAAANHFGVWPAVISNIERGLRRDDAFASSYREWLAAA

SEQ ID NO: 321716 - protein, 367 aa, unidentified
MQKPTIFVGLDVHQDLIVAAPIREGSDCAHEVRRFGSDYAPLRKYLKKLQSEGEIATCYEAGACGYGLHRRLEADGVLNYVVAPSLIPKKPGDRIKTDKRDAQKLAKNLKNGDLTPVAVPTEEEERVRGLVRCRDGFGLDVGQVKNQILKFCQFKGVKQPAGKKWSKHHRAWLRSVELAEIDRRILNRHLDLLKYLEAELEQLDAEIDEIAKQPQYSKRVDALRVLRGIDTLSAMILVVEIGDIRRFAHPLPLMAYTGLVPSLHASGGPGQGGPITRTGNRRLRRILVESAWHARHLPTLGGAVGRRLQEVNADAATRIFSKKVQTRLHKKFWKLSVKSNKLAVTAVARELVGFVWAALRKAEGLEA

SEQ ID NO: 321717 - protein, 412 aa, unidentified
MLKIVYPICCGMDVHKSFVVACIATTNDHGVTTYKSKRFSTFTGDLRRCAAWLSENNCKDICMESTGKYWIPIYNILEATCNIVLAHPKYVKAIRGKKTDKRDAKWIADIFKHDLVSGSFIPPADIRQLRDLVRYHWKLTNFNVGEKNRAQNCLTVSNIKLDDVFSDVFGKAATAITTRLLESNEPFDVKPYLTKNIKKPIEQIQAAVDGEMCAEQAEKLRIIRSHMDSLELCKLNLESLILSTAEKYIPQLNLVMTAPGIQSFAAIGIISEIGVDMSVFPTSKHLCSWAGLTPQNNESAGKKKTTRISRAGAYIKPLLVQCALCAIRTKQFPEVRNRYLALKKRRGHKKAIIAIARMLLTAIYNILKWNEVYNSELYRKADRPPAHREVSVEEAVFILQRQGYLVTAPAVT

SEQ ID NO: 321718 - protein, 338 aa, unidentified
MAIVFVGIDLAKNVFAVHGVDERGKPALVRSSVPRARLHALIASLPACTIGMEACSGAHHWARLFIAAGHAVRLMAPKFVAPYRLSGKRGKTDAADAAAICEALQRPNMRFVPPKSLEQQALLTLHRVRQGFIEQRTALINRMRGLLSEFGIVMPLKASTVRLQAGAALEDLPGWANIAIGDCLSELHRLDERVAQYDRHLAAHARQDDRARQLMRLNGVGETTATALVGSVGSAHEFRSGRQFAAWLGLVPGQYSSGGKTRLGRITKAGDGYLRSLLVLGARAALNAAKGRTDALSCWALALLERRGYWRTVVAIAAKNARMAWAMLRRGEAFVMPA

SEQ ID NO: 321719 - protein, 372 aa, unidentified
MNYNTVYVGMDVHKESFSLCAYTIEAEKASHYQRTEADYKKVLNYLEFLRTIYGDDANFICGYEAGCLGYTLYHQLTANNVKCIILAPTTMLEQRSKKRIKTDKRDAEIIAKCLAQHNYSPVHIPTAKDEETKEFLRMRDDHKLALKKVKQQILAFCLRHNYRYDGNSHWTAAHLKWLKALTPEALYKEILDEYLLTYHTLSDKLERLDKRIEELSTQDEYKEAVKKLCCFIGVKTHTALSVLVEVGDFNRFASAQHFASYLGLVPGEDSSGNDQNRLGITKAGNRHVRLLLTEASQCYARGQVGFKSKELKARQSGNTPAVIAYADKANERLRRRYYKMVLNKCKKHNVAKTAIARELACFMWGMMTDNIA

SEQ ID NO: 321720 - protein, 375 aa, unidentified
MLGLDVGKSSHWACLIDRDGEVLSSAPVRNREAELDALFASVPAGTLVVVDQFRNIGSLAVRRARAAGLGVAHLPGLAASRAAGLFAGEAKTDERDAAVIARTALGVPDSLSGVPGRGEALEAARALSSQRDHVVACATRDKNRLRAVLLESCPALEAAVDLSDRRWLELLAGFGGAWGIARSGAEGPQAEAAGEAAAASTAPPPALIEAENRQVRFLAARISEALDEAGALEAETAALLEGDETYACLLTVPGIGPRTAAQLAVSVDIGRFPDHDHLASYCGIAPRVRSSGTSVRSVRASRRGDARLKSLLIFSCNSLVRSSGRYGEYYRACRARGMGHGRALKAVARKRLRAIYAVMRDRVPYREQPRRLTKL

SEQ ID NO: 321721 - protein, 350 aa, unidentified
MIIIGCDYHPGFQQIAFVDTETGDCGEQRLAHSEGAEKFYRDLGAHGKKVRVGMEASGHARWFERLMAELNFELWIGDATEIARKRERKQKTDRQDAQHILQLLMENRFPKIWVPSGENRDLRQLLWHRHRMVQARTRIMNQLQAVALNEGLRCKKKLWREKGRQQLEAFRLAPWASRRREDLLQLLDRLNPTISNLTQAIEQEVEKCPEARRLRTHPGVGALTALAFVLIIGRTERFQCGKQIAAYLGLVPLEDSSGNRRRLGHITKQGSSIVRFLLVEAAQVTARSIPEWRNKYVHLTMRRGRKIAKVAMARRLAIALYWMWRKGWDYEQLRKFGSHAGQPGHRDGVK

SEQ ID NO: 321722 - protein, 414 aa, unidentified
MELLHERCAALDIGKKDLKACVRTPNPAGKRSRRQEIRTYATTTNSLLELRDWLVAEQVTLVVLEATGDYWRGAFYLLEDDLNVILVNAAHAKGLPGRKTDVCDAAWLCQLGECGLLRASFVPPEPIRQLRDLTRYRTTLTSERSREAQRLEKELEDAGIKLSSVATDILGVSGRAMLAALIDGERDVRVLAEMAKARMRSKIPQLVEALTGNFGEHHAFLCRLHLERIDQLSASILALSSRIEEQMRPFSRRLDQLATIPGVGQSVAEVIIAETGGDMSRFQTAAHLASWAGVCPGHHESAGKRKSGKTRHGNRWLIGALGTAAMAAARTKDTTYLGARYQRLAHRIGKKKAIVAVEHSILTAVWHMLTNDVDYTDLGGDYFARLDPERAMRRIVRQANTLGFTVRFDPIQAA

SEQ ID NO: 321723 - protein, 442 aa, unidentified
MPLLHPDAAGIDIGHREHWCAVPADRCEQPVRAFGTFTQDLEEMARWLQECGIKTVAMESTGVYWIPAFQILERHGLEVFLVNARHVKNVSGRKTDIQDCQWLQRLHSFGLLNASFRPPDHICVLRSYLRYRDDLVGLRSMQSQHMQKALQQMNVQLHQVLSDVTGLSGTRIIEAILKGERAAVKLAGLVDKRVRTSKAAIQKALEGDYRPEHLFMLQTAFELYQIYDQKIHLCDEQALAQMAQLPTQESKPLPERKACRKPIHDMVAGTDLRAELHRWGGVDLTAIEGFGVLTAQVILGEIGPDVSRWPSEKHFASWLGLCPDHRISGGKVLSRHTRRVVNKVSNALRQSAVTLQKSQTALGAFYRRMRGKLGAAAGVTATAHKLARLVYRLLKHGELYVQQGLEDYERKYRERVVRHLKKTAASMGLEVVEKQPLASGVS

SEQ ID NO: 321724 - protein, 441 aa, unidentified
MKTIKVVAAVIKNGDKIFATQRGYGDLKGGWETICNDPQVCRIVDLPVYYELETNNGNRDYRIQIGGHYMNYNTVYVGMDVHKESFTLCSCKYEDEKASHYQRTPASYKNVLRYLAFLRTIYGEYTRFVCGYEAGCLGYSLYHQLENFNVECVILAPTTMLEQRSKRRIKTDKRDAEIIARSLAQHNYSPVHIPTETDNQTKEFIRMRDDHKAELKKIKQQILSFCLRQGYQYDGSGNWTAKHVKWLRSLKPAGLYKEILDEYLLTYTILTDKLNRLDQRIEELASKEEYKESVSKLTCFLGIKTHTALSVIVEVGDFQRFVSARKFAGYLGLVPGQHSSGDDRNGLGITKAGNTHVRRLLVESAQSYTRGKIGYKSRVLRSRQAGNSPQVINYADRANERLRRRYYKMVLKDGKKYNIAKTAIARELACFIWGMMTDNIY

SEQ ID NO: 321725 - protein, 420 aa, unidentified
MKSATNTTKSELPEFAPNDLTAGIDWARDDHAACIVDGRGRKVATIVVEHTAAGLGELVAFLGRHGVGEVAIERPDGPVVDTLLAAGLVVVVISPNQVKNLRGRYGSAGNKDDRFDAYVLADTLRTDRPRLRPLVPDTDATIALRRASRARKDLVKHRVAAANQLRAHLRNVLPAVVGLFQDLDSGISLAFLTRFDTQDKIDWLTPKRLGGWLAKQGYSGRVDPTVLHQRLLAAPRGATGAHATSQAPITATYVALLRTLLEQIKTLEKEIDRQLDAHADAHIFTSLPKAGRVRAARLLSEIGDCRAKFPTPESLTGLAGAAPSTRQSGKLRVVGFRRACDKQLRDAVTDFAADSRMTNPWAADLYDRARARGHDHAHAVRILARAWLHIIWHCWQDNVAYAPDKHRALQRFLAAQNAAA

SEQ ID NO: 321726 - protein, 345 aa, unidentified
MYRTRVGVDLAKEVIQVCIYRNKKMQSNIEMTPNEFLCWLIKSKPATIIFEACGTSNYWKQKATEAGHDARLISAKLVAVVRQNQKTDKNDALAIVQAALLPDVTFIGGKTVEQQQLQSIKRLRELAVKHQGAIQKQLVSLLLELNIRISNRKGGIISAIDGVLEDAESGLSTEFRAAINTAKKQLSILISSVHSYDDCLEKSVTSHPDCKKLLKLEGVGTMNAINLYIALGCSDIGSFSKGKDASACIGLTPIQHSSGGVVKLGSIGKHCKNSILRSQLVCGAMAAVQATIKREAKTKKDVWLKGIVERRGKKCAAVALANKTVRTAYAMLTQGTEYKAELLAA

SEQ ID NO: 321727 - protein, 320 aa, unidentified
MRNTVGLDISKLTFDATAIVGNAEYSAKFDNDSKGLDQFSDRLKSLGCQNLHICMEATGNYYEEVADYFAQYYSVYVVNPLKISKYAESRFKRTKTDKQDAKLIAQYCRSAKESELVKRQKPTDEQYRLSRMIAAYAQIKSECAAMKNRHHAAKDEEAAKAYAQIIKAMNEQLEVLKEKIKEQTEKPNCKEGVKRLETIPAIGRMTAAVLFHHLTSSKFETSNKFAAFAGLSPQQKESGTSVRGKGKLTKFGNRKLRAVLFMPAMVAYRIRAFPDFIKRLEEKKKPKKVIIAALMRKLAVIAYHVHKKGGDYDPSRYKSA

SEQ ID NO: 321728 - protein, 371 aa, unidentified
MAKRSMFVGMDVHKESIDISLAEEGRDGEVRHYGSIAGDLEALAKVVKALRAPTRRLRFVYEAGPCGFGIHRYLTAQGEECVEVNPSSMPKRSGDRIKTDRRDGDALARVHRAGELSPIYIPTADDEALRDLVRAREDAVGLSTQAKHRLKAFLLRQGRRYPGRAGWTRPYRRWLADLRFPLAPQHVAVQEYRDTIDDTERRVERLTDQLRQLTPPWRWAPVVDALQALRGVSLVTAVGLVAEIGDIRRFTHPRELMAFLGLVPSEYSSGPSVRRGGITKAGNPHARRLLAEAAWAYQGVPRIGRQLRYRHEGLSKSVCHIAWKAQLRLTSRCRKLVARGKAKPKVATAVARELTGFIWAIAREVPPPPAS

SEQ ID NO: 321729 - protein, 445 aa, unidentified
MRRCIGLDVHRDFAEVAIWQEGVVRLAGRIETTPEALRLFAASLCEHDEVAIEATCNTHAIARLLERHVGRVVVSNPMKTRAIAEAKVKTDKVDAQVLAQLLAAGFLPSVWLADDDTQALRRQVARRAHIVRQRTRLKNRVQAVLHRNLVRRCPASDLFGHKGRAWLAEQELPGDERQAVEALLRQLDFHGEELTLIDAELARIALRRDEVKRLMTIPGVDATVALSIVAAVGDFGRCQSPQKLVSYLGLNPRVRQSGGHIAYHGRITKQGRAHARGMLVEAAWVAAKVPGPLRAFYERVRARRGMQIAVVATARKLAVLCWHMISNGEDYAFERPSLTAKKLRALELRAGQPSRRGQKGTAAAYSLKEVRQRENALAEQGEHAYRQLVANWQAKPAKTKAGAGAATGEAALRPSNGNPARRGFHPHAPLFGPGTPAPAPKPNAR

SEQ ID NO: 321730 - protein, 279 aa, unidentified
MSRTKAQSLSRMGIDIGKNTFHVVGMDDKGNILIRRCFTRVKLIEYLARLPQTTIGMEACPGCHWLARKAKSFGHTPCIVPAQFVKPFVKSNKNDLIDAEAIAEAISRPTMRTVIPKTTAQLDLQALHQIRERVVSHKTAVVNQARAFLLEYGLTIHSGIAKFTHDMPSLLSDEQNELSPSMRDILIDLWQEYRSLEEKLLHLRRQIESIADADGIAKRLTSIPGVGKLTATAMTAFVGNGQQFKSGRNLAAWLGLVPREYSTGGKQRLLGMSKRGMLT

SEQ ID NO: 321731 - protein, 342 aa, unidentified
MTKVTIVGVDLAKNVYQLHGAAEDGSVVFRKKLSRVQFARFMSLHPPCLVAIEACSTSHYWARVLTEIGHRVRLIAPIYVKPFVKRQKNDAADAEAVVEAALRPAMRFVTPKSEGQQAQAVLFRTREQLVSQRTQAINALRSHLAEFGFVAPVGIACVQRLADIVEDEKSALPELARDMCRILLTQIAGLSQQITSLQKRIKLLAGKSKVSARLQTMPGIGPVSAFAVEVFAPAASEFRRGRDFAAWLGLVPRQHSTGGKQRMGRTSKMGQRDIRRLLIIGAMSVIRWAARRGAEKGSWLESMIARKPRMIVAIALANKMARGLCAMLMKEKNYKEPMLTSA

SEQ ID NO: 321732 - protein, 369 aa, unidentified
MEKTLEKLNLVNLSNHLYLGVDTHKDKHSVVGLDCFSQVLYEKEINNSEEDFKQLIKEVENMGLTPVFGLEDCYSYGSRLADYLFKNGFSVRIVSPVLVERERKYQTHPEKSDLLDAKGVAEALIHRIGTLPHYSISKEKETTKEIKELVLDREFLVKEQTRIKNQLHRLLHKAYNSEYRDKFKNIFSDKALRYWLKSSLKIESPILKNQIRRKVKRLADIRKEIKEIEEELRILVNQTDQRLETMNGCGLVLAASVLAEVKNIDRFASDDSLAKYGGFCPRERSSGKTIRRIKTKSGNRKLNKAIHRIALSQIGRNGNKYAKEYFMKKVSEGKSKSQALCCLKRRLVKIIFMMMKYRQEYKYFKNILT

SEQ ID NO: 321733 - protein, 346 aa, unidentified
MLYAGLDLSRKRLDVHILDEDGQTVEVTAVSPDAAGLRRLAAHVLHFGHEVYGAIESMTGARFVHDTLERYGWDVAIADAAKVKGIAPLAAKTDRIDARVLAELARRELVPEIWLPDPTVRAERERARFRLHLVHHRTALKNRIHATLMTFGHPVPFADLFGAGGRELLTRLALPEPWTGTLATSLRMVDVLGAEIDACEADLRRLGADHPSIPLLLTVPGIGPILAYTIASEIGDIGRFSSPKKLTGYTGLCPIVRQSGNRDVRGPLAKNGPKYLRWALIEAATHAARDAHYRDRYERTKRRLGRQRGAKVARIDIARKLAEAIWHVLTKNEPFAPAGPTMLLVA

SEQ ID NO: 321734 - protein, 358 aa, unidentified
MKYVGIDVHKKMCQAAVLDEDGTPLDEIRFRNDVEGIEDFALKLTTFHDEVKAVVESTGNLWIQIHDRLEEHGFNVVLSNPYKTRLIAEAKVKTDKVDARTLARLLRADMLSICYVPDEEQRSRRELLRHRLKLVQTRTEVKNRIHSLLDKHGLHMPYPTPFSKKNIAWLREQDLGFMDDAILRSALAILEAVDKQVGLMEEKIAALAVEDPRVRLLMTMTGVGYFTAMLLLAEIGDINRFSSDKRLASWAGLAPRVRQSGEKIRIGGVGGPGNKRVRWVMVQCAHSACRFDPRLRGFYERYSKRKGGKKAVVAVAHEMIRIVFYMLKRSEAYRGENRGMTERKLKSMGRMALNGLRN

SEQ ID NO: 321735 - protein, 428 aa, unidentified
MNYNIQNAKIASITEKTLIVGIDVGSETHYARAFDWRNYEFTKKPLAFSNTEAGFLTFKAWVEDLQEKYGKTAVIPGMEPTGHYWFALGKFLQDNGMKPVHVNPHHVKKSKELDDNNPNKNDRKDPKTIAALVNEGRFSYPYIPTGIYAEIRSLSNLRFQTQEEVTRIKNRIARWFSIYFPEYKDVYGDVKAVSGRMVLKKAPLPEDIKKLGVEGVNKIWRDAKQRGAGMKRAKTLVSAAEHSVGSKEAPEAARIELKHLLGDMDVYTARLEELVEKLENKLKEIPYIDKLLEIKGIGMITVSGFIAEVGDIGRFDNPKQLQKLAGYAIVANDSGKHNGESRISYRGRKRLRYVLYEAAISLVGKNTEFRAIHEYYRTRKENPLKKMQSVVAVACKVIRVFYTILTKGVDYDAGKLLGDIRHRKVQAA

SEQ ID NO: 321736 - protein, 438 aa, unidentified
MSNLDQAAVNREFAAHIGIDWADQKHFWTMRTADGKTQRGELDNTPEAVQVWAAELEQRFGGRPVAVALEQARGAVIAMLCKYAHLVLFPIHPNTLANYRKAFRPSGAKSDPRDADLALELLVSHADKLRRLEPDTVETRKLQFLTEERRRLVNQQTSETQRLIGWLKQVFPQILPWFEDPACAMVGELLLRWPTLPALQKATPKTLRTFFHRQNCRSAERIEERIAQIRQAVAATHDAALLETGILCIQNSVHVLEQMREGIARFDHQIAETYRQHPDRAIMESFPGAGPALEPRLIAAVGSRRERFESAQSVACFVGIAPVKEASGQQRWVHWRWACPKFFRQTFHEWAGCSIRTCQWAREHYDQQRDKGKGHHAAIRSVAFKWIRIFYRCWRDRVPYSEETYLKAKSARAPKPQPAPSMQWESCGGLAKLSELPS

SEQ ID NO: 321737 - protein, 356 aa, unidentified
MLYTGVDLHRRLIVVCTVDDNGTVVARCKMKTDPALVTEYFRRWPDQHRAVVECTTGWYWFSDLLRSLGVDVVLAHAKYLKAISYAKVKTDAVDALTLAQLLRMGYIPEAHQLPPEYRAMRDLLRQRMVMEHKRTNIIQRVTSILAQFNITDLPFSPYQPGFADFLNQCQIPDEYRMTLMLYHHQCLQVTEHRKQLEKHFKAQLRPTPAVQLLMSLPGIGDITGSIIAMETGDIHRFADAKHYCSYCRLVPGAKDSGGKHSHRSGSKDGNQYLKFAFTESAIKAMRFYPQIKHFAARLERRATKAIARTVVAKELAKISYYVLSRQQEFKTFKGIEINKLRNWPRARKPVRLTGGL

SEQ ID NO: 321738 - protein, 417 aa, unidentified
MIIIGVDPHKRMHVASAIDPATNHRVAALQVEASLAGYRRLLKWADTFGERRWAVENAHGLGRHVAQWLLARGEAVEDVPSTATARVRELSRGGRRKNDVIDAAAAASVAALHGDANPVLPEDLTTVLGLLDERRTNVTTQRTRLVNQVHAVFRDLLPGGAPQNLTAATASRLLAGIRPVGPVEAARKQLARDLVSEIRDADQRLKLLTAQIAETVAATGNHLTEVDGVGPIVSGRLLAHTHKMSRFPTAAACASDAGVAPIEVTSADRVRHRLPRGGDRQLSHALHIAAVNQIRMPSSAGRAYYDPKIAAGKTEKEARRCLKRRLADHIWRLMIRDERDDAAGPGGQQGATMQSSAAGPTPTTSSSDKSLPEPATPTLRPAKQQLDKHRGTYFVVARRRKACRLTPPQHCGARSAV

SEQ ID NO: 321739 - protein, 340 aa, unidentified
MNGAAHDTWAHVGIDVSKRKLDCAILLNGKIKSKVVNNDRPGFAQLNAWLQERGAVTDSTHLCLEATGPYSEQVALALVDFGWMVSVVNPARIKGFAQSELARNKTDRADAALLARFCAAMRPSVWTPPSPAYRQLRAMVERLQALKDMHQQEVNRMEAHHASGETTVLANVKIHIVWLDERIAELQREINDHIDGHPELKQDADLIASIPGIGEATVAKVLAYAGDVRRFASAKALAAFIGICPRQRQSGCSVKGRTMISRTGHADLRKALYMPGLVALRHNPILKAFGARMKANGLAPKAVVGATMRKLAHLIYGVVKSGKPFDANFAMNGVAIQDGI

SEQ ID NO: 321740 - protein, 341 aa, unidentified
MKSILKQVVGIDVGSQELVLALGSLFSRPHTEIKAAKAFRNSEKGFNELLEWVEKLKDQEAPLWFVMEATGVYHEKLAYFLNSKGYKLSIVLPNKISNYMRTLETRTITDKTCAEAITRFGLERAVREWQKPNPTFRKIRQLTREREQIIAERTIVRNQKHAEEAEAHPSQSSIKRMEARIRLLVNQEKEIKREISKLIAKDEATSRIVKLLCSIPGIAEPTAATIVGETNGFELIQSRRQLAGYVGLDVREKQSGISVKGKACISKKGNKYLRKAMYLPALCAIRFDTNFKNHFARLVSRHGIKMKAVVAVERKLLELAYTLYKNNKRYQPNYSSNAEAA

SEQ ID NO: 321741 - protein, 523 aa, unidentified
MPVTRSRKRSSSRRPEVLQKPRGVIHPRVQKVGPEHFGIVSVDCAKARSKWMLCDFYGNVLVPPTVVEHNRPALTAATTQLRQAMAEHDLRDVIVAIERTGRYHHATQRAFAAAGFEVRIVHPFATKQFRQASDPGTKTDDTDLVAIHRAACSGFALIELPRDDHWKELQLLIRYRRDLVFKTSALCAQIREHLEAALPGYATCFYNLWIRACAFPLVRAFGSAEALLQAGLRGLSEVLRQQHVRFQERTLQRVLAWAEQAAPSDQAAALHLRVALRLEDDRQQKSLEILGLERDIASRLVRTPYVLLLSFPGINVVSAADFAGEMGPIGNYANSRCITGRAGLRPARYQSDQVDRPNGPLVRCANRKLRAAILGIADNLVCCNRHFNVLALRWRAEGKDPRHTRVKIAQRFCRIAYQMVAGGQVFRHPCLQQRSYILDKLNAFHREHDTAMPQALTDLQAAIEQLPRSAYAEEARPLAQELQRIEQGRRRGPQLLGDILPIVLARLGVGALQSRESGEHDLT

SEQ ID NO: 321742 - protein, 425 aa, unidentified
MKVTYKTCCGVDVHKSFLVATIIATTGGIEPSYQKKRYSTFNNSILEFKQWLLDNDCHDLCMESTGKYWIPVFNLLEDEINVTIANPKWVKAVKGNKDDTKDSKWIGDLFRLGLVKGSYIPCKKIRILREFTRYRYKLVSCRSSEKNRYQNALTVCNVALDSVVSDIFGKSSTSIIDYLLEQSGNSINHEEIASKLLKSLKSKEDAVIESIEGYQMTDSQKYRMHLVRAHMDYITAEINDVDREIEKLISSDPDFENAIQFLMTIPGVKRDSAITVISEIGIDMTQFSSSKRLCCWAGLTPGSNESGGKKKSVRVTRAGVYLKPALVQCAHAAVKSEKSPYYKKKYESLMKRRGKKRAIVAIARMILTAIYQMLSTGESWNPSDLYKIDIPEALLEKQRAKAIKQAMKLLQREGLYPLPQESKAS

SEQ ID NO: 321743 - protein, 338 aa, unidentified
MKIEVLGIDLAKNVFQLHGVERRGRPIYKRRVFREQLLSVVGDIPSCLVVIEACTGAFHWARQFEALGHRVTIISPQYVKPFVRRQKNDGNDAEAIVTAARQPHIPHVPKKTIEQQDIQALHRARQRMVNHRTALVSQIRGLLLDRGFAFAKSITRARRTIPVLLSDMANGLTAMARETIAELWDLMCDLDRRVAMLDKKINAVFKADPACQRIARIKGVGPKTATAMVAAVGDGAEFKNGRHLAAWLGLVPRQHSSGDKRVMMGISKRGSQHLRSLLVHGARAVVRTAPNKQDPQNQWVNDLRERRGFNRATVAVANKTARIIWAVLRTGEPYRAAA

SEQ ID NO: 321744 - protein, 472 aa, unidentified
MKCNQQRKHRKGNGKRPRQEPNSLFERIQPNAAGIDCGEKSHFVAVPPDRDAQPVREFRTFTADLQRLAEWLVRCGVKTVAMESTGVYRIPVYEILEQHGLEVVLVNARHVRNVRGRKTDVLDCEWLQQLHSVGLLRASFRPAAAIVALRAYVRERGILVEEVAARIQRMQKALTQMNVMLHTVISDITGATGLKIVRSIVAGQRNPEALAAHRDSRCRASRKEIVAALNGNYRQEHLFSLRQNLAAYQFHLEQISECDAAIETLLNTLAAQQPQPAAALPPPRRKSYPKGHEPRFDIRTPLHRLTGGADLSQIDAIGPQAALQLVAEIGTDMSRWPSAGHFTSWLTLAPNNKISGGRLLSSRTPPSANRAAVVLRRCAMSLARTPTALGAFYRRLAARAGKAKAITATARKLALLVYRVLSGELVYQDPGAAAYHQLNRNRELKSLRKRAKLLGLDLLDRSSGELISSPVS

SEQ ID NO: 321745 - protein, 310 aa, unidentified
MAFLHHQPSRFVGLDIAKHTITLVDSRAPAPRVIDNQPRAIRALLKTCDETCLVLCEPTGGHERIVLAEAFRAGIPCHRADTLKLKAFIRSFGTLGKTDAIDAACIADYGRERWRTLPLWTPPTQNAQQLVDLVRRRRDLVALRVAERNRASAPGASALAASFEAMLAVIGAQIDAIDTAIDQAIATCPDLVRRAAICTAMPGIGQKTAAALLALMPELGKLSRRQAAALAGLAPHPKDSGLLRGHRRMHGGRPEVRTVLFMPALSAARGRGEFASFYQRLVQNGKNRLAAIAAVMRKIIVVLNARLADA

SEQ ID NO: 321746 - protein, 405 aa, unidentified
MKVKYEDRQKQKVIAITTDTLVVGVDIAKNYQWARFVDFRGIEHDRALKFKNSKGGFETILARIREICKKENFAKAVVGMEPTGHYWKAFANWLEKQDGIKAVLVNPYATKQAKELDDNSQTKSDKKDALTIAKLVKDGRYFELYLPHDVYAELRGLSTTRTGLNKRKNALKNTITAVMDEYFPEYGEVFKCPLSGKASRHILKTCPFPKFILELGEDGVTDEIKKAVKKTVGRKKAAQLIETAKESIGVDYGEEAALQKTDYAGFLLSIKGIGVVTLAACLGELGNPARFENPRQMSRMAGYNLVEDSSGKNKSGTKISKRGRKNLRSVLYQMALIMVATNDEMKQLYHYLKTREEAPLRKMQALIVVSKKILALIHALAKKKENYDPGKVFGPVRREQLKAAA

SEQ ID NO: 321747 - protein, 418 aa, unidentified
MSLNVAGGSAYYVGVDWAAVTHAVCVLDPTGKRVAAFTVEHCAAGLTALTQRLARLGAPDTMPVGIERPDGRLVDALLEAGHPVVPVKPNAIKAWRDGEVLSGAKSDAGDAEVIAEYLRLRQHRLQLATPYTAQTKALRTLVRTRGDLVELRVALTNQLTAVLDTHWPGAKEIFADVESPIALAFLTRYPTARHAQHLGVKRLTAFCVEHHYSGRRSGEQLRTRLRAAPAGTLDETVCHAVSDAVTALVTVLTSLGAAVKTLDRSVTATLGKHPDAEIFTSLPRSGQINAAQILAEWGDCRQAYAGPDSIAALAGVTPVTKESGKHRAVHFRWACNKRFRVAMTTFADNSRHDSPWAAEVYTQARTRGHDHPHAVRILARAWIRVMWRCWNDRVAYHPTRHGNAQRLTQPRQNEPLAA

SEQ ID NO: 321748 - protein, 319 aa, unidentified
MSEQKEERFVGIDVSKAMLEVAVKPSGERWSVANEEAGVRELVRTLEKSVPTLIVVEATGGMQSLVVAELTAAGLPVAVVNPRQARDFAKATGRLAKTDAIDAEMLASFGQAIRPEVREIKDEQTQLLTALMGRRRQIVDMLTAEKNRLASAPKAVRKEIRRHIEWLEARLKAMDGQISDTIKEDPVWHEKDLILRSTPGVGPVLSVSLLAGVPELGKLNRQKLAALVGVAPLNDDSGKHRGTRRVWGGRAQVRAVLYMAAVSASRSNPVISVFYQRLVAAGKKPKVALTACMRRLLCILNTMIKNGTRWRQEKVTASA

SEQ ID NO: 321749 - protein, 392 aa, unidentified
MLFVGIDIAKRNHEASVIAQDGRVVRKAMRFANSQAGYNKFMDMVGGLSEPVVFGMEATGHYWLTLYAHLRNDGFTVHVINPIQSDALRGMYIRKTKTDSVDSVIIADVIRFGRYCETSVEPGDLHAMRELCRQRFYVIDMASDLKRKVIALLDQVFPEYEKLFSDTFGVSSMELLSQYTTPEEMLSVSSQQLAEVLEKASRGRLGAEKAAEIQDAARNSFGIVLASSSFSLIIRQYIEQIRSLEASVDVFDAEIARLLSGFDTQLTTITGIGPTLAAVILSEIGGDIRRFPSPAKLAAYAGVDPTVKQSGDFSGTRMKMSKRGSPYLRRAIWLASTVAAFKDPAIHALYERKRAEGKDHMTVIGHICRKMISIIFAVLRDNTPYLPAVIPD

SEQ ID NO: 321750 - protein, 329 aa, unidentified
MVEVVVGLDVHLKNTQVTVMKLNGEIVKKERVRTSKAELRRVLESVPKGSRVALESVGFCWPWIDFLNELKYEALLANPVKVKLRAEDVKNDKADSKTLADLTRMNWLPTCYVPPAELRWLRNLLRHRAFRTRLSTGVKNRTKSEFRKRDIGLEVNLGTKKGRRAASDLDVFEVSQNVELLDVMNRQTKEVEAMLRKKYGQIKPVLLLMTIPGIGFLSAVTLYAEICDIGRFSNPEKLAHYAGLVPRIRQSGEHSFTGRETRGDAWLKWILIEAAWSHVRFCPEGHLAQVFKDACRRKGNSRDAIKVVARKLVNVVWAVWTYEKEFMVK

SEQ ID NO: 321751 - protein, 413 aa, unidentified
MSFTPASTPARVCAGIDWASIDHAICILDNQGAVIERFFVVHDAAGLKTLIRRLLKAGVEEVGIERADGPVIDALLQAELTVLVIAPGQLKNLRSRYGSAGNKDDRFDAYVLADVVRTDRARLRPLERDSAATTAMRTTVRARRDLVEHRVAAANQLRAHLQLVFPGATSLFAAIDSAINLSFLERFTTQTQADWLSPKRLAAWLNNVSYSGHTDPGVLHARLLAAPRGTTGTEAETHAATTLAYVAVLRVLNTQIAVLEENLTTQLTVHPDTHIYASLPRAKTLRVARLIGEIGDARGKFPTPQSLAALAGVAPSTRQSGKVKAVTFRWGCNKQLRDALCDFAGDSRHDNAWAADLYESAIARGHDHPHAVRILGRAWAHIIWRCWHDNLSYDPNQHRALQNVLAQTTAQAA

SEQ ID NO: 321752 - protein, 354 aa, unidentified
MRNIKYIGIDVHQATSVFAVRDHQGKLIGEAVLETKPAAIIDFLKGQRGTLWVTFEEGTYANWLYDVIHPHVAKLLVCDPRKNKLDENKTDKIDAKRLAELLRLNALTAVYHGQDGTRTLKELARSYVSLQQDSTRVMNRLKAIFRGRGIPCHGTSIYHPDNRKEWLKKLKDKGAQLRAERLFEQLESLVPLCLDAQKDLVREGRKHQSYKILRRIPGLGPIRVALILAFVMTPHRFRNKRQFWTYAGFSVVRRGSAEYEITQGELKRTKKRPLPRGLNRNYNHVLKNVFKGAALTAVYRGPFKQLFDQRVANGTAPNHALLTLARKIASITLALWKKGERFDIERHRLSEQTT

SEQ ID NO: 321753 - protein, 340 aa, unidentified
MSEYIGLDVSLKETAISVRRDGKRIWRGKCPSDPSLLAEVLRKRAPTAKRVVFETGPLSVWFYHALSAEGLPAICIDARHAKAALDMAPNKTDANDADGLAHLAEVGFYREVRVKGYDSMLIRTLVAARTKLVRITTELSNQIRGLMKTFGLVVPPSKGGKFEDNVQRLLACQEELARIILPVLEAWRSMRARAAELGRQLIASARQSEACQLLMSIPGVGAVTATSFTTAIEDPANFKKSRSVGAWLGLTTRRYQSGEVDYDGHISRRGDAHLRGLLYEAATVILTRSYADSDLRAWGLKLREKIGFKRAAVAVARKLAVIMHSMLKSGELFNRVTSMA

SEQ ID NO: 321754 - protein, 379 aa, unidentified
MALYLEGKTSVDTNELSPKEATQMSHDVKYIGMDVHKEAIVIAVLNGSGKLIMETIVETKASSILQFLHGLQGELHVTWEEGTWAAWLYDLLQPQVQEVVVCNPRRNALLKEGSKSDKVDARKLADLLRTDMLRPVYHGENGLRTLRELGRSYQTISKDLTRVMNRLKALYRGWGIPCAGTQVYAPRYREEWLSKIVQAGVRRRAELLYQQLDGLQGLRRNLRPEFLAESRKHKAAKLLRQIPCIGPIRAARLIALMQTPHRFRSKRQLWTYSGLGIETHDSAQFRFVRGQLQRSKKPQQLRGLNRNHNHEMKEIFKSTATRASCGTGPFHEFYAALLATGMKPEMARLTLARKIAAITLTLWKRGERFDAEQLKTQAA

SEQ ID NO: 321755 - protein, 386 aa, unidentified
MGDHNNEAFIGIDTAKLRNAVAIAEASRRCEVRYLGEVDASEAATRKLVAKLAAKYKRLSFCYEAGPTGYGLYRLITSLGHECQVAAPSLIPKKPGERVKTNRRDAEGLARLLRAGELTAVWVPDDRHEAMRELTRARDAARQDLTRKRQQVSSMLLRLGRHYPGLKTWNARHRSWLANLKLDHREQRFVLEELLQAERQAGERVERLEQAIREAVADWSLGFMVPALMAMRGVDLVAAVTVLAEIGDLSRFKNPRQLMAYLGLVPSERSTGESVKRGSITKAGNGRARRVLVEAAWCYRHPPRVGYEKQTLVAAAPRRAREIAWKAQVRLCKRFRMLSRRGKKSTVVATAIARELAAFMWAIAREVGNEATPSAAPRARAASRIV

SEQ ID NO: 321756 - protein, 480 aa, unidentified
MNVKTRRTKKQVNVENQAIKLLAKEELGRKIEVIKKELRSYTWRDLETNGKFAKNDKLSFITDDMLIVGCDIGSENHYIRAIDVRGRELSRGAFEFSNTSEGFENAKAWVLALAAKNDKKQIVLGLEPTGHYWFALAAWMISNGISVVQVNPYAVKQSKEIEDNSQLKDDRKDPKLIANLVKDGNYGMPYLPEKVYADMRRLSMFRDQLTEDRIRNINRLHRELKIYFPEYMDAFGKIDGAFTLEILKVSAIPSDITALGAEGIKNIWHNEKLRGRGYSRANEIVSYAEKSVGLTDGTDAGREAVKWYAEQILKLDEQLAVVESTLHEKCREIPCAENILEIKGVGENILAGILAEMGDISRFDDVKEIQKLSGMGLVACSSGKHKGQTKISHRGRKRLRYWLFQAAKSAVSHADEFKQLHEYYTTRTNNPLKKMQSLVVIACKILRVIYTILKTGTTYDSQKLLKDIKRPTASQAPMAA

SEQ ID NO: 321757 - protein, 352 aa, unidentified
MKHFIGCDVHTRNQVVAWMEEETGEIKKRRLEHEGAEVKEFYAAFPRGTVVGIEATFPVYWFERLMGELGHELWVGDAARIRASEVRYQKTDARDAEHILDLLRTDRFPRIWIPSVEERDLRQLLVHRMKQVRARTQVKNQLHALAISQGVCRKSKLWSVKGRKELESLALLPWAARRRKELLETLDRLDEQVRDLDRAVEEAGRGREEVALLRTHPGVGMVVGLAFALTVGPVERFANSRKLVSYWGLNPRENSSGGRQRLGSISKQGNPMMRWLLVEAAQTAARLDPQLGRIYQRLKKKKTSGVAKVAVARRLAVRLFWMLRTRNNYAQLVQMSGSPGSAVVPPPAGSNT

SEQ ID NO: 321758 - protein, 320 aa, unidentified
MQNYIGIDWAQSIMAIARLTDKNDEFTVFEQASNIKELIFYLKSLPGKTSVTVEETTGAQWLYTELKPYCDQLIICDPYRNRLLAEGVKNDKNDAVKLARLLKANMLKEVFHTGDESIHLRKLVRGYEFLINTIIRFKNNKKAIRRACGTGSMDSNSLFVNDSVDPIIECLEEQKARYLEEFKRIEATNKQVRDLRSIPGIGLIGAVKLVATIVDIGRFKSKSSFWAYSGLIKYQNISGGKVLGKRNPRYSRLLKCVFKVASLSTCQTGSKSKFNKYYHYLIEEKKYLPHNARNAVARKIANTVYGVLKTGNQYDAKKIK

SEQ ID NO: 321759 - protein, 370 aa, unidentified
MLDTTIFVGLDVHARSIKAVSLDVMTGEVRCATFGYDAGAVAEWVRSVDPKAKCVYESGVTGFDLQKRLSGLGVDCVVGAVSKMIKPSADRRRKNDRNDAEFLARMLSVGNVVEVWVPDDECEAARDLTRALEDARDDLSRSKQRLSKFLLRHGLVFDERTPTGRRKGNWTRAHWSWIESIRFAEGADNEALAYYVDAVRRAAEDKARLEGLVEAETRKPRWRKRVDSLRCLKGVDTATAADLVFEAGEFSRFRNARSFAAWVGLTPSEHSSGESDRRGAITKAGNKHLRKALVEAAWHYLTCSARPKEPARGQAPDPGARRHAAKGVRRLVERRGALLARGVHNNKANVATARELACWVWAVGLMAEEA

SEQ ID NO: 321760 - protein, 392 aa, unidentified
MIYVGIDVAKDKHDCFAMNSDGEILIENFSFQNNSDGFNLFFNSISQFNESFENIKVGLEATGHYSNNILNFLTSKGFNVFVINPLQTNLFRKGQSLRKTKTDKLDARFIATMLISNNLKPYSNLSYHISELKSLVRHRFRLIEERSKFKVSLSRLVTIVFPELEKIVWSISQNSVLYLLYELPSVKDISECNLKHLTNLLKKHSCGKYSRDKAIEIRDLAKISIGTHSPSISFELRQVIQTILFLQSQIDDIDKELKRLVVELDSPILSIPGISYVTAAFILAEIGDINNFDSPSKLQAFAGLDPSTYQSGKFNATHSVMVKRGSKYLRWALLTATRLVCMRDKNFNDYKKQKLAEGKHYFVALSHTTKKLIRVIYHLLKTNTTYQFQKVA

SEQ ID NO: 321761 - protein, 393 aa, unidentified
MYLVGIDIGKLKHSFCLLEKETGEILVEPVFFENSRDGFNALLSSFKHLPQRDILIGMEDTGHYNLALLKFLLDRNYQVALINPVATNLTRKMQGGISKNDKLDTLTICDVLSSNQRVKSYRISKYSSFDLYEQKLLTREHHNLKEEENQLSNRLQKCIDVVFPEFNSLFKSKYGIVYMNILKEFGSADAIAHADIRTIRKCFDTGRGKHISLTAQELKEAARNSIGFPSSSEATQIKHLVARIELIKEQIAEIDKKIEEFSIQNNSPILSIPGISHFSGTSILAELGDIHNYSKPSQIIKFAGVAPLTYESSQFTAQHTAITKKGCKYLRKTLYQIITPVIQYNPVFRKFYLLKIAQGKGHRCAQGHCVRKLMRVIYHLLSTGTQFDPALLR

SEQ ID NO: 321762 - protein, 376 aa, unidentified
MREKLRFLGLDVHAETIAVAIAEADGEVRSLETIANREESIRKLVRKLGPPEHLRACYEAGPTGFVVYWQLTQLGVECAVVAPSLVPKKPGDRVKTDRRDALKLARSHRSGDLTAVWVPDEDSEALRDLVRQREAAKQDQLRARHRLTKFLLRTGRRPPLGLKAWTERYVAWLEQIRYTQPAQEVTLVDCLNEVEHMSARVKRLEEAILEVVKLAPQPMQDVIRGLQALRGVAHISAVTIAAELGNISSRFESARNLMGYCGVFPSEDSSGKRIRRGGITKAGNAHLRRIVVESAWSYRHLPRVGAKLRKRQHGVPAEITEIAWKAQNRLHKRYMKLTMAGKDQRKTMTAVARELLGFIWAIGIKAEAAGKQQLAA

SEQ ID NO: 321763 - protein, 462 aa, unidentified
MKLYLGGDVSKGYADWVILSEKKQTVLENFQLDDTYAGHCKLYSALEAYFGKHLGLEMYAAVESTGGYENNWYNTLKSYQKVFNLKVVRINPLGVNYNRRASMKRNVTDAISAVSIAEYMINHPENIAYDQDEKWKTLCRHWNFVEMQKQQRVQTINQLETILYSANPTLMRYKKGDLPNWLLELIIQCPTADKLAKAKPERLAKIPYLSLVRAKELVTEANQNIASATDRNAEILVTQIALQIKSFDQNIKSQMQLIERDLICPEIELLKSFKGISTISAIGLMLEIKTIDRFPTVKGFSCYFGLHPKFKQSGDKIIGVRMSKQGSKNMRKILFNIAKGAITYNPLITEVYEKKISHGMSKMAAIGVCMHKILRIIYGMLKNKQAYNPLIDKQNYERSKEKQQDKLQQENTNIDKSRRYQEFDVKAPISRKQTKKRREHDLSQCKINSQSPGSTCSSETKL

SEQ ID NO: 321764 - protein, 400 aa, unidentified
MRVVFGIDVSKASSEVAILVNGEKVHGYTIPNDAIGFNRLLGDLKTVHQLEIVFEATGVYSRRLQAFFEDNSYAYTRLNPLESKKQLDSLRVRKTDKIDAEKLAMSQFILNRKPSYVQEALYQELRDLSRFYQNLTEDIVCAKNRLHKVLQVTFPELENILSAPTGEQYWNLVITFPCNSFVLESDDATLTAIIRQSTAKRISEKRVTYLVDKLTKLANQSYCAVKKTSPVIEEVKYYARELLRLSEHRQGVLEEMVTLAQSLPEYEILLSIPGIAETTATSIIGELGDIRRFHSANQINAFIGIDLRHYESGNFLAKEHITKRGNPYARKILFKCIHNIASASHTNPCHIADFYEKRKRQSQVTSTKPHTIASIHRLIRTMYYLITYNKLYDYTSTQNL

SEQ ID NO: 321765 - protein, 310 aa, unidentified
MTRNVGIDISKETLDVHRTDDGAHAQFQNDSMGRRALFRWIGDKVALVVFEATGVYHRGLEVDLADASVPFAKVNPKQARRFAQAIGKLAKTDRVDAAMLAKMGAVLDLSPQTPATSELHDMRELLAARRALIKDQTAARTRLATAAVGSVQTILRRRLRQIVKDIDQIDDALRNLSSLDVTFARKVAILASIPGIGQLIAITLLIDMPEIGGIDNKQAASLAGLAPVSQSSGKWQGKERIQGGRAQLRKALYMPALVATRVNPDMARKYNQLINAGKEKKVALTAIMRKLLVMANALLRGNRMWTETRP

SEQ ID NO: 321766 - protein, 406 aa, unidentified
MNQNTCITIDVSQNKSHIQGFIGPNKPLSKARTMRNTKQGFQFILILKNLIESKTNETPLIVFEFTGIYHKPLEKFLISQNLKYHIVAPLKAAKARNSEIREQKTDARDCLSLSKLFYSNNLGIFYSENETYSNLRKLNRYYDTCMKHLIKIKVNFRETLAVVYPNYKKLFSSIYSDDSLTFLKEFPHPSLYTSKLEDRIIEILKNKWDHLESWTSSKVKILTPLINEVVSGCNVTEPDTIMLLSYISQIEYYLNQIEITVSQMNELAKKVPLYNLVHSLPGIQDILTCKFIAEVGDISRFSNYKQIVAYAGIDPMIRQSGDKDGLHLKMSKKGNKRLRTILHLMVSSLIKANREPNAIKDKYQKKTHQLNPLKPKVASMACANQLVRVIFYMHKTSSTYTYHECK

SEQ ID NO: 321767 - protein, 347 aa, unidentified
MRFYTKQHKFYCGIDLHAEKMFLCILDETGEVRLHRNIKTDREVFLKVIEPYREDIVVAVECMFTWYWIADLCTAHGIPFVLGHALYMKAIHGGKAKNDKIDSRKIAVLLRGGMIPMAYTYPAKMRATRDLLRRRNHLMRKRAELYAHIQNTRSQYNLPEPLGCIAKPQNRDGIVERFEDTSVQNMIATDLAVITAYDPIIAQVERYIIKTAKHHDPVAHALLNTIPGIGRILSLVILYEIENINRFPRVQDFASYSRLVKCSKESNGKKYGANGKKIGNAHLKWAFSEAAALFLKGNEQGKRYRDRLIKKHGKAKSLSILAHRMGRAVYFMLKNKKPFDQNKFLGL

SEQ ID NO: 321768 - protein, 336 aa, unidentified
MIAVGVDTHKHEHLARALDHLGQALGGLTINASLAGYMKLTQWLRTLEGEVVVGIEGAGSYGAGLCEFLLAEGITVVEVERPRRQDRRRGKSDEIDALMAAKKVLADDGLSTPRAGGTRQALAALLIAQRTCKGERTRLLNQIQALNTTAPLALRERVGEGNGRELAQRLIKMRTRNDRPASEHLIFTVMRDLSRRAQELAAQARTYEHELTILINSLDAALLEEQGVGPISAAKLLVCDPKRLKSEAAFARCNGTAPKPASSGQTIRYRLSRGGDRQANNAIHTIALHRARRDTQTRAYLDRRTSEGKTKREAMRALKRHLSRHLYKQLINIPLT

SEQ ID NO: 321769 - protein, 391 aa, unidentified
MYYCGIDVGKNSHTVLVMNERGEVTRPAQRIENDREGLNQLLGLLSSYAGQIFIGLEATGHYWLALFEALTRQDYPLVVLNPMQVRAYRKIDIRKRKTDRQDAYWIADFVRFAQPSPSSLDIPVYLQLRELSRFRFRLTQQIGDCKRKIICILDRVFPEYKRLFSDVFLRSSRQLLQGAVTAEDFAGLDMTELEQVLNRVSRGRFGYEQAKAIQEAAQKSIGVSFLTDAVHIEMSCLLKQIGLLEQQQKTVEQKLEEMMAHLPQYITTIPGVGLATGAMLLAEIGDIHRFESLEKLVAYAGIDASVYQTGLFEGDQMHMSKRGSHYLRYALWQAASASLLHNPEMKSYYDKKRGEGKPHGVAMGAVCHKLLGRVYVILKECRPYVIYPQKN

SEQ ID NO: 321770 - protein, 432 aa, unidentified
MNPLSVSPEPPPVAAWVGLDWADQQHAICLYEVATGQSTVSRLEQKPEALQDWLSQLRQRFGGAPVAIVLEQARGAVIYALLSADFVRLYPVNPQSLASYRKAYAPSGAKSDPADAVLLMEMVRNSPERFRPWKPDDADTRSLQLLTQNRRQLVNQKTALTNQLTSLLKTYYPQALELAGVLDSLQACDLLTQWPTLEALQQARHGQIRQLYREHGHPSPEQLDRRLEQIRQARPLTTDPAALLSGSMMVQALVQQLRPLLGAIERFDRQIAVIFGKHPDRPLFDSLPGAGAVLAPRLVAAFGTDRDRFQSAQQAQQLFGIAPVTEQSGKQRWVHWRWACPKFLRQTFHEFAGHSRHWCSWAKALYQRLRRFGKGHHAALRVLAFKWIRILFHCWKTRTGYDESIYLKSLQKRNPTLWAEIQLLPPRKKKVA

SEQ ID NO: 321771 - protein, 347 aa, unidentified
MSIRMIGLDTAKTVFQIHGVDEAGKAEIRRKLRRNDLIAFFEKQAACTVVMEACGAAHHWTRMLTGLGHSVKLIAPEAVKPFVKKGKKNDAVDAAAICEAASRPDVKFVPAKSVEQQGILALHAARSLLVKQQTMLANAMRGLATEFGLTVPKGIHKLDELMAVVDADEIIPKRAKQAIAGLHDYCNNLSDGVETFETEIVAHARRDETARRLATIPGIGPITASLIAATVGDISLFKTARQFAAWLGLVPRQSSTGGKTRLGRITKTGNREIRKLLVLGATSMVYRADGWNSAVGAWLRSVLERRPVRLVTVALANKMARIAWAVMTRKEVYRPKSGVAAVAQAAA

SEQ ID NO: 321772 - protein, 428 aa, unidentified
MNETELIRVREFRQLKREIQGSETHLIVGIDVAKDRHHAFLGTATGKTLVKKLIFENSASGFSELLARVEAVRAQSGLSGVVFGLEPTSNYHKPLGRYLISKGCHVVLVGGKAVKNNRELLDERWDKHDTKDAANIADLVSRGKCFYYDMPSGQIEELRGLLSLRARLKKEEHSLNLRIRNNLLAKHFPELDSFYAACERETLAIVRWCLNPQQIAAMPFDEFFKRVAPNARGIGQKLRLQKIHRLAHESIGCPVDSAVQLQAGLLVEKIKQVREQIVQVEQGIQQRCVQFPSYEHLLSIPGFGPYVASKVLATVADPQRFDSAKQVIRSAGYDLCADRSGKSSDQAVPVISKKGNSELRYALYQAALIASSRHRFFMAYFARMLQGRERERGIRTKMRVKLAAKLLVIAWTLMKRGESFNPEYLKVQ

SEQ ID NO: 321773 - protein, 398 aa, unidentified
MSTHQRIWVGIDAGKAHHWAVAVDSDGSKVLSRKVGNDEAEILDLIGDVCPLADEVRWAVDISSRPSALLLALLLGHGQEVVYIPGRTVNRMSGAFPRDHKTDAKDAQTIADTARVRSDFRALQLAPDLVGELSLLTSYRANMTADRVKMINRLRELLVGICPALERAFEFRKRPGPVLVTGFCTPSSLRRIGVKRLTTWLAKRGIRNAADFAERAVEAAKAQHTALPGEKRAAALASDLAQQILDLDERIKKIDHDIAEVLGQDERAEIIQSMPGMGPLLTAEFVALAGDLSGYRDAGHLASHAGIAPISRDSGKRTNNMRRPRHYNRRLCRLFYLSAQSALLRPGASQNYHRRKRAEGMLHPQAVLCLARQRINVLWAMLRDGRPYSPVQPVPGVA

SEQ ID NO: 321774 - protein, 314 aa, unidentified
MKNVGIDVSKKELVVATRPSGERFVVDNDEEGIAKLTKRMKSMKPERIVLEASGGYEIAAVAALARAELPVIVANARQVRQFAQAVGRLAKTDGIDADVLAQFAEAVKPVQRVLPTDAQRELEALVTRRRQLVDMRTGELSRRKTAPIILHPNIDAVIAFLSQQIDKNDHDLDHMIRSSSVWREADDLLKSVPGVGRVLAVTLVALLPELGRLNRKQIAALVGVAPLNNDSGERLGKRTTWGGRAPVRHVLYMATLAACRFNPTIRTFYERLLQRGKPPVVATVAAMRKLITILNAMIRRRSGWSPPSQLAVAP

SEQ ID NO: 321775 - protein, 331 aa, unidentified
MFPVGIDVSKDTLDLCMLYNGIKGRVKTRNIKNDRSAVENTSRWLRLQHCGPEDVHVVMEATGVYHERLATALHDAGFFVSLANPHRSREFARGMGIMTKTDKVDAYMLACYALLKKPHRWEPPAADIRLLSALLRRRDVLLADAVREENRLEKYQSTDTPADVVSSCIRMAQLLREEVRSIERQVKAHIQASPELKRDYALLTSIKSVGPQLGMNMLVVLRSHHFESADQAAAFLGVVPVEKHSGTSVRGRPRMSKIGPPQLRAKLYMSALCGKIHNKRMRTVYEEMCLRGKSKMVAIGALMRKLVHWCYGVLKTGTVFCDGGPHAALNT

SEQ ID NO: 321776 - protein, 355 aa, unidentified
MTHHTAKRSPVTIGFDVGDRTTHLCVLGLDDQVAARGKFATTRGDLRSALKRWRGARVVLEAGSQSPWMSRALRADGFEVHVADPRRVQLLSKDPRKSDRRDAEMLARLGRLGPELIGRIFHRGEQAQADLSVVRARDMVVRLRTQCVQHIRGLSKAFGCRLPDASTRTFASKVRELVPAIVLPAIRPLLDLIDTLSVVIKQFEQELADIVQQRYPETERLQQVTGVGPITSMAFVLSIDDPARFASSRRVGSWLGLCPRSQASGDKDPDLPISKAGDGYLRRLLVQCAHCILSRGKDCDLRRFGERLLRRGGGRGARRKVIVAIARKLAVLLHALLRSGAAYDPDYLLRRASAA

SEQ ID NO: 321777 - protein, 349 aa, unidentified
MRLYNGQHRYYCGIDLHARMMYVCIVDQAGTVMVHRNLPTSREAFEQLIDPYRDEIVVAVECIFSWYWIADLCAELGVAFVLGHALYMKAIHGGKTKNDKIDSHKIAALLRGGMLPMAHAYPQEHRSTRDLLRRRMYLMHQRSELLAHIQNTNIQYNLPGLEKRIASPSNRTALPEHFEEPMVRTSIEADIAMLDRLHEVILRIERTVLAQAREADPVALQLLRSIPGIGKILSLVMLYEVQDVRRFDKVGNFVSYARLVKCSRESAGKKSGSRNSKIGNAHLKWAFSEAAVLFLKDNPAAKSWHDKLVGHYGKAKALSIMAQKLGRAAYFMLKRKEPFDPKKFFQEQI

SEQ ID NO: 321778 - protein, 372 aa, unidentified
MEERTKIHVGLDVHKDSISVAAAEPGRAPGRLIGKVAHDVSKLLKVLAKIDTTEQLHIVYEAGPTGFGLQRALKARGYVCEIIAPSQIPRRPGDRVKTDGRDSVQLAECSRAGQLSAIWIPDPGDEAIRDLSRAREDAVNSRVQARHQLRGFLLRHDVRYTGKTAWCGAYYRWLATLNFGAGAAQTAFTEYWQAVKSADDRVERLTQALQGSITGWRFEPVVEALQALRGVAAITAIGLVAEIGDLGRFAHPRKLMGYLGLVPSEHSSGERTSRGSITKTGNAHARRLLTEAAWNYRFKARIGKEAQLRQQELSEPVRTMAWKAQLRLTQRFAALNARGVQANKACVAVARELAGFVWAIGMQAQREKLTTT

SEQ ID NO: 321779 - protein, 319 aa, unidentified
MQSKLTIGMDIGKGEVVVACHESAFAVLKMANAVPVLRRWLATLPAGSRLGLEATGGYHEPVAQLAHSLGFTVYILNPKDVHHYARALGARGKTDRLDAQVIAAYVAEHNARLHAFVPLSADEKLLRELARRRATLVNAKSMLQQSLRVLPGFEREGRELLRAMGSFADRLERKLAEIAARSSERAALVKRLQTIDGVGTLTSIRCATLFTRVPLHRSDAAVAFFGLDPRPHDSGQHRGRRRLSKRGPSEDRRLLYNAAMSAIRTPTWRPLYQHLRNRGLASTEAIIIIARRMVRIAFAMYQNHSDFNPRLVPRPSCPA

SEQ ID NO: 321780 - protein, 461 aa, unidentified
MKIRLGVDVACRAAHQVSCADEYGVMLWVGHRFRTDPDELEALWRKLPPDAAEVMVVMEPTRNAWVALAAWFRRHGATVVMIPPEQSADLRAYYAKHAKTDRLDSKTLARLPLLHPEGLHREDTLGPGEMLKRAVKVRSGLVHRRTTSMARLDALLEILGPAWVAAIGSDMSLTALRFLARYGDPRTVKRLGPARLAEFFRRSSRGAWHHERADAVIEAAETTLRLWGADGLDFDALAADIAVEARLALAVSEEIKELDKRIAHAYERVDPDGIVRSAPGVGRIGAPQIAGRLGEATRFANLPAVRSFAGLVPRQDSSGIAARAGGPTKAGDACLREALFIAADHARKIDPTLAVRYHRLITEGGKHHNSAVCTVAAVLLTRIAACLRAGRPYQLRDTDGTLITEQRGRQIVTDRYTIPAAVRASRRHLTSTTRTSRRNERAQEGVARRSEAPPVPEPACT

SEQ ID NO: 321781 - protein, 337 aa, unidentified
MALYCAIDLHSTNNVPVVIDENDKILFQKRLPNDLTIVHSALAPYQSELHGVAVESTFNWYWLVDGLIDHGYRPVLVNTSAVKQYEGIKHTNDHSDAFHLAHLMRLDILPTGYIYPREERAVRDLMRKRLQLVRHRVTHMLSAQNQLWRSTGVNTTTKLIKQADLSLLNLVEDRHIKMAIHSNLVIIQALNQQIDLLEKTVKRQAGLKPEFQSLLTMDGVGDILGLTIALEIGDIRRFPRVGNFSSYCRCVDSSRLSNGKKKGDNNRKNGNKYLSWAFIEAAHSIIRHNKTAHRFYQRKRAQKNGALATKALAHKLARAAYYMIRDREPFKLDLLFR

SEQ ID NO: 321782 - protein, 311 aa, unidentified
MNNTIGIDISKDTLDAHRLADGQHKQFLNGKTGHAQLVKWIGKQSDPLIIFEATGAYHRQLERVLCTHIIPFVKVNPKQAHRFAQASGKLAKTDRVDCEMLAKMGAALQLMPKPFTAENLYDLRELLSARRALIKDRTAAKARKATVINALIKQQLEKRLRQIKNDIAKIDALMLDVAREDQYMSERLDILFSIPGIGVITALMILVDMPEIGALNNKQVASLAGLAPMSQSSGKWIGKARIQGGRPNLRNAIFMPALVAIRHNADLKTKYDQLVTAGKEKKVAITAVMRKLLVLANALLRDNRKWAEKAA

SEQ ID NO: 321783 - protein, 339 aa, unidentified
MNAVCTIGLDLAKQYFQVHGIDQRGKVVLQKKLTRHNLLKFFANLPQCVVGMEACGGAHHWARELGKLGHTPKLMAAQYVKPYVKTNKNDRADAEAICEAVTRPNMRFIVIKSVEQQEVLSLHRIRHGLIKRRTALANETRGLLLEFGLSLPQGIGHLRKSLPRIIEDLHNCLTLIQRDTFSDMYSELVDIDERVVKLERQLKVFVDNSEPCQRLLNVPGLGVLSATALLATVGQATCFKNGREMAAWLGIVPRQHSSGGKERLLGISKRGDSYLRSLLIHGARSVLQYCWRKEDERSRWLQRLADRRGPHKALVAQANKTARICWSILARNEEYRSVA

SEQ ID NO: 321784 - protein, 386 aa, unidentified
MVTPIRTRIEQETPPQSTLFLAFELGQNTWKLGFTIGVAQQPRERTIPAGALETLQQEITRAKQRFGLPEDACVVSCYEAGRDGFWLHRHLVAHGIQNHVIDSASIEVNRRQRRAKTDRLDVRKLLTMLLRHSAGETKVWSVVRVPSVEEEDRRQLHRELTTAKQDRTRVINRIQGLLAGHGVQLTLQGDVDAQLDQGQQWDGSPLPSALRTRLKRAWQQVCFLTAHIQTLEAERRALLRRHEDPVIAQVRQLFTLRGIGVNSAWLYVMEFFAWRDFQTPKQVGALAGLTPTPYQSGQARREQGIAKAGKRHIRAMAIEIAWAWRRFQPASALAQWYERRFGHGSARLRKLGIVALARKLLIALWRFLKTGVLPEGAVLKAETPSR

SEQ ID NO: 321785 - protein, 385 aa, unidentified
MPVAAHQSEAPTAIRTDLGAIFVSLELSRSKWLITSLSPGGGEKMSKHAVAAGDVAGLLARFAELKRKARTGQCFPIIVIQEAGLDGFWIHRVLEAEGIESHVVDPASIATSRRRRRAKTDKIDGEALVRALLAYKRGEPRVCAMLRVPAPEEEDRRRITRERKALTNERVRHVNRVKGLLFAQGVSGYEPLRRDRRKRLEALKTGDGRPLPAHLQAQVGRELDRLELLLEQIKAVEAARDAMLAAVPVVSPAPAMLLDLKGIGPEFAAVLWSEGLSRHFDNRRQVAAYAGLAPSPWQSGAVDHDQGVSKAGNPRLRTTLIQTAWLWLRHQPQSALTLWFQDRVKHNGGRLKKATIVALARKLLVALWKYVSAGVVIEGAVMKIA

SEQ ID NO: 321786 - protein, 375 aa, unidentified
MNEHSEAFVGFDTSKLRNAVAIAEGGRDGEVRFFGEIDNTTEATAKLVRKLAGKYERLTFCYEAGPTGYGLYRQITGLGQACSVVAPSLIPKKPGDRVKTNRRDAVSLAKLLRAGELTAVWVPDEGHEAMRDLTRAREAAVIDLRAKRQQVSALLLRLGRHYPQKRGTWTKAHMNWLASQKFEYPQQRFVFEEMMLAVRQAQERLARLEETIRGAVPEWSLAAVVTALMAMRGIDVIAAATLLAEIGDLSRFRTPHEMMAYLGLVPSEDSTGDTVRRGSITKAGNTRARRMLVECSWSYQHPPRVGPHKQHKVDAAPPAVREIAWKAQCRLHKRYRALIRRGKLKTIAITAVARELAGFIWAINREITSACGVAR

SEQ ID NO: 321787 - protein, 330 aa, unidentified
MERTLHFIGADIAKKSIDLVIHGLKSHLQIENNPTGFNQFLVWFKANRIPLTQAIVIMEHTGLYSYCFEKFLFEKSIQFCKVSSLDIKLSIGVTRGKSDRIDATRIARYGSENSLRLTLATPMSKALERLKLLNSSRDNLVRVRAGLLNSTEELRNLGMQDIDIALGAQMKVIKCLDEQILALDQEMEYIIKSEEKINANYQLIRTIKGIGPVVARNTIIKTHNFERFTNARKFACYCGIAPFEHTSGTSIKGRTRVNHLADKEMKCLLDLAAKSAITCDPELSKYYQRRLEMGKSKMATINIVRNKLVGRIFAVVMRQSPFVVCQKVAA

SEQ ID NO: 321788 - protein, 409 aa, unidentified
MKVMYERVAGIDVHKDMIKVAVRSPGDKPWTRKTEILTFRTFYGVLRAMARELRRRGVTHVVMEASGVYTEPVYYALCEEDFTEVAVVNPAHAKALKGHKTDAKDCARLAELFECGLLQGSYIPAAGLKEMRDLSRYRMKTVQARTSEIQRLAKALESAGIKLGSVASEITGKGPVAMIEAMALEGRFTDHHALMCRLHLDRITALDAAVADLEARIAATAADWQREIDLLKTIPGFGDIVAWAWIAEIGPAPHQWFASHHKLASWVSLAPGNNVSAGKRKYGRTGDAGTYIKPMLIQAAWAATQVRGRLQARYNRLVRRMGGPKNPAAKKKAIVAIAHTLLKIAYTVLKTGTGYQEPGADFYTRRESPGHRQAWLERQIQKLHPGCTVTITISPSPDPAPEAALPPGA

SEQ ID NO: 321789 - protein, 366 aa, unidentified
MVQSSTAFIGLDVHKESIDVAIADAKEARHFGRVGGDAHSVDRLVRKLCGVHRAPMFVYEAGPCGFWLYRRLKDRGLACMVVSPSMTPRNAADRVKTDRRDAMKLARLARAGELEPIYVPDEKDEAMRDLVRAREDAVCMQRQARQRLQALLLRNEIRYVGRSNWTQAHRRWIAKIKLPNPAQQIAFEEYVQACDECERRVERFEAAIAAQLEHWRWRPVVQELQALRGISALHAVRIVAELGEFQRFATPRKLMGYLGMIPSEDSSGPRRRQGAITKAGNSSARRALIEAAQAYAHPARVSWVIARRQVNVSAAACEIAWKAQLRLCARFSRLTARRLPRNKIIVAVARELAGFVWAIARPVNPL

SEQ ID NO: 321790 - protein, 415 aa, unidentified
MKVVYPICCGVDVHKSFLIGTIITTTGGVEPHYQKKRFSTYNNDLHRFCNWLLSNNCKNVCMESTGKYWVPVFNILEERGIATTIANPKWVKAVKGNKDDTKDSKWIGDLFRLGLVPGSFIPSKEIRILREFTRYRYKLVSMKSSEKNRFQNAFTVCNIALDSVVSDMFGKSAAAITNYLISEDSFDPEYCKSLLQRSLKNKADSVIESIEGYSITNEQKLRMKIIRSHLDYIQSAIADVDSAIDAMVAKHENLIALLQTVPGIDRNSAITIISEIGTDMEQFGSSKRLCCWAGLTPCNNESAGKKKSVRITRAGVYLKPALVQVAHAAVKATDNSYYRLKYEQISKRRGKKRAIIAVARMILTAVFQMLSTGEAWNPSDLFKVDMPQPLKEKQLEKAVKQAMKFLEKQGIFVPA

SEQ ID NO: 321791 - protein, 354 aa, unidentified
MIIVGCDYHPSFQQIAFVDTETGELKEQRLAHREGAEEFYRALAGTDQQVCVGMEASGHARWFERLLAELNFELKMGDASEIRRKRGRKQKTDRQDAQHILGLLLKNDFPPIWVPSWENRDLRQLLWHRHRMVQARTRIMNQLQAVALNEGLLCRKKLWRERGRQQLEAFRLAPWASRRRHDLLELLDRLNPTIAELSQAIEREVEKCPTAQQLMTHPGVGSLTALAFVLIIGDAGRFQCGKQVASYLGLVPLEDSSGNRRRLGHITKQGSSMLRFLLVEAAQVTVRSLPEWRRKYAHLMMRRGRKTAKVAMARRLAVRLYWMMRQRWDYQQWSNFGSHAGQPGHRDGVQLNIE

SEQ ID NO: 321792 - protein, 415 aa, unidentified
MAVKKDFIQFEQVVERGAGMDVHKETIVVTIRGKGIKTVTKSFSSFTNSLIKLKEWLKEHGIAHIAMESTGVYWKPVFNVLGDDFQIWLVNARHVKNVPGHKTDKKDSRWLAKLLLSGLLKGSFIPNQSIRELRDLTRYKKKLTNQVSSEKNRFQKILEDANIKLSVVLSDVLGSTGRKIIAEILKGDYNPEQLLYLVHGRVKASRKNIKEALTGYVTDHHRFMLRTIQSNIARIEETIAELEARIAEMTKDYQDIIELLETIPGVGHDGAIGIIAEISLDMDKFPTHKHIASWAGMSPGSNESAGKNKSSRITHGNKYLRALLVEQGWAASRTKKTYFSLKYKSLVGRRGKKKAVIAVGHKILIAAYFIIKDKVAFNELGEDYLNNFRKDKLIGYYKKQLEKLEPNIDSDKEAA

SEQ ID NO: 321793 - protein, 405 aa, unidentified
MVFVGIDWAEAHHDVCVLDEQGQVLAKGRVAEGLEGVRRLHELVAEHAEAPEQVVIGIEIDRGLLVQALLVTGYQVYPINPLAVTHYRGRHTTSGAKSDPGDAKLLADLVRTDRHNHRPIAGDSEAAEAVKILARAHQNLIWTRQRQLNQLRSMLREFYPAALEAFDGDLAGRDAIAILERAPTPYQGRSISQAKIVSALRKAGRERNLEVKAAEIQAILQASQLQAPQLVAQAYGRSVAALVGVLRQMNQELAGLENELNDSFEAYPDAEIYLSLPGLGKVLGARVLAEFGDDPTRFVNPKARKNYAGTSPITRASGRSRLVLARFVRNRRLADACYLWAFAALQRSPGARHYYDQLRARGQSHNQALRALANRLVGILHGCLRHQQPYREEVAWQPQLLEAAA

SEQ ID NO: 321794 - protein, 340 aa, unidentified
MNYYAGIDVSLEASSVCVIDASGKIVREAKVASEPAALIAWLGSLGLELTRIGLEAGPLSQWLYAGMREAGLVVELLETRHVRNAFKIMPVKTDRKDAHGIAELMRLGWFRPVHCKSMEAQETRAMLTARKLVQKALHEVEMSLRGVLRGFGLKVGKVAPARFEARIEELVEGHPNLAVIAASLLAVRATLRREFNGFERRLRAIARSDTRARLLMSVPGVGTIVALTHAAAIDDPARFTSSKTVGAHFGLTPTKYQSGETDRSGCISKIGDGSVRAALYESAHIIITKPIKGCTNLKSWAMRVAKRAGMKKAKVALARKLAVIMHRMLADGTTFTTQPA

SEQ ID NO: 321795 - protein, 349 aa, unidentified
MIVIGADIHKRSHTLVAVRAQSGELVGELEIGATEAGHRRALRWAHELGEERVWALEDCRHVSRRLEGALVGAGERALRVPPRLTGSSRRGERGVGKSDRIDALAVARVVVREGPQRFPAAFLDEHAMEIRLLADHRANLVAERTRAQNRLRWHLVELCPELEAELPAGSLDRAVRLRAISKRLEEIETVRARVARELLERVSALAQEARRLEAEIAGLVRAHRPALLEETGCGPLCAAILIGHTAGAERFASDAQFARMAGVAPIPASSGKTQRHRLHRGGNRQLNRALHMIALTRSRLDPQTQAYLARKRAEGKSNREAMRCLKRHLARRFHRLLQEPSTSPSPSSS

SEQ ID NO: 321796 - protein, 372 aa, unidentified
MEGTESNYQWYVGIDWGAERYEVCVLDRQAQVVARRSIAHSGTGIAEFVDWLVKLCEGKPERVAISIETPRGAMVESLVERTFAVFAINPKQVDRFRDRYTVAGAKDDSRDAFVLGDSLRTDEHCFHRVGLDEAAILRMRELSRLEENLQQESNRLSNQLWEQLHRYYPQMLALSKAADEPWLWELIEWAPRPVEAGKPEQVLEALKKEPLRLAPGAEEAASEHALLLLPRLRLAHEQRTQVAKRIQRMLREMSAAEPTEKADKREHSDVKILLSWGIAPVTRQSGKKKVVSMRYGCNMRLRNALYHWARTSVQKDAAAKKQYAALRQAGHSHGRATRGVADRWLAVLMAMLKAGTLYDPERRGKGQATKVS

SEQ ID NO: 321797 - protein, 372 aa, unidentified
MEQITRAVVRGEAVRVGVDLAKRVIQVHAVDAAGQVLCGRALARDKFIAWCAQLPAGCTVAMETSSSAHHWARKLIALGLDARIIAAQLVSPYRKQGASGKNDANDAAAICEAASRPQMHFVPVKSIEQQSMLCVHRLREGLKADRTACINRLRGLLAEFGLVFAQSPAVLEAVLADVLEDASNEMNTLARLALQRLQDQWREIDAHIDWCDERIATHGKDNDAVKKAATLLGIGPVTASAVVATVGEFKQFSSGAQFGAWIGLVPRQHSSGGKSNLGGITKRGDTYLRSLLIQGAKSAVMTAHKRSDPISKWAAALRERVGWQKAVVALANKNARILWAVMTKGDAFDARHVSVKPGLPTTTTPATATATA

SEQ ID NO: 321798 - protein, 382 aa, unidentified
MEMRFIGLDVHQKYVEGCEIGPDKQKRRFRIANTRESWEEFAQTLDPETRVVMEATGNAFWIYDILSDYPAQVVIANTLKTRAIAEARVKTDALDAQILAQLLAADFIPESWVPDKEQYQLRVLLHHRIRLAKIRTMLKNKIHAALIRNGIQSPWSDLFGKNGRKFLESVTLPEMEQIIVCSSLRLLDAVQKEMTALEADLFGRAKENPDVKLLMGIPGISVLSALTILAEIGDISRFSSPKKLASYAGLVPSVHQSGKTRYTGHITKEGRSVLRRILVQCTQRAVQSEGKLRTFYLGLKAKKGHKIAIVATARKLLHVVWAVLVRQEEYRDLRKDLLDKKLKTMNRKAKKYEVTTDELLRIIKDVGEVQGEQEPHWLQGAG

SEQ ID NO: 321799 - protein, 443 aa, unidentified
MKRKDKTHLRGERGQAFANQIRGLNLEQVLCVSLDISKYFHLVMIHNGLGEIVSPTFEIDIFKTGFTGLCRVIDEAVEQTKAQLVLVGMEPTAHYFENLARHLQQRPRPVTLLNSYAVSQNREQQMMHREKTDPIDVAAIGDLLRRGEGSPFQPLKGIYLELQHLDRARLSKVKMQTMLKNQIIGHLDRIFPGLVIIGKEGKKRYTPLFATDFWECQTLQHLIRVCPDPRQLAAMTPTDLISAFHAQHFKMGPKTATTIITYTQKVLLPDPEVIAIRTELLQHDLLLLEALAERIDLMEARLVALVADTPYQIWTKLKGLSDIQVARLAAAIGDPDHYRHAKQVFRRSGLVSGRNDSGVRQQRGKGQPIVKRGDVHLRRALMDALSTFVLHQPVLFRYYTKLKLTKPDLVARVATVRRATGILWATLRDQHSTSLVYKRGVHM

SEQ ID NO: 321800 - protein, 345 aa, unidentified
MSEIIRIGMDTSKHIFVLHGVDASEQPVLRKKLSRNRVLEFFAKLPPTVIGMEACGASQHWARELGKLGHEVKLLAPQLVKPYVMRNKNDGRDAEGLCEAMGRPSMRFVPVKTAEQQAALMLAGLRDGLIARRTQLSNAIRGYAAELGLIAPKGLDKIEPLLAQIAQDDSLPAMAREVFAVQGRQYAALQAELKQLEARLMAWHRADALSRRLAQIPSIGPITATRLVMKTPDPHAFRTGRDFAAWLGLTPKDHSTAGKTRLGKITRAGDEDLRRLFVAGATSVIQQVRRGRGYPSRWLVALLKRKPPKLAAVALANKVARIAWKLMATGESYDAARLDAMGAAV

SEQ ID NO: 321801 - protein, 410 aa, unidentified
MELLHRRCCGLDVHKETVVACLRLVSDGKVTTEVRTFQTTTADLLRLSEWLAANDCTHVAMEATGVYWKPVWHILDDGEFVLVLANAAHVKNVPGRKTDVNDAMWLAELLAHGLIRASFVPDTQTQEMRNLLRTRKQLVREQSSHVLRVQKTLEDANIKLDSVLSDLMGKSGRAMIEALIAGETNPVKLAALADRRAKASHDEFREALRGRVTKHHRFLLRLHLNQIDALSAAMAELDAQVEANLGPFRTAVDLIISIPGIKNLGAHVIVSEIGIDMSRFPSDAHLISWAGICPRNDESAGKRRSNRLRKGAPWLKTTLVQCAWAAVKKKNSYLQAQFYRIKARRGPKKAIMAVAASILTAIYHMLKDGTMYQDLGCNHFDRRSTDQQKKRLVKRLNDLGYAVEIKPLAA

SEQ ID NO: 321802 - protein, 366 aa, unidentified
MKKKIAYVGIDYHLNSLSIAVLIDGQKKLHDTIRLKNVDKIISKYMKKLSRDFEIRACYEASTNGYAFQRKMTNWGYPCDVIAPSLIPKKAGDRRKNDFRDARDLAQNFAAGMLSIVHPPSEDEEAVRSLVRCRTAFKDDAKRIKFKINSLLLSQDLRWPRSKWTFAHRKWLSEIQLSNPYLQKVLDEHLGHLHYMETRLKHLESQIEEIARSEIYSPSVKKLRAFKGIGTLAAMILISEITDFRRFATPRALMAFLGLIPSENSSGDKQRGGSITKAGNRRCRTQLIESMQHYVKSPHISLQMKCDLSQVDADTANRAIKCLKRLHKRYWALTMKGKNRPVAITAIAREFVGFIWAVMQPEPLPA

SEQ ID NO: 321803 - protein, 411 aa, unidentified
MTITCGIDWAEGHHDVALVDADGRRLAKLRIDTGMTGFTALIALLAEHVADPATVPVAIESEKVLLVPALQAAGLTVYPINPRAVARYRERTGQAGGKSDPGDALVLAHILRTDAQLHRPLTAPSQGAAAVKVLARQHQEAIWARQATVNQLRSLLMAYFPAAVLAFPVLTHKAALQVLLAAPTPAQGRRLTRARIATLLQRSGRGNHPAQVEQILAHLSAPALVLPARPELAHGRAARALLGVIVAMQAGIADLEQAMADELGQHPDAALMHAVPGLGPILTARVLAEIGDDRARFPSAAGLRAFAGTAPITKASGRSKQVRARHVRNRRLADACHWWAFAAITKSAGAREHYDRRRAVGDSHNAALRNLANRLLGRLWWCLHNDQEWNENAAWPRLAATTTKRKEALAA

SEQ ID NO: 321804 - protein, 351 aa, unidentified
MYLIGVDYHPSFQTIAFLIEETGECGEQELNHSDGQAEKFYRDLKKREVSVRVGMEATGYSRWFERLLAELGFELWIGDPAQIKAKRVKKQKYDREDARLLLRLMRENNFPQIWVPSPENRDLRQLLWHRHRLVQMRTRIMNQLQALAMNEGKRMKKKLWNEQGRAVLEKLSLGPWASRRRQELLELLDKMNPKIEELTTAAVQEAKKRPDVLRLMTHPGVGPLTALAYVLIIGTPERFPRGKQIGTYVGMIPCEDSSAGKQRLGHISKQGNSLLRFLLVEAAQAAARIHPDWRRRYIHLAMRRHKSIAKVAMGRRMAIQLYWMWRNGCEYSQSGKRGSYAGQLGTVHGGK

SEQ ID NO: 321805 - protein, 367 aa, unidentified
MKKISTVVAKQSKNFPEQKLTIGLDLGDRSSWYCVLEEAGEVLLEQKLSTTPKAMKEVFGGMPRSRMALETGMHSPWVSRLLSELGHEVIVAHARNVRLIGESRKKDDRLDARTLARLARIDPQLLAPVKHRSAQAQSHLMVIRARAGLVRARTSLINTARGLTKSYGERLRGCNPRNLNAEKARELSPELQAALQPLLAAIESLSERIYEYNQRIEKIATESYPQVARLKQVKGVGTLIALTYLLTLEDAQRFRKSRDAGCYVGLQPGRRNSGQSEPQLHISKEGDPYLRTLLVQGAHHILGPFGADSDLRRWGVKLAERGGKNGKKRAVIATARKLAVLLHRLWVSGEVYEPLRNSRPVLQSAAA

SEQ ID NO: 321806 - protein, 319 aa, unidentified
MAQNDLVVAGIDVAKDKVDVCIRSLSLKRTFASTEEGRRELTSWLRRRKVGKAVMEASGGYERDWAKVLRNAEIEVRIVDPKRVRSFAQSAGRLAKNDTIDAEMIAWFAETFDEARGQAYDETREQLHQMVNARQALKGMQAKLESQGEHALPAAVQRMHARILKTITVELVKFEAAIAAMIQATPRFTELAEIIESVPGIGRTTSAALIAAMPELGQANNKIVAALLGVAPYDDDSGRRRGERHIKGGRRRTRNVFYMACLGAATQHNPVLKASYDRLVAKGKEKKVALIACMRKLISILNIMIERRQKWDASRYALS

SEQ ID NO: 321807 - protein, 355 aa, unidentified
MTSAKYIGRDVHKETISIAVMNSMGKLLMESIIETKAGTILQFFAGLRGDLHVTCEEGTWAAWLYDLLKAHVTEMIVCNPRKNALLKDRNKSDRIDARKLAELLRLNYLKPVYHGEHGLRMLKELSRTYLAISKDLVRVMNRLKALYRGWGIACSGRSVYAASYREAWLKKIIEPGVRLRAEYFYQQLDTLLRLRREVRRNLLIESRKHSATKMLSQIPTIGPIRSAHLVALIQTPHRFRTKRQLWAYSGLAVETHDSAQFRYVDGQLFRSRKPQQLRGLNEDHNHDLKNIFKGAAQKATVGAGPFREFYERLLAKGIKPSMARLTVARKIAAITLAVWKKGVRFDPEQLKLQAA

SEQ ID NO: 321808 - protein, 409 aa, unidentified
MDKLFVGIDVGSRDNAVYIMLPDGEKHSSFSVQNNPGGAQTLSKRIVSALTGTKLDAAVIGIEATSVYGDNLIYFLRGDGTLGQFDRKFHILNPKQVNKFKESHPDLPKTDPVDAFVIADNLRFGRITKAVYESDYRYQALQTLTRSRYYAVQNLTKEKQRFMNYLFLKCSGLTQDKVFSNSFGVAALELYEIIESPDDIANMNVRQLASFLAEKGKNRFPDPEKVAQAVISAAKNSYVLPDPVNASVSQTLAVSISSIRAMQLQIKALNIEIERQFKDMHNTLKSVPGIGPVYAAGIAAEIGDINRFDNQAALAKYAGLAWTKHQSGKFNGQNTRLIKSGNRFLKYYLCEAAFSLVRCDTEYRRYYDLKYKEVNKYQHKRALALTARKMVRLVFRLLKDNRLYTPAAV

SEQ ID NO: 321809 - protein, 382 aa, unidentified
MDCMLLVPPLRWRRRRVLVEWIGLSDRGNLEARRRHGLTRERSLGLDARMAIRRADQNPSLPEEVMTDKAIVGVDVSKNWIDVAVAGARDVMRLPNTQEAIGAWLDRSAPPAIVGFEPTGGYERPLVACLGPRAILPFRVHPNALVAFRKSRGIRAKTDRIDARLIADFAADAWSRGVVRPAVGGDPALRELAARRRQLVDSLHAERCRLDRAQASAVRQSLAAGIEALVANLQGIEAAIDAAIAGNADAAQCAALLQSVKGVGPITAATLLADLPELGRASAKEIAALVGLAPQNRESGKKKAQARTGHGRPGVRKVLFNAARSAIRHNPVLKAFYQKLVGQNRRPGKVALIAVMRKILVILNAIARDRMPWNYLQSTSGS

SEQ ID NO: 321810 - protein, 393 aa, unidentified
MLFVGIDVAKSHHDVAVLDDNGLVVLRHLRILNNRQGFSTLHQFLIQLSADTNDDIRIALEATGHYHLNLLLFLQSNAYPAFAYNPFLIKEFARTLTLRKTKTDKADALIIAKKLATDLSPDRFKPNFNMQELKFLTRHRNRLTDTRSKLKTQYIRLLDILFPELAGFIGKTNLHHQYVYDLLTKYPSPAKLSRAHTNALVKLLHNHGNRLDMAQQLKALAKQSIGLSSPANAFELVQTISAIRLYDEQINAIDQEIAQIMNSLDEAAIVTSITGISNRLGSVILAEVNNINNFHSPDQLLAFAGLEPAVYQSGQMSATGKMVKRGSTSFRWALFQAAEYASHWSPTIHQYRQKKLGEGKHYYVVMTHVAKKLVRIIYYLLKHHQYYDESKLI

SEQ ID NO: 321811 - protein, 346 aa, unidentified
MWIIGCDFHPRFQQVAFLNTETGECGNRRLEHSKGEAEQFYRALQGQVVRVGMEAGGHSRWFERLLAELGHELWTGDPAQICAKRVRKQRNDVLDADHILGLLVEKQGEGFPRVWRPTLAERDIRQLVLHRHRLVQIRTRVKNQLQALAMNQQMCQKQKLWSKSGRAQFEALALPEWAARRRQDNLELLDELNRRTEPLDQAVKLQAAQRAEVARLMTHPGVGEVTALAYAMTIGDPRRFHCGKQLASYLGLIPSEDSSGGKQRLGHITKQGNALLRGLLVEAAHVAVRHEAELGRCYRRLAMKKNCSIAAVAVARKLAVRLWLMWIRGLDYGQMFFESGSHAGQA

SEQ ID NO: 321812 - protein, 422 aa, unidentified
MNYKQNEKINQVKESTLVVGIDIGSTTQYARAFDWRGIELGKVFPFSNSREGFESFKAWMQHLQDKYKKLDAIVGIEPTGHYWFDLGAYLEDEGILLVMVNPYAVKQTKELDDNSQSKNDRKDPKVIAKLVTEGRYSAPYTPDGVYADLRIMVANRKRLIREMTQIKNRFARWFAIYFPEYTDVFGDYEAQSSMLLLKKVCTPEAIVELGAEKINQIWRDAKLRAVGMKRATTLCETAKRSIGLKKGSSAARYEMKLLLEDYEYKKAQLDAVMEEIEKLCRKIPESEQMLAIKGIGVITVAGFLAEVGDVRRIESPRQIQKLAGLSLRENSSGKHKGQTTISKRGRSKLRAVLFNAAIPLIAKNPEFKSLHEYYTTRANNPLKKKQSVIAISCKLIRVFYAILANGVTYDAQKMLSDIHRQP

SEQ ID NO: 321813 - protein, 425 aa, unidentified
MASVKQKRKETTVKEKVYVGIDVAKADSKVAVADSSGEIILKPFTITNSKKGIEKLLERLSGYSKDQIVCGMEISSNYWENMLSYFNKKDVTCVLLNPYQVKKYRQAMGAKIKTDKVDAEAIAQLLSNRKHEKLRISGDDAMELKELVRVKHAFGRRVKDLKKSVLSLLHLVFPEYTDLISHPFSKVSTDILTRFPTAVHMADKASPSRLVKIFRKYQGCNFNLEKAQRLMAAARDSFYSGKASRSRGMTICMQLEEISSLEEKIKAIENEIRSIICPSDPDGGPSDYDILNSIKGVGIGTIATFIAHIGDVSMFCSSDKVVSYIGFYPNIVESGKYKRKNPTIQKAGPKDLRYMLYLSSVSCLKHNSQLRKYYHDNVSAGMHPKKALIKVAVKLARMMYSMLKNRTRYQPSRVIMQPLPINSAA

SEQ ID NO: 321814 - protein, 351 aa, unidentified
MPRTSTVHAVTAIGIDMGKNTLHIVGLDSRGAIVLREKVSRGRITSRLANLPPCLIGIEAGLATHYVARELAALGHDVKQVPPTYAKPFRQGHKNDFRDAQAVAEAVQRPTTRFVPAKTDEQLDLQALHRVRSRLVSERTAVINQMRGFLLERGIIVRQGLRFLRQGLPDILAKRTDVLSPRMGRIVADLASDWRQLDERIEAVTDEIETLAKSDDSCRRVMTVPGIGPIISSAMVAAIGSGAAFARGRDFSAWMGLVPKQMSTGDRTILGRISKRGNGYLRTLFMQAARVILLRPASWPKHSFGVWLARAAQRLHPNVLAAALANKLGRIAWTVLAQERSYEARVTKAAA

SEQ ID NO: 321815 - protein, 375 aa, unidentified
MSTNLRYLGLDVHADTIAVAMAEPSGAVRNLGVIPNRPEAVAKLIRKLRGREQLRACYEAGPCGYVLYWQLTTLGVACDVVAPTLVPTKPGDRVKTDRRDAETLARCHRAGDLTRVWVPDAAHEALRDLVRAREAAQQDQLRARHRLGTLLVRHGIRPPPGAQPWSQRHRRWLDTLPLDPPALQATMDDSLHEVDHAAARLERLEGTLDAAVAAAPAPLRAVIAALQTLRGVRQVTAATIVSEVGLLSRFTHPRQLMGYSGTVPAEHSSGARVQRGAITKTGNAHLRRVLVEAAWAYRFPPKCGKALRTRQRGQPDAITAIAWKAQHRLSTRYRRLPGRGKPTPQVVTAVARELVGFIWAIGIAAERAGTAAAAA

SEQ ID NO: 321816 - protein, 392 aa, unidentified
MVVSVGIDVSKDKHDCFILSSEGEVLVDVFTIPNTMDGFNCLLKRIQGCTAPQDKIKVGLEATGHYSYNLLGFLLDNGLATYVLNPLRTNLYRKSLSLRKTKTDRVDARTIASMLLSDAGLKPYTNTAYHNEELKSLTRYRFDKVKERAKLKSSIARLVCILFPELEKLVPSLHIASVYALLEAFPGAKQVASAHLTRLKALLETASKGHYKRDMALEIRNAAKNSIGSQMPAKSLELQHTIRLIRELDHEIDEIEEQIKSIMDELHSPITTIPGLGFRMAAMILAEVGDFTRFDSPDKLLAYAGMSPSTYQSGQLKNCYPHMEKRGSRYLRYALYNATKYVCHWNPAFADYLAKKRAEGKHYNIAISHAAKKLVRLIFALEKSRQPYCSAA

SEQ ID NO: 321817 - protein, 410 aa, unidentified
MPKIVYPVCCGIDVHKSFVVACIANTDATLVTTYKSKRFSTFTGDLRRLADWLAANDCRDVCMESTGKYWIPVWNILEPTCRLVLAHPKYVKAIKGKKTDKRDAKWIADIFKHDLLNGSFIPPADIRQLRDLVRYHTKLTSYNTGEKNRAQNCLTVSNIKLDDVFSDVFGKAASAITQRLLENNEPFDVRPYLTKGIKASPEEIQAAVDGAMCATQAEKLRIIRSHMDSLATCKANLESEILTLAQKFLPQLNLLLTVPGIHTFSAIAILGEIGVDMSVFETARHLCSWAGLAPQNDNSAGKKKTTRVSRAGVYIKPMLVQCALAAIKSSKHPEIKNRYNAIKKRRGHKKALIAIARMLLTAIYNILKKNEPYNAELYLQANKPPVQREVSVEQAIFILQRQGYLVKPAA

SEQ ID NO: 321818 - protein, 407 aa, unidentified
MYYLGIDISKKSFTVSVLDEEGEAITKSLTYPCTGKGFEKLVDKISSLKLKKSEVVIGIEATGNLWENLYSFLKGYRVVILNPYQTRKYHQVLSKKAKTDKVDALVIAGLLRSKEALASYVPEEEVQVLRELVRLRHYLQKDKKNYLRKAYSLLSLVFPEYTNFVKDPFKKVSSIILKKYPTAIHMARARRTDLVKMARKIQGNNYSSELAEKLIEVAKESIYSGKASEVRGMALRIIIDEIESLRNKIKEIEDKIKEILSSDEPSSPQKRLLSIPGVGPKTVAAFLGEVGGDVSRFSSANKLIGFIGWHPRISESGEKKNLHPKMSKKGPSALRASLYMAAVASLKHNPYLRSLYHRKISEGKESKQALICVGKKILSIMYSMLKYEADYDPQRIFFQFEKERILT

SEQ ID NO: 321819 - protein, 426 aa, unidentified
MKFKQREAQNQRIAHISTQHLLIGIDIAKEQHVASAVNYRGIEIGRPLTFQNSEEGLKKLMRWMQTLQHQNSFSSVMIGLEPTGHYWLNLADWLAAQGLEVVLANPLTVKRNKENRDNSQSKNDIKDSLVIADCVSRGFYSSYHPNAEIYQRIRIVMNDREYWVKQFTSLKGRLLRCLDLYFPEYQRVFPDWEIVRSIATLKVFPLPEDLKQLTSHEIITAWKEKGGMKRAGGKTGLESSARLLAAARHSIGRTLGVQEARNELKRLVEEYERHSQRLKEMEQELEVLLEQAPHVTLLRTIKGLNTIVIAALLAGCGDLGKYAHGRQLLSQAGLNLTDNRSGLNEGQVGISKRGRRQLRKYLYLGTLSLVANHPQFKAWHEQNVKEKKMKKHRSIFKLIGKLARILVGMVKRGEGFQIEAAHQTAA

SEQ ID NO: 321820 - protein, 316 aa, unidentified
MAKLVSKITLGIDVAKDQHVVFNWQTQETTTLPNQRNEIKAWLKSFSDPLQIAIEPTSHYHLMVVDEAQAQGHTVYLIDQRQLVHYRQAINVRNKTDPLDAWLLARYLEHEGHLLRPFQPQDPRARRLWALLLRRATVVQSRQQLQQSFREVGWSIKALITQFSQVLLRIDQDVKRLIRELGWWADYQRCCSIPGIGPGNAAALVATYRRGAFSGSDAFVAYMGLDVRIRESGKFKGKRKLTKRGEAELRRLLYCASHAARTNQRFADYYQKQLEKGLTKIAARVALARKLARIAFALMQNKETFIKQKKPYCMAP

SEQ ID NO: 321821 - protein, 341 aa, unidentified
MKTKQHFLIGSDISKKWFDATLLVMNGRHPSVIETKRFDNTKKGFICFLKWLIKNGVTDLGQVLLVMENTGLYNRLLWVFCQQHGLPVHVGNAAEIKWSFGLTRGKNDAVDSRRLAEYAAKNAWKLKPTPAPSPELWQLKDLVTARTKMLRQKTALSVHLGELRGVNSPEVQQIMEAGHRAALEGLKASIKAVEAEIKRIIRQDEALWENYKLVKTVPGVGHVIAVYLICCTNNFTRLISGKQLACYAGVVPFEHSSGSSVRGRSRVSHMANKELKRLLHLGALSVRTHNPEFRGYYERKKAEGKHSMCVLNAIRNKIVLRVAAVIKAQQPYVSREVKMAA

SEQ ID NO: 321822 - protein, 346 aa, unidentified
MEHYAGIDVSLEWSSICVVDALGKIVKEAKISSEPATLVAFFEALGFAVKRIGLEAGPLSQWLHAGLKRAGFEAVLLETRHVKAALSAMTVKTDRKDARGLAQLIRMGWFRPVHAKSIRSQEVRALLVARKQLLGRLIDVELSMRGILRGFGLKVGPVTRKGFEARIRELVRGQATLERIAGAMLSAREALKAEYERLHKTVLAIVRDDAVCGRLMTVPSVGPLVAITYKSAMDDPNRITKSKAAGALFGLTPRKYQSGEKDVTSGITRAGDEMVRTALYEAANVLLSRITRFSKLKRWGIDVAKRRGSKRAKVALARKIAVILHRMWVDGSTYRWSEAQPIAAQA

SEQ ID NO: 321823 - protein, 337 aa, unidentified
MKYSGIDLHSNNSVVTVTDEEDRVVAEKRLPNDLAKIIGFLLPWREELAGVVVESTYNWYWLVDGLQEAGYKVHLANTVAIKKYEGLKHSGDESDAWYLAHLLRLGILPTGTILPPEQRALRDLARKRMQLVRSRTSQILAVENITARQQGARITSNQIKRLDADTVDQMQLPADVALAIKSNLAVISTLDTQIDRLEKRLQESVQVRTEYGLLNSVPGIGRILATTILLETGPIDRFADVGNFASYARCVDSVRTSNGKKKGEGNSKNGNKYLAWAFVEVANFALRYCPEAKRFYERKKAKTKNVIAIKALAHKLARACYHILKEGKPFDAKRCFA

SEQ ID NO: 321824 - protein, 433 aa, unidentified
MSKFFNSPTVGIDISADFSYVAILAPNGDVFKKPFRIKHDVNGFNHLLKEIKKVEEEFNMKTAIFMESTGVYHLSLFHFLNKNFDNTFVINPLVTKCNKNVDIRKVKNDKKDALSIAQIGKFQNIKLSQSVSMDIFQLKSLVREYYKLTDNCSTYKKKLSTDLRVIFPGYKNVFSNVTSNSSLAILNDYPTPEAILNAPKDVLIDILIKKSKKGRTWAEKVYSNLIDYANEATIIGLPLHGFSVKITSTIKIIKTLESEIKNLLEQIESLINSPNFSKQIRKNIELIDSIPGIGRLTAITLIAEIGDINGFIKPKHLVAFFGIDSSVNESGKFKGNQNRISKRGTRIGRRALYSAALACIRTNRNGVPINKVLLDYYQNNLNGKKPKVALVAIMHKIINYIFSVLRNQTPFEVRDPRIHKQMYLENKSKNKAA

SEQ ID NO: 321825 - protein, 313 aa, unidentified
MPVSCGVGIDVAKDALEVAWSTEPEARWHTTNDERGWAALIDRLRALQPNVIVLEASGGYETGVASALSVAGLPVAVVNPRQVRAFAQALGRLEKTDALDAGVLAEFAVRIDPVPRPVADEVQADLQALVTRRRQLVEMLTAERNRVPLARGAVRKNLLAHIAWLEKQIGQTDRDLRTRIENSPIWRVRDRLLQSVPGIGPTTAACLLASLPELGTLSHRQIGKLVGVAPLPDDSGTRVGYRRIQGGRAAVRRALYMATVTAIVHNPPIAAAYRRWRAAGKLPKVALVAAMHKLLIHLNAMLKHHTSWQPTQP

SEQ ID NO: 321826 - protein, 400 aa, unidentified
MLSIGIDVSKGKSTVCGMKPGGEIVYTPFEVQHTREGMSELVSLLRSSGEEVRAVLESTGSYHCPVVTALLENGIFVSVVNSLRMKRFCSQSIRKVKTDRIDAMQIALYGLAYWQELQPARLPEDTYRELQLLARQYYQMTSMLIKAKVNFNALCDQVLPSMQELMSDHAGRHKLSDFVLRYRHTTHILEMGETRFRKDYCKWAEKKGYRNCERMAALIFATAQNGIPVLPNAPSTQIVITEAIRVLHTVEASRDAILTQMQALAKTLPEYSLVREMPCIGDTLAPRLIAEIGDVRRFHSKRALIAYAGIDAPPYQSGKFCANNRHISKRGNRYLRKTGYEVMQSYVMHKPANDPIFTFIEKKRGEGKSGKLAMVAGLNKFLRVYYGKVTELYRSLPAIE

SEQ ID NO: 321827 - protein, 543 aa, unidentified
MVVGSRLCSLFSLDIFAWYNKKKLAFYYTHNPLFVKFGILIYVNIIRSPPPGIEIQISLKSISGRYTMKNQNIYRNNNYALKETLSNYKPEQLLYIPIEVGKFNHKASIVNFFGDIVVKLFEFPNKKHGLDFFVTNLNFATTSSNAQKIFLGCESCGHYHLNLVHHLKQLNFPVEIINPRDTRKENPNKNSKTDNIDLGAIARVLISNKGGRQIVPEGVYYNLQRAARTRRKFVQRKTSSKNIITGLLDRIFPGLWDKDAPIFSDRWGKASMLLLERYPHPHRIIRLGEQRLARFLRKNNTKLGMDSAHKIIDAAKDSLTKPLSELHMDIFALKSHIKCLNLYNETIAQLEQEIACLLVQTPGIYLLSIDGISVIFAGEFTAEVGDINRFAYANQIISFAGSCSKVFESAEYQAQGLHISGRGSKFLRSTLNQVALALNAWCEPFHLYYTNKALQKPDKPGIARIATGNKFVKLAFALMKYEQLYKPRGLLLDEKNYYSNLWSKIIRKLSGFNLTNISQENNYLLKIKKYLEEKYALTLSTKL

SEQ ID NO: 321828 - protein, 400 aa, unidentified
MSKRRACVWAGIDAGKGHHWTAAVDETGATLWSKKVDNDESAILSALGEILDLADEVRWAVDISGTASALLLALLAAHGQQAVYVPGRTVNRMAGAYRGEAKTDARDAYIIAETARHRRDFATIDVPAQLAAELALLTAHRSDLVADRVRMINRLRDVLTGVFPALERSFDYSAHKGALVLLTGYQTPAAIRRRGRARLTAWLANRGVRSADAVAVTALEAAQTQQTALPGEEVAAQIVADLAEQILALDERLKRIEKRIRETFRSHPQAEIIESLPGMGPMLGAEFVVAAGDLTAYADAGHLASAAGLVPVPRDSGRRTGNLHRPKRYSRRLRRVFYLSAQTSIIREGPNRDFYLKKRGEGCKHVQAIIALARRRASVLWALLRDGRMFTTAPPVTQAA

SEQ ID NO: 321829 - protein, 348 aa, unidentified
MAMTIVESTRLITGGVDTHLDVHVAAAVDANGGVLGVESFATTPGGYRELCSWLATFGTVDRVGVEGTGAYGAGLARHLRGRGVVVIEVDRPNRQERRRNGKSDELDAIEAARAALSGRASGIAKSADGDVEAIRALLVARRSGRNVRIKYLNQIRHLGFTAPDALRERLRDVPVDQLGRTAAALRPTVGSDTVVYATKLAIATLGRRVVALDADAKRLDGALDTLVRRHAPRLLEVYGVGTHTAAILLVAAGDNPHRLQNEAAFAHLCGVAPLRASSGKVDRHRLNPGGNRQANHALWRIVFTRMAGDERTRKYVARRLADGRSTREIMRALKRYVARELYPHLALD

SEQ ID NO: 321830 - protein, 311 aa, unidentified
MTEHTTVGIDIAKETFDVFISPDGIFLHLENTPQGHQLLLDALSSRAVARIVMEATGRYHNLLAATLELAGLPVAVVNPAQVKHFARALGTLFKTDPNDARIICEFGRRMTPDVRPAPDEQTQRLAMMVSRRRQLVDNRTMEQNRYGSCADELIRTGIKRHIDWLNAEIKDTDDDIDQQIKVMPLWQEKVKLLEEVKGIGRTTLAVLLSMLPELGQLNRRKISALVGVCPYAHDSGKMKGKRCIWGGRSAVRAALYMAAMSAVRYNPTIQAFFEKLRSKGKAFKVPMTACVRKLVTILNAMVRDNKKWAAA

SEQ ID NO: 321831 - protein, 428 aa, unidentified
MSNQELIRRKQYCQIVKEIAGSDQHMVVGIDVGKDNHHAFMGTATGKSLFRKLIFENNFEGFSRLLKTADEIKLQNDFSKIVYGLEPTGNYHKPLARHLIRCGSNVVLVSGEAVKKNRSLLDGRWDKHDTKCAANIADLVSRGRCLYYDSPSPEIIELRSLLSLRKRLKREEHSLRMRIRNNLLTQYFPELDRFYSACESESLAIVKWCLDPDQIAGMAFEPFFQMVTQIRRGPAQLLRLRKIYQQASESIGCPMGSAAAFEAQLLVDKLKQVRQQLKDTEAAIKEDALKFEEYSCLLTIPGFGPYISAKVLASIGDPFRFRNRKQLIKMAGYDLCANRSGKTSDKAIPVISKKGNSELRYALYQAAKVASTKVDLFRTYFTELLRGRERERGIKTKMCVKLAAKMLIIAWTLMKKKEPFDPEYLTIG

SEQ ID NO: 321832 - protein, 362 aa, unidentified
MGMRQIIALDLGKFKTVACVMNAADRSHIFETIEMSPATLRDLLARHATDGPAEETLVVFETCDTAGWVHDACAALGVRAACVAANDEPWHWRRVKRKTDRDDALKLAKLALLDQLTVVHVPSPQQRQRRRLILHRRSVVSRRTQSRNAIRSIFSQQGIALARGGKQWTKAGLEQLREHAKPLADCADLLDLWRGRLGVELDLMAAADAQLKLLDHALDALSSADARVKLLQTIKGVGPRVAEAVVLHLDDPHRFTSAEHVASYAGLVPKQIESGEMSRFGHITRHGPSLLRSMLVESAWVVWRHNPWAQAWVNKISHGSRSRRKLAIVALARHLLTILWAMLRDNTPFRDPGRPPAPVLSG

SEQ ID NO: 321833 - protein, 388 aa, unidentified
MIYVGIDIAKLNHFASAISSDGEELIKPFKFTNDNDGFQLLISKLAPLDKDSLIIGLESTAHYGDNLVRYLVAKNYKVCVLNPIKTSTMHKKNIRKTKTDKVDTYIICKTLMMQESLRFVTFYDLDLMDLKALGRFRQKTIKQRTRLKIQLTSYVDEIFPELPYFFKSGLHQKSVYALLKEAPTPEAIASMHMTHLAHLLKVNSHGRFEKEMAQQLRVLAQKSVGANDSSLSIQVTHTIQQIELLDSQLERVEAEMTEIIKFNDSVIMTIPGIGYINGGMILGEIGDIHRFSSPNKLLAYAGLDPSVYQSGNFQAKKTRMSKRGSKVLRYALVNAAHNVVKNNATFKAYYDAKMAEGRTHYNALGHCSGKLVRIIWKMMTDNLEFNLN

SEQ ID NO: 321834 - protein, 323 aa, unidentified
MAKHITICAGIDTGKRKLDVAVEGSREQLQVENTSEGHAVLLAWLRRHRVKRVGIEASGGYEQPVVAELRRKRFVVVVFQPAQVRAYAKFHLQRAKNDKIDAALIAACTAAVRKIHPAPDPRLQPFAEQLTMIDQIGEDIARLKNRIESCRNTQIKGLWEEDLARLAKREKVELKALIASICKHPDLAKRLDLINSIDGIGLPTAVAILVRMPEIGQITREQAAALAGLAPYDDDSGEHSGTRHIEGGRQRLRHALYAAALAASFRWNKQLITLYRRLIAAGKEHKRALVACARKMLVFANTIVARGTPWQDRPPENAALTAS

SEQ ID NO: 321835 - protein, 367 aa, unidentified
MDETITYVGLDVHKETIAVALADGGGRGDVRAFGQIVNTPTALARMLAKLSQPGRTLKFCYEAGPCGYGIQRQLSAAGHDCVVVAPSLIPKKPGDRIKTDRRDASNLARLHRAGELSAVWIPDTAHEAMRDLVRARLAAVRSLRQARQQLSGFLLRHGFHYSRPAWTQMHRRWLAGLCFEQPIHHIVLEDHIATIEAATERRDRLTKQIEIMLPDWSLAPVVLAVQSLRGMALVTAATMIAELGDLSRFTNPRQLMAYLGLVPSEHSSGGTRRQGGITKAGNTTARRMLIEAAWSYRFPAKISREQLIRQEQLPKPIRDTAWKAQLRLCSRYRKLAKAGKPATTVTTAIARELSGFVWSIACQVSTR

SEQ ID NO: 321836 - protein, 345 aa, unidentified
MPEKAEVAVVGIDIGKNSFHVVGLSDRGEVVLRQKWSRSQIEVRLANMPPCLIGMEACVGAHHLSRRLRALGHNARLMPAKYVRPYSKGQKNDFRDAEAIAEAVQRPTMKFVATKTVEQLDLQALHRVRERLVGQRTGIINQIRAFLLERGIAVRQGQRFLRTELPDILAAPVDVLSPQMARLVEGLAADWRHLDERIDQLSSEIHAMARDDRNCERLMSVPGIGPIISSAMVAAIGGGEAFNRGRDFGAWLGLVPRQMSTGDRTVLGPISRRGNRYLRVLFVQAAWVVLIRPGSWERYGLKTWIESARKRLHRNVLAIALANKLARIAWSVLANGRNFEVSAMV

SEQ ID NO: 321837 - protein, 320 aa, unidentified
MTDSKKKNHMGIDVSKHQLEIAVYESDYVYRCANKQSAFTELIAELVALRPARIVLEATGGLELPLVTALHAAGLPVVVINPRQVRDFAKALGLLAKTDRLDAQVLARFAAVIQPALRPIKSAEEQELDALTGRRGQLVEILAGEKNRLKSANSPTVREEIKAHIEWLEGRITALDRQLEKLLKTSAVWQRRNHIFQSVPGIGPVVSLSLLADLPELGTLNRHQIGKLVGVAPLNRDSGKQRGARHIFGGRARVRSMLYMAAFNAIRSNPVIKAFYQQLRARHKLYKVAITACMRKLITILNVMVRDNTTWKVERKTLSA

SEQ ID NO: 321838 - protein, 366 aa, unidentified
MDKRTTVGIDLAKEIFAICVLDAQGAVLERKALRRAAFERWAESLAAPCTVAMEACGSAHHWGRVFAARGHAVRLMAAEFVVPFRQGGKNDGNDALAIAIAARQPTMRFVPVKTVEQQAILAWHRMRQGWIEERTALLNRVRGLLAEFGLVPGRSPAVLIAAMARLVDEGTAPAPLRAIVQQAREQLHQLDARLGACDVQIQAHARQSPQAERLRALLGVGPITASAVVATVPDARLFRHGRLFGAWLGLTPRQHSTGGKTRLGASSKRGDAYLRGLLVNGARSALQAALRAAPDKATRLQLWMVGLARRCGYQKALVAIANKHARMIWAMLARDERYDPEAWRRHARTQPSDATGMPMPSAVGVS

SEQ ID NO: 321839 - protein, 318 aa, unidentified
MNVIGLDISKDTIDVTLITAKSEMDYIKIGNSHEGFEKLIDWIKNKRVRKIAISMEATGIYYEQAAEYLSAVYTVYVINPLKIKDYAKSQFSHTKTDKADSKLIADYAKRHLDKLTPFRSSENPMLYKLINLLQQLKQQKHESQNRLHTAKDPFIRSTHETIILLLSKKIDETSKRIDSTIKQQKSLNAEYQNLQTIPAIGKDTAAILLRHLTDKTFRTANQFVSFAGLSPKIEQSGSSVNKKGRLSRYGHRQLKRALFMPALVAYRINAFPQLVKNLEAAKKPKMVVIVAIMRKLAKIAYYIHKTQKPFDKARHKTV

SEQ ID NO: 321840 - protein, 405 aa, unidentified
MLFVGDDWAEDHHDIEMQDETGRRLAKARLAEGLAGVAQFHELVAQQLGDAESAQVAIGIETDRGPWVIALIAAGYRVFAVNPLQVARYRERQSVSGAKSDAADAHILADMVRTDSHQLRQVAGDSDQAEAVKVVSRAHKTLIWERTRHAQRLRNALREFFPAALLAFDDLSAADTLELLAKAPDPDAAARLTIAQITAALKRARRHHAADKAKVLQSALRTEQLRQPAAVSTAYAATVRAQAAVIATLNTQIKTMGAQVEAHFGQHPDVEIYLSQPGMGPIVGARVLAEFGDDKNRYVDARARKNYAGTSPITRASGKKKTVLARYVHNNRLIDALGQQAFSALSGSPGARVYYDELRQRGMGHRAALRQLANRLVGILHGCLKTGTTYDETTAWSHPAETAAA

SEQ ID NO: 321841 - protein, 373 aa, unidentified
MRFYNGQHPFYCGIDLHARSMHLCILDQAGQVVFDRNLPCRPETFLRAVAPFRDGLVVGVECMFAWYWVADLCQQEGIAFVLGHALYMKAIHGGKAKNDKIDAGKIARLLRGGTFPLAYAYPKGMRETRDLLRRRTYLVRKRAELLTHVQILNAQYNLAPFPKKLSFAANRVEMNIAARFADPSVQKSAAVNLALVDRLDELIGELELYLTRTAQVDDVQTYHRLRTIPGVGKVLALILLYEMHDVQRFERAGQFLSYARLVRCAHESAGKKLGSGGKKIGNAHLRWAFAEAACLFLRSSERAKKWKQKQAAQRGEGKALAILAARLGRAVYHMLRKREAFDEERFWQGGTRRNGTGSSSRSPAEACHAGTMT

SEQ ID NO: 321842 - protein, 425 aa, unidentified
MKNNIMSTLFVGIDVSSKTNVLCALDFQGNKLLNLRALNNQPGAESILKSILDCLNSNSLKYAVIALESTSIYSTHIANYLSSNEILLAYKPLVYCLNPKTIANYRKSFVDIDKTDPLDAYIIADFSRCGRITSSPWRGAQFLALQRLTRHRLHLVESITREKAYMVSNIYLKFSQLVTLDKENKPFSNTYGATSAAVLTEFLSLDDITYSSIEDLVAFVREKGKNRFSNPLETAKLLKKAARDSYRLDKVLYEPLNISIASSFNVIKALENEIKTIDKAIEKTIKGINTTEYQSLTSVQGIGPVLASGILAEIGTMTSFGSHDSLAKYAGLTWRVNQSGNYSSDNTRMTKTGNKYLRYYLIESANSVKNRNPEYREYYYKKYGEVTTHQHKRALALTSRKLIRLIFSLLTKNQIYSNDKVGEIK

SEQ ID NO: 321843 - protein, 341 aa, unidentified
MKDTMIGVDLAKRVFQLHGARMTGEVTFRKKLSREQFLAFMAAQPACLVVFEACPSASYWAREMTAFGHEVRLIAPQYVRPFVKRQKNDAADAEAIMIAARQPEMRFVAPKTAEQQARAVLFRSRERLVCQRTELANALRAVLDECGHVFPVGLGHLKRIAALLDDPACDLPALIIAECRDLLAQIAEKTERIDAKTRNLKALAAETDTARRLQTMPGGGPLTALAVEAFAPDMAQFRSGRDFAAWLGFVPRQHSTGGKARLGRISKAGQADIRRLLIIGAMTRIMGRARHKVPAESWIGRKLARKPKMLVGIALANRMARQIWAMLTRNEDYRDPALEAA

SEQ ID NO: 321844 - protein, 351 aa, unidentified
MEEFIAFDSHKRYTLVEREDVETGKTKQFRVEHCPGAIRQCLEGRGKGTRVAVEATGNWYWIVDEIEQAGLEPQLVHPRKAKLMMGMINKTDKLDVHGLNRLQRNGTLPTVWIPPRELRDQREITRARMVMTAHRTRLKNRIQATLSKYGWAGTEASDPFGKKARKELKQAIKQLPPQTAHITEALLKQLDFVQDQIEEIEKRMRELVQDTPKMDLLRSLPGIGWILSAVTGLEIGTIKRFASAERYASYSGTTPRVHASGDKIRYGRLRPDVNRYLRWAYIEAAHSVALHRGTYPSRHVSRLYERIRTRKGHPKAIGAVARHLAEATYHVLTRAEPYRDPVMKKGRSREV

SEQ ID NO: 321845 - protein, 376 aa, unidentified
MRWIGLDIHRTSVEAAELRDGEPAVRRFRFPNTPEAWQRFAASLDRDAAVCLEATGNAFWIYDLLACRAREVVVAHPLKTRAIAEARIKTDKVDAEILARLLKADFVARVWVPPKPVRELRSLLGHWCCLVKQKTVLKNQVHGVLMRQGLRCPFTDLFGRGGRAYLQRIRGQLPETEQIIVDSALQVLDRVEAQLEALRRELYRRAQSVPEVRKLLAIPGVDVFTALLVIAELGEASRFSSPKHVTSYAGLVPSVHQSGSVRYTGSITKAGRRHLRWVLVQAAQKAVRSPGRLQRFYLRLRVKKGHHVAIVAAARKLLTFMWLVLVRDTEYLDGREDLRRVKERRLAREGRSYVCQDFWGSDWTDSATKEVAVAGA

SEQ ID NO: 321846 - protein, 343 aa, unidentified
MKLMRIGVDLAKNVFQIHGVDCHELPVWRQRLPRDRWLPTVLEKIEPGCEIGMESCGGAHHWARQLQAHGFRVKLVAPQFVKPYVKSNKNDANDAEAICEAMSRPSMRFVAIKTIEQQDIQATHRIRAGLIEQRTAKANQIRGLVAEYGLVAPKELLMLRRAIPCWLGDADNGLTARFRRLLDGLWDDLRALDGRVCQLDGEITAIATNEPSAVRLQQLRGVGPMIATALVVALGDARQFANGRQFAASLGLTPRQHSSGGKDRLLGISKRGDTYLRTLMVHGARSALRTAKSKEDRLSQWAVRLAERSHPNVAAIALANKTARMAWAMLRHGTDYQPNQAAA

SEQ ID NO: 321847 - protein, 411 aa, unidentified
MENIFLRCAGLDVHKASVEACVRRMEASGRLHQQTRHWGTMTRDILMMADWMAAQGVTHVAMESTGVYWKPIFNILESRFKVLLVNARHLKQVPGRKSDIRDCQWIAQLLQHGLLKGSFIPPRPQRELRDLTRHRTQLVEEKTRTSNRIEKVLEDANIKLGSVASEVMGVSSRAMILALLEGEKDPAQIADLARRSLRGKIPELQKALEGHLTEHHRFLLRLLWKELTQQEALIAELEAKIEERTRSFAPEIERLDAVPGVDRRVAEVVLAELGGDMRPFPTHRHLSAWAGMCPGNEESAGKRRKRRITPGNRWLKRTLVQAAWAASHTKNSYLASQYRRLVGRRGKKRTLIAVGHSILVILYYLLKEGRQDADLGTDFFDRLEPQRLTRYYVNRLQKLGHKVVLEPNVTV

SEQ ID NO: 321848 - protein, 391 aa, unidentified
MIYIGIDVAKDKHDCFITNSDSEVLFKAFTIFNNLDGFNDLYQKIESVMDDVTKVKVGLEATGHYSYNLLGYLIDKGLPTYVINPLHTNLYRKSLSLRQTKTDKVDARTIASMLMSDVNLKSYSDTSYHNEELKSLTRYRFDKVKERAKLKTSVSRLVCILFPELEKLVPTLHMASVYALLSEFPSAKHVATAHLTRLTNLLSESSKGRYGKDTAITFRDSARASIGSNMPAKSLELKHPIKLIQELDSEIDEIENEIKIIMDEINSPILSIPGINYRMGAMIIAEIGDFNRFDSPDKILAYAGFSPSTYQSGQLDGAYAHMEKRGSRYLRYALYNATKYVCHWNPTFAAYLAKKRAEGKHYNVAISHAVKKLVRVIYHLEKTKQQYIKAA

SEQ ID NO: 321849 - protein, 338 aa, unidentified
MDNYIGMDAHSSICIFSIVDANGKEVNQAKIATNGQLLVEYIRSIEGSKKLVFEECELSAWLFETLRGEVDELIVCNPTRNQQYKKAKTDKLDAQNLARLLRGGFLTPVYHDGSKTEHLRALMSGYQDIVDTGVSIKNRYKSLFRKAGLPARGAGLYDDSSLLENLSRPDQRFIGRGFYRLLETLEKEREQYIVAIRKSSRAFPEIRLLKAIPGIGDIQAAKIVSQVISAQRFRDKHKFWSYCGLVRHRMESGGHIYGSKRSWGNRILKCVFKMAAQTVVRGENEFRAYYDELRLKGTSDRAAKNAVSRKLAAISLSILKTLRPYDETRIMPQTEQAR

SEQ ID NO: 321850 - protein, 407 aa, unidentified
MDVLHPKCAGLDVHQQTVVACARTGAGKAVTYDVRTFGTTTAEVLALSDWLTAHGCTHVAMESSGVYWKPVWHVLEGHFELVLANARHIRNIPGRKSDVNDAPWIADLLAHGLIRGSFVPPEPIQELRDLTRTRQQLVREIAQHTLRIQKTLENANINLTAVLADVLGSSGRAILRALARGERDPARLAELASDRVKASRAELVAALHGRVTPHHRFMLTLHLTQIEALEAAVREVEARLGDALAPFRAALDRLITMPGVSETVARVIVAEIGFDMTRVPSAGHLVSWAGLCPRLHESAGKRLSHRTRSSNPWLKTTLVQAAWAAARKKDSYCRAQFLRIKSRRGPKKAVLAVAASMLTAAYYMLKHGVDYRDLGADHFDRRDTAKLAKRLIARLHDLGLTVEVRAA

SEQ ID NO: 321851 - protein, 340 aa, unidentified
MPGPRARIRKVGRSGVLNPSRKEHVNSTKEIFVGIDVSKARLDIHVLPSGDTWDTENQTDAIATLVLRLRSLHPSLIVLEATGGLERRVLAALLTADLPAVAMNPRQVRDFAKGMGYLAKTDAIDARVLALFAEKARPEVRPLPDAQTQELEALMVRRRQVVDMLTAEKNRLSSAPPSKRVIRAIRKTISCLEGQLEDFDKDIDNAIRESPAWREKDEVLQSVPGVGRVLSRTLLGHVPELGTISKKKMGILIGVAPLNCDSGKYRGQRHCWGGRTEVRNVLYMATLSAIRRNPVIKAFYDRISSGKLRKVAIVACMHKLLTILNAMVRSNSRWSPALPA

SEQ ID NO: 321852 - protein, 313 aa, unidentified
MNTNLKQNEINVGVDTGKFFLDIHIHPLDIFFTVANDDKGIKEALSIIKKHKPNRIIIESTGRLEHQFILACSKAKLPFVLANPIHVRRFAGAIGQTAKTDKLDAKLIAHFGEAIKPKLSSIKPESIALMTDLVARRNQLITMQTMEKNRIQIMPKSLSSTIKPILTALKKQIDNIELKIAALIESCDEYKAKNTLLQSMPGVGKIVAASLISNMPELGYMTNKQAAALVGVAPMNRESGRYSGQRKIRGGRSQVRTVMYMAMMSGIQCNPVFRGKYQQMIADGKPKKVAIIACLRKLVVILNSMVRNGVMWE

SEQ ID NO: 321853 - protein, 349 aa, unidentified
MGIIGGLDVHRSQITFDWIDSDSGQRERGQLAPAHREHLRMWLEQFAGRQAAFALEGCTGWRYVVEELTRAGIEAHLAEPADTSAARGPKRRAKTDQLDARHLRELLAAGRLPESWIPPAHVLEVRTLVRCYKALGDEHTAWLQRVHATLFHHGVPAQRNLLAPDRRERLERGSGLSPAARQLVAVALRMLDQLDAELDLLRAELTRVARRQPGCRALDELYGIGPVTAVAIWAELGDVRRFTSSRFAVRHTGLDVTVYSSDGKRTPGHLARQGPPVLRWALFEAAKCAARASSPDHAYYLQVKQRLGGNRATLAVARKLARRCYHTLAALGDQAFAPPVDTQPVGQVA

SEQ ID NO: 321854 - protein, 408 aa, unidentified
MNTLYVGIDVSSKSNVVYLMLPNGDKHSNFSVANSHEGSTLLVKKIYSALTSHSLDTVLIGLEATSVYGDNLVYFLREDATLAPFNRKIHVLNPKQVKKFHDTYNDLPKNDYVDSFVIADCLRFGRINKEVYMGEYRYKALQNLTRARFFAVQNLVKEKQRFMNVLFKKYSTMTQEKVFSDAFSTTALAVYDEFESAEALANMDLHELTDFIIEKGKNRFPDPDAVAKAIQKAARSSYRLPKTVNDSVNQVLSISITSMKALESQIKEFDKAIKALMELLPNVLISIPGIGPVYSAGIMAEIGDINRFDNQASLAKYAGLAWKQHQSGGFEAEVTRLIPSGNRFLKYYLCEAAFSLVRCDKKYSDFYHLKYKEINRCQHKRALALTARKFVRLVFRLLKDNRLYCPAK

SEQ ID NO: 321855 - protein, 351 aa, unidentified
MLIIGVDYHPSFQQISFMDQETGECGDRRLNHSDGEAERFYTELKQRGANVRVGMEATGHSRWFERLLAELGFELWTGDPAEIKRQRGRKQKTDREDGRLLLRLLLENRFPRIWTPNPENRDLRQLLWHRHRLVQMRTRIMNQLQAVAMNEGYRWKKKLFSAPGRTLLEKLSLAPWASRRRKELLELLDQLDPKIAELTRAVEQEAAKWPAVVRLMTHPGVGPITGLVYILVIGTPERFPSGKKIGSYTGLNPSENSSAGQQRLGHISKQGNSLLRYLLGEAAQAAARCNPDWRRRYVHLTMRRGKRIAKVAMARKLAVRLYWMWRNGWQYAQLVEFGSHAGKLGTVHGVK

SEQ ID NO: 321856 - protein, 341 aa, unidentified
MEEYIGLDVSMKETAISIRRDGKRIWRGKCASDPKLIAELVGKRAPSAKRVIFETGPLSVWFYHALAEAGLPVICIDARHAKAALDMAPNKTDANDADGLAHLAEVGYFREVRVKGFDSMLSRTLVAARTRLVRITVELSNQIRGIMKTFGLIVPAGKGSTFEKNVRDLLIGQDDLASIVLPLLEAWRSTRIRATELGRQLIAQARQSEACQILMSIPGIGAITATSFATAIEDPDNFKKSRSVGAWLGLTTRRYQSGEVDYDGHISRRGDPHVRGLLYEAAVTILTRTSAESSLRTWGLKLRERAGFKRAAVAVARKLAVTMHAMLKSGQLFDRTAGAAA

SEQ ID NO: 321857 - protein, 344 aa, unidentified
MDYYSGIDVSLERSSVCVVDGSGKIARETKVASEPEALINWFGSLGFGLARIGLEAGPLSQWLYAAMKQAGLAVELLETRHVSDAFKAMPVKSDRNDARNIAQLMRLGWFRPVHCKSMTAQEIRAMLTARKLVQSKLLDFENSLRGILRGFGLKVGKTTRTHFAGRIEELVKGHPNLQTITEALLRARAVLLAEFNGFEKRVRAMSRLHEKARLLMSTPAVGPIVSLTFACAIDDPSRFTSSKQAGPHFGLTPKKYQSGETDYTGRISKHGDASVREALYEAAHIMLTKPVRGCSKLKSWAMRIARRAGTNKAKVALARKLAVIMLRMLKDNVPFNPAAKAATA

SEQ ID NO: 321858 - protein, 350 aa, unidentified
MLIIGCDYHPAFQQIAFVDTDTGELQERRLQHREEAERFYRDLAAERMKVRVGMEASGHARWFERLLSELQFELWIGDAAEIRTKRVRKQKTDRQDAQLILQLMLEDRFPEIWVPSWENRDLRQLLWHRHRLVQARTRMMNQLQAVALNEGLRCKKKLFREAGREQLEAFRLAPWASRRRHDLLEMLDRLTPTIAELTQAIEQEVEKCPAARRLRTHPGVGPLTALAFVLIIGKADRFQCGKQIASYLGLVPLEKSSGNQRRLGHITKQGSTLLRFLLVEAAQVTARSLPEWRSKYYHLTMRRGRKIAKVAMARKLAVRLYWMMRKEWDYGQLTKFGSYAGKPENRDGVK

SEQ ID NO: 321859 - protein, 328 aa, unidentified
MSDDVAALFVGIDVSKARLDCAALVGETVTQSKSFNNDSAGHERLLRWLHDGECQPGLIVVEATGGYESAMVAMLATAKLPIAVVNPRQARDFAKATGVLAKTDAVDARVLAQFGRAIRPQVRRPKSEELSLLEALLTRRRQLVEMITAETHRRGVATSPVIARQIDRHLRWLERQVQAADDDLNGMIGKSSLMQRKLDVLTSVPGVGRVTAVALLAQLPELGGLNERQLSALVGVCPFSRDSGTMRGRRVIWGGRARVRAALYMAALVASRHNPILRTFYRRLLNNGKAKKVALVACMHKLLLILNAMIKRDQMWQPAYVHPGAQVA

SEQ ID NO: 321860 - protein, 377 aa, unidentified
MSRPILYLGMDMHKESVTIAVLPGAAASPTRVERLPNDFVKLRRFMDRLAETAEIRACYEASGAGYVLQRAMREWGYACEVIAPSLIPTKPGCQRKHDKYDAAQLARLYRAGELTPVRIPSEAEERVRDIVRCRETFQREALKSRHYILKFLARRGFVYRDGTNWSGRHFVWLRHLASSHSPLAREDALVYGEYLALLEYKLARRDELDRQIEALALSSALATAVAYLQCFRGLQVHSAMVLACELVDWRRFARPGQLMAYLGLVSREDSSGDRERRGSITKAGNRHCRHALVQAAWSYRHKPKIGTALKLRQQGQPAWVITHAWKAQHRLYKLYHHLAYRKPPQVAAVAVARELVGFLWAVMREVEPVHTETTAAP

SEQ ID NO: 321861 - protein, 340 aa, unidentified
MSLVLQLILPYPDSCLGTSPHQQGWDTKMEKLSYGGIDVSKDCLDVVVLPEGWFFSVSNDTAGWAELVARLRPLAVCAIGLEPSGGYERGIIRALLAAGLSVRRINPNKLRQFARARGVLAKNDRLDARLIAEYVAIMPTRVVQRNDAVERLAEIVTMRRQLCDEHVAVENQAVHLEDAMLRRLSKRRLIRLEADIRLLDKRLAEMVATNAAFAQLYELLTSMPGVGPVLAFTLIALLPELGKMSRKQIAALVGLAPYDFDSGKLRGHRSIYGGRMPIRNVLYMAALSASRHNPALKAFSNRLADANKKSKVIIVAVMRKMITTLNAMLRDNAAWQPQSA

SEQ ID NO: 321862 - protein, 427 aa, unidentified
MAYRIAGIDVHKRMLAVAVADIAGDGDCQFERRKVDTTPAALRTLAAWLVEREVEEVVMESTAQYWRPVWETLERFWQPQRRPREGAPSMSGTTHLAQAQSNRGAPGRKRDFPDAERLVKRLVAHELTLSFVPEAEQRLWRTVTRRKYQLTRNRVQLQNRLESLLEEAHIKLSTLVSDLLGVSARRMLQAIADGETDAAVLAGLAHRGLHASAAQLQDALGACQDLHPVYRRLVALTLEELRVLDDHLAQLDQQMAHLLQLHQDAVRRLAEVPGFGVDSAQQIIAEVGATAAPFPSAKQLSSWVGACPGSEETAEVNHSRRSPKGNRQMRRLLNQAANAAVKTKGSIFELVYRRLVPRLGHAKAIGAIAHRLCRLVWKILHERVSYEERGPAVTARRRQKRAAKMIRELRSLGYRVELTPSPSASPA

SEQ ID NO: 321863 - protein, 341 aa, unidentified
MNQVSTVGLDLAKHIFQLHGADSAGAVVFRKKLRRGQLLAFLATLPPCTVAMEACGSAHYWGREIAKLGHTVRLISPAYVKPFVKRQKNDMADAEAICEAAQRPTMRFVALKSANQQAAAVVFRTRDLLVRQRTQAINALRGHLTEFGVIAAKGPVHTSKLMAALEDPASDLPQAARTILAVLVEELRSLDERVAVLDREIARHAKENAVARRLMTIPGIGAVTAAALTALAPPAETFRRGRDFAAWLGLTPVQRSSGGKERLGKTSKMGERSLRRLLIIGASAVARWAARKGVPASSWLGRMLARKPPMLVRVALANKMARIVWALLAKGGVYRAPVAAV

SEQ ID NO: 321864 - protein, 333 aa, unidentified
MNKLYCGIDIAKDTAVYCLLGPDGEPLERTASFRNAPASHRDALKWMRRLAKPYKPFELHVVMEATGVYYLSTAKFFDKQTGVTVAVVNPAQVKSFAQADLVRTKTDSVDAAVIARFGIAMKPGPWTPPAPHEEEMLGIVRHIEAVKDMIRAEQNRLHALEEIGGSTKSVQREVKKHIRFLERQTDDLSGKLKAIAKEHPDMDENIRLLCSIPGVSDTTAHNLLAEMGDISRFTGVKQLVAFAGLAPAERQSGTSVRGKTMLNKRGSRRLRKSLYMPAVVASMHNPDVKELYQRMKAAGKNSMCAMVACMRKLLHIAYGVLKNRTPYKPQAAV

SEQ ID NO: 321865 - protein, 330 aa, unidentified
MKNYVDVIGIDVSKLTIDAHIHHKSVHRVFSNAPKGYRALLSWTEKHLAEQSYFFCFENTGHYSANLGVYLSETSMDYVEESPLAIKRSAGIVRGKTDRLDAGMIARYAWLHKEELVLSSPKEQNIQELGRLLSFREQLVRDRTGKMSSLKEMRSLLSSPSTDSCCKMIIKTIHYLTKQIEALEDHIKVLLKKDASLKKNFDLLNTLKGVGLILSCQLLFHTNNFTRFASWRQFSSYCGVAPFAHSSGTSIRRKNRIHHIGDRKMKTLLTLASVSAIQCDKELKLYYKKKVAGGKPKMVALNNVRNKIISRAFAVVKRGTPYVPMQQFAA

SEQ ID NO: 321866 - protein, 393 aa, unidentified
MQALLVCCCGMDIHRDVLEACVLKGDSDNPEIIRKQFKTTQGELLQLVNWLNGHSCFHVAMESTGVYWRPVYEMIEKQYAACQQLIVVNARHMRTLPGRKTDVKDAEWIATLLRHGLLEASFVPERVIRTLREYSRTYKAEVQEKSRLLNRIEKFLQNHGFKLSSVLSNIVGVSGRKLLQQLVEKGSISPEDIQKVISRRIKRSVEEIQAATCGVLEEYERKLLHHLIRKLDSCEESVGNLLIEMADLAAPYRSALETMDSIPGIDLTSALTILAEIGATPTKNFKTAEHLSSWAGLAPRNDESAGKIKSKKIMHGNPYIKSILCQVAWAAIRSRHSALARWFWSHQGKLGKKKAIIAVSRKILSLIYVLLQKGELYNPDYQPSSPRNSLVLG

SEQ ID NO: 321867 - protein, 344 aa, unidentified
MNSVPFYIGIDISNDDFAASIFTDPEIPIKTRTQIPNEFSGYEKFESWLAENQVQTDNCIICLEATGVYGESLCYFLAAKGWKVAVEPPLKVKRAFPDKGHKNDKTDSKKISEYAYRYFDELQFWRPKANIIEQIKVLLMTREQLVGQRTASSNTLKALRKKVVQTPLANDIYQKNVERLSRQIHKIEKELEKLIDKHPDFKKTVKFLDSIPGVGMLLAANFLTATDGFENEMTFQYRKLAAYIGICPYEHSSGSSVYKRPRTPKYGPAKLRKLLHLAARSVVTHNEQFFLYYQQKIAQGKKPKLVLNNVSNKLLKIMCAVTRTQKPFVDNYVSIHPQFTHINS

SEQ ID NO: 321868 - protein, 396 aa, unidentified
MPATTRHARVPALPESTTAQARLLYLALDLGERHWTLAFTVGRGQRPRVRTIPAGDLERLTTELAAARRRFGLPPETRVVSCYEAGRDGFWLHRALLAAGVTNVVVDAASIEVPRRARRAKTDRLDARKLVTMLVRYIEGERPVWHVVHVPSEADEDRRHLERERETLVADQTGLVNRIQGLLATQGVRLALRGDVPAQLAAVRRWDGTPLPPELRARLEREWMRVEAVRTALRALTTARHRRVTTPTPPATDAATVHLTRRLAALAAVGETTAWLLATEMFSWREFRNRRQVGSFLGLTGTPDQSGDRIREQGLTRNGSVELRARVIELAWGWLRYQPASALSQWYRQRYGGGNARLRRIGVVAVARRLLIALWRYAMGGPPPAGAHLNDDAMVA

SEQ ID NO: 321869 - protein, 370 aa, unidentified
MRFSTKQHPFSCGIDWHARTMYVCMLDHHGEILLHRNMPARPETFLKAIAPYRDDMVVAVECLFTWYWLAALWAREGIPFVLGQALSMQAIHGGKAKNDTIDAQKIAVLLRGGMLPQAYVYPAAMRATRDLLRRRRHVMRKRAELLAHIQHTNSQYNLPEMGQKLASKGKRDGVAERFLAPAVQQSVEVALALIDHDDRLRRDVALTIVQTAKQHHAHALDRLQSVPGIGKILRLVLLSEMHDITRFPRVQDVVSYCRLVQCAKESAGKRDGTAGKKRGNAYLKWAFAAAAVLLLRHNPQGQKFLARLEKKHGQGKALTILAHKLARAVYDMLTRDTVFAMDRFLNGSGSRVGEPAASLDTPGISLKMGP

SEQ ID NO: 321870 - protein, 279 aa, unidentified
MDVLGIDVGKRDLHATLLQNDRVASKSVPNSESGIAQLQTWLKNRNANRVHACLEATGGWSEQVAISLGEAGHVVSIVNPARIKAFAQSEMVRTKTDRIDAALIARFCRLHQPEPWKPPAPEIRILQGLVRRQHSLIQMRVEEENRRSAPMVAPAVTASIEATLEHLARELERVNREIEQLFDDYPPLRRQRELLISIPGIAESTAARILGEMPNIAEFRDVKAIAAYAGLSPRHYQSGSIERRSRIAKNGNTHLRRALYFPRFRPYASTHQFERSLNA

SEQ ID NO: 321871 - protein, 431 aa, unidentified
MNYNQNKKIAQITSQTLIIGVDIAKFKHVARAQDFRGIEFGAPCQFENTKEGFEHFLQWISEIKKEQSMDKVMVGMEPTGHYWFNLAHILKENGIKFVAVNPLHVKKSKELDDNSPTKNDVKDAKVIAQLVKDGRYAEPTLPQGVYAELRVAKKIRDLLTEDLQTVQGQVHNWIDRYFPEFLKVFKKWEGKAALQFLKLYALPHEIVNFTEHELLSHLRKSVTRSVGLSKIRELKQAASKSIGLRQGSEMAKLELETILAKYELIQLKFEELDAKIEGLLDEIPGVPQMLAIKGVGRDTIAGFFAEVGDLSDYTHPRQIIKLAGLSLKENTSGKHKGKTTITKRGRKKLRALLFRVCMILVAKNSAFKALHAYYTQRPDNPLKKMQSLIALCNKLIRILFSIGKKQFDFNEEKMLKDIPHLAVTEKTEMAA

SEQ ID NO: 321872 - protein, 373 aa, unidentified
MAIKVKPEEVIRHEEVYSVGLDVSQRSTSICVLDPSGKLVMEGQVKTNPFEIARYLQKRMEGPLKLGMETGSLAAWLYHGLRKMGLDITVMDAAHAHRALSLKRHKTDRNDAHGLAEMVRLGSDRMKAVHIKEQASQELRVQLAARARLVKQKVDLENELCGLLKPFGFIVARGNVTADTFRNRVVDALCEAHDNGFHLRPLLMPLLDVHRLIAQHIAEADARLEVVAKAEPICRRLMTVPGVGPVTALAFRATIDDPTRFKSASDVAVYLGLTPRRYQSGEQDYHGRISKRGHSPTRLHLVQAATVLLVSVKRWSALKAWGVRLVNRIGFNKAKVAVARKLATVMYRIWRDQSEFRWGKAVMEPAASAVATS

SEQ ID NO: 321873 - protein, 456 aa, unidentified
MGSARARRIPARLIEDEDYQLRYERVAGIDVAKAKADVCTRLPAAAEGARRASRVEEVPAAAGEILALAGRLLADGVELVVMESTSDYWRIWFYLLEGAGLAVQLVNSRQARQLAGRPKTDQKDAQWIARLAEMGLLRPSFVPPPEIRALRDLTRTRQQLVKDRTREWQRLEKLLEGALVKLSSVVHSLARTKTARGILEAIAGGERDPKALAAMTHGNVKGGSAAVAKALEGMLVGEHHRVLIRLHLDHITLLDRLTAEVEDEIEAALAAIPAAWGVSADGVPSADPGPGAAVLPAAERLAEIPGVSPKLAMAIIAETGLDMTRFPTADHLASWAGLAPVARQSGPRQRKPQKGHGDAYLKVCCTQAANGAANTDTFLGERVRRLSRRLGGNKAKCAVGRSVLVIIWHLLADPSARFTDLGPGWHDDHAGRDRKIRNHLRHLKALGLEVTITPAA

SEQ ID NO: 321874 - protein, 349 aa, unidentified
MRTEQAVRGKDVYVGIDVHKENWHVTIRSDGEERFNGRIPGQYQSLKSILHRYRECRVTVAYEAGPFGFWLLDRLVQDGIKAMVVPPSLIPVESGNKVKTDKRDSRKLATLLESNMLKHVYVLTPEEREHRDLLRTRRQIVDHRNDVARQIKSKLMFYGISAPFTSATRWGLQYIEWLKTITFETSYLKESFDLLIQLYEYLTRQIARINRTIVRLCRDKRYRHKIKLLCTVPGIGKLTAIELLVELQDMSRFTSAEGLASYIGLTPAEYSTGERTRQGRITRCGNKRVRTYLVESTWVLITKDPYLRAKYLRLKSLRGGKRAVIAIARKLLIRLRRMLLDNVPYRMAA

SEQ ID NO: 321875 - protein, 466 aa, unidentified
MADQRVVHFETRFRTKSCAVRALVANAFNPNARQFGHCAYFRERSFGQGLSDPRKSQMPERKVYEMIDKEAPVLAFDVSKGSSHCQGFLSFGKPLGKPVRVRHSKSGMAAAEDISKSLKEKSGESPKVILESTGVYSDPVVHWAESLGLEVFLVSPLESAKVRKSKIRPTKTDALDCGVIAEVAYTRDLRRRSPVSSRYSDLYSVSRRRSAIVRRLVDSKNQYRKNLDAIWPLFDEICDPFSDYALFAVARYRCPERLARSSEGRVASALDKANVRLGPVSRAEIAKRLVSYANDVLGGHRPDDAEVRSLMSSLEDVKDDLESLESITVELVNLAKGLDHFPIVSSIDGCGEVLASLLCAEIGEPSRFSSKEGLVAYAGLDPTILQSGRSDGLHYSITRKGNSSLRGYLFLTVENMLIGKPDNQITRFYLKKKSSGLCHKAAATAACRKLLVCIWGMLRSGTLFEK

SEQ ID NO: 321876 - protein, 370 aa, unidentified
MKMSIGVDLHKTQFTVCCLSEDRKIQESGIYPTKDRGYGSFVKKMSHWIEEGYEIAVAVESTGNTRYFCNEVMEVGIAVRIVNTLKFKIVNESVKKTDKHDARVLAEFLEKDMLPESILCSQASEDIRRLLKSRSVLVKALVSLKNQVHGLLLGYGIESRRGQLQSKKERQRILDGLADHRSDGNAARAVQPLLDTIDEVSIQVKKLEGTLSDLVCEDEDVALLKTIPGVGLITAATIRAYTDDINRYESAKKYASHAGLVPWVQNSNKTIHHGHITKRGPVELRTAFVQMVMGMVRLHSKTDGYWLMRKYQIMKEHKGTGKSIIATARKMNTIVYAILKTKKPFDPSRMLPDPKYLEMSKAAKRYALVV

SEQ ID NO: 321877 - protein, 420 aa, unidentified
MRKRSYRAAAFQQTNLEQLEQRLPDRVVAGIDIAKKIMYASLMDESKEIHAVLKWDHLSESRNVVSWFAGLRQVNEVALEPSGTYGDALRHSLEASGVEVFRVSPKMVKDAREIYDGVPSSHDAKASATVAWLHLCERSERWEAKSELERGLKAAVGTADLHDGAFRRAQNCLEAQLARYWPEVNQLLALDSVSLLELLARFGGPQWVAASPRAAERCLRDAGGGGLKEEKIQQVLEAARETLGVPMIEAERQALQELAGEARHRQKATQAAKRRVGDLSCGDIPTVLVSAEVGRLTGAILTTDLGSLVEYANTGSLLKAAGLNLKEISSGTHQGQMAITKRGPRRARQYLYLAVLRWIQKDPVARAWYEQKVQRDGGKIKGKALVALMRKLLCGLWWVARGEAFDSRKLFDVRRLELSA

SEQ ID NO: 321878 - protein, 344 aa, unidentified
MATMPQTLGGVTVGVDTHGKIHVGAVADPLGRILGTIEVTTDERGFRQLENYAKGFGTIERFGVEGTGAYGATLCRWLTNRGHEVLEVDRPDRKMRRLRGKSDPIDACAAAQAVLSGRASGVPKARDGAVEAIRVLRMARGSAVRGRTQTMNQMHALVTSAVDPLRTQLRSCSPAKLVDRCVGMRPGKLDSPAAATKFALRELARRHRALDEEVERFDEELSRLVAKRAPRLVALVGVGTDVAGALLVTAGDNPDRLRSEASFAHLCGVSPIPASSGRIHRHRLNRGGDRSANQALWRIVMVRMSWDERTRAYAARRTSEGLSKREIIRCLKRYVAREVYEVLA

SEQ ID NO: 321879 - protein, 351 aa, unidentified
MMIIGVDYHPSFQAIAFFIEETGECGEQELNHSDGQAEKFYRDLKQRGICVRVGMEATGYSRWFERLLAELGFEVWMGDPAEIKAKRVKKQKFDREDARLLLRLMRENNFPQIWVPGPENRDLRQLLWHRHRLVQMRTRIMNQLQALAMNEGYRWKKKLFSEQGRAQLEKLALAPWASRRRQGLLELLDRLNPTIEELTAAVEREARKRPEAMRLMTHPGVGALTALAYVLIIGTPTRFQRGKQIGTYVGMIPCEESSARKQRLGHISKQGNSLLRFLLVEAAQAAARTHPDWRRRYLHLAMRRHKSIAKVAMGRRLAIRLYWMWRNGCEYSQSLEFGSYAGQLGTRNGVK

SEQ ID NO: 321880 - protein, 475 aa, unidentified
MSDRQQVEVDEHEEIVGRVAAIDVAKASGMVCTRVPHATKAGKRSTTVWQVPSTTNQVLELAEQLAGEGIERVVVESTSDYWRPFVYLLEARGLVVWLVNARDVKHLPGRPKTDKLDAVWLCKLNERGMLRPSFVPPAQIRRLRDYTRLRADLTADRTRHKQRLEKLLEDALIKLGTVATDIFGVSGRAMLEALIAGQRDPRMLAELARGRLRVKHAALVQALTGRFDDHHAELARMLLDQIDALSGQIDQLTSRIEETIAAICAATPPAPAPGPGGGTAATLHAGIELAGSVPGHPNSNSVDPQTGELLAAPLPVVDRLDEVAGIGRHAAQVIIAEVGLDMGQFPTPAHLVSWARLSPRTIQSGAKHRAGTTGKGNPYLKAALGEAATAAAKTDTFLGERYRRLVRRIGKGKALVAVARSILVIVWHLLADPTARFHDLGADYHASRIDRDRKTRNLVHQLQALGHKVTLQPAA

SEQ ID NO: 321881 - protein, 341 aa, unidentified
MRKTLFCGVDLHSDNAMYVITDQEDRQLFKRRLPNRLPVVLDSLEPFRKRLKVVAVESTYNWYWLVDGLMDHEYPVVLANPAAIDQYDGIKEADDLTDAAFLARLARLDILPTGYIYPREDRPVRDLLRRRTLLVRQRTAIILSLQNMAMRQTGQSLDWRAIRNLSDEDRTELLGDHDCLAFVSMEQVDLIKLLTEKIKRFETKVLEHAHLRPAYECLLTLPGVGMILALTIMLETGDIGRFQTVGDYTSYCRCVRAIHTSNGQNKGKNNRKNGNAYLAWAFVEAVHHAFASCPQAKRFYDHKRSQRNGALATKALAAKWSKASYYMIKRQETFDLTRVFG

SEQ ID NO: 321882 - protein, 315 aa, unidentified
MISCAGIDVSKATLDIGLWPQDSTFQVDNTPEGIAIAIDRLRGLGVGRVLLEATGGYEKRAVSLLARAGFQASCINPRRARQFALAMGRKAKTDKIDVLMLAQFAQKLDTYPAVKPSNQRDELAALVKQRDRFVQQRDDDKRRLKMASHDVVRANYTDHIAYLNTRIKALEQCIEQALKTLDSRTVALMRMVKGVGLITTAGLMAYLPELGTLNRRQITALVGLAPYNNDSGTKSGRRQIWGGRQQVRRLVYMSSWCLVRFNPDFKARYEGLIARGKAPKVAIVACMRVLIVRLNAMVRDRTPMINRGLPVATMG

SEQ ID NO: 321883 - protein, 419 aa, unidentified
MKKYILRDPQTVEPQESVRQPRPQTTVPTLIQGPILFIGLDVHNDSIAVSLAPSDATEVRRYGIIGGEHDDVLKLAKKLQAAHPGATLKFCYEAGPHGFALCRCLRAHGLDCIMVCPSKVPRKPGKRVKTDRRDADQLARLYRAGELTGIYVPQPEDEAMRDLIRARFQVGKGQHRARQQLKMYLLRHNLRYTGQTSWSAAHLRYLAQIKMPFPVQQIVFQEMLNVITEATERLERYDQEIERAVPGWRWEPVVRAWMSLRGMALLHAATLVAELGDFRRFEHPSQLMGYLGLVPSEHTTGNDRQQGGITKMGNGPARRALVEAAWQYVAPARISPPLRKRQEGLPKAVTDIAWKAQGRLHHRYQYLTRVGKKSPRPPSPPWPANSRALSGPSAVWSSPGRPSREPVSTVWMNRKTKNA

SEQ ID NO: 321884 - protein, 421 aa, unidentified
MNSLSTAKYTAFVGLDWADAKHDICLQAAGSDQREFDCFAHRTERIEAWAQALHQRFGGRIAVALELSKGPIVYALQKYDFLVLFPINPSTLAKYRQAFKPSRAKDDPTDAELALDLLIRHPERFKPLTPQSVPMRKLCLLVEQRRRLVGDKNRFVNRLCDSLKQYYPQVLEWFKQHDTVLFCDFLARWSTLTGVKRARKTTLRTFFKAHNTRSEKLIEARLCAIQAAQPLTHDAAVISAHRLLAEILVEQLRVTLKAIDRFDEEIAATAAKLPDYALLFRPLPGAGPVMAPRLLAGFGEDRQRYSGADELQKYSGVAPVTERSGKKTRVHWRRQCPTFLRQTMVEWAGQTVKYSFWAGAYYRQQRAKGSSHQAAVRSLAFKWLRILYRCWQTRTPYDESKYLNALRRRGSPLLEHLGETM

SEQ ID NO: 321885 - protein, 366 aa, unidentified
MSSVAHVGLDVHKRTIAIALLNADTGELTEWQISHDPTSVRRLIRKLGERAPVAWAYEAGPTGYALQRQLEAAGIPCLVAAPSLIPLRQGNRIKTDHRDARKLAELLRAGLLTPVHPPAEDEEAVRDLCRCREDAQQDLVRARHRLGKFLLRRGLAVRDGWNWSQQHRYWLHGLTFDRHADQVVFEDYVLAVEQQEARVAALDVQLAAVAGEEPYRTPVAHLRCFRGIDTVTALSLVAELHNVRRFTSAPQLMAYLGLVPSEHSSGGKRRQGGITRAGNTHVRRLLIETAWHYRHKPAIGARLAKRRRGQPPAAIALADRAQQRLCLQYRRMAAKGKHHNTIVVAIAGMLVGYLWETLRTAQPVEA

SEQ ID NO: 321886 - protein, 447 aa, unidentified
MNQKKPLKKKLLRLPKHLEHINAYAAGIDVGSRSHFVAVPVGVDEEPVREFSTFTDDLERLTDWLISCGITTVAMESTGVYWIPVFEILESRGLEVKLVNARHVKNVPGRKTDVLDCQWLQQLHTYGLLRGAFRPAEQVCALRAYVRQRATLVRVSASHTQHMQKALTQMNLQLHNVVSDITGVTGMRIIKAILAGERNPKALAAFRDKRCKNDEKTIARSLHGNYRPEHLFSLKQAVELYEFYLAKIADCDQQILEQLKRFDATGSDQNPSGGKPGGGLDEALLRMSGVDLASIDGIDTTTALKIIAEIGIDMSRWKSDKHFASWLGLCPGAKISGGKVLSSATKRIANRAALAFRMAAFSLIRSRSALGGYIRRLKARLGAPKAITATAHKLARLVYSMLKNGTTYADLGQDYYEERYRSRLIQNMKRKAKQLGFDLVPVEVQPT

SEQ ID NO: 321887 - protein, 350 aa, unidentified
MRTEHFIALDTHCTTTDMAVVTGRGRLTKRLQCTTAIPPLVEAVTGIRRPRYVTFEEGPLADWLFRHLAPHAEEVFVCEPRRNHLIAKDSDKDDPIDAEKLAQLYRGGYLKRVHHPESLRRAVFKQHVATYHDVVRQRVGAANRVMARLRRHGLFVQEDSFAHDVEGREKLLRRLPASRMLRDDVQCLWAIYDSFIYQEEVLRERLTRHATRVEPIRRFVRLPGVSWIRGATFYVFVDTPWRFPGKSALWNYLGIGLERKHSGQGPARLRVAPQCNRPLKGMILGAAMTAIRIGDNPFADQYDHWMKGGLTARNARRNVARSLAATLWGMWKNQTEYRPEWVGQGGRSHS

SEQ ID NO: 321888 - protein, 420 aa, unidentified
MKDFSVDDFAALVGIDWADKKHDICELPAGTTNYQWSVISSKPDHLHAWAMALENRYPGQPIAVACELKKGPLIYALSQYRNLVLFPINPSTLARYRKAFFLSGAKDDPGDAFLQTEILEKHMDRLKPIVPESVDVRALAQLLEYRRKLVQDKVDLTNCIGATLKNYYPQVLDWFNEKDTHIFCDFIIKWPTLAHAKTARKKTLIAFFNTHNARYIQVNHERIDAIKAAVALTHDDAIIEPNRMLIETLIPQLKLLLDGIKRMDVEINRRYKPMDDRNLFDSLPGAGPQYAPRLLVAFGSNRARYHAATELQKYSGVAPVIEKSGQKNWTHWRYSCPTFLRQTFVEWAGQTVRYSFWARAYYQQQQAKGKPHNTIIRSLAFKWIRIVFKCWKDKKPYDESKYLEALRKRGSPLLQFAIKT

SEQ ID NO: 321889 - protein, 360 aa, unidentified
MFYLGIDQHRKQLTVSVRNEAGDAVLRRQVSTEWARVRGFFDELQRLALPEGGFAAIVEICGFNDWLLKMLTEYGCRETVLIQVEKRSKKKTDRRDAHQLSGLLWVNRGRLLAGQRVEGVRRVQPPTDREAEDRQLTAVRQRMGRQRTRTINRIKHVLRKHNLEQQQPAKGLDTKRTRKWLAALPLGPIDRLELDLLLAQWKLWDDQIAKLELEIEKRQPRSATAAVVATIPGCAAYGSLALASRIGSIERFPRPASLANYWGLTPGCRNSGEATDRLGSITKQGSAMARFVLGHMVLHVLRRDGRMKAWYGRIKRRRGSKIARVAVMRRLATIIWHMLKHNEPYTIGGPPRRKLRDQAA

SEQ ID NO: 321890 - protein, 352 aa, unidentified
MQIIAFDSHKRYTWASVETMDGRRLCEERICHHKGAISEFLSRWNKGSSVALETIGNWYWLVDEIEDAQMRPHLVHARKAKLMMGAVNKTDKLDARGLNMLQRTGTLPTVWIPPGELRDKRELCRTRMVFAAERTRIKNRVHSVLAKYGLQEELGGASDIFGKSGRVKLAVCIEQLPKQTRYTVKSLLSALDVVCRQIEALERRMHAVYKQTEEVKLLMTMPGVGFILAVVIWQEIGDVSRFRGPEQLASYAGTCPRIHSSGDKSRYGPLRNDVNHYLKWAFSEAGNSVAVNRACLSGRHVGRLYNRLRVRRGHAKAVGAVARHLAEASYWILSRKEGYKEREVFAVSSTVA

SEQ ID NO: 321891 - protein, 367 aa, unidentified
MMGWMAPLRHLSAKLLSDRISSEWEPSMGEVTTIGLDLAKHVFQVHGVDAEGATVLRKQLRRAQVLAFFSRLPPCLVGLEACATAHYWARELRALGHEVRLMPAQYVKAYVKRNKHDAADAEAICEAVVRPTMRFVPVKTADQQAAVLLHRGRERLVRQRTGLVNALRGHLAEFGVIAPQGLRNVGKLIAIVRDERDARLPDLARQVLQVLAAQIEQLEAAVAAIEKQLMAWHKSNPVSQRLASVPGIGPIIATAIAATVVEPSGFRSGREFAAWLGLVPRQNSTGGKHRLGGISKRGNQYLRRLLINGASANLLRSKATNADPWVIGLRRRRPSLVVAVALANKTARIAWAVMHRHENYQRVAASA

SEQ ID NO: 321892 - protein, 391 aa, unidentified
MTKRKTETVNDLSRCLDALDMDATLIAVIEMSQSSWLVGGIIPGVERQPLKKLAIDEYALHKLLNRWRGEAEKKGHTITRIAVAFEAGHDGFWLARWLAAQGIEAHVIHASSVAVTREHRRAKTDRLDTELLKRGFLGWLRGERGHCKMVAVPTLAEEDAKRPSRERETLVGEASRIITRVKAAFVRLGIRSFNPKLKTAAAHLKTLRTPEGEPIPPNTLAALKRDLERHRIVKQQIREIEETRLERLAQAPSNGPHAMVRLLARVIGIGVETADMLVQEVLSRNMRDRRAVARYSGLTGSPDESGAKRREKGLARSGNARVRRGMIQLAWRFLMFQKDGALAKWYRQRTANAPSSRKTLVVALARKLLIALWRLARDGVVPEGVRMRPAV

SEQ ID NO: 321893 - protein, 389 aa, unidentified
MYSYFVGIDIAKNTHWASCLSSDGEIILEPFSFSNDNSGFQKFISKLESLDKTKILIGLESTAHYGENIISYLFNLDYNIGLINPIQTANLRRSNIRKTKNDKVDTKIIIKALTLGNYSLITSRDINNLKLKGLCRSRRNLVTMRSKAKIQLVSYLDQISPELAQFFKGNLHLNVSYQLLKEYSSPKQISSLHLTKLSNILHDNSHGRYNKQDAIRLRELAKNSVGIDNPSLSLQIKHSILQIELYNEQIAEVEALYKQILDEMNTPILSIPGMSYNQAAVIIGCIGDINRFEHSCQLLAYAGLDPSVIQSGNFQARSTRMSKRGSGMLRYSLVYSAHNVVKNNKTFRDYYELKRSQGKSHYCALGHVAHKLVRIIFKMLKDNVAFNLD

SEQ ID NO: 321894 - protein, 391 aa, unidentified
MIFVGIDVAKDTHYAAVSDDSGAVLVKPFAFQNNAEGFCLLLKKLSEFDRSKLLIGLESTGIYSENLICFLYESGFRLAVINPIQTATLRKTAIRKTKTDKVDTMLIIKSLMVNSYRLYSQRDADFLKLKTLCRFRQNLKKSKARLKIQLAGYVNLVFPEFGKFFKSGIHIAASYALLKKYSSPKEIAALRTSTLCTLLSKASHGRFGKDTAEALKSLALSSVGVKNPYISIQIAQTIAQIELLEQQIKDLNSAIEEAMESINSVLMTVPGIGAVNAACNLGEIGDIKRFSKPCKLLAYAGLDPTVRQSGQFTAKSTRMSKRGSALLRFALINSAWQLTLNDTTFKAYYDLKRSQGLNHYGALGHVAHKLTRVIFKLLTSDTPFIPAKLVA

SEQ ID NO: 321895 - protein, 335 aa, unidentified
MIVIGIDPHKSTHTATALDPATNSDVGSLRIEASITEYRRLIVWAKAWPEHTWAIENADGLGHHLALWLLARGEVVLDIPTTATARVRELSRGGRRKNDRIDAAAAASVAALQGDARRVYPETTADSLALLDERRVNLSHSRTRTVNQLHALLRELMAGGAPTSLTPVSATATLRGFRARTGPDRIRVELAKELIADVRRFDEQLTANAKTMTALLDEHGTRLREIDGVGPVLAARLLGRTGSPKRFASAAAYANYTGTAPVQIASADSSRHRLSRYGDRQLNSAIYIIAMTQIRMPASAGRAFYDKKIAEGDLAGMLGGAVAIDSGGARIAERL

SEQ ID NO: 321896 - protein, 409 aa, unidentified
MKGPIVSIDVSKGKSDYQAFKEMNVKYTGSRSIKHTKEGFDEIVSLVREMEKKLETEVCVVYEATGVYHRVLKKVLEDNNIKQFIINPLLSAKTRKNDSLRSPKTDKLDPKSIAKTYYSHSLHNSHKPETIYHELRELSRYYEDILVHLRKDKVAFRAQLDVVFPGYDTLYDDLYGPVALAVIEKYPHPEMLQKKKINTVSKVIQSKTCHRQAMSDTMADKAIEYSKTIYSGCDRDDIEVLILQRFIKKLKEDMAEAERTIGEMIKLAQELPDFSIIKSIPGIGDNLAARIIAELGDMTRFKKKNELVAFAGLDPRISESGQNDGDHMHITKKGNKRLRCLLYLAVTCFIRLKRDDNSIKDFYIKKKQQSNPMCSKAAKTACASKLVRIILVRIIYSMCKTGELYQYNK

SEQ ID NO: 321897 - protein, 342 aa, unidentified
MTAIGIDTHKATLAACAVDELGRAIGEATFANDPAGHVAFIAWARSIASEATIGIEGSSSFGAPLAWAVHHAGLSVREVPPHLSRTERQRTRRPGKSDPGDALAIARVTARETNLPPIRLPDRTSELKLLLEAREDLVAETTRVRNRLHAHLLALVPGYGGTVANLVAARHRITVGRLLRGNTAVQAELARALLARLARLERETGALTRRIGALVDGHPLLGLPGAGPITVARLIAEVGDVRRFRTADAFAALAGVAPIPASSGQIQRMRLNRGANRQLNRALYVIAVSQSRFHPPAKAYVTRRIEVDGKTWREAIRALKRLLVRPVFRLLVQGSIVPAEAA

SEQ ID NO: 321898 - protein, 338 aa, unidentified
MRWYSGIDLHSNNSLVVVIDEADRVVYRRRLPNELAKVLEALEPYRGELAGVAVESTYNWYWLVDGLQAAGYQVHLANPARMKRYDGLKRSGDDTDALQLAHLLRLGILPTGYIYPAAQRALRDLGRRRLQLVRHRTMHVLAVENVQARETGTRMTGDQVKRLSAQQIEALGFGEDVRLGLQANVAVIGTLNAEIAKLERRLLQQLKPRPEYALLGTVPGIGRILGPIILLETGSIERFAAVGNYTSYARCVDSVRLSNERKKGEGNKRNGNKYLAWAFIEAANMARRWCPQAKRFHDRKRARTNAIVATKALAHKLARACYHVLKTGEPFNMQRCFG

SEQ ID NO: 321899 - protein, 323 aa, unidentified
MTCVIGIDIAKHTFDIAKPLERDKYRTKAKLANTPEGFKQFDQWLEKHAEPHCWVLMEATSVYHEALATHLHQRGYQVCVINPARIAKYAQSELRRVKTDKTDAKLIARYAQRHLEELRPWEPEPESIRQLRGLVRRLADLQELAQMERNRLDVSAESAQASIRIHLEHLDGQIALISKAINDHIDNDPGLREQKQLMKSIDGVSDGTSALLLAELGNPLRFDSARQMVAFCGLNPRLQESGRYKGKTIISRTGSGRLRAALYMPALSAMTYNPVIKAMKVRLAERGKTGRLVVCAAMRKLLHIIYGVLKSGQPFDPIRALAH

SEQ ID NO: 321900 - protein, 411 aa, unidentified
MTKIIVAQDAPVLVAIDIAKARHEVLIAIPDKKRRRRLTVLNELADFNRLATALKEYGRPVRVAFEATGTYHRALAYYLATAGFEIKLVSSVALARTREALNNSWAKNDPKDAQVILHMMEIGNEQYYHDPLVCGTNDIQELSKTHDIVSKSKTELWHRVLTHYLPLYFPEADRFYRSSRSDWFFAFLERYPSPHLITAMGKAAFTADAWDVIGRKVAKERLLADIYETAKSSVGLPVAPDSDAIRMFRLVLGEGRSLIAQRNQIEDRAVALLKDLPDYQLLTSIPGIGPINALTILAEAGDLRRFGHHRQFLKFCGMDLATIQSGTFRGQTKLSKYGNARLRRTLWMAGQVAILQRTNSFRDKFERYIAKDRQNTHLRRKAYSAIAATLSGHCCAIPCRAVNGPYCSRDH

SEQ ID NO: 321901 - protein, 461 aa, unidentified
MSANKPKGAKEKSAPKKVDWKALEVVHPDAAGIDVGGSEHWVAVSPDRDPEPVRRFGCFTADLREMARWLVEKSVRSVAMQSTGVYWMPVFEILEQQGLEVYLVNAQHTKNVPGRKSDIQECQWLLKLHAFGLLNNSFQPSDEIRIARTLWRHRGNLVAEASSVVQRMQKVLTEMNVQLSNVLSDISGVSGMKIIQAILDGARDPGELAALVEPGVKATPEDIVKSLEGNWREELLFVLRQHVEFYQIYQKKIRACDLQLRKHLQSLGSKLDLQAQPLGPRPKGKKLSRNAPTFDLRTELYRITGIDWSQINGIDVLTAQTVISEAGADLSAFPSEKQFASWLGLCPTNQQSGKKILNRRTRKVVNRATVAFRNAAMTLVRSQSYLGAQYRRLRTRLGAPKAITAMARKLACLFYRLIKHGQQYVDQGTEYYETRYREQQIRALAKRAQKLGLQLVIPKTA

SEQ ID NO: 321902 - protein, 346 aa, unidentified
MGKCITDLSSVTTVGLDLAKLVFQVHCVDASGRVVVAKAIKRNKLLEFFASLPPCLVGIEACGSAHHWARELIKLGHDARMMPPAYVKPYVRRQKNDATDATAICEAVTRPSMRFVVIRSLENQAALMRHKAREMLVSQRTQLLNGLRGHLTEVGVIAAQGPRHARELAGLIEACDENIPIEVREALAELVHQLHRLDEAIARLDRTIVKIARKDETARRLMSIPGFGPITASAMAASVQDASSFAGPREFAAFLGLTPKQNSSGGKQRLGRISKMGNRNLRKLLVVGAHAVLFHRKRHTDPLRMWAKKLMEKKPFKLVAVALANKMARIAFAILRGKTTYREIPA

SEQ ID NO: 321903 - protein, 411 aa, unidentified
MKTIIGIDWSEKKHCVHLYNETGALLARFDIAHSVSGFAYLHDRLAKVNPEPADCLIAIETDHNLLVDYLHSRGYTLYIIAPSVVKHNRGRQGSSRAKDDDRDAQLLADILRTDRGRFIPWQADGPLVRQMRSLLSWVDDLTEMIVAEHNRLRAILLRYYPQPLTAFGSLKGVIALHFLASFPAPSDLEELTFADFEGFCRQNRYYRREHMRAMFAHLQSPALSLDVNIVPAYQTQTSFMANHLLTLTQQKKAAIEQVNLLFDQHPDAPIFASIPGAGALLAPKLLVMFGDHRMRYPQRSILPAIAGTSPVTIASGKARYVKFRRACNRRYRQTAQLLARSSLSYSVWAASYFNQALQRGMSKSHAFRCLANRWLHIIWALWQSGRQYDEVYHLQQVARHRQPSEPAGFSG

SEQ ID NO: 321904 - protein, 370 aa, unidentified
MLDTTTFIGLDVHARSIKAVSLDVMTGEVRAATFGYDAGAVAEWVRSVDPRARCVYESGVTGFDLQKRLSGLGVDCVVGAVSKMIKPSADRRRKNDRNDAEFLARMLSVGNVVEVWVPDDECEAARDLTRALEDARDDLSRSKQRLSKFLLRHGLVFDERTPTGRRKGNWTRAHWSWIESIRFAERADNDVLAYYVDAVRRAAEEKARLEGLVEAEARKPRWRKRVDSLRCLKGVDTASAADLVFEAGEFSRFRNARSFAAWVGLTPSEHSSGESDRRGAITKAGNKHLRKTLVEAAWHYLTCSGRPKDLARGQAPDRGARRHAAKGVRRLVERREALLARGVHGNKANVATARELACWVWAVGLMAEEA

SEQ ID NO: 321905 - protein, 318 aa, unidentified
MKITAIGIDISKDHLDIAVRPTGERWRVTYSPEQLPALLTRLHALAPERIVLEATGGLEILLATELAAAGLPVVVLNPRQARDFAKATGQLAKTDPVDADVLAHFGEALKPDVRPLPDEQTRALEALLTRRRQLIEMLVAEKNRHAALSRQPKLQKGVAEHIDWLKRRIADLDDELKGRLEQSPVFCRNDSLLRTVPSVGEVTSRTLLACLPELGKLTHKQIGALVGVVPFARQSGQWKGEAHIRGGRIEVRSALYMATLSAVRYNPTIKAFYQRLLAKGKKKKVALTACMHKLLTILNAMIRHQQEWTAPQISAATS

SEQ ID NO: 321906 - protein, 328 aa, unidentified
MAGLRCVGIDVSANEITVALEGRAEPVTLANDTDGHARLLRLLARKSRRLRVCLEATGIYHLDLALALHRARGIEVMVVNPVAARDFSRALLMRSKTDRVDALVLLEFARRMPFESWQPPAAEILDLRAIVRRIGALTVARTQERNRLHAAGRTAELTQAIAWDIEAHLEHLAQSLDRLQQQALELVQAHAELQRRFERLVSIRGIAATSALRILAELAVLPSDMSPRQWVAHAGLDPRAQDSGTSLHKPARISKTGNRHLRAALYMPAMVAAREEPCVRSFYQKRIAGGLKPIQALVAVERKLLHAIHGMWKTNTNFVGKSFYAMNA

SEQ ID NO: 321907 - protein, 421 aa, unidentified
MKKIKPKKTREVNQNVLIATVDGGKDKHYGYYRRPDGTDCKSFDFWNNGQGFQEFWGRISSAAATHGLEEIIVGFESTGPYMEPLAQFLRSKKGIRLVQVNPMHTKRLKELPGNSPLKTDRKDPKVIADIIELGHALTVVIPEGPAAELRRLTQARERTIESRTRLFNQLQSLLAISFPEFLQVMRDVKTASAQHLLRHYPTAQDIVSLGEPALAALFRKVSRGKLREDRARALFEAASESVGVREGRSSMLLEIGLMLDTIGIYDRFIEGLEAEMVRHLGQIPYSRIILSLKGIGPVTAAGLIGEVGDFTKFGTISEVMKLAGLDLYEVSSGKHRGKLRISKRGRPLIRKLLYLAALSTVRKSGVMHEWYHRALGRGMNKTKALVAVSRKLLGIIFALVRDHSVYVENYMKQKPILQEAA

SEQ ID NO: 321908 - protein, 310 aa, unidentified
MDVTYASVDVSKATLDVAVSNQKAVKSFTNDENGIAQAVRYLKEVSPVLTVTEATGGLEKLLAVSLVEAAVPVVVVNPRQVRDFARAKGKLAKTDNIDAAILSAFACDIHPEVRALTDKQTEEIKAMMGRRQQITAMITMEKNRLHSAGPRVKPSVELHIKWLKGELKSLDKELEDMIQDSPAWREKDSLFKSVPGVGPVLSMTLLGVFPEMGRLTRKQIAALAGVAPFNRDSGVYRGKRTIKGGRVKVRPPLYMAALSATRSNPVIREYYNHLLQKGKAKKVALTACMRKLLVILNAIVRDNRPWRYAY

SEQ ID NO: 321909 - protein, 404 aa, unidentified
MGTNSDLRVSIDVGCYRHSVAIGLPGGELLEEFDLAHGPEGFDQFFGRVDKLQHHYGGSVLVAMEGYNGWARPLDTLVRAHGYRLFNINNLKLARFKEIFPAAAKTDRIDARKGLELFQLRDHFPTARDVLQEIAATPLVNDKLKRLTRRRRALVDERSRLIARLQADLQAVCPGLLEITKDTDNLWFLNFLTHGDDLRKLGRLRETTILGIAGIGRKFGAIIEHWQKTARFSHDAEWVGPMVVEDARRVLELRRTIKTLEAACKVLMQDSKITVLTKTIPGFGLTCSSELAGEIGTIDRFDKEGSLAMYLGMANLTNSSGKHQGSKNPKHVNSRAKAAMMAAVDKHRKLVPESKRYYDKKRTEGKKHNQAIRALGRHLCRVIFVMLKQGRGYELRKENDSNIA

SEQ ID NO: 321910 - protein, 412 aa, unidentified
MQDILTCAMGLDIHRDVIVACLAKGDLGTDPEIEIRSFSTLIPEMRKLRDWVLEAECRYVAMESTGIYWQPIYEMLEPCFDGQINILVVNARHMKNVPGRKTDMRDAQWIATLLRAGLLKGSFIPDKTFRELRHLTRYRKSIVRDITAQKNRIDKFLQSSGFRFTAFLSDAFGASGRNIIRHLMEYGNISREALDRCLKTQTRKRIDEILIALNGSLSEHQRGFLRMIFGHLEALEQHRHTVEDAITKEITKHEEALSLLCSIPGIDVTAAAAIIAEIGTDMSAFPDSQHICSWAGLSPGNNESAGKRKSAHINKGNPYLKSMLYEVGWVISGKRSLYLSGWYWRIKQRKGAKRATIALARKLLALIYTMLKTGSPYNEDCFEIRRKQSERKRASRMVNELQKLGYFVVAPS

SEQ ID NO: 321911 - protein, 418 aa, unidentified
MKSMEITAVGIDVSKSKSTVAIRRPGGVIVARPFDISHSNHDLEKLVSILKTTGGDIRVVMEHTSNYWKPIALTLKEAGFYVSVVNAMLIHNFSDNSIRKLKTDRADSLKIANYALTFWNELPPFNDEDETRLVLREQSRMYERLASTATSLRNGLIALADQTFPSIDQAFGHAIKNADGHEKWVDFFSIYWHRDCVLRLSIEKFTESYRKWCLRRNYKFRTNTAHKLYALAQDAVPTLPKNNGTKALVLQACKSLNAVCEAKQSTQEEMNRLASLLPEYEVVMQMEGTGPITGPALMAEIGDVRRFKNKKALVAFAGIDAPPFQSGNFESKSRHVSKRGSPHLRRVVFLVANIILTLSHKNNSVFCFMDKKRAEGKHYYVYTIAGSAKFLRIYYARVTEYLRTQEIPVAASCLKGNS

SEQ ID NO: 321912 - protein, 441 aa, unidentified
MSNILNPNAAGIDIASKEHFVAVPQDCCQESVRCFESFTKDLHQIASWLKQCRIETIAMESTGIYWYHLYTVLQDYGFEVFLVNAYHVKNVPGRKSDVSDARWLQQLHCFGLLNGCFQPDNLTRTLRNYVRQRKHIIKQMGRETQRMQKSLEQMNIKLNNVLRDINGKTGKTIIEKILQGERNAEELVKYRESGIKASRETFIKSLEGNWREEQLFNLQQAYDHYHFLQSQLEQCDKKSEKIVIQMADSSIPKKKIPKVRRQKNQPFFEVEQHLYNALGVDVTAIFGVKVITALTVFSETGSNLKEKFPTPKQFLSWLNVVPDNKISGGKIISSKVKRKKNNAGQAFRDAASSLWRAQNPLGDYLRRKKAKSGTRQAVVATARKIASIYYKMVTDKVEFNSDKLKEKTEKYLKRKVEYLERKIIEINNLIVKNQIVTNLVI

SEQ ID NO: 321913 - protein, 345 aa, unidentified
MQTMYYIGLDVHKRTISYCVKDGSGAIHAEGAIPATRFDLDRWMKTLPQPWTAAMEATVFTGWIYDHLQPHAAALKVAHPLMLRAIAAAKKKNDRIDASKICDCLRCDFLPECYMASTAIRERRRTLRYRNLLVRQMVQMKNKIGMLLMEAGVSYNKQRLHKASYFRELLTTNPDIDEGLCSLLRLCRETVVRLQKTESALVRSLERDSLLMDRVERLMTVPAVGPITALTWALEVGDVQRFSSIKKAISYCGLCGAEKSSANTVQRTPLSKQRNKHLQTTLIEAAKMAPRNSSELAMLYDKEKQKGHANRATLAVTRKLVAYLMAVDRGQRDFQVLEASHCTAA

SEQ ID NO: 321914 - protein, 464 aa, unidentified
MKDHRPPSTKPRLSPAALDRLHPHAAGVDCGSAAHFVAVPPDRDATPVRSFATFTGDLHQLAAWLTACRITHVAMEATGVYWIPIFEILESRGFHVILVNARHVKNLPGRKSDVSDCEWLRDLHILGLLRGSFRPADAIVALRAYLRHRATLIESAAALIQRMQKALVQMNVQLPLVVSDITGVTGLRILRDIVAGQRDPHQLARHRDRRCRASTAEIAAALTGNYRAEHLFTLQQNLELFDAYQRQLATCDTAIEAHLTQLAAATPAPTAPLPAARPRQKPRQNDPRFEIRPALHHLTGADLTQLDGIGPYNALRLLAEIGTDMSRWPTEKHFTSWLTLAPHNKVSGGRLLSSRTQPSANRAAAILRLAAMTLARSQTALGAFYRRVAFRIGKAKAVTATARKLAILVYRTLKGHLVYADPGADVYDAQHRTHILRRLRQRANHLGFGLINLATGELIEATVS

SEQ ID NO: 321915 - protein, 386 aa, unidentified
MEELTEEPAELVERVAALDIGKASLVCCVRVPHESRLGARRQEVRTYGTVTPALLELRDWLICQGVTRVVMEATSAYWKPPFYLLEDDIECWVVNARDVKNVPGRPKTDKLDAVWLCKLAERGMLRPSFIPGRPQRQLRDLTRYRRTLTQERTREKQRAEKLLEDAQVKLSSVISDIFGVSGRDMLAALIAGERDPHALADLARKRMRAKTSVLRQALTGHFTGHHAFLLGMMLDRVDALTAQIDIAETGTDMSRFPTPGHLVSWAKFAPKARQSAGRSKAAATGKGNPWLGGTIGEAATGAARTSTFLASRYKRVVKRRGKKRALVAVGNSILTICWHLLSDPGAHFTDLGPDWHDRLAPQRRKRQLIAELERLSGKKVTLNDAA

SEQ ID NO: 321916 - protein, 378 aa, unidentified
MAKAILEVKDTAQATSAVLYVSFELSDKVWKLTASNGCSSASRYDVAAGDVTAVSERLARARKRFGLAASTQVRSCYEAGRDGWWLHRWLLEQGVDNIVVDSSSIETNRRRRRAKTDRIDGEKLLEMLLRHWCGKKVWSVVRCPSIEQEDARRNNRELDRLTRECTSHVNRIRGLLVLHNLRPRWITGRIWNTWWPAHRVELGEGLCGEIEHELARLELARKQIKEIEQQRQTQLETKQHPTTGKLNALFGVGIRSAWQLDKELYGWRTFNNRREVAAAVGLVPTPYDSGDSHVEQGISKAANSQVRTTLIELAWSWLRFQPDSALSKWFATRFATAGKRMRRVGIVAVARRLAIALWRYLQFAEMPQGAVLRAGTSA

SEQ ID NO: 321917 - protein, 314 aa, unidentified
MKMAMLSFCGIDVSKDRLDVVVLPEGWFFSVSNDTAGWAELVVRLRPLTVSAIGLEPSGGYERGIIRALLAAGMSVRRINPNKLRQFARARGVLAKNDRLDARLIAEYVAIMPTRVVQRDAAVERLAEIVTMRRQLCDEHVAAENQAAHLEDAMLRRLSKRRQMRLEADIRLLDKRLAEMVAANVALAQRYELLTSMPGVGPVLAFTLIALLPELGKMTRKQIAALVGLAPYDFDSGKLKGHRSIYGGRMPVRNVLYMAALSASRYSPALKAFHNRLADADKKSKVIIVAVMRKMITTLNAMLRDNAAWQPQSA

SEQ ID NO: 321918 - protein, 457 aa, unidentified
MPARRKQSRSGGVSPAHTIDPNAAGVDVGATEIYIAVPADRDPHPVRRFATFTEDLLEAAEWLKQCGVKTVAMESTGVYWIPLFQILEARGMKVCLVNARHVKNVPGRKSDVCDCQWLQHLHSAGLLRASFRPEQQVCAVRSLVRYRDSLVQLSAMHLQHMQKALSQMNLQLHHVISDLGGKTGMAIVEAILGGERDPHQLAQLRDPRTKASEETIAKSLVGDYRREHLFTLRQSMTGFRQNSQLIAGCDVEIESLLKQFSSGDGPGAEAVPEPQAELKRKPRRNEMSFDLRTQLHRIFAVDLTEIPGINTLTAHALFTEVGRDLSKFAHVAAFTSWMGLCPDNRVSGGKILHARTRRVNNRVAKALRMAAQALSRSNGWLGQFYRRMRAKLGGPKAITATAHKLARIVYHLLTTGQAYDETVFAQQEAQNKQRNENRLRHQARKLGFELTLIPAQM

SEQ ID NO: 321919 - protein, 402 aa, unidentified
MAAGQLWAGVDVGKEHHWVAVVDSAGTMVLSRKLANDEQQISKLVAEVDRLGAQVSWTVDLTTVYATLLLAVLAEAGKSVRYLSGRSVWQASVIYRGGEAKTDAKDARVIADQSRMRGDDLPVLHPDDDLVTELRMLTAHRADLVADRTRTINRLRQQLVAVCPALERAAQPAQDRGWVALLARYQRPKAIRHSGITRLTRVLADAGVRNAPMIAQAAVTAAKTQTVRLPGEEVAAALVAQLAQGVIALDERIKQIDADIEDRFRRHPLAEVITSLPGIGFRLGAEFLAAVGDPALINSADQLAAWAGLAPVPKDSGKRTGRMHTPQRYSRRLRRVMYMSALTAIRCDPHARSYYQRKRNEGKRAVPATICLARRRTNVLYALIRDNRTWQPDSPPITTTAA

SEQ ID NO: 321920 - protein, 418 aa, unidentified
MKKHSKSCRRSEVSSKRAKSRGPVQRDAKEVMAEVLGKLTGKLDAPTVSTSAQENRRGNTVGPNRDRLTVGVDLGDRWSQYCILGLEGETLAEGQLRTTQEDVGEFFRGLTTARVVLEVGTHSAWVQDVITELGHEVLVANPRLMEGWKRRKRKNDRIDANKLARLGRVDPQSLYPIRHRSREVRQDLVVLRARDALVSVRTELINSTRGLVKSMGTRLPRCSSPSFAEKVKDAIPAEVREALQPLVQLVETVNECIERYDERIEELGRKKYGHTTLLRQVKGVGPITSLAYVLTLEDPQRFASSREVGPYLGLVPKQEDSGDIPPQLGISKAGDRMLRRLRVGSSQYMLGAFGPETDLRRYGLRLCERGGKNAKKRAVVAVARKLAVLLHHLWVTGDVYEPLHRTETGTGTAQAAAA

SEQ ID NO: 321921 - protein, 343 aa, unidentified
MDHFAGLDVSVKDASVCIVDDTGRIVREVKVASEPDALLTVLRNPAYHFNRIGLEAGPLSQWLFSALAEAGLPVICVETRHMRAVLKAQINKTDRNDARGIAQMMRVGLYRPVHVKTLRSQKLRMLLTHRKLLQSKAIAVENDLRATLRNFGLKVGMVGTARFEARIKELVENVADLVVLVEPLLVVRRVVREQIGILHRRLLAIVRDDEVCRRLMTVPGVGPVVALTYRATVDVPARFRKSKSVGAVFGLTCSRDQSGERDRPGAISRCGDEMMRAMLYEAAQAMLLRSAKWSWLKAWAIQIARRRGMKRAIVALARRLAVILHRIWVDGTEFRWTRETAVA

SEQ ID NO: 321922 - protein, 418 aa, unidentified
MTATHFIAPTLLAAIDISKYRHEVLIGIPGKKRRRRLTITNTLEDFQRLAAALASYDLPVRIGFEATGNYHRPLAHHLGQAGFDLKLVSSVGLARTREALHNSWDKNDPKDAQVILHMTEIGAVQFFHDPLVTGIADIQELSKTHEIVSRSKTELWHRILTHYLPLYFLEAERFHRSSRTDWFLAFLEKYPTPHMITARSREAFVADAWQVVGRKVSKERLLSDIYATAVGSVGLPVHPESDAVRMFRLVLAEGRSLVRQRNEIEARAIELLSDHPDYQLLTTIPGIGPINALTILAEAGDLRRFRHHRQFLKFCGMDLATAQSGMFRGQSRISKYGNARLRRTLWMAGQVAVLKRTNSFRDKFERYISRDRHNAHLRRKAYTAIAAKMARTVNAVVKHGEPYRPFFEGVSPGGRTLV

SEQ ID NO: 321923 - protein, 311 aa, unidentified
MTEIICGVDVSKRRLDAHVAPSGVFASFDNNPAGIADLAAFCRRHGVQLVAMEATGGFERMAFLLLWQASIACGLTNPRSVRRYAEAMGILEKTDRIDAAIIARFAVAKALKPTTPPTASQQRLNALVMRLRQVTDDLTVQKQRRSSATNREVANSIDEVIALLKRQARTLEGEIGSMIDDDPLWAQLDAALRTKGLASRTVARLLAELPEIGVYSNKAVAKLAGLAPLANDSGARAGKRHIRGGRAGIRSILFLIADIVRRFDQSLGAFHRKLTAQRKPKMVVRIALARKLLVRLNARARQARAQYALAT

SEQ ID NO: 321924 - protein, 320 aa, unidentified
MQTPTEVLNIGADVAKDEVVVACSVGSFPTRPLANQRTVLLSFLKNLPAGSRIGMESTGTYHELFANLAHKLGFIVFVLNPKDARHYAKGVGMRGKTDRVDAELLARMIAHEHTKLHAWIPPTPEQHEIAQLLKRRAKLSSLRQALGMSLKGVDGFAAELKALRKRFDQLIARIDQRVKILVEANPDRKQHVMHLRTINGVGPVVSAALVNTLERVPLKNADAFVAFTGLDPRPDDSGQHRGKRRLSKRGPSELRRLLYLAALSTIKTKTWKPLYEHYRAKGLSSTAVIVILARRIVRTAWSMYTYKTEFDPGRLKKTLT

SEQ ID NO: 321925 - protein, 425 aa, unidentified
MKNNFLSTLFVGIDVSSKTNVLCALDFQGNKLLNLKALNNHPGAESILESILDCLNSNSLNFVVIALESTSFYSTHIANFLSSNEVLLAYSPMVYCLNPKTIANYRKSFVDMDKTDPLDAYIIADFARCGRIKSQPWRGAQFLALQRLTRHRLHLVEAIAKEKTYMVSNVYLKFSQLTVLEKADRPFSNTYGATSEAVLTEFLSLEDIAYSSIEDLVAFIKDKGKNRFSNPVGTAELLQKAARDSYRLDKVLYEPINIAIASSFNVIKALQIEIKEIDKAIEKNIKGINTTEYQSLISIPGIGPVFASGILAEIGSITSFSSNDALAKYAGLTWRIKESGDYSASETNMTKTGNKYLRYYLIEAANSVKNNIPEFNVYYRKKFNEVPKHQHKRALALTSRKLVRLIFGLLTKNQIYSSSKVGEIQ

SEQ ID NO: 321926 - protein, 398 aa, unidentified
MLSIGIDVSKGKSTVCGMKPGGEIVYTPFEVQHTREGMSELVSLLRGSGEEVRVVLESTGSYHCPVVAALLENGIFVSVVNSLRMKRFCSQSIRRVKTDQIDAMQIALYGLAYWPELQPTRLPENTYRELQLLARQYYQMTSILIKAKVDFNALCDQVLPGMQELMNDHAGRHKLSDFVLRYRHTTHILEMGETRFRKDYCKWAEKKGYRNHERMAALIFATAQNGIPVLPNAPSTQIVITEAIRVLHTVEASRDAILTQMQALAKTLPEYSLVREMPCIGDTLAPRLIAEIGDVRRFHSKRALIAYAGIDAPPYQSGKFSANNRHISKRGNRYLRKTGYEVMQSYVMHKPANDPIFTFIEKKRSEGKSGKLAMVAGLNKFLRVYYGKVTELYRSLPQ

SEQ ID NO: 321927 - protein, 354 aa, unidentified
MKHTTKYVALDVHQEATATTVRDHKGRVIARSVIPTEEGTLLEFFRSMRGSIHVTFEEGTQAQWLHDLLTPVVDRVVVCDRRGEGQKGNKGDRVDADQLSDLLRRGVLRAVYHGSPHRADLKELTRTYQNLVEDTTRVMQRLKALFRARAIRTPGKRVYDPKSRAEWLAHLQDGGVRFRARMLYAQFDVLRDLRPKAKAAMIAEARRDPAYAVLQTIPFFGPVRVALLLATLRTPWRFRTKRNLWGYAGLAVVTHTSSEFVIERGRPVRRKRQPLTRGLNRNHNPAVKAVFKGAAMAASAKPGPLQDFYHGMVERGMDEALARVTLARKIAAVTLRLWKRGEHFDPEMLTVQAR

SEQ ID NO: 321928 - protein, 342 aa, unidentified
MQVATIGLDIAKNVFQVHGIDATEKVVVRRRLRRSQMLEFFKALPPCLVGMEACATAHYWARELTKLGHRVRLMPAKDVKAYVKRNKNDAADAEAICEAVRRPTMRFVAAKSAEQQGQLMQHRTRDLLMRQRTQVINALRAHLAELGIVAAQGDKGVKELLTIVTDKKDERLPIDARASVIVLAAQLEAVQTLIGSIERQIKTQHRANEASKRLETIPGIGVIGATAIAATVADPTIFRSGRDFAAWIGLVPRQDSTGGKQKLGPISKQGDRYLRRILVVGAHSVLRRAMQNPEKYLWLTQLLARRPFKVVAVALANKMARMAWALLAHGGTYRAPEPAAAA

SEQ ID NO: 321929 - protein, 426 aa, unidentified
MTYKIVGIDVHKKMLAVVVADVAVEGEYQFERCRFGTSPDQLRLLAEWLIQQKAEEVVMESTAQYWKPVWAALERQWKPSCGKREGGDPISGTLHLAQAQSNRGRRGRKRDFPDAERLVKRLVAQELTLSFVPDAEQRLWRTLTRRKYQLTCDKVRWQNQLEALLEEAHIKLSSLVSDLLGASARRMLKALADGETNPAALAALADQRLRATPAQLCDALGACTELDPVYRRLVKMMLEELHLIEQQIDKLDQEIATRLRQGQDAVQRVAEVPGLGVNSAQQIIAEVGVTAATFPSAKQLSSWVGACPGDEESAGVNQSHRSPKGNCHMRRVLNQAANAAVKHKGSIFAIVYRRLEPRLGHNQAIGAIAHRLCRLIWIILHQAVRYEERGPAVKETSKRRRRMKMIRELRKLGYRVEPMAVQFNPA

SEQ ID NO: 321930 - protein, 413 aa, unidentified
MTDESLSWFAAVDWGSEKHQACILDAKGDVAGEREFPHSGTGLTELCDWLLSVACDTSAVAVAIETPHGPVVDALLDRGFAVYAINPKQLDRLRDRFCVSGAKDDRRDARVSADGLRADRHLYRLVQVSDPAVIELREWSRLLEELQQERVRLCNRVRHQLWRYYPHLLDLTDDVGADWFLELWALAPTADKAGRLRETTIARLLKQHRIRRLNAETTCRILRQPAIKVAAGVTEAAVLHLRSLFARLRVVNRERHQAERKLDELCTELSERASEGQSGEPCDVAILKSLPGIGRVTLAALLAEASGPLSRRDYPALRTLSGVAPVTKRSGKSNIVVMRYAAHARLRNTVFHWARAAVQNDPKSSCRYAALRKRGHSHGRALRGVADRLLQVACILLQRQTMFDPDRCQPAAA

SEQ ID NO: 321931 - protein, 407 aa, unidentified
MDLQHPKCAGLDVHQHTVVACARVVAGSTVTHERRTFGTTTAELLALGDWLTAHGCTHVGMESTGVYWKPIWLVLEGQFALVLANAMHIRNIPGRKSDVNDATWIADLLAHGLIRSSFVPPAPVQELRDLTRTRKQLVREIAQHTLRIQKTLETANLKLTGLLSNILGVSGRAILHALVAGESDPERLADLVHGRLKASRADLVAALHGRATAHHRFLLQLHLTQVDALEQAVHEVEERLGHALAPFRTALDRLITMPGVSETVARVVVAEIGFDMTRFPTAGHLVSWAGLCPRLEESAGKRLSTRTRRSNPWLKTTLVQAAWAATRTKDTYLRAQFLRLKSRRGPKKAILAVASSMLIAAYHMLKHDVDYRDLGANYFDRRDKTKLAHRLIHRLQQLGLTVDVRAA

SEQ ID NO: 321932 - protein, 355 aa, unidentified
MIVIGVDPHKQTHTAAVVDGRSGELVGERTVRARRRGHEQLLGWARALAVERLWALEDCRHVSLSLERFLLARGERVVRVPPRLMGASRKGVRTTGKSDRIDALAVARAGLREPGLPQAFLAGREREIKLLLDHHDDLVAERTRIQSRLRWHLHDLEPDLIVPTGALDRACWLERLERLLAGRAQTAQVRVAAELVARCRELTTRVRQLERELRPLVEREAAPLLALRGCGTLTAAKLVAEIAGVHRFKSDAQLAKHSGSAPLPASSGARQRHRLNRSGNRQLNCALHRIAVTQGRCHPPAQNYLARKQAEGKNRKEALRCLKRHLARTVYRMLNSTEQENSASTRPTARTPALT

SEQ ID NO: 321933 - protein, 405 aa, unidentified
MKHVIAFDVSMGKSYMVIYNGLKKCIYEAEIKHTKPEFEKLRARIDELIEGYEDQPYIVFESTGVYSRQLERFMRDNYYSYCLLNPLEAKKQCDALRIHKTDKSDAHQLALTHFSVSRRETNGTDTLFQQLKSLSRFYSELDDELSVTRSRMHKVIQLTFPELEKLFTIKSDLFLNIVQLFPHPDFVQGLSKTIIKNKIRANTNKNISGAMAEKKAIALIEASQQSYPAVSSSDVLCEQQRSYARRYQELLQQKEQCINDMVQLAEKRSEYKVILSFPGIGPNTAVRLIAEIGDIHRFENNKQLNAYAGIDIRRFQSGKTYFKDKINKRGNKHLRKLLFLIIQNMIKQRRYGRNHIVEYYDKLKTQPYNKCHKVASIACVNKLLKNIFFLISHNMNYDYGLASKS

SEQ ID NO: 321934 - protein, 425 aa, unidentified
MVHQHRSSKTCLRLLTHERQGLSPNLDADAVVHEKRGFGNYGLPVIEVADKWDEQVFRIGETIPMKKPAHQLIAEVSVRRSKVEMTIGIDLGDVWSHYCTLNEEGEVIDRGRFRTSPKGVEKWFIDVPPARVAMEAGTHSIWISEHLQELGHEVIVANVRELRAISHSDRKSDQVDAEKLARYARLDPKILRPISHRTVAQQEALTLIRARNVIVRLRTAAVNAVRGLAKPCGYRLPASSTLCFAKRCMAVLPPGLAQALGPVLEQIATMTVKIKHYDRLIKRLTETEYTETQALIKVYGVGQLTALTYILTLGSKERFQRSRDVGCYLGLRPRRSQSGDRDPQLGITKAGNVYLRSLLVECANHVLGPRGKDSTLRQWGLHLASRGGKQSRNRAIVAVARKLAVLLHRIWVTQEPYIPFYAVAA

SEQ ID NO: 321935 - protein, 391 aa, unidentified
MIFVGIDVAKDKHDCFILNSEGTVLADVFTIANNRIGFETLLSRIQSCSQGESKIKVGLEATGHYSYNLLGFLLDSGLTTYVINPLHTNLYRKSLSLRRTKTDRIDARTIAMMLMSDVDLKSYSNTAYHNEELKSLTRYRFDKVKERAKLKSSVARLVNILFPELEKLVSSLHIAVVYALLSNYPGASYIANANTEELAETLCTASKGRYTKSKTAEIKVAAGVSIGSKMPAKSMELKHTIALIRELDKEISEVESAIDKITSQMDSPIFTIPGIGRHMGAMILAEVGDFSNFASADKLLAYAGLSPSTYQSGQLQNCYAHMEKRGSRYLRYALFNAAKYVCLWCPTFSAYLEKKRSEGKHYNVAISHAAKKLVRLIFAMQRSGKAFLADY

SEQ ID NO: 321936 - protein, 365 aa, unidentified
MPAPHPDVTVTIVTVGVDTHKDVHVAVALDALGRRLGDLQIPTTTIGYDQLHHWAAGLGHVSAFGVEGTGSYGAGLTRHLRHHGIHVIEVNRPDRATRHRKGKSDPIDAESAARAVLAGTAAAAPKAGDAHVEVIRMLKLTRDSAVKARTQAVNQLKAVLVTAPAELRESLNGLGPVALLERCAGLRPGQPTTPLTAAKYALRMLARRALTLESEARQLREQLATLTTAAAPALLQLTGVGPDTAAALLLAAGDNAHRLHSEAAFAALCGTNPVPASSGKITRYRLNRGGNRQANAALHRAVVTRMHWHEPTQIYVARRTAEGKTKPEIMRCLKRYLARRVYRALPMTPVNNKPADHRKNLAPAA

SEQ ID NO: 321937 - protein, 430 aa, unidentified
MTTGHPTPEDAAPGTWVAIDIAKEAHVALIAHGGKRERYRVENTAHDFDRFVAHLSSLPQPVRIAFEPTGVYHRPLGYRLVTAGFDVCFVSSLTCARYREARYTSWDKNDPKDARVILEVLQQGMTMRFVEPLLAGWHDVQEISKTYWQVTLARTRVQHSLLTHFLPLYWPEFARYWRSNRSAGFIGFLLRFPTPASVTRLTESAFIADAWEAVGRKVGKRAWLSGVYELAHHSVALPIPVDSPAVATFRLRLQAYLDLSAQRAELEHWADGLLGSLPDYQRLQTIPGIGPVFALTILAEAGDLRRFGHHRQFLRFCGLDLAKSQSGQSSGHERLSKRGNSRLRCAFWYAGRVAVRSREHSVRDKFERYLAPDPFSADRRRKAYTAIAAKMARITYAVIKSERPYRAYFEHDFPSGSTPLKRAVEAHATS

SEQ ID NO: 321938 - protein, 385 aa, unidentified
MTSNLLHQPCPNESFAAFVGLDWADEKHSVALLTADRQSKESTTLDHTPEALSDWVAQLHQRFAGGKIAVILEQSRGSLLYALVPHPHLVLYPINPQMAAKFRKAFYPSGAKTDPLDADLLLQILLRHRDRLKAWQPEEPVTRQLQLLVEARRRFVADRVRLSNRLENALKSYFPQALELVGESLTTPMACAFLQRWPTLQAVQKAGAHRLRQFYYGQHCRAEELIQQRLQLLAQANPLTTDAAVVAAQALLVKSVARELAVLPAILEEYDRQIASLFALHADYAIWDSFPGAGPALAPRLAAAWGTQRDRFQSSDAMAAYSGIAPVTQASGRSVWIHLRWACPRFLRQTFHELARTSLAFCVWAQCYYQMQLQRGKGRQAAAVQ

SEQ ID NO: 321939 - protein, 344 aa, unidentified
MMKLTRVGVDLAKQVFQVHGVDRAEQPAWCKRLKRARWIADLERNVEVGCEIGMEACGGAHHWARVLQAKGYRVKLIAPQFVRPYVKTNKTDANDAEAICEAMSRPSMRFVAVKSVEQQDLQAVHRVRSSLIRERTAKANQLRGLVYEYGLVAPRELHALRRAVPDWLEDADNGLTVRFRALLAGLYRDLQLLDERVRELDREIAAIAREHEPVGRLEQISGVGPLVASALYALVGDGRQYRSGRELAVALGLTPRQHSSGGQDKLLGISKRGDKYLRTLLIHGARSALRVAPGKTDRLSRWAVALAERSHPNVAVTALANKMARVAWAMLRHGTNYQPEHVVA
